United States Patent Application Publication US 2019/0348154 A1 - sequence listing, part 16

SEQ ID NO: 59512 - DNA, 279 bp, Acinetobacter baumannii
atgagtgagtttaaagagtttaaaacaggcgattacgttgtcctggtgaaagatggaactagtgaccacttactacagatagtcaatcatcaatacacaaatgatatgtaccgcgtactttttgtggcaattggtcagtgtgggtcagtgcctaaagatgaaattcgcccagcgaagaaggaagaaatcgcagcaggccaccgcattgacaatgatatgggcgacgacttccccatagaaaaccacatttcacagaattgcaaagtggaggatgtttga

SEQ ID NO: 59513 - DNA, 294 bp, Acinetobacter baumannii
atggaaattcgtatcggtaaagaatgggttattcagtcttctggaaatgcaatgaatatcattcttgcaaaagttcctcaggacttgcaggacagtacagatccaattgaccctatccgtctaagtcagaagttttactattcaaccatttttggcgctattacaggtgtttttaaacttggcatagctgactcagaagctcgcacattccaagacttagagaaagaaatacatcgcatagcaaaggaatgtcagaaggcatttgacgcagctaaggagcactctcatggataa

SEQ ID NO: 59514 - DNA, 387 bp, Acinetobacter baumannii
atgaatatgttagccaatatctcgtttgatgctgctgtattcacaagccttgaagtgatgaatgtaggtgttgaggatggcgtggttcagttctctttatctatccaaaacgctgagcacatctacatcgtagcaagtgtcaaaggaattgagaaaaacgacacttttgaatatggcgaaggcttggattgtcaagactggaaagatgtggattacaccagaatgacagtcgattcatctagccgaccacatgtcgatgactttgattatgtggatgcaatagaaggtatgccctttgccctgacttctactcaaatccttaagctaaatgagtatttagaagaactggcaagagaagaaaaaaagaaagagttgagaggtgggtga

SEQ ID NO: 59515 - DNA, 249 bp, Acinetobacter baumannii
atgattgatacacacgaacttatttgtcacttgtgcaatttggacgatgattctgaatacgatgatttagatcaggcgatttacgataagtatgagatagggcttgatcagtttaatgctgttgttgctagcttgttgccgcttatagatattggcaagtcggaattaacaggcgagacatataaaggtttttcagtacaaacaaacggatatggcttttggttgttaaagatgaaggtgaagccatga

SEQ ID NO: 59516 - DNA, 1053 bp, Acinetobacter baumannii
atgacctcaatccagaaagcaaatgcaccaccacgaggaacagccgatatgttggtagtcaaagataatgcgttaattaacgccagttataatttagagttagtcgaacaaagattgattttattagcaattattgaagcaagagaaacaggaaagggaattaatgccaatgatgccttaaccatccatgcctcaagttatattcaaaattttaatgttcaaaagcatacagcctatggtgcgttgaaagatgcttgccgagacctattttcaaggcaatttagttatcaagagttatcaccgaaaggtaatgttataaatcagacatcaaggtgggtgagccaaattggttatattcaggaggaaggtagtgtacaactaatcttcgctcctgccgttgttccacttattacacagttagaacagcagtttaccagttacgacctagagcaagtctcaactcttaaaagcaagtatgcaactcgcttgtatgaaatacttatttcatggcgtagcgtaggcaaaacaccaatgatagggctagaggaactgagaggaaaactaggactaggtgttaatgactataagcttttagcaaactttaaattacgggtattagagcttgcacttgaacagattaatgaacatacagacatttttgtaaaatacgagcagcataaaaaaggacgtagcattattggcttttcattcaagtttaaacaaaaacaacagtcaaaaattgaaaaaccgattgatcagaagcgagatccaaagaccgttgatatgttcacaggtaaaactgatgctgagacaaaaaacatagctagagcagttgttaaagacacctcaccgcctgcgaatcccttgttgcatagggcaagtcgtatcacaacgtcaattatcacccataaactgcacgaacgtttcaaacatggcgatgagggtttatctagtacattgaagcgtattcaaggcgaaattatggagggaggggaggaaacggcagactactggcaatcgaaacttgaggattttgggataaattttgattaa

SEQ ID NO: 59517 - DNA, 189 bp, Acinetobacter baumannii
atgaatacaaggtttgatcctatcgtgtcagagtttgaaagttctgatcatgaagcagaatacaatgcgtggtttattgcaaaagttgagaaatcactagccgattcacgccccaccattccccatgaccaagtagtggcacgtatgaaaaaacgtcgtgaggaaagagaagccagtgctaatcgttaa

SEQ ID NO: 59518 - DNA, 273 bp, Acinetobacter baumannii
gtgctaatcgttaagtggcaaccaaccgcagtagaagatttggaagcaataattgactatatcgccaaccataatactgttgccgcatatgacctagaagaccatattctacaatctgctgaagatttggcagaacacccatacaaagggcgtaatggtcgaagagcaggaacaagagagttacttgtccatccaaattattggttagtctatgaggtttcagacctgattcgcattaccaatgtaatacatacgagtagactctatccctga

SEQ ID NO: 59519 - DNA, 303 bp, Acinetobacter baumannii
atgacagacgaaaaagagccaaagccaaagctaactttagaacagaaaattgaacagcaagagcaaaaactaaagcagctaaaggcacaaaaacaagctgctgaagcaagagaaaaggcacgtaaaaaagagcaggatagaaaagacgacacacgtataaaaattttactcggttcttatctgaagaaaaaaatggatagtaacccagatttcaattctcaaattttagatgaactggaaaactatctgacagccgaacgagatagaaaactgtttggactatcccctcttgatcagggatag

SEQ ID NO: 59520 - DNA, 1626 bp, Acinetobacter baumannii
atggcaatttatcatttttcagtgaaagcgattagcagaggtgcaggacgtagtgccgttgcttgtgctgcctatcgttcaggtgaaaaattggtatgtgactattatgggatagagcaggattacacaaaaaaatcaggtgttgaatttacaaatatttatgcacctgaaaacacaaaaaaagaattattagaccgccaaaaattgtggaatgccgtagaaaaatctgagcgcagaaaagatgctttactggcaagagagtttgaaattgcttttcccaaagagttgagccaggaacaacggcaagccctactcgatgagttatgccagggcattgtaaaaaaacatggtgtcgttgtagacgcagcaatacacgtcccccacgttggtggtggatctgacgaacgtaactatcacgcccatgtcatgtttacgaccagagctattgataaaaatgggacgtttgaagccaagaagtaccgtgatttcagcagggatcatgggacaaaaaccgttaccgaatggcgtgcagcatttgccgacctagtaaacgcaaaactggagcaaatcggctctaaagagcgtgtaacccatctgagttatgctgaccttggaaatgggctagaagccacgcagcacgagggctacgaggttacacagcaaagaagaagatacgaagcagaacaacaaaaaaatgaagaagatcgtgaccttgccatcattatgcccgatgttgcaatgtcaaacgatgcgatcaaacagcgcaacgctgatagataccgcgatgatcaggagattaaggggctagatcaggagattatagtctcaaaagcgattgtaagcgatttacagcaatctaaagccaaaagtgatgcagaacatgctcaacagcaacaaatcgctttagaacgcaaaagagagcgtttagaggcacaatctctagctgatgcacacaagcgagctacagattttcatacagcgttcgaccccaatcaccctgacaagtctttagtaacccagtacatcactgattacgccttgcttgcccgacatggcaagcaaccgcaaccccccgccccagtagaacaaccgcagccgacatggtggcaacggatgacggggcaacagccacaacaaattgaaccaccgccattttttgaaattgatgcgatcaaagctatagtccagtccattgttgagcatgagcaaaaacaggctcaacagcagaaatggcaacggttacaagagtttttacaacactcccctcgcaccgtagaccgacttgagcgagatgctatcagcagatcgtttgataagggacaacaggcaggcgatgaagaacttgccgagttcatcaaataccatcgtcagcactggcaggaaaaagagcaggcagctaaagactggcaagccgagcatgaccgctttatgcgtgaggaagcagctaaagcaagggaagaagctgcactcacactacaaagagagcgtgagtcagaagccaaacttgaagcgtacagagagcgcaaagcattgcttgacaaggaaatagctgaaatgcagcaaaagcctgttaatagggatgagatacaacaacagccacgccctaaaaatgactttgagccatag

SEQ ID NO: 59521 - DNA, 1149 bp, Acinetobacter baumannii
atgagttacattctaggcatttccgctttttatcatgatagcgctattaccttacttaaaaatggcgagattatatgtgcattacaagaagaacgtttttctcgcattaagcaagacaatcgctttccccgtcaagcattacttgcttgttttaagcaagctgaaattactcttaaagatatttcttatattgcctattatgaagatccagaaattaaatttgaacgtatatacacgacttataaaaagaactttccaaaaggtgcattaaattttgcaaaacaatataagcgttttgttgctagaaaaaatattatttctcttataaaaaaagaacttacagacatttttcaagaacaagttttacctccgttctatatatgtcaacaccatcagagtcatgctgcatcggcattttatccctccccttatactaatgctgctgtgctgtgtgtcgatggggttggagaatggtcaacaactacagcttggcatggttgtggtacagagttacgctctttatttgatattcgtttcccacattctttaggactactatattctgcgtttacctattactgcggtttcaaagtagattcaggtgaatataaattgatgggactcgccccttatggcaccccacgctatgtcgatattattttaaaaaatctaataacaatcaatcaggatggcagtttttacctaaatcgtgagtattttgactatgaagtcgggaatcggatgatcaccgataaattcgaagtattgtttggaggagctgcccgagagcctgaaagtattattacaaataaggagatggatctcgctgcgtcaatacaagttgttactgaagaaattatgttgatgctggcaaagaaaattaagtctcttactcaagctgaaaatctttgtctggctggcggtgttgcgcttaactgtgtagcgaatggcaagttgctacgttctggtttatttaagaatatttttgttcaacctgcatctggagactcgggtggatcacttggagcagcatatctatgctactacaagcaaatgcaaggaactaggaaagttgatgagttcagcgaccaaatgcagggcgctgatcctagacagtatcgtggacaacaaatccctctaaattcttaa

SEQ ID NO: 59522 - DNA, 1374 bp, Acinetobacter baumannii
atgttcgatataattatcattggcgcaggtactgctggtattagcgcatataaagaggctgttaaacataccaataatattttaattatcaatgatgggccatgggatacaacttgcgcacgtgtagggtgtatgccaagtaaagtcctcatctctacagcaaatcgtatgcatgacctccaaaatgctcaagaagttgggttaaatgcttctgtagacattaatactgatcaggttatggaacatgtaagaaacttacgtgaccgttttacaaaggcgactctcaaagatgtagaccaatggccaactgaacataaaatttcaggtaaagcccattttattgattcagaaactattgaagtaaatggtaaacattatcaatcaaaaagctttattctggcagttggttccactcctaattatgatcaaacatggaaacaagaattaggtgatcgccttattaccacagaccaaatatttgaattagatactctacctaaatctcttgccgttattggaagtggagtaattgctcttgagatcgcacaagctatgcatcgattaggcgtggaaacaactatatttgctcgtagtaaaagaattggaatatttactagctctaaattacagcaacttgctcaagaagagttaagcaaagaattaaactttttatttgagacattaccagccgaagttaagtctacttctggtggcgttatattaaattatagaatcaatggagaagaaaagtctcttcaaactgagtatgtgctatccgcgacaggtcgttcaagcttattagataacttaaaactagagaatattgataaatcatttcagaatattaagttattgcctataaatgcgaaaacaaaacagctagataactatccaatttttattgctggggacgcttatacttcaacgccattacagcatgaagctgcacatgaaggtaaaaaagttgtttataactgtttgaattatccacaggttaattcagttaagactcttactccattaggcatagtatttagtcatccagaaatggcaattgtgggacaaagttatagacaactaaaagacaatggaatagattttgtcacaggtgaagcatcttacgaaagacaaggaagagctattgttcttggaaaaaataaaggagctattgaagtttatatagagcgaaaaagccataaactacttggtgccgagttatttactgaggcgacagaacatatggctcatctcttaagttggatcattggtgaagaattaactttaaatgatattttagagaaacctttttatcatccaactcttgaagaaggtttacgcactgcccttaaacatgcacgcaggcaattaaaataa

SEQ ID NO: 59523 - DNA, 1482 bp, Acinetobacter baumannii
atgaaaagtatgtataaaaagcaacttaccttaaagttgtcggctattgctgtgtcaattatgttggcaagttgtggcggtggaggtggtgatggttattatcagaatggttcatcaaatagtaataattcctcatctggaggcaatactagcggttctgaacaaccgactgctacagctttaaagatagaactagataaattatcagttgctgcaacgaatgacactttaacggttactgttagagctttagatataaataaaggtggcgttgctggcgctaaagttagattgaaattagaagatccaacaaataacgtaactatagaaggagcatcaattcaaactacagatgcagcaggtaatgctgtatatattataaagacaccaaaaacatcgagttcaataaatgatttggtgaaaaatggttttaaattaatagcctacacgaataatgatactcttacgcaagaacagactgtaacagtaacaggtagtaatagcactacagaagctgatactacgagtattgtattgtttgatgctacaaagacctcattaaatgttagaggtgatcagacaactgttacattaacagctgtagatgcaaatggtgcaactttagcaaatcaagcgattacgcttaaagttagaaattctgttttaaatggtgtcaaatttactcctaatgcgacacaaactgatgcaaatggtcagatcagctatactttagcttttagtgaaaatcaaagatcttcatcatatagtgctgcacaatttgtgacagatgatcttgttttagaagctaattttggtcaatcaacaaaagtttatacgtataaacttgatgtagttaattctgatgtgccagtagcggttggtgctattgctgtagcatataatccgacgatggtggaggattcaacggatggagtttactactataaaaatatctcagtacaagtgactgatgtggatggtaaaccgatcgcaaatcaagatgtgataatgggcgttaatgcacttgcctattataaaggggcatttgattttgttgatacctctactccagctgacggcaaaccagatgaatatctaccagttattaggtcagcgtgtacggcaccagttcaagttgtaaatgtgaatggagacgttattaatcaattaaagccgcttaaagaaaattcaacagtccaagttgtatcgtatattaatagtgcaggtaccgctgcaaccaataataaatatacaacagatggaaatggtcgttttgatcttaagattcaataccctaaaatttatgcatcttggttaactgttcagttaacggctaaatctacagtttcgggaagtctgattaaaggatctacatctttgactttagattacttgaaaaaggatgttactgtcagtgatcgtatcgccccgaatatattaagtccatatggaatagatccaaactgttcaaatggtaattaa

SEQ ID NO: 59524 - DNA, 825 bp, Acinetobacter baumannii
atgatggaatcaataaaaataagtagtaaagcttcctccttatccattcacaatacagaaaagctgttatctaggaatgggtatgaatttaactatcatgatgaacgttgggttgtatctaaggtttgtgcagtaaactttaattggatttattctgtactcgaatttaagtttcatgaaagctataagagagttttattgcattatgttcagaataattctgctgggtacgctaaagccataaatcactatacaaaattattttttcagttttgtgcgaatgctgacggaagattaatatctttagtttcaggtcggcatgttattaattactattcttcgctcgatcctaataaaaaacataatatagcccaagtgctaacttttctgaagaaatggcatgaatttggttatgagggcataaataccgatgtccttgaggtaatcaaagagttacgagttaaaaatgctgaaaaaggtaaggccgttagactactttgcccatatgaaggtcctttgtctgatttggagtatgaaggactatacagtgggttatctaaagaatttgaagaaggcaagattagtctgaaagagatggtgattgccaaactatttttagcaactggtaggcgtccaatccagatagcaaatttgaaagttaaagattttgtaggtgttaccgttattgatggaaataagtttgacttattaagagtaccaaaagtaaagcaaagagatatttggcgaaaaaaatttagtgattacgctttgtctccaacatgcgacaatatatgtcgcatatttaaaattctatggtttaaataa

SEQ ID NO: 59525 - DNA, 1245 bp, Acinetobacter baumannii
atgaaactcatcaggactaaatttaagtcaggtgaacgctactcactgttggtagatgacaaaggaatgcctatttggtatccgacactttttgctacgagcaaactcaggaattccgcaaaagcaccaaatacaatagaagcacatctaaatgccataaagttgctaatagaatggagtcattcatcaaatattgttctagaagaaattttctcagcaaagcagtttttaacaactgaacagatagaacatctctgcatctatctgaaagggaaaaaagatgaaaaaatttatgaaggctttaaaagttgtaggaaccaaagaaaagaactgcatagagctaaaattcgaagtgaagaatcaatttctagctcaactgcttatataagaatatcttatgttgctaattatatagattggcttgcaaaacacgttataagtgagagaaaccaaattataaatagtgatatatcgctcggtatctcacgcatggtaagaagcttgaaagctaggagaccaacaagatcaatttcttctcgaaatcctaaaaaaggattagcagacaatcaaagagatatagtgctaagaattattaatccaaatagcatagatttacctttctccacggagacaaaagagcgtgatagcctaatatttgaaatcttgtataagacaggaatacggctaggagagcttttatcaataaaaatttcagactttaattttcaaaacaacacactgcatatacatagacgtcacgatgatgtttatgatccaaggttaaaacagccagttgctaaaacttttgatagattgttgcctattagcagaaagctagcagaacgaacacatgactatatacttagagaaaggtctcaagtagttggagctaataagcatgactttctgttcgttacttacaagtctgggccatattgtggaaaaccattatcatcaagtgggctttataaaatcataaatcaggttcgtgaaagtattgatgatctgtccgatttaacaccacatatatttcgccacacttggaatgatatgttctcagagaaagtggatgagcaaggtatatctgaagcggaagaagaaaagctaagatctaatctcatggggtgggcagaaggttctggtacctcaaagacttatacccaaagacatatagagaaaaaggcacatcaggtaagtatattattacaaaaggaaattgatgatggaatcaataaaaataagtag

SEQ ID NO: 59526 - DNA, 390 bp, Acinetobacter baumannii
atggaaaattttttaacattaaatggactagcttctatttttaagctgtatggtacggtcatgatgatcgctttagcagtaagcttagtcgtagcggtggttttaatcatgcgtttcccacgttcgcctcaagaatgggtagtaggtttgatttgtactattgtctcaagcttgactggtggttcattcattatcatgaaatggaacttacatgaatgggtgaccgatatatggggcatgatcactttaggtggattcttctttatttgtggcttacctggttgggcaattgtgaggtggatatttaacttcattaataaacaagaaggaaaaactattgttgaagtaatgaaagacttaaaaaaagcaaaagatgatattcaaagttaa

SEQ ID NO: 59527 - DNA, 183 bp, Acinetobacter baumannii
gtggctatttcaactggttatgaaggaaaagctaaagcctcaggaggtagtgcaattgtcctaactcatcgaaactcagatggcgaaattcttcacattcgagcttcaaaagttggtgaaaacggcattaaggcagacacatggtatcagcttgatgctaatggtcagtttgtggaggcttaa

SEQ ID NO: 59528 - DNA, 384 bp, Acinetobacter baumannii
atgaatatgttcgttaccaaacctgagctgttgtgcccttctttcccaatgcttcaagtgtctggtgagtttgaggttaaggacaacactgtttcatttgaattggaaagtggatgtgcaactttgaaatgcaagattgtcgctgatgtggttagagaggttcgagttgttggctcaatccttcatccagaagacagcaaagatcagttttatgaccaacttgtagtagatgaccgtacacacgttgaagtggttggtgctgagtacgtagaagcccctattggtctgctatttcagctaacaacaacccaagtaaacagcttaaacgagcagcttaaatactacgccgaagagttggcagatgaagaagcgggagtggcgtga

SEQ ID NO: 59529 - DNA, 294 bp, Acinetobacter baumannii
atgatgtcaaaatattttgatttaaatactgaagataaagaatattttgaaactattgcaaaaaatcgagcagaaggtttagttaaaaaatatccaaaatttaaaaaatataattatagaattgttccttatagcgagggtaataataaatatgtaaaaataatttttggaagtgcaataactatagaagatagattatttcatattcctactccagccgaagatacatatatacaagattgggacgttacaagaggcttattttggaaagctcacttcttagctggagattaa

SEQ ID NO: 59530 - DNA, 1083 bp, Acinetobacter baumannii
atgactgaaacaatcacagaacctttgagcacgaaagttgaaaataaaaaaagtgttcgacatgatataccagtaacatatcatcaaattcattttgtacctgtaaaaaagccaaaccaaaaactatctggtgagcctacaactcttattaaattcgaagatgtaatgactttaattacagattatgaatttcatacagttgaattagattcccgtgatcgttatacctataacttttctggtatcagactgaataaatctggaatttatgaatgtgtaatcaactgtgatgatagccaagcagaggacgtactaaaacataataaaaaaataagaaaaactgaaattgtctcttttaatgttgatgaaagtcatcttatacgtgcacatgtattgtttcagcctttagcttctactgaaggtgtctgtgctcgtatgttaattgaaggcaatagaaaaatttctgagcaagttgtccgaatgttacttcagaaaattattgatcaaattgaaaagagtgctttccaacctgatttctttaaagaagattatgcagggacacttccaaatagtacaaagcaatatcaattacatttctcaattaaaactaaaactgatcctattactgatcaagaatttgttaaacaactggaatcaggacaattttaccatattcaaatttccgaaaagacagttggtaaagtccatactgaagctccctttttaaatgaaactttacaaacaattcagttaaaacctgtttttactgatggtagtaaaggtataggagcaattttcacaggattaaaaaagttagcaaagaagaaatttggaaccgatacatcaaaagaaactaaagaaattacatataagctctgctatccagaaggttcacataaaagaactgtaagctttaatcctactaatgaacaaacctctgattttgcgattaaacgaaaatggattaataaatttgaacgtcagaacaagacgcacgatactatctttgataatgatttatgccgtagaatgacggccatgtttaaagatgagggcaatgatcatgatacggatgataattaa

SEQ ID NO: 59531 - DNA, 228 bp, Acinetobacter baumannii
atggataaacctaactgggccgaactaattaaacaacttattgagcgtggatatacggaagagagcattgctgatgcagtagatgcaactcaaccagcaatccactacttgaagactgggaagactcaggaaacgaaatacagcacaggtgcaggaattattcgcctgtgcacattaaatggtatttcaatcaaccacaaaaaagccccagttacggcaaataactag

SEQ ID NO: 59532 - DNA, 750 bp, Acinetobacter baumannii
atgttgctagattataagggtgtttatatttcgatgggcttattcatggttggcttaacagttggagatcgcgtccgtcaatgcaggaagttaaagcggtggtctcaagaaaaattggcgaaggaagcgcaattaacacaagctactatttcacatgttgagaacaacattagtgatcagtcaaaatacttgccacaaatagctaaagctttaaacgtatcaagtgaataccttctaagcggccaagaatacatagataaacaaaaaggaacgttcgatgactttgtaatcattgggggtgacaaagctggtgaagttccttctaaggaggaatatgtattgatcccaaagtttgatgtggctgggtcttgtggctctggctctatcattgaccacgtggatgttaaaggcggtttggtatttagcgaagattggatactatctcaaggacttaagaaagataaattagtagttattcatgcaattggggacagtatgtaccctactattgaagatggtcaggttttactggtggatacatcagacatcacacctagaaactcaaaaatttactttatgtgtatagataatgagtattacattaagcgcttagttaatatgctaactcattgggtaatccgttctgacaatccagataaaaatgatcatcctgatatcgagataagccaagagactatgaataaccttcaaattgaaggtcgtgtagtttggaaaggtggattgctataa

SEQ ID NO: 59533 - DNA, 1083 bp, Acinetobacter baumannii
atgattaaacgaactttgtggtatcaagttgaaaaagagtatttgcaagtaactcaagaagatttacctaatatggataactccttaattattttaggagaggcaggtatgggaaaatcttgcctgcttgagtggttaggaagcttggataattttgcatattgtactgctcgacagttactccatcgtcataaacctaatactttgttaaataataaaaaagttcttgtaatcgatgctttggatgaattgagttcatctaaggatggagatggtatcgatttagttttgcaaaaattgggagaacttgattatccacagtttgttttgtcttgtcgtgtggcagattggcgtagtgctactggtttagtagcaattaaagaacaatataatattgaaccactagaacttcatttaaatcctttctctcaaagtgatatgaatgatttcttaagtgaaaaaataggaaatgagcaagcattgaaagttgtggatcactttgtgaacctcggattagaagggctattgggtaatccacaaacattaaatttgatttcagaagtagctaggtcgactcaactacctgaaacattaactcaactttttgaacaagcagttggcttattaagaattgaacattctgaacagaagaaagaaagacaactatccaaagaaactgaacttgaagtagtaggagctgcgtttggaagtttaatattgtcagcaaatgaagctattactaggaagcctcttcacaaaattgatgatggggaattgccaataagtgaaataaaaagtcttacacaagggcagtatattgaaaatgtaattggttctcgattatttaaagcgaatggtgtggaacgctttacctatctacatcgtaggataggagagtttttaggtgctaaatggctaattaaacaagcaaatacgagtcgtaaaaaaaaacgtcttctatctttttttcatgcatatgagcttgttcctgctaatttacgtggcatgcatgcatggttaattatggatcataatgatcctagccaaaataatggacagtacttccctctaaagataacgtaa

SEQ ID NO: 59534 - DNA, 597 bp, Acinetobacter baumannii
atgagatttgaaaagaagttgatctatggtgtcggaatcaatgattgggacacgcctgttcgaaaagatgggaagttaataaaagagtattacttatggcgtggtgtattggagcgctgttattcagattggttccaaaaccgcactcctgcttatcgaggcacgacttgttcggaggaatggctaactctatcaaaatttgcaaacgatattagacaaaaaccaaattttgataagtccattactgatggatggcaattggataaggatattttggtcaaaggtagtaagcactactcaaatgagacaacttgttttgttccgccctcaatcaataacgtgattttaaaaagtgatagggcaagaggcgatctctgtataggggttactgctgtgaacggtaagtttcaggctcaattgcgaactgagaatagaaaaagtatcacagcatgttttgacacagaagttaaggcttttcttttctacaagaaagagaaggaaaaacaaattaaaagattggctgaactatttaaagatcaattagatatcagggtttatcaagccttagtcaattaccaagtcgaaatcactgattag

SEQ ID NO: 59535 - DNA, 210 bp, Acinetobacter baumannii
atgagccataaagagcaaattcaaaagaaccttgaaagattaattgctgctgagttaagaaggtttaccctcgaaacaggcgaagtggtagatgaactttatgtctttccacaagatgacaaggatggtggcgagacctattacgacatatttgttgagtttcttgaaaaagatgaaagtgaagcaagcaaatcgggagctgaacaatga

SEQ ID NO: 59536 - DNA, 390 bp, Acinetobacter baumannii
atgaagcatcttgttgggattagcttcaatgcagaatcaaatcagtatgaaattagtggtgaaaaatgggcatgtgaattaacggatgcttgtgaagagctaaatactggatggttcatttggcaagagtgtgtaaaagccaaagctcaggcggtgccagtctggatctcagttgaagataaattgcctgaaattgccgacgctagtgtgttggctcactttcaaaatgggtcaattgaaacagttcatatagaagattggttcaaagatataacaagtggttttgatgaagcagggatacaaacgttcacaaagtggtacttaaaggcatctaacaccattacccactggatgtcactaccagaagcgccaattgagacaggagcttaa

SEQ ID NO: 59537 - DNA, 534 bp, Acinetobacter baumannii
atgttggaagaattaagtatagaattagactattatgaactggattatttagatgttaaagaaattagagagtttgttatcgagcaaaagaaaattgatgcatatgagttaattttaaatatacaaaaatataaacccatcccaattgaaaaatctattgaattggatcacgtaattattgagttagttgaaaagtataatctcttagttgtaaatagtatgttaagttatcatgcggataaagttgcttcaaatttgtatagcttagagcatggagaaagaaaagatagatattattctgtgaataagatgtttatcgcgaggatcacatcttacttagaacattgtaagttaaataataaagttccatctcatacacgaaatattggatttaattggagttatacttgcttagagtactttgttagtaaaagtataataaatgatggactctcttggactacttttagtggtgatgagttaattcataagtggttaaatagtgataaagtaacgataaaacctgatttttaa

SEQ ID NO: 59538 - DNA, 756 bp, Acinetobacter baumannii
ttgtatggcaaactaacaaattttattaatcggcttgaaaataaaattaatgacaaaagattagatttttttctaggggaaaaatctaaaaatattacatttgaagaaaccttacaaaatctcttaggttttactcccaaaaaagaatcgaatatcactattattgacctaagcggcgttccttttgaagtattgagtataactgtatctttaatatcaagattaatttttgagtatggttatatatataaaaaattgcgctgtatagaaaatcctgaagagaaaattaataatgatgcacctatcttattggtatatgaagaagcacacaaatatgtaccaaatagtgatttatccaaatatagatcttcaaaactctctattgaaaggattgccaaagaaggacgaaaatatggcgtcactttactattggcgagtcagcgaccttctgaaatttctgaaactatatttgcacaatgcaataacttcatagctatgagactcactaatcctgtcgaccaagcttatgtcagaaagttattacctgattctttgggttctttaattgataaaatgacgtcatttaaacaaggtgaagctcttttggttggtgaatccataatacttccatcgattgttcaaattgagccttgctctattgctccatcatcaaatgatatcccatactgggaactatggaaaaataaatggaaagatattgatatatcgaaaataaaaaccgaatggcacaaataa

SEQ ID NO: 59539 - DNA, 672 bp, Acinetobacter baumannii
atggctaaatatcaagtttttgcagatgagtcatggactcatagctcccctcctctcaatcgataccattgttttttcggcggtatatttggtttagaacaagacattgataggcttgattatgagctacgccaaatagctaaaaaacattgtatcaatacagaaataaaatgggctaaaatttcccctacttatttaaattgctataaagagttagtcgattgcttagcaaaacacattttgtctggaaaaattaaatatagacaaatgtttaaagaccgttcttatcatttcgataatcagcaaggattctctgaattagatatgcaatttagactttattatcaattccttaaaaactcctttggtttcaagtacctacccattctaaaaaataatgaaaaacatcacattctcttaagattagatggacattccagccaaaaacataaagagaatttagctgagtttattacaaaagttcctcaatactttcaaagaaccgatattgaaattcaagtatcttatattgatagtagtaagttcatcagactacaaatctgcgatttattaatgggagcagctggctataaaggtaataaagtttttgctcgaagacagccaaagcaaagaggaaagaggtggatcaggaaatttgaacaacacttataa

SEQ ID NO: 59540 - DNA, 483 bp, Acinetobacter baumannii
atgatgacgtcagatacaaatgaaaaaataaatgcccaagttatagccgtattccctgataaagtaaaaattgttgtcgaggatttagaacatttcaaagttgctgaagagtcactaaaagttggttcatacttaaaaattgctgataatgaaaatgcggtattaatagctgtaattgaaaattttcaaatttctgtaggcgaaggtgtacaaaactatattattgaagcatttccattaggagtgctcagaaatggtaaatttgaacgaggaggtgattcattagctattcctccaaaagaagttgttcctgcaactatcgaagacataaaaaagatttatgaggatacagttaatcctgttgaaagctttactttttcacatctggcttctaataaagaagttgccgtaccaattaatgggaacaagttttttaataaacatatgatcctagccaaaataatggacagtacttccctctaa

SEQ ID NO: 59541 - DNA, 177 bp, Acinetobacter baumannii
atgatcgaattagtggattacaactcaatgatgaagctacgtagagactacaaccttggtacacgcaataaagaaacaagagcagcagcgaacctctatgagaaattaagaaagctgaaaatgctagaccatctcaagcaggaagccattactaaacatgacggagaacaacaatga

SEQ ID NO: 59542 - DNA, 297 bp, Acinetobacter baumannii; identical to SEQ ID NO: 55191

SEQ ID NO: 59543 - DNA, 297 bp, Acinetobacter baumannii; identical to SEQ ID NO: 55191

SEQ ID NO: 59544 - DNA, 177 bp, Acinetobacter baumannii; identical to SEQ ID NO: 59541

SEQ ID NO: 59545 - DNA, 471 bp, Acinetobacter baumannii
gtgattccacggcttgaaaaagtgattgaagctgagcaaggaggtatttcttctgctgttaattggcaaggtggtggaggttttagtttttatactttaggtagctctgttttcgatgataatggtttcttaaatttcgatgtgaagtttaaagaccttgctagttatgtatggtggttagaaacaaaatttgcattaaaccaaactgaaaattttgataatccattcttaggtattcatgaaggtacagcctactatttgctgtataacggtattttaggtgatcgacgaccaaatggtggaaatgtccttacgtcatctgtattgaatcatttgaatgaatgtcatgcccatgatggtaaacgaatcgtgattggagaagcctcccgtttaagtcctgctcgattggaagcattgaatatcgagtttaaacaaattccatattcactctatggcaataaggctaagtaa

SEQ ID NO: 59546 - DNA, 396 bp, Acinetobacter baumannii
atgctagatattaaattaaaatatttagatcaagaaatagctcatcgtcgtaaaattgcgcaattgtatttgaagcatatagtaaatcctttaatcaaattacccttagcgcagaaaaatgctgaagagtatcagcaacacgtttggcatttatttgtgattcgtactgagcatcgtgaagctttacaaaagtacttggctgaacaaggtgtacaaactttaattcattatcctatcccacctcataagcaacaggcttataaagaatggaatgatttaagttatcctgtatctgaacaaattcatgctgaagtgatgagtttacctattggtcctacactaagcgtggaagaggctgagaaagtaattcagatttgtaataattttaaagtctaa

SEQ ID NO: 59547 - DNA, 321 bp, Acinetobacter baumannii
atgaatcgattaacttttataaacggtgcgattgtttctgcgactgatgttcgcaaatcttggagcaaaattgttcaatgtgtcaaagatagtcataaacctgtttttgtttatacgaagaatgcgcccgaagctgttgttctgagttttgaagaatttcaaaaaatgcaggaaattattgaagctatccggcgtgaacagctcggacaacaaatggtttatgatcttttggatattaatcagctcactggtcaaccgatcaaacacatgcttttgaacccaaaaggtgtatttgaagaagtaaatggacaagaaaaatag

SEQ ID NO: 59548 - DNA, 258 bp, Acinetobacter baumannii
atgtattttcctttaaaagctccagatggtacagatgtatatcctataaaacctgatggaacagaaggtagatggcgttggggaatggagaaagttaatgaaaatatcaatataattgaatgggttaatggtaaaaatggttggtctgcttattataaaatatttgaagattcaaatgtgggtagacctcctgaaactatttggactcatcaagaagtcggtagcaatagaacttcaaagaaagaggttaaatcttaa

SEQ ID NO: 59549 - DNA, 399 bp, Acinetobacter baumannii
atgttcatcggtatcaatcacaacagcatcgcccttacgctgagggatttcaactgccacgatttctttagaaaaaaagcctttggcttgcgcgcttgcggtgcgttgttggctcaccaaggcaaactggtcctgatctgcacgattgacgttgaactgttcagccacgttttcggcagtctggggcatggtgtctacaccatacaattctttaagtttcgggttaatgaagcgccaacccatggtggtgtcttcaatcttctggctacggccaaaggcactgtcagacttacccatcacatagggtgcacggctcatactttccacaccacctgcaatcaccaagttcgcttcacctgctttaatggcacgggcagcaatggcaattgcatcgagtga

SEQ ID NO: 59550 - DNA, 279 bp, Acinetobacter baumannii
gtgagaaatattcctaagcaacctcaatattctttttggctaccaactgaaaaagactatttttaccctgactttgttgcggaattagtagatggttctatttttgtcttagaatacaaaggcgggcatttagatactgctgataatgctcgtgtgaagaatgctatcgggaaacaatgggctaaggatagtaatggcaaacgaatattcttgatggctaaaaagcaagatgaagttggacgtagtttggaagagcagattaatactatattattttga

SEQ ID NO: 59551 - DNA, 219 bp, Acinetobacter baumannii
atgccagttttagttgaaccggatattaatacttataatatcgatccaagcaagattgaagctgcaattactccaaaaacgaaagtaatcttacctgttcatttatatgggcaattagcagaaatgcttgcaatcatggcaattgcaaataaatacaatctacttgttttagaagattcagctcaatcacatagtgcacctaaatttttaccaggatag

SEQ ID NO: 59552 - DNA, 225 bp, Acinetobacter baumannii
ttgtccacgatactgtctaggatcaatattgctatagtaggttcaacgggctctggaaaatctcatactttagcaaaaattatccaaaaagctacctctgaaaaacatgaagattttcatttaaataactctcatgttattgtttttgatattcactctgagtataaaacagcttttccaaacgcaaattacattgatatttcaaatttaatacttccatattag

SEQ ID NO: 59553 - DNA, 132 bp, Acinetobacter baumannii
atgccagagcttgagatttccctgcttgaccagggtcctgaggaattcgaacagttacgttttttccatcaagctcagtggtttgctttaagcgtttatttacattgtcagggccaagctgtcctcttgtaa

SEQ ID NO: 59554 - DNA, 378 bp, Acinetobacter baumannii
atgaaagtattagataaagaaaaaagattaaaagaattattagaaaataatataagaaatgaaaaaattggtacagcaattgctattactggtccttggggagttggtaaaacttttttttggaaaaagtttatagaaaagaataattttaaaaggaaatatatatatgtatctttatttggtcttcagtcattgagtgatttgaaaacgcatatttatagcaatatcgaaaataatcattctactttagaagttcctagatggattcgaggattaccagctatttttaaagatacaagggtttcacactttggtttaagtacttctactaaaatttttgatagtttgatgtttagtcaggtctatgatgtgtgctga

SEQ ID NO: 59555 - DNA, 234 bp, Acinetobacter baumannii
atgttattcaaaaaattcgctgttgctgctgctgttgctgctactttagctttcgttggttgttctaagaaagaagaagctcctgctgctgctgctgcttctgaagctactgctgctgcttctgaagctgctgtagctgttgacgctgctgcttctgaaactgctgctgctgctgcttctgaagctactactgctgcttctgaagctactgctgctgcttctgctgcacactaa

SEQ ID NO: 59556 - DNA, 687 bp, Acinetobacter baumannii
atggctttgaaattgaagggagatactcaatcactacaagctgttgcaacaggtgcccagggttatccaacctataatgatataaaaggtgcaacatgtaggttgcagactccaggaaaaggtgagaaaagtgtagtggggcatattttgttaggtgatatttctctaatcgatctaaagaaaaagttcgataaacaatttttaaagagtgatttatctatgttaaaaggtgaagatttttttattgaagatttttttgaggtagctgaggaattaaacattttttatagagagctagatattagtaaaagtgagaatttttatgttcaagtttttgaaaaatattttaggaaaccgcctactttaaataattctgaactatggcaggaattaaaaaaagagacagagggtgcacatttacctatgggagcttctcaaatggaacggctttttgagttttgtaatcctaaaaaacaagatttatatatattttttgatttttattactgtaaaaaaatatttaattttaaaaattttgatgatttgtcaagaatttttgaaaatacatataattttaatttctatattgttggtgaagattttttatttgcttggtgtaaagaggaaacggtttttggagcgggtgcagctaaaaaatgggtaaaatgcttgcaggaaaattggtag

SEQ ID NO: 59557 - DNA, 330 bp, Acinetobacter baumannii
gtgcttaaaaattttgttcttaaaatgattgaattaaagcgatttgatgatttattgaatcttttaagtgaagattcagattattcatctgattcaatgaataatatacctcaaataaaagatgaaattgaacaatatactctttcagtacatcatattcgttttttaaaaaagtttggtgctactgatcaggtggtagttgataaggatggaagtgtgtataaatggtatatagattattttaataaatggcttgaaaatggtgttaaaggattagagatgatcgaagtagaaaattatttgaaagatcaccctttcccaacgatttga

SEQ ID NO: 59558 - DNA, 216 bp, Acinetobacter baumannii
atgcctgaatttgtagcaaagtcagctttttggcctggactatacgttgcagtgtttgtacttctgccattcgttgttgtaatactgattttaaaagtagcttttccatcggctaaaagttcaaactctgctgtaccagcagtagaggttgctaaatttggtaaagtcgatgatgaaccgtcgccccaattggggcaacttcaatatagcctttga

SEQ ID NO: 59559 - DNA, 420 bp, Acinetobacter baumannii
atgaatgagttaaaagtgattaatgtaaagaatgcaataggtaaggttgcgcgtataattgatgattattcttgcgttatcaataagggagccaatgatggcttagagcaaggtaaagagttctttattattgaattaggtgaagttatcgtcgatcctgatacaaacgaagaattagagcaattacatattgtcaaaggtagtgctcgcatagaaaccatccaagaacgtattgctactttaagaacatccgaagaaagggttcttagggctgctgtaaaacgtagaaagaatgcatcagatataagaagtatatttgcaggtttaaatgagtatgaaatagttgaaccagctgttacggagcctaaaaagtttcttaatttaaaagtaggcgatttaattattcctaagaataactaa

SEQ ID NO: 59560 - DNA, 399 bp, Acinetobacter baumannii; identical to SEQ ID NO: 58646

SEQ ID NO: 59561 - DNA, 432 bp, Acinetobacter baumannii
atggcagatttgacttactcaagtttaaataactggcttaaattcaagcacttggttttgttagagacgttagctcgaaccaataacatgcatttggctgctgagcagatgaatttaagtcaacctgccgtaagtaaaatgctaaaggaaattgagggccttcttgggtttcaggtctttgagcgtttgccccgaaatatgcccgtaacggcattgggtgaacatgttattcgttatgcacaacgtgttttgaatgacgcaaaacattttgtcgaagacatcgagattttacggttgggtggacatgggtttttaaaaatagggggaatatttgcagcgaccgcagtagtaattccaaactcaattatcgaaattagaaacaatggccgctactttctatcgatgttgttgaacagaccagtgaccatttaa

SEQ ID NO: 59562 - DNA, 771 bp, Acinetobacter baumannii
atgagttttttattttttaagacaaaagatttctcaagcgcccattcattgcctcaacttaaagatgtttcagatttaattccgcaatatgagaataatgcatatggtcactggttgtttggaggaggtccttcttcattggtagatgttgtcaatggaagaatattgacgcttcaaaatggggcaacagttcagccagtatatggcgataaaactattacgctatccacagccatcggcaatgcgcttttgacagatttggttgattcttctgcacagagtatgactttatgttcagtagtaaagtgtagtacaacgtctctggccattttactgggcaatctagttccgagttcatctacattaagtagcggtctagctgcttttgcatcggcagggaaggggtatctgactgttaagcctgctactgcaggtggaccagggggtatttcatctttaacgccaccatcatcaattgtacagacatccaacttttttattgcaacaagcgttgataagaatacaaaaaaaggaatcatctatcttcaacaattaggcgttgagtctagtaatgaatcgtcatataccgctgttagctatgaatcttcagctaataaaatcggtataggaaacgtggcttatacaggctctagtaatacagctacttattctgaagcaatcatttttgataacgctttaactttggctgagattcaaaatgtagcattacgctctaaagaccgtatggcgaataggaatataagtttttaa

SEQ ID NO: 59563 - DNA, 1803 bp, Acinetobacter baumannii
atgcctttacctaatgccgaccagttcgttggtcaaaatgtgactgaatcgggctttaagcaagcccaaactcaactgattcaatttctaggtgatgaagttccaactaatgaaaaattagttaatacctttgccacaaaagcaattgctgattctaaaaccaccttaatgccaattgattacaagataactgtgaccagtgatcccgatgaaacaaagaatggtgattacacgtggaacggtacggaattagttaaaagtccttatgatcctgttgataaatcgagacaatttacaagtgaagaagtaggtaaagtttctgcagatgttaaggagaaatttgaaaaaattaaactttctaccagtagtgaatccacttctgttattccagtcttggttgataaagataataagactttaattggttatgacacagagaaagaccagatagctgcagggagattgcaagagcaggttttagaaaatttacctaacttaaaaaaatcggaagacattgggaaaattgctgttctaacagactcaacgcacaaaatcttgattggttatgatacggagaaagaccaagcgatcatagcggggctagagttaccaaatcaaagacctctcgtgaaggccgttaatcacattctgttttatggtcaatctctatcagtcggagcaacagcaaccacgattctaagtacatcgcagccttattttaatgtgacattcgacacgggcccacgcaaagactcagctgcaaattcagtcattccactgattgagcaatttaataatccaagttcagatggctatgataatcgcggtgagacttgttgctctggtgcagcaaattacgcaagtcgagcaatgatgctagagaatggtattgatccaaaggaccatgtaatttttgcatctaccgcaggacatggggggtatcgcatcgatcagcttgaaaaaggtacggactggtataacttttttatcgagcatgtgtccgaagcaaagcgtctaaatggcgatgattacaaagtacaagtcgtgtgttgggtgcaaggtgaaaatgatgcagtaagttcagtacaaacaagttatgaagtttatcgacaaaaacttttaaaacttcagtcagatgccagtgcagatattaaagcgattactggtcaaacggatgaagtgaaatttattacttatcaaatgtcgtatgcagcaagaacgtgggaaaaacaagcgcttgttcaactgcatctttgtcagcaatcagataagtttttgatggctacgccgatgtatcacatgccgtatgccattgacaatattcaccttacaaatgttggttacaagtggctcagtgcttatttcgggcgcgcatataaacaattggttgttgataaccgaaagcctgattttatcaatcccaaagtagctcaactaatcggtgatgaaattcatatcaactttgacgtgccgaaggtccctcttgtacttgatacaacaactttagccttaacgacagatcatggatttaaagttcttgttgatggagacgcaacaacaattgtgagtgttacagttcaagacgataaagttgttcttaaattatctgagccgccaacgggggtggtcaaggttcgatatgcattggaccatcttggggctggcatcagtctaactggtggagcatctggaaatctcagggactctactgcagatgaaattttaattgatggagtgttaaagccactttatcacgtatgcccgcattttgaattgactgcatttatagataaaggaatttaa

SEQ ID NO: 59564 - DNA, 297 bp, Acinetobacter baumannii
atgaaacgtaaaaagtttagtaaaaaacggttttatcgccgtttgcaagcacagggattagttaaagatggttatgtcaattggaatggcgaattagaaatctggcaaattccttgctgtaactttcctgatttagctaaggcagccggtaaagctgcagaaaagtttcaagagatggtggaaagtttaaaaggattacagtcgccaaatatcaaacccattaaaagtaatatttttattgatggtgttgatttcggttctgctaaagacttttctgttacctattcaagaacgtaa

SEQ ID NO: 59565 - DNA, 558 bp, Acinetobacter baumannii
atgaatcatcttaattatttatggacattactcggagctaattcaagccaattacaaacacttcttgctgtgataggtttaatttttgcagtgattgcagctttatatgcgaaaaagcaaattaaactctctcaagatcaaaggctatttgaattaaagttacaacttttaaatacatcgcatgaatatcttcaattaatccttacccttagacataaacaaaatatttataaaactatgttttatagaaaatttaatcttaaaggcagtgatttaatgattggtgaaaattatacgaatgatcactatttcgaaaaaattgcgagcctattaatatctccagaagatttactaaataaaataattaaaagtattaaagacaataattccaaactctctattagagatttagaaaaatatttatcaataatttgcgatgtaggaaacagcttacgacactccagcgctgctatggatcaacgaacattagaactggaagatctaaacctatttcataatacttggaatactaatcaatcaaaatatcctcataattag

SEQ ID NO: 59566 - DNA, 318 bp, Acinetobacter baumannii
atggacagtaattggattgagcaacagcgccgtgaaatggaaaaaattatttcacctgagctaatcaagtctagagatttagcgcgtcaaaattattttgatcacatggaaaaagaaatgactggccatgtatcacgctcgattgaacccttaagcggtaaaaagcaaaacactatggttgaactaaggggggctattgaaaaactggttcagaaatataaacaagatgcccaagcattaacgctattgggtgatctggataaatcacgtgtctataacggcattgctactcaattagatcacttgttgaaatggtga

SEQ ID NO: 59567 - DNA, 342 bp, Acinetobacter baumannii
atgaataaacgcatcttaaaaaaactaagcaaaagatcggttgagattttggctcatgtaaaaggataccgtgaaactcaattttacccagcggattatgacgattgttcaacctatgacgtgctcaaaggtacaccaatgttctcatatcaaactagttatgaatataacgaatgggaaagtgaagctgcatttgctgtattgatgaagtttatatattgggagctttgtgaaatatgcacggagacaggagacttaattagttccccaacttttaaaaatcgcggtgatgtaattagaaaagccaaagattacgtaatgaaaatgggggattggaactaa

SEQ ID NO: 59568 - DNA, 753 bp, Acinetobacter baumannii
atgttggttgaaaagtttgattttattgagttacttcgccttgctattgctcaaggcaaagctgaaggaaagaaaatttcgaaagatgtagttttaggtgaattagcgctgttatcgccagctgcaaagctttgggccactgtcttgattgaaaaggttgattttgagcgaatcgcaataattaccccagcacaaaaacagactgaaactttttacagtaagtatgactttaattttcaaaccgaacgccgtattgaagatattccgggtaaggttgagtttgttcgtggtgagattaaatcaggtaattttttccgagcgcgaaataaattagcggtagagattcataaagaaatggtaaagaaaaaatttacccctactaatgcccaaggtgatcttactaatctggcaaaaggaattgctgagattgttttacgtggccatgtttttgttaaggctatgtgtggagtctgccaagggttgggtaaaattgagacatttggtttaaatggctttccaaatggggccatgttttgtgggaagtgtaatggaactggaaaacgaccatatacgttgaaagagaaaatgaatattgctggcattgatgcaaccaaaacagcttatataaagagttatcagaaatttgagctgtttggagaatcaatcgttgctgaatgggaaaatgaaattagaacgcgtatttctcgatcattccgttttgaacttcctgatagtcaagaaacttacgcttga

SEQ ID NO: 59569 - DNA, 210 bp, Acinetobacter baumannii
atgagcataactcttaatggtcaccaattaaaaagccttctcgaatttgtaaatccagatggtgaaaatgatttagatcaacttgaaactgaactaactattaaattttttgaagatgggcacagtggcaaaggctattacttttggatgaccgaatatcctgaagaaggtgcaatgaagctggatattgaatcgggagctgggggatga

SEQ ID NO: 59570 - DNA, 360 bp, Acinetobacter baumannii
atgaaatcagacgcagaaaaagcacttgatttaatagttcgcttagatgaggcaaatgaaaactataaatctctaacagaccagatcgggaaccatctagccctctgccctagaacaatctatttagatgcagagccttatggttgttatcgccatgcgcctcatatgaatgaatggttgaagccacaaattataggtcatacacagtattttgcagcacaaaacgctactgaagaagaatgccctcactgttatgccgcattaaaacttattgagaagcgcaagcaagtacgtatagatcgaggtcatatcaaaggcgcaattacaaagttatctagaaaggttcggagagcagcatga

SEQ ID NO: 59571 - DNA, 261 bp, Acinetobacter baumannii
atgggcgagaaatgcagaattgaggaaaacggcagaaacattgatacctgtcagtttatggattcagtttgctacaacaactatggcggatttgaacgcgctcttaaatcagttcgcatgaagtcaggtgaaagacttactcgagtagcaatcatcgtgaagaagtcagcaaagaatgcagttgagttgaattactgccctttctgtggttgtgacattgatacctctgattatggaatcaaggagccctctcatggataa

SEQ ID NO: 59572 - DNA, 213 bp, Acinetobacter baumannii
atgttttttagaaatgaaaagaaagaagaaacagtatctaaaggcaactatgttgtgattctccataactggtttattgaaactcatggttttaagcactttgaattttctgacatgacaagagcagaagtagagaaagaggctaaagctttaagacatgatcatgactctacttttagtcattgcgcttattacatcatgaaagttgaatag

SEQ ID NO: 59573 - DNA, 270 bp, Acinetobacter baumannii
  misc_feature (241)..(250): n is a, c, g, or t
atgtgtccacaacgcgaaggtattggaatcgagcaaacaattgatatttacaaaatattagatttagataaatccttaaatgaagaaggtgctatagacttccctacttatcaacctacagcatggcgttggacgcgatatgcagattcaggttactttgatttagataaaaaattaaaagattatagtgaaaaagaatgggacttatttttgtatgctcctcagcacaaacctttaaacnnnnnnnnnncctttaaacccgacaagtaa

SEQ ID NO: 59574 - DNA, 345 bp, Acinetobacter baumannii
atggttcggcttgagtcggaaaggcccggtacggctttagctaaaacagttgcaatattcccagatgaaccatttcttaaaagttcaatttgtttttcatctagcttggtcacttgtttggcagatgtagaaagttcatctgcacgtgaagcggtgattgtaattgtagggagtgcttcaggctttttttcagcatctgttgtctcagaaggcgaggctgcaaaggccgagtttgagagaaagatggctccaccaagtgatagaagtggaatgatattttttgcttcagacttcctagtaaaaagtttattactttttatcttatttcccattttctcgccctga

SEQ ID NO: 59575 - DNA, 210 bp, Acinetobacter baumannii
atgtgtgaactcgattcaatggtagaagaaattaatgcatttctagctctaagaggttattcccctttttttgatataaaccaattcacatcagaacaatggtttgatttttcaaaaattgcaatgtaccagtatcgcaatatcgctctatgccatatttttaagcaattcggtatagaaacatcaccgacgattcatatagttagatag

SEQ ID NO: 59576 - DNA, 273 bp, Acinetobacter baumannii
atgagccaaagcgataagctagaacaaaaactacgagctaaaccaaagcccgttagctttccttgggacgatttagttaccttgatgaaacagtatggtttcaccgtattaacacgcaaagcaaaaggatctcactttactttttatcatctagaaactggactaaaggtaaagttatcaagatctcatcctgatgacgtgttaaagggctatcaaattgccaatgcaattgaagcgatagatcaagttaaacgtgataaagaaagctcctaa

SEQ ID NO: 59577 - DNA, 489 bp, Acinetobacter baumannii
atgaagaacttaggtccatataaaggttatataggatccttagagtttgattctaacgataaaattctacatggtaagatcctatttattagagatatcattacttatgaagctgatagcgctaatgatatcgaagatgcctttcatgaagctgtagatgagtatcttgaagattgtaaattcttgggtgttgatccagataaatctttaagtggaacctttaatgtacgagtatctcctgaactacataaagagatctctaaaaagtctactttactcgatatttccttgaaccaatatgtcactcaagctcttgagtattatgtacatcatggtgaagaaattcattcctcaattcaaaatcttaactcttctatcgatgagttaaatgattgtgtcatcaccattgcttatcagacagatcgaaagcaaagttcgactgctgagaagtttgatacacatggttttattgttaatgctttatcttaa

SEQ ID NO: 59578 - DNA, 234 bp, Acinetobacter baumannii
atgagtaaaaaacaaattagtatttctatagaagaaatgacgaaaattcttcttaaagaaaatggcatttccgaagggaaatatattttaggcttagatattgatgtggtggcaggtcatatggcttcacctaaaacagacgctaggcctagtgttttagttggcatcgaaaatttcaaactaattgaagtagatgattctgtagctaatgcagtagatgcatcaactatctaa

SEQ ID NO: 59579 - DNA, 363 bp, Acinetobacter baumannii
atgaaaagtcatgatcatttgcttgatagacaatatgacgaggaaaactacaactgtgttcattttgctcatgaagctgcattggatctatatggaatagaccgggtggaagcacttgaattttttatgaagcctattaaagaaaaggtatttctaccatcaaggttaaaacttttaaatccactgcccatgcccaaggaaggctgcatagtcgcctttcactcgagataccgaaacaagcccccacatgtggggctttttcgtttgggccgtgttctacatttgatggaaggcggagttacttttttatccgaagaagtgatcaaggcaatgggttttagtcgggtcagttactatgattaa

SEQ ID NO: 59580 - DNA, 543 bp, Acinetobacter baumannii; identical to SEQ ID NO: 56982

SEQ ID NO: 59581 - DNA, 750 bp, Acinetobacter baumannii
atggcgggtcattctaaatgggccaatattaagcatcgtaaagcgaaacaagatgccagtcgcggtaaagtttttactaaatatattcgtgaaattgtcactgctgcaaaacttggtggtgcagatcctgccagtaaccctcgccttcgtgctgttgtcgaaaaagcgctttctgtcaacatgacacgagataccattaaccgtgcaattcaacgcggtgtgggtggtgaagataatgatgatttaaaagaagtaacctacgaaggttacggtgtaggtggtgttgctgttcttgttgagacaatgacagacaacctgaaccgtacagttccagacgttcgccattgtttcagcaaaactaatggtaacttaggtaccgcaggttctgttgcttacttatttactaaacgtggtgagattacttttgacgatgtttctttagaagataagatcatggacgtggctttagaagctggtgcagaagatattgaagtttcagaagatgaaattttagtaatcacttctccagagacttttggtgaggttcaagatgctctagcagctgctggtttaaaatcagacaatgctgaagtagtgatgagtccttcgactaaagcagaaatcactgatattgatcaagctaaacaagtaatgaaactcattgatatgcttgaagatctagacgatgtacaaaacgtttatacaaacgttgagtttagtgatgaagttttagcgcaacttgatgcctaa

SEQ ID NO: 59582 - DNA, 444 bp, Acinetobacter baumannii; identical to SEQ ID NO: 58643

SEQ ID NO: 59583 - DNA, 279 bp, Acinetobacter baumannii
atgcctagtagaaaaccccgtgttgctcttacaatgcctgacgatttaaacgcgttatttgaccgtatttcagaattgaatggcacacctaagacaaagttgattgtcgagctattacaagcatatgagcctgttttaacagagatgttagacaccttagaaaaaatacataccgataaggaaaacgcacaaaagatcgttaaacaattcggtcagaatctcgttatggaagctagttccattctcggtgatgtttctaaagaggttcaggatttatga

SEQ ID NO: 59584 - DNA, 1005 bp, Acinetobacter baumannii
atgattgattgggtatcggcgaaaataatttgtaatcatgacccgaataagctctcaaacggcattattgcttcactagatcgtgaaggtaatacggaatggcttactaataaaaaaacgattgttgaaggttcttattcaacaaaaattcagattcagtcagtaacagacactcaaatttatatttctgggaatcctacaaaattccttcagggtcataatttatttggttctaatgatcttgtttcaattatgggtaagttttttgatgagctgttaaaaaaagaagaattaggcttatgtcctgatccattccaatacgcaaatatcaaagacggtcattatgaattatctcgtgtagacgttaatgaaacatggcatttgaataatgaaaaagaagtacttgcttggattcgtgccgtaggcgaatcagcatatttaaaacatcgtggtgctggtcaatttagtggtgatacagcttattttggtaaacattctagacgttgggctttaaagtgttactccaagttcatggagattttagcaaagggtcaccatttacccgttgatttacaaatacctgaaatgatcgaatatgctcgtaaagccttgagaatagagggtgttactagacaacaagagttaaaaagacgttctttgcacattgcatctaattgggatatagacacagcagaggagttactcctagaatatatatctaaattagaaatgagtgatgtctatatgctcaaagatgatgttttagatacattgcctacccgtttaagaatggtttatcaaacctggttgaatggcgatgacttaaagcaaattatgtctaaatctgctttttatcgttgtcgtagtgagatgcttaaatacggtattgatatttctaccaagtccccaaaagagaaaaacaacgtaatcccattaatcagagttttagaagccaaacctgtcgggatacctgattgggcttatgaaagaaaccttgtcgcttga

SEQ ID NO: 59585 - DNA, 615 bp, Acinetobacter baumannii
atgtttttaagtggcaaatacttgcatacgatgggcgcattttcttcttcaaatagtcaattacccgtgaatactattgttgggcgatattcttctatagcacatgatgtgaaaagaatgcatggaagccatccaacctctcgatttacaacctcaatgcttacttatgattcgaaggtaacggctttcaatgattatttaaaagataatggtggtgagattaaacacgtacaccatgacttacctaattcttctccaatcgtaataggtaatgatgtctggattggtcaagatgtaactttttcaacatctggtatttcggttggtgatggagcaatagttgcagcaggctccttagtaacaaaagatgtaccaccctatgcaattgttggcggtgtacctgcaaagattcttaaatatagatttgatgaagagactataaaagaattattagaattaaaatggtggcaatatggtttcgctgattttaaagagataaatgttgatgattcaattgaagtgtttattaagaaattaagaaaaatggttgatttaggtgagatttcaccttttcagccacagcgtctaactattaatgagtttataaatatttaa

SEQ ID NO: 59586 - DNA, 420 bp, Acinetobacter baumannii
atgcttgaaggcggcagctttttccaccatggagactcatttgccatgatgcgtggtggtcatcttgatattgcggtgcttggggcatttcaggttgctgcgaatggtgacttggcgaactggcacacgggtgcaccggatgcgattcctgctgttggtggtgcgatggatttggcggttggtgccaagaaagtatttatcactacagaccatgtgaccaagcaaggtgagccgaagattgtggctgagctgacttatccagtgacgggtaagcactgtgttgaccgtatttacactgacctgtgtgtgattgatgtgactaaagacggtttaaaggtgattgagaaggtggatgggctgagttttgaggagttacaggctttaaccggtgcaactttgattgatgcgactcaagggtaa

SEQ ID NO: 59587 - DNA, 180 bp, Acinetobacter baumannii; identical to SEQ ID NO: 56990

SEQ ID NO: 59588 - DNA, 204 bp, Acinetobacter baumannii
atgacctcacgccgtgatcggaatcttgcggacggggcggacacggaaggcgttgagcttgtcaaggtcgtttgtggcgccgtcgacgaagggcgtggtgaaggcggtgcgggtggagcactgcgagctcgaccagtaccagcgatctgcgaaaccagacagctcgcctgcttgcttggcggagaacagaagagccagttctag

SEQ ID NO: 59589 - DNA, 279 bp, Acinetobacter baumannii
atgagcaagccaaagttgcagtgctacggatgggatgctgttcgtttgtctggctgctcaattgaacacctacagcaacttcgtgaattcgttgagttggagcacaagaacccgctggatgcaaagggccacccattagagggaggccttccaaccattcacatattcaacaaggctggcaggaagaagctcgaagccatctcctgggcctttcgctacaagcgcgatgaggtcaaagctttcgacgccattgcaaaggccaccgggggtgacgtatga

SEQ ID NO: 59590 - DNA, 1686 bp, Acinetobacter baumannii
atggatataaatttaaaaagagtacaggtattaaatagtgatatttcaaacgatgagccatcatgcaaacaagattgtagcgatgtagttaatatttcggtattttttgatggtactggtaataataaaaaagaggatgaagataccaaaaggtggtcaaatcctgctcgattgtggagaaatgctcaaggattaagagaaaaggaaatggctgataaaaacaagcaaatatcgccaaattacgctatctatatttctggtgttggaacaagatttaatgctgagttaaatatctttcaaagggctatttcgtgggtacaagataaccttggtttaggtgctggtgctgggttgggaggtgcaagacgtttagattatggtgaagaccagttaaatgatgctttaaaacaaatcctgatttttaatgcacaaaaggttgaaaaagacattaaaaaatatgtaagtgaaaaaaaggagtacagctttgctgaagtcgataaaagtttaaaagaacatcgattaattaagaaaattaatatttctgtgttcggtttttcacggggcgctgcacttgcccgtgcatttacaaatcagtttatgtggcaatgtcaatcagactgtgatgggctgacgtatggtcaaggtaagtatccgattgaatttaagtttttaggaatttttgatacggttgcttcatttggcttgcctgccacaaatttaagtaatagcttaccttttttagaacgtgatttggttgtagatgagcgggttcaaaactgttcacattatatcgctggtaatgaactgcgctttgctttccctgttgatgttattcataaagacaataagttagctaacagtaattggaaagaagtggtatatcccggagtacattctgacgttggtggtggttatgaaccaggtagccaaggagtaaatgacaattttgcccgaattccgttaaaacatatgctagaggatgccttacaagcaggtgtcaaaatgtatagctatgatgagttgaaattaaaacattccgaaatttttgagcagtttgaaattcaaccagattctcaaaaatattatgatgctgtaaaagccgctataccaagccaaggaagtatccaagatcagattaaaggttgtatgaaaatttactacggtgcctacggtacgattgcacgtgctggaaatgaactttctgttagtcagcgtgtacgtcaggaaaataaatatcgtgaacttataccagttggcccatccgatatggcaactgaaatgcaaagattgatgaaactaaaagaagcaaccgcttcgaaaaaagatggttttaatatttttagagttttttcaccggtttcaactgcctatgaatatatgattggtgtagaagattggcaatttgagagttggaatacaaatgtcagtgatgatattaaaaaattctatttaaattatgttcatgactctaaatatggctttttaagtaatgtagaaccatttagttatttccgtcagagaaaagtttatgagtcacgtcgtagcgccagtggtgaagggtgggataaaaaagctgctgaacagaaagtaacttgtagtgtccctaaacaagaaataccgcaaaagcagtttattgatgcttatgaacaagctcaactaacagagaactttttaaatgcatcttag

SEQ ID NO: 59591 - DNA, 432 bp, Acinetobacter baumannii
atgagtttaaagaaaatattactgttcccggttagtttaatgttgagtgcagcaggttgtgcaggtattggtccaaatgcgacttataatatagcggctacatcctttaattacgatccaagttatacaagttatatggtgaagttgaatggttctgaaataggtggtggatttggaggtggaacaaatactgctagcgtaaagataggaccacagatagttacatggggagagacaaatagtaaaaaaaagcatgtagcaaagaatcaagttattcttacaaaagaacaattaaaaggaaaaaaatatttagcagtacatatatatcctgatgataccgtagaaatatcaacttcaaatgactggcctaatcccataaaaaaaggtctcgattggcggactgacatttgggaaaaaaatcataaaaactaa

SEQ ID NO: 59592 - DNA, 435 bp, Acinetobacter baumannii
atgatgaataaaacacaatggtcgaatagattattactaatatttggtttgatattcagtcttgtaggctgtgttagccttggtccaaatgcgacttataatatgggtacaacatcctttcaatattttacttcttaccatgcttatatgactgagataaatggtgaggaaattggaggaggatttggtggaggcatgaatacttctccagttaagattggttcacaagtcattacatggggagaaacaaatagtaaaaaaaagcatgtggcaaagaatcaagttattcttacgaaagaacagttaaaaggaaaaaaatatttagcagtacatctttatcctgatgatactgtagaaataacgacttcaaataattggcctataccaacagaaaaagggataaagtggatgcatgacttaaaaaaagctaaataa

SEQ ID NO: 59593 - DNA, 579 bp, Acinetobacter baumannii
atgattcatggaggcttaggggtatatttattaaaaaagttggatttagtgcaagtaattaatgatgcatgtgacaatctactctcccagcaaaaaaggttagattccttcacacatattggacccaatacatttggaatatcattagtcgattcagaaaaattagccgaagaatgcattgaggctgtgatagaaatcatttctattattgatcaaatcaaacaagctgtatttgaaaaaatcgaagatactctagattctcacttattagaatccactatttttgagtcttgtgaagaaattgaaattttagcaaatagagcttctatcgaggaattgtacgcagagggttttgatgacatcaagatactatctaataaagtaatctttatcgtcaatggtacagctaattgtcattttgaatatggatctagaaaagaatggaacgaaggtgatggaactgtgttaaaaccatcatttccatttcaggcagaagtttcagttataatccaacaaccttttggggaagaaataatagtgcatagagttggcattaatacagatagttggtatgaatga

SEQ ID NO: 59594 - DNA, 888 bp, Acinetobacter baumannii
atgaaagattatttatcaatcatatggtggaatactagcctttcaccgcccatgagttcaaaacgaaatttagcttcacaagttaaaaaagaatgtattgcaactgttttaaaaaaatttatggacatgaaatatgactttatatgcttaggtgaggtcagcattgaagatgtaagttatatttcaagttatttgaatttaaaaaagactgaatacaattatgctattggggcacagaaacaaggtcgtttatattttgatacggctgtcttttataaaaaaaatcatcaattgattaagtacaatagggatgattgtcaatttgcaacaatggggcttggtagtcgtaatttaaaaatttttgaaagatatgagttcatacactctgaatttggtaatttaatctcgctgtatttgtctcactggccaagtagattacaggataacagtttaaatacagctacaatttcagcgcgcttaaggtttgaagttgaaaaagatcttgataataataaggaaattatcatgatgggtgattacaatgttgagccttttagtgatgagatggttcatcatttacagtcatcaagagatagagatattgtcttaaaaaaaccaaatatcttttataatccgtgctggaagttcttacctttaggtgcaaatgcaagagttaagggtacttacaattatactgaaggtaactttcatacttggtgtgtaatagatcaaatattaatttcaagttctttcttgaaaaatcagtggtcttttgatgatagtctaacttccattattgacttaaataccttatttaaacaagatgaagaatttaaaaatccttctgaccattggccattaagcactttaattacgaggataaattaa

SEQ ID NO: 59595 - DNA, 483 bp, Acinetobacter baumannii
atgtctaattctttagagaatagtttgtttggtcaagcattaaaggctggtttacaagcttcagaaaataaatcaaaaaatttatcttcaattaatgaggttattgaaaaattaaaattagaaatatctcaagctactgataataaaatcttaattcaatacaaatcacctgcaaagcgaaatcatttagcagcctttggtgttttaggtagtgccctcagttcattagagattaatgataaacccaaggatgaaaagccaaaagataaggctatatatgctgttaattcggaaggtgatgaagaattactttcgatcgtagaaataggtagcgaaggatatccttgtacaatttttctggatgggaataagttgattgctttagataaaatgtcttttgaaagtaatttatctgaattaatttcttctgctactatcggtgataagttccaaagactcctcaatgcactaaataatgaataa

SEQ ID NO: 59596 - DNA, 969 bp, Acinetobacter baumannii
atgaataatagaagcaatagtggcaaggcaactgctgcgagaatgacaccagaacaacttaaagagcgttcaaaaaaaggagtagaagcaaaaaaggctaaggcaaatctacctaaggcatcttatactggtgaattaaaacttggtgatatttctgtaccatgtcatgttttagatggtgaggtccgggttatttcagggcgaggactacaaaattctttaggattttcaaaagattcatccggattagcacttcagtcaattgttaattcaaagttgcgtcaatttatgactcaggaaacgatagacaaactcgagaaaccgattcagtttgtaagggtcggtagtggaggttcacagcctgaaactcatggatatgatgcaaccattcttattgatatttgtgatgcttttatgcaggcaaatagagtggagaatttattaacagatgctcagaaaacgtatgcagcacaagctgaaataatcattagatcagttgctaaggttggaataattgctttagttgatgaagcaacaggttatcaagctgttcgtgaaaaaaatgctttagcaaaagtacttgaagcatttgtcgcaaaagagttacagccttggttaaaaacattccctgatgaatattacaaacaaatatttcggctgtatggccttgaatatccacccaaaaaaactcattttagacctggttttattggttctctgacaaatgaggtggtatatgagcgcttagctccagagttattacccgaattaaagaaagaagctgataaaattgaaaagaaagctagattacaccagtttctaactagtgatgttgggcacccaaaacttcgtgaacatttagcttcacttataacattaatgaaattatcgaattcggcagatgagtttaagcaaaaggtcaacttaatacatccaaaattcggagatacatatgaaatgggattgtaa

SEQ ID NO: 59597 - DNA, 369 bp, Acinetobacter baumannii; identical to SEQ ID NO: 56249

SEQ ID NO: 59598 - DNA, 963 bp, Acinetobacter baumannii
atgaatactatctcagctactcttttatatgaacacccgattgagggatgcaccaaagattcaaatggcaatttaaaacctttccctattctcgcaattgataatattccattaaatatatgggttcaccaaaatacccatattactgatctcgcagaaactttagttccagctcaaggttggttatatgattatgatagtgagttggcattaagtaatgcatggaaacttcttaaaccacaaacttatgaaaatgtatctatttcaacagtagttccaattttaatttgccctgatgatttagatctagtgtgcaatgtggttatggtggaacaagttgtttcagcagatcaagtcgtatgggctcgttttggttacgcatttaatcatattcatgatgttgtgacatccgtagtctgggaaaccccaccttctgctccgcagttaagttttccattaagcgaatttgaaaaagcatataatgatttaaaagaattagacaaaaaatggactgaaaattttatctttttcttttcaatagaaaaatatgaaccgaagaatgatctctttttattagttgttaatattaatggtacttcttttagcaattatgagactcctataaatcttccaattttaattaatgacttaaacttactgctatatactaaccaacgagaaatagactatctccaagtagatactgttaacgaaaacattgagttaattaaaaagttaataaatttagagtatttagaattagagaataatatctatgattttcaaaatagtaccgtaaggaacggccatgaagtatttttcttttttaaagtaccaaatcagtcattctatgaatctccttcactcataaaagctggtgaaggttatgtggaaactattcccatacaaactgttaagtttgcattaaatgagttaattaaatatcaaaattcaattttataa

SEQ ID NO: 59599 - DNA, 330 bp, Acinetobacter baumannii; identical to SEQ ID NO: 46732

SEQ ID NO: 59600 - DNA, 183 bp, Acinetobacter baumannii; identical to SEQ ID NO: 56222

SEQ ID NO: 59601 - DNA, 306 bp, Acinetobacter baumannii
atgttagaagctaacaaaaaattggtatattcaggtgatgaagttttaagtgttttacaagaaatagagtttatattaatttcattacataaaattgggtcgtattatgctgaaactctgcctaattcttatgaagaatatgcaaaagaaaccactaattttatagacagtaataatgtgtgtgataggttagctaatattagaaaagttttatcttgtaaatttaataatgatctaggtgtggatgatatgtctgatattgaaagagcactggaaaatatagatttctgggaggctggaaagtaa

SEQ ID NO: 59602 - DNA, 303 bp, Acinetobacter baumannii
ttggctattggctttgaaagcaagtttcaacccattcataccaagcattggcgctttgatttccatattgtgaaattacgcttgttgattgaaattgagggcgggccttggtctggtggacgtagtggaaagttggctaataaagcatggagtctcgaccgatacgaccaggctgaagagttggggtataggattgagcgctaccatccagatgtagttttatctggctatgtaattaacttgatcaaagaaagattagcgagaattgaagatggaacagatcagaccatttccaccaactga

SEQ ID NO: 59603 - DNA, 642 bp, Acinetobacter baumannii
atggaacagatcagaccatttccaccaactgattttattgatcaggctgaagaagaggaagcaatccgtttaataccggcgccagatttaaagaaatgggttgttgctaattttcttacactcggtggacctctacataacccggaccatgaccatatcgctgagctgcttcatgataatgaagaatttttagcatttgcttgggcatcttctgcatataaaagcaagcaagctatggtgttaggccagtgcgaaaaagtcatgttcaatgttggtggctggcgcaaagctagacaagagcaacagatgcgagactggttcggctttgtgccaacttacttaataactgtcgacgcttctttttgtgagcgtgcaaatgatacagagttctgttacttgcttgaacatgagctttatcacattggagtgatgagagacgaggacggcgaaatcatttatagcgatagtacggggctgcctaagcattacttagctggtcatgatgtagaagaatttgttggcgtggttaaacggtggggaccaagtaagaatgttaagcgacttattgaagtcgcaaaaaatccgccgtttgtttcgaatcttgatatttcaaaatgctgcggaaactgcgtaatcaactga

SEQ ID NO: 59604 - DNA, 381 bp, Acinetobacter baumannii
atgagtgaggtagtgaatcaggctgaagttatttcagtaaggccgaataaaattgttgtacaagttactgatcttaatgattttaaagtagctgatgaaactttaaaagttggttcatatattaaaattctaaataatgatgatgcaatattaatagcaattatagaaaatttttctattggtttcgataagaacaatgagagaatttatttaattgaagcattgcctttaggtgtattgaaagatggagctttcattcgtggtggagatactatagcaatatgtttattaaaaaatttattcccatcaacaggtatacttacctctttatttgtacttaatgtacaaaatttcaaaactctatcttcatcaatacattga

SEQ ID NO: 59605 - DNA, 732 bp, Acinetobacter baumannii
  misc_feature (711)..(720): n is a, c, g, or t
gtgagtgaagttgaaaacaaaatgaaatttttaatgattagtagttttttaccttcagttctaaattttcgtggaaaattactagaggctattcatcatcaaagccatgaaattcatattattgccccagatcttgagcttttccagcctgaaatggataagctaaaatctcttggttactcagtttactctgttgaaatgcaaagaacgggaactaatccaattgcagatataaagacactatttgaaatctataaaattacaaagaaaattaagccagactatgtcttgtcatatacgattaagcctgtgatttatggcacgcttgccgcttatttggcaaaagtaccaaatcgtttttcactcatcacaggattgggatatgcttttcagaatgtagacagtacaagtaaaagaagcacgtttcaaaaaatcgtacattggctttataaacaagcattaataagatcatccaaagttttttttcaaaatcctgatgaccttgctttattcaaacaattaaatttattaagtaataaggtgccagccgtagttgtcaacgggtctggtgttaatgtgactgattttgaagttgtaaatttgcctcgtgctgtgaatggtgaagttagggtttcatttttattaattgctcgattattacaagataaaggaataagagagtatgtagaagctgctaaattattaaaaaannnnnnnnnntcctcaaattga

SEQ ID NO: 59606 - DNA, 1428 bp, Acinetobacter baumannii
atgagtactgatgcggctcgggataaagccatccggatcgaggcgcaagaagatttatatttctttacaaggtacatgtttaaggagcgccgcggttataaatggatgcataactggcaccacttggaactctgtgaagctttaatgaaggtttatcgcggggaaattaagcggttagttattaatttaccacctcgttattctaaaactgaaattgtcgtaattaattttatggcttggtgttttggtaagaaacctgattctgaatttattcacattagttattcagcaatgcttgctgcaaataacgcgtttcaggtacgaacactagttcaagaagaagcttataagaaagtctttccaaattttagcttgcgagatgatagtaaggctaaagacttctggcgtacgtcagagggtggtgtctgctatgcgactggtacaggcggtaccattacaggttttggtgctggcaagatgcgggatggctttggtggctgcattattattgatgacccacataaagcacatgaagcttcatcaaaaactattcgagaaggggtaattgattggtttcagaacacactcgaatcgcgtactaactcgccagatacgccgatcattgtgattatgcagcgacttcatgaagatgatttagctggatggttgctaggtgatagaaaagacggcgttcctgtagctggtggtaacggtgaagtgtgggagcatctatgtctttcagctattcaggaagacggatccgcactgtggccagcaaaacacaatatccaaaaattgaggctaatggagcaagcagcaccatatgtatttgccgggcagtaccgacaaatgccatcaccgccagcaggcggtttttttaagcccgacaatattcaaattgttgatgctttgcctgcggatgtagtgaaacaagttagggcttgggattttggggctaccgaaaatgagggcgactttacagtaggtgtgcgagaagctctaggcgcagatggttttacttacattgtcgatgtaactagaggacagcttggacctgacaatgtgaataagcgcttagaacaaacagcaaaaatagatgggaaaaaagtttctgtgcgtctaccacaagatcccggtcaagctggtaaatcacaagctagttcatttgtgaagcttcttgcgggttatagcgtgatagctaagccaatttcaggtgacaagcttacacgtgcacaaccatttgcggcccaagttaacgtaggaaatgtacgaatgctcaaaggtgaatggaataaggattttattgatgagcttcgtcattttcctaatggcacacatgacgaccaagtggatgcagcttcagatgcgtttaatgaattacatgaaggttttgaagccttctttgctgatatgggatttgctcgatga

SEQ ID NO: 59607 - DNA, 669 bp, Acinetobacter baumannii
atggccagtaaaaaattagaagataaaattaaacgagtttgttattttgttggtggtggagttctaggctacttgttaattagttttattatattaagttcatttccatggaaccattatgtactcgataaaaagcaagcttacgatgttttaaaagatgcattcacattaggtgcagcatttctcgctccagttgcagcatttgttctgtttagcgattggagagttcaacataaagctctaaaaaatgaaaagttaagtgaagatatcttaagaatccttaacacggaattattatccttttataattttaatcctcgatcaaaatcagatgttgaagattttaataatcatcaaatgcaatttcataggaacgttgcaaatatttatttgatgttagatgaaattgatgcaaatgaagagcaggcaaaccacttcattgaaaatattaaaaaaatagaggttgatctagatggtttatacatgagtatttttaaacaaattgaaattgttattgaacatgatgcgatttctgattttctagatactcattcaatgcgtaaaaaagaaatattattaaaaaaattaaaaaaatttgaaaatataaatgaaacccattatgaaaatttaattaaagtaatttcacaattgaaacctttaaaagtttag

SEQ ID NO: 59608 - DNA, 171 bp, Acinetobacter baumannii
atgacttggagtgtacaagaggtctatggcagctttcaggtagtgccggacgatgatttaaaacctcattccttatttcactgcgaatgccatcccaaatatgaggatggcatttttattcataactcatttgatggtagagaggcgactgaaacgcctttgccaagttga

SEQ ID NO: 59609 - DNA, 372 bp, Acinetobacter baumannii
atgatcgatttgcataaggaaagagaatcttttacccaaacagaattcaatacatttggtcttgatgttaaggactttaaaaccattggcgagtatttcatgtttattggttggttgttgcgttcagagctagaaaaaaccgaagctaaggcagtgccagaaggattcaagcttgtaccaaatgagcttagtgaattaatcgcagaaaagttagcagcagagcgagttcagaaaccaagaccagagaacgaccctgtttgggttgaaattgcagaacgtgcttataaaagcaatctgttagctaagaagtgggagttagttcgagaatataaaattttgactgaagcaagcgaatcggaaattaagccatga

SEQ ID NO: 59610 - DNA, 450 bp, Acinetobacter baumannii
atgacaacagatatccatacatggcgcagtgaaatttgcgcacaactaatccgcacaggcaaaaccgacattgaagacgtaattaaagatgcaactcgtcttgaaacatatgtgttcggtagtactaaaactgcggatatcaaaaacgcagaagctaaaacttctgaccctgcaaaaactcaaaaggctaaaacagaaaaggctgaagaagtaaaagaaaccaaaactgaaacagccccagttgaagaaccaaaagacgaagttgttgaagaaacaactaaatcagaaatcactgaaaaagaagtgaaagacgcttgtttagctgttgctaaaaaagaccgtgctgcacttttagcaatcttaagcgctgtaggcgtttcaacagttgcaaccatccctgcggacaaatacgcagaagtaatcgcagcttgtgaatcagcacttgcataa

SEQ ID NO: 59611 - DNA, 363 bp, Acinetobacter baumannii
atgactgacggtaaaaaatttgataacggaaagccgcgcttttcgttaattccaaaaggttcgcttgcgcccgtaatcaatgtacttgaattcggtgcgcgtaaatattcagaagacaattggcgcaaagttgccaatgcagaaacacgttatttcgatgcagctcaccggcactttaatgcatggtggtatgggcagaccttagaccctgaaacgggtgaatcacatttagcgcatgcagttagctgtttgctttttctcattgcattggagaagaacagtatacgagcaatgtgcagtacttgcggttttcacccgtgccaatgtgcaacggcctcttattcaactgaagaggggcgttga

SEQ ID NO: 59612 - DNA, 738 bp, Acinetobacter baumannii
atggctttacgaggaaggcaacaaagatttgtcaatgagtacctaattgatcgtaacggggcacgagcttacatacgtgcaggatacaaggtaaagaacgaagatgtagctgctgtgatggcatctcgtctgttaagagatgataaggtcaaaaaagccattgaagcaggtgaagctgaacttgcagaacgcaacaagatcacacaagacaaggtattaaatcgcttatgggaaatggcaacggctgaccctaacgaattaacgcgatacacacgtgttaattgccgattctgttggggtattgaccacaattaccaatggacagtaggcgaatttaaaagagcaattcaacacgcgcacgacacgaatgcacctgaaccaaaatgcgaaggtggtttagattttgatcgtctcaaagcgcctaatccagattgcccagaatgtcgcggcgaaggcgttggatatacgtatatcgcagatacgacacgtgtaagtgaccaagccaaattgctttatgcaggtattaaagaatctcagcacggcatagaaatcaaaatgaatgaccaagtcgctgctttgattaaagcaggtcagcacattggcatgttcaaagatcgtgtagaacttggcaacgacccagaaaacccgctaaccgatccaaaggcagcaagcacacagctaagtcttcttgccaagttgaaaaaggctaaggccaaaaataagggggaagagcgatga

SEQ ID NO: 59613 - DNA, 591 bp, Acinetobacter baumannii
atgataagtaaattccgcaaaaagcccgtagtagttgaggctattaaatacagcaatcaacccgaaattaaccaacaaattatagattggtctaaggattctgccactcccgctttcatggatatcgagtttagaaaccactgtgagaagtttccagacggctttgaataccctgttttatgtatcaatactttggatggggttatgacagtgcgtgaaggtgattacgttataaaaggaactcaaggcgagttctacccatgtaaaccacaagcatttcacgacgcatacgatgttgaaggaccaaaccacaacacatcatgcacatatcaatttgaacttgcatttcacaacctgcaagacacacctgaactgcgcaagatttattggtctgcattaggccaattgcactttgattctaacgaccaagcgattacgccagagcttgaagagtgcccatgttgcaagccgccaatcattcgcaaaataggcgttgagacagaaggctatgagacttttgacataggcgttgatgaaagcggtagtcggtacatacgttatcgccacggtgaatgggaacttgaacaatga

SEQ ID NO: 59614 - DNA, 261 bp, Acinetobacter baumannii
atgattatagctgccgtaattctttctcttgcattcatgtcgattgtttcaggcttattaactctgctaatgctcaagatgaaatgtattagcaagaaaaaggcattttcatacttcacatggctgtttttcatatttgtcagcggtctttattttaagttgtttggcaatcagcactataaggacctttcagacgtttggttcatttgcgcaatgggatacaccattgtgtacggcgctgaagattggggggatgtatga

SEQ ID NO: 59615 - DNA, 2250 bp, Acinetobacter baumannii
atgcgtataccacagtttaactctcaagtcgctgaagccgacatgcctaacgtacaaatcagcggtggggttacacctggtcaagcagtggatatggtcggcaataaaatagatggttttgccaatctagctaatacggtcgccaataaatataaagaaatacaagatgagaacgaccgtgtgcgcgtgattgacgcgcaaaacaaacttgccgagttgcgtttgcatcttgaaaacaacgataccgatggctacatcaagaaaaaaggcgcagacgtggtcggttttgatgacggggaaggtggcaactttgttgattactattctcgtgcatatcaaaacggtgttggtgaaattgctaataaattaagcaatagccgtcagcgtacgatgtttcagcaaattgctgcacgcgatgcgcttcaatttaaaggtactttgcaaaattactttgtacgtgaaaatgatgtttatcagcaaagtgtttactcatcttctgcagaacgttttatccgtgaaataaatgaaaatcctgccgacttcactaagattgacgaaagccgtgaaaatctaaaagcttcacttggcaaactaatgtccctcaatggtaaatcagctacagaagctgaaaacctgtacctgaagtcaatttcatctgcgcatttaaacaacctaaacgcctttattcaaaatggcgaattaaaagcggcagccacttataaaaagaaatatggcgatgagatttcacttgccgatgattatgtgattaacaaaaggatccatgaaaagcttgaagaacaacagatcgaacttttagttaataaggctacaactggaacccaagagtatagtaacccagcattaaacgcaccgccccaagcttcggcggcaattgcaaaagagttaaaagcattatcacctgagcaaatgaaaagcatccgatacaatgatcagcgtttggatgtttacaccgtgcatgctgcaaaagaaaaaggcatggagtgggcagcgccattattacttggcattcgcttagcaggtgagaaatctgataacagtgcagtttcacgtaggggtgctaaatccgttatgcaattcatgccacaaacttggggagaatacagcaaaggtggtaaaagagatattaacaatccggctgacactatcgatgccgctttagaattcgtagattggattagtaagaaatataaaactaaagacccaatggttattgcagcttactacaacggtggtggcaatgcggctacggcagtgttaaaaggacaacaaccgccaaaagccgaaactcaaaattatcttaaacgcattgataaatggttatctgatgatatggggccatatagcaaacagcccgcaaaaacacgtcaacaagcttatgatgaaatttggaacagtaacgtccctgtagagacaaaacaaaaagctttgtctttaactgaacgttattttaatggtcaggataaagttaaaaaagatcgtcaagaccaagaatatagcaatctttataatggaataatttcaggtaaattcacctttgagcaaatacctgcgggcagtattacggctttagaaccaagtcaaattaatagtttgaaatcggtgagcaaagcaacttacaacaaagacattaaaacagacccgataacccttagtatgattacccttaatcaagaggaacttttcaaaggcaaaccacaatctgttctacatcaatttgctgataagttgtcgccaaaagattatgaagaagtcactaaaatgtatgcgaatgtgaatgctcttaaaggctctaaaaatgagaaaaagacattcattcttgacaataatactgtggctttggcagtcaagccgtatctaaatatcattgggataacaagcactactgataaaaagcagcttgagcactacaatgctgttaaaacagatttaatgcagacgttaaaagaagctgaagcaaaaaacggtgggaatttaacttgggaacaagtaaaccgagttgttttaaaaaacataaacaatcaggtaaaagttactacatcaagacctttctttgacgataaagttgagtacaaccgggtttactctcaagttaagagcaagggtgatattactgactcaatgaaaacaaaaattgataatatatttagaaagcagggtagaaacccaaataatgttacggatgctgaatatattaacgcttattattcaattatgagaaggggttactaa

SEQ ID NO: 59616 - DNA, 399 bp, Acinetobacter baumannii
atgtataagatattaattttattatcttttttggtatttagtttttcagttaatgcagctgtggaagatgatttaaaaatatcaactagaaaagctttaaataaaatcgacgcgcaaaaagaagactgctacaaaaaagccgaattttcagcaacagctaacggatgcttagaggattcttttaaacgtcaaaaagttattgtagatacatttgttgatataaaagctagaaagcaagacccagaacagttgttacgtacttacgaagatcaggatgtttttaataaaagtataaaagcttgcgaactattgcttaacctttcgagtcctaatgataaatacttttatgtatataattgcaaattgaacgcccttaaacagtattttgagtatcagtaa

SEQ ID NO: 59617 - DNA, 453 bp, Acinetobacter baumannii
atgcgacccatcgaaataataaaagtagtaaacagctttttatcttttacttgctctgccttcattattggttttttcttttactcttttgttggcaccgaaagctactataaatataaggatatcgtagatttttataatctttttgcttttctaattaatctggtactgctgataattgtatttaaatacggtaatcttttatcagaacgtacatttgattttttagagaatgaaaaaatagaagggctaaaatcaggcaactatattgggctattgcttttaagtgtttttaatattttattattcaatcctattttttctttttcagaatattttgataaaggaggagacaatttaaatgtcgcttatttggcaatgagttgttctctttttttaggtgctgttttactgtacacatctaggcaacaaatcaaaaaattacatgaatag

SEQ ID NO: 59618 - DNA, 222 bp, Acinetobacter baumannii
atggaattggataacgcaaaactaccaatcaatcagattattgctcgcatcaatgatgctgcgaaacatggtgaagctttggtgctaacagccgaagaagtgaagattctttccaaagatattggcgacaaagtctttattcctgtgcttactaatgagcaggtcgtgcagttggtaaaagaaggaaagctaggccagaaaattaataacacaaaagattaa

SEQ ID NO: 59619 - DNA, 183 bp, Acinetobacter baumannii
atgaactattcaatattagcagacattgaactaaatcggaagattagtttatttcaaaaagcggttgaggcttatgcaatagaacgcagtttaaaaaactcggttgctgtagctgaggctaaaagtaacttggagcgtcattactatgaatcctacagctttgcggttcataagggagtatga

SEQ ID NO: 59620 - DNA, 174 bp, Acinetobacter baumannii
atgaatcctacagctttgcggttcataagggagtatgagcatgaagtttatgaaggtgcgaaatatgcacgccagtatggtgatcttcaaaggctttacgatgcttcaagtgatgaattcttcattgaagaaatcaacgatgcttatgaagagtttaagaggagcttggtatga

SEQ ID NO: 59621 - DNA, 192 bp, Acinetobacter baumannii
atgactgagtttcaaaaaatcacgcgagagataagacagtttcaagtagatctaaatcatttgggaagctgtacaacgaaaggattatctacagaacagatcgctcaattagatgagcgattttttttagccatagcaaagcaaaacaaattaattgcacggctcaacaacaagcctgagggcttcttttaa

SEQ ID NO: 59622 - DNA, 267 bp, Acinetobacter baumannii
atggatgctgaaatgaaaaaatattttgatgtggctgaaagtgtttataatctgttaattgaaattaaaaaagaagcagctataaacaatttacaattaaaatatcctgttattgattttgaaagttgtttaaatcggccaatgaaagagcgtattgttaaaattgatttaagtcttcttcctcattttgataatgaacatgaatttattctttggttggcgggttttgtgaaaagtatttctgtatctaggagttattatttttaa

SEQ ID NO: 59623 - DNA, 144 bp, Acinetobacter baumannii
atgcagcaattaatgattatggtcacagaagttggaaagcttgagcacacatgtaatttgcttgctgaggtaaacaaaggcggtaaagtcataaaggttttcggctacaacggtaatcaattaccatctaaagttgagctttag

SEQ ID NO: 59624 - DNA, 1350 bp, Acinetobacter baumannii
atgattgatattctgcaactggaaggtgtacagccgatagattaccgtaatgaagatggctgtattatgattaccgtacagccaagcggtgagcatttgcaaacatgccctgaatgcggtggacgcttatacaagcatggtcagcgtatcaatcattttgcggatacccccttacagatgcagcctgtaaaaattgaggtgatacgaacacgttatcgctgttctgaatgcaaaagcatgataacccctcaactgagtttcttagatgaaaaacgtagagcgacccatcggctgattcagcaagtacgcaagcgttgcttagatcgaacttttacacagcttgccgaagatacgggtgtagtcgtgaacaccattaaaaacattacgctcgatttcgtggaggaattagaacgagatattaagtttgaaactccaacgattatgggtattgatgaacttaaattgatgggaacatatcgctgtgtcatcaccaaccttgctatgaacagcttatatgatatgttgcctgaaagaactcaagatacattgataccatacttcgccaaactgcctgatgcagaaaaagtagaatggatttgtagtgatatgtggcgacccttcaaaaagtcattccgtctgcacctaccaaatgccaagttggttattgataagtttcatgtagtgagaatggcaagtgaagctttagacactgaacgtaaagctttacaaagtagtttagaccgtgatgcccgactgaatatgaaaaaacatttacggtggatactgcttagacggccaaattcattgaccgaagatcaacaaagaattttaggaaatttagaaaaatggcatcctgaatttaaggaagcttatgacctcaaagagcagttttataatatttatgaagcaacaaccaaagacgatgccatacaaaggtttcatgaatgggaaagcagtattcccaaatatttaaagtctttccgtgacgttgctaaaactgtgaataataactttgaggatatattcacctattgggatgcgccaataagaattaccaatgcttatactgaggggcataatggtattacaagggtcgcaaatcgaatggggcgaggatatacctttgaggtgcttcgagcaaaaatgttatataacaaagtggctcgatctattacaactttaaagactccatcatcttcattaaaatcaaccaaaggttatgagggtttaattgcatttccaaccaagcaagagaatactaagttggaatatggcgcttatattccaaccttggttgaattgtatggcggtgatgaatatttagatgaagaagtaatttcaaccatataa

SEQ ID NO: 59625 - DNA, 3285 bp, Acinetobacter baumannii
atgaatattttggcagacaaagcccattacgaaagccacttagaagcctatattgtgcaaaaactgcaagcgcaaggttgggtggttgggcaaagtaaaaattatcataccgaatatgcactctatcccgaagatttaatcacatggattcaagcaacacagcctgaaaagtgggaaaaactgcaagccttgaatggcaataataccgaaaagcgcatcatcgaccgcttggatgatgaactgaataagaaaggcacaatccatatctttcgtaatggctttagcatggcgggcgcaggcacgatagacctcagtgaaagcgcacccgaagatggacgcaatcaagccgtgattgagcgttataacgccaatattttgcgtgttgttccacaactcaaatatcatccatccaaagatgcaggcattttggaccttgtgttctttattaacggtttgccgatggcaacggtagaaattaagaccgagtttaaccagtctttagaagatgccattgaacagtataaaaatgaccgcaagccgatagaccctaaaacaagacgtaaagagccattgctgacacctaagcgtggtgcaattgtgcattttgctttgtctgaatctgaaattgccatgaccacggctttagatggtgaaaacacctatttcttaccgtttaacaaaggtaatcagggacatgcaggcaatccccctgcggatgcagccaaaggtgaggattatccagtggcgtatttctgggattatgtctgccaacgtgataattggctgaaaattttccataattttgtctatgtagaaaagaaaaacaaagtcgatctatatggtaattggacggtacaggaacgcttgatcttcccgcgttatcatcagtttgatgcggtgaataaaatcattgccgatgtgcaagaaaaaggcgtaggactgaattatctgtgtgaacacagtgcaggctcaggcaaaacatcgacaatctcttgggtgtgtcattcactggtgcgtttgcgtcacaatgacggtacaccgttttataactccgtcattgtggtgacagacagaacggtactggatgaccagttacaggaagcgattcaacaattagatcatcagaaaggcttaattgctgcaattaaccgtgatgacaaagaacatccaggcaaatcgaaaagcaaacagcttgaagatgcactgttgtccaataaacagatcattattgtgaccattcagactttcccgcatgtgatggaagcgattctgaccaataccagtttaagcgaccgtaactacggtattgtgattgatgaagcacatacctcgcaaacaggctcaacagcatctaaactgcaagcgacattggcattgcagtcgggtgaagcaatggctaacctgactgttgaggaactgcttgagcagattcaaaaagcgcgtgtacagtccaaaaacatcagtcactttgcctttactgcaactccaaagcactcgactaaaatgctgtttgggcgcactaaaaatggtgagcctgccagtgatgacaacttgcctgaatccttccatctatatccgcaacgtcaagccatcgaagaaggctttattttagatgtactgcaaggctacgtgccttataaaacagcttttaaactcggcggtgaagctgttgatgatgataaacgggtcaattctaaagcagccaaaaaagccttagcccgttggatggctttacacgcaaccaatgtcacgcaaaaggtgcagtttattattcaacactttcaccacaatgttgccaatttgcttaatggtcaagccaaagccatgattgtgaccagttcacgccctgcggcagcacgatataaaattgccttggaaaaatatattgaagataaccctgaatacagtgcttaccgtgtcttggtggcattttcgggtaagctcacgggcaaacagattagccatgaagcagatggtgatagcgaaaacggggcgctatttcaagttggtgaagatgctgaatttaccgaaaccaatatgaatgccgatgcacctaattctgatttacgcatcgcatttgaccgccctgaatatcgtttaatggtagtggcgaataaattccaaacaggttttgaccaacccaaactctgcgccatgtacattgataaagtcattgccaatgaagttgaagtggtacaaaccttgtcacgcttaaaccgtaccaccacaggcaaagatcaaacctttgtaattgactttgtaaacgaccctgaatggattttaaagtgcttcaaaaaatacgacaacggggcaaaaatggtggatgtacaagacccgaatgtggtttataccatcaaagataatattgaagaacttgatctgattaccgaagatgatttggaggagtttaaagcagctcgttttaaaactatccgcgatattagtaatcatgatttcaaagaaaccacacatcccgacctgtttaaagcaacagatcgtgtcgcccgcctgtttaaccaaaaactgaaaatgctcaaacaggcgattgagctacaggaaaccgcatttgatcaagccaaagcagacggcaatgatgaaggcgcagaaaaagccgaatttgagcgcaagcagttagatgtagaattacaaactttaatgcgctttaaaggcaatttggataagtttagccgtatttattcctatgtagcacagcttattgactttggcgatcctgaacttgaaaacttctcggcctttaccaagctcttatccaaacgattaaatggtatgtctgctaaagaaattgatatttccggcttggtactgactggctttggcatctttaaaaagaaacttaaaaccgatgataccgaccatcccgaagcggatgaacctcaaccattagcccccatccaaggcacagcgaacggtgacttacagccaaacaaaatgacttatctcaaagaagtgatcgagctgattgcacagacctttggggatatttctacccgtgaagaacaggtggtgtacatcaatcatttagtaaccattctacgaaataacgatgtagttatggctcagattgaaaataatcctgaatccacagccttgcaaggcaatctaccatcggcaacgaaaggcgcaattattcaagcactgacctcacatcaagacttatcagcattgttgctcaagaccgatgcacaagcgatgcagaatgtgatcaaggtgctgtataaattgcttaaagatggtgaaaccattgatgtgcatcgtctaacataa

SEQ ID NO: 59626 - DNA, 1038 bp, Acinetobacter baumannii
atggttcaattcactaaacaggcaaaaatcaaccaagaacacctacaaacatggcaagaccgtggcctaatcattcccgatcttgtacgggcagaccgctatttaagctttatcggctactatcgcctatcagcttataccattccatttcagcaaattgtcactacgccttcaacggtattacatcaattcaaagccaataccacatttgatgatgtactcaatctatatatctttgatcgagaactaagactcctgatcatggatgcgattgaacgcattgaagtggcaatacgggcgcaaatttgcaatgtactgtgccatctatcaggtaatgccttttggtataccgatgaacagcactttaatcatcactatgcccacatgcgtttgcttgccagtatcgaacgtcaattattagatgaaaaagaacgcttgatacgtgacgagaaagccattgataaacgtccactctcgcaagctgacaaagatgtgttgaaagataaagtgcgtaaagaaaacttcttacgccactacttatctaaatatgacagtccaaaattaccgccttcatggatgatgatcgaaatgctgacttggggtgaactgagccatctctatgtcgggctaaaatccaatcaagccaaaaaacagatcgctcagaatctagggctacatgctgaagtcttggaatcatggctgaaaagcctgaatgacgtgcgaaacttatgcgcccaccatagcagactatggaataaagaacatggtcgcagcattaagattccaacttcaaatgcaattcaatggcttcaacaaccaatcatattgagtaataccgcgattcgctatgagaagcgtacctatatgcttttggtggcaatacaaaccttactttataagatcagcccaaattcaacatgggcaaaacgactcaaagatttaattgagcagtatccatcactctctaaagccaatatgggaatgcctgagttatggcatcaagacccgttctggcaacacgcattacaacagaattaa

SEQ ID NO: 59627 - DNA, 1293 bp, Acinetobacter baumannii
atgcaatttaaacaatacccaagttataaaaatagcggtgtggaatggttaggtgatgtgccagaacactggggggtgaataggttaggggtacattttaaaaatagaaaagaaaaagttagtgataaagactttaaacccctttcagtaactaaacatgggatcgttcctcaattagaacatgcagctaaaagtgataatggcgataatcgaaaactggtaagaaagggagattatgtaataaatagtcgatctgacagaaaaggatcatcgggtttagctgatttagatggttctgtgtcattaattaatatagtcttaacaccatttaagactattcaccctaaattttcacattacttacttcgcagctatttatttcaagaagaattttataagtatggtcatggtatcgttgccgatttatggacaactaattatgaagatatgcgtaatattcatttagctctcccatcagtaagtgaacaaacccaaatatcaaactttttagaacaagaaaccactagaattgatacccttattgccaagcaagaaaagttaattgagcttttagaagaacagcgtaagtcgattatttctcatgctgtcactaaaggtttaaacccgaatgcaccgatgaaagacagtggtgtggaatggttgggggaagtgcctaatgattggaatttaagtagattagatgctgtatcaaaaatcgttagaggtaattccgcattttctaaaatggatttattggaaagtggtaaatatgtagcactacaatatggaaaaacttacaaagttaatgagataaatgagagcttcggctcttatgtgaatcaagagttttttaaaaaatctcaaattacagaatttggagatattattcttatttccacatcagaaacattagaagatttagggcactcgtgtttttatgctcgacatgatgttgggttaattggtggagagcaattcttattaaaacctaagaaccaaaattttggtaaatatatttattatgcaacgaaagcattttcttcatatttgcagagatatgccacaggtcttaaagtttttagatttaatttagatgatttaaaaaaaatctatatccctgatatatctttagttgagcaacagaagattgcagagtttcttgataaagaaaccgcaagaattgatatatcagttttaaaacaaaaatccttaatcgaaaaactgaaagaatatcgtgcttcgattatctcccatgcggttacaggcaaaattgacgtaagggagttctattaa

SEQ ID NO: 59628 - DNA, 1944 bp, Acinetobacter baumannii
atgatctttggggtgatttcccgcatacagagttcggcaaaaaacattttaccctttacggtattaagacgtttggaatgtgtacttgagccaacgaaagaagctgttctcaatacttatgcgcaattcaaagatcaaggaatggcgcttgacgatattcttactaacgtaagcggcaatccgttctataacaaatcaacctataacctatctaatttaggcggtacaaaaactaaagccaaccttgaagattacatttccaatttttctgaaaacgtgcgtgtgatctttgaacagtttgatttcaatacaacgattaacaagctttctaaagcgaatttactgctacgcatttgcaataatttcgctgccatcgacttacatccgaatgttgttcctgaccgcaccatgagtaatgtctatgaacatttaatcgctagatttggtgcagaagtcggtacggggtcagaggactttatgaccccgcgtgatattgtacatttggcagcgactttattgcttgagcctgataatgagctgtttgaacaaaagaatggtttaatcagaactatctatgatcaaacgtgcggtacatcgggcttcctaaccgacatgatgaactatgtagacggttttaaagaccgctataaagttgctcctgtacttgtaccccacggacaggaattgcagcctgaaactcatgcggtcgcattgggttcaatgttgctcaaaaaactggaatctgacccaagccgtgatttatcgcaaaatattaaattgggcagtaccctcagtaatgacttatttgcaggacagcgtttccactatcaatgttctaacccgcctttcggtatgtcatgggcgaaagatgccagtgcagttcaattagagcataaagaaaaaggcttaaatggtcgttttggtgcgggtttgcctaaagccagtgacggctcaatgctttttttacaaaatctaatttccaaactagaactgcctgaaaatggtggtggtcgtggtgcgattgtgctatcaggttcaccattgtttaacggtggtgcaggctcaggcgagtcggagattagacgcttcattttagaaaacgattatctcgaagcaattgttgcattaccgactgatattttcttccgtacaggtattggtacatatatttggttaatctcaaaccgtaaacctgaacagcgcaaaggcaaagtacagctcattgatgctacaggcatgggttcatctatgcgcaagaatgagggtaacaagcgcaagtttattgaccaaaattcgattgatgaaattagtcgtatttatgccgattttgaagaaagttcggttagtaaaatctttgactatactgactttggctatcgccgagtcaaagtcttgcgccctctacggattgatcttcaatttgatgcggaaaaactggaattgtttaaagcatcgaaagagtttggcaagttatcagacagcgaccaaaacacggtatcagcttatattgagcagcagtttggtgacagcaaagactatacttggtttgagaatacattcctgaaaaatctaccactcagcaaagtcagtaagggcttaaagaatgctttgatcgctacgtttggggttcaaaatcctgatgccgaagccgttgaaattaatggtgaagtgcaaatggacagtgaacttaccgattacgagaacatcccgctaaatcaagatattgctgcatatatggcaaaagaggtacttcctcatacgcctgatgcggtaattgataccagttatactgatgccaaagatggtcaagtcggtgtggtgggttatgaaattaactttaaccgttatttttatgtgttcgagcagccacgccacccaaatgaaattatggcggagatcaaagagttgtctgtcgaagtcgcacaattgcttggggagatttaa

SEQ ID NO: 59629 - DNA, 666 bp, Acinetobacter baumannii
atgccaaataagcaagaaaaaatgacagcatttggacagtttcgtatcttaaaaattggaacaaagtatattcaagctgaactgatcggtagtgtaaaaaattatcaagcccaacttgttaaaaatgccgtgctatcagatatagaaataggtacaaccatttttctgcgagtaaatgatcaatctacccaaaacagatacggcactaaagttcagtttgaaccaattgagcttttaactgaccaagctgaaattgagaaatacattttggctgacaggaagcgagtagcagaaatttacattcaagtagcacaagaaaatttggataaaggttggtatagcggtgatgccatagataaggcactattttttagcgcaagccatccaacttatacaccaatcaatattgagctacgccacagacgactcaaaaatatcattcatgcttgttgtaattatcagtacaaaacaacagcacacttcattcatttgtgtcgagcaactatagatatgtacaaagatgaacaacgattgagtgatttggaattaagccagtttgaacaaagcatcattaagattcaatctgatttgaatttatcagaagaaaatgctcaacaaaaagcaaatgaatatttgagtcaactaaaaggattattaaaaagctaa

SEQ ID NO: 59630 - DNA, 405 bp, Acinetobacter baumannii
atggttaatactgattatgtacccgagtggtacatcacacctttccaacatgtgaaatacacgcttgctagaaatcaaatgcatatggatctgctgtttgaaaatatggatgaagctgatcaatttttagatatgggggcggatgcacaggtaagtactttttctgatggcgaatatgcaattgtccaaattggagatacagcggataaggagcaaatacaagtttatggattgcttttacatgaagctgttcatgtctggcaaaagattaaaaagctaatgggtgaacgagaaccaagctctgagtttgaagcatattcaattcaagcgatcgctcaagacctatttgaaatgttcgaagctagtgaggtaaatcatgggatggaaggggaaaaagccgactag

SEQ ID NO: 59631 - DNA, 171 bp, Acinetobacter baumannii; identical to SEQ ID NO: 59608

SEQ ID NO: 59632 - DNA, 669 bp, Acinetobacter baumannii; identical to SEQ ID NO: 59607

SEQ ID NO: 59633 - DNA, 957 bp, Acinetobacter baumannii
atgactacgacagttaattccgacatgatcatctacaaccaactggcccaaacagcgtatttagaacgattacaagacaatttgaatgtctttaatgaagcttccaatggtgcgattatttatcgtaatgaaatcattcaaggtgacttcaataaaaatgcattctacaaagttggtggtagcattaaacatcgtgatgtgaactccaatgcaaaagtcactccggaaaaaatcggtgcaggtgagtctgtaggcgtaaaaattccttataaatatggtccttatgcatctactgaagaggcatttaaacgccgtgctcgtacacctgaagaatttgctatggttgttggttacgatcttgcagatgcattggttgcaggccgattagagtacagtttagcttctttaaaagcggccatttctagcaatccggacatggttgcaaaaggtagtatcgtagttgatggtcgtaaagcattaactcgtggtatgcgtaagtttggcgataagtttggccgtattggtttatgggtgatgaactcagatacatatttcgatattgtcgatgatgcaatcactaagcaaatttatggtgaatctgaaatcgttatctatggtggtttaccgggtacgttaggtaagccagtcttggtgacggatgctgtaggtgataatgatgcttttggcttgcagtatggtgctgtaactgtaactgaatcacaagtaccgggcttccgagcttatgacatcaatgatgaagaaaacttagcaatcggtatgcgtgctgaaggtgcatttaacttagatattcttggttatagttgggatacatcgaaaggtgaaaatcctgaccttacattacttggttcaagcgctaactggattaaatatgcaaccagcaacaaaatgacagcaggtaccttacttgatttatcaggtacagcgacaactggttaa

SEQ ID NO: 59634 - DNA, 768 bp, Acinetobacter baumannii
atgaaacttaaaacagtaacaatcgacggtaaagtttatgcggaagtagatggcgataagccgatctatattcatgatgacggcaaagaaatgccacatgatgcaccacactcggtagcaacaattgcacgcttaaacaatgaagctaaaacacatcgtgaagccaaagaagcagccgaaaaagcattaaaagcttttgacggaatcgaagacccagcggcagctaaaaaggcattacaaacaatccaaaatctcgacgataaaaagctagtggatgctggtgaagttgagaaagtgaaagctgaagctatcaaagcagttgaagaaaaatatgctccgattgttgagcaacgtgacgccctagaagcctctttacacaaagaacttatcggcggtggttttgctcgttctaagtacattcaagacaacattgcagtacctgtagacatggttcaggcaacctttggccatcacttcaaaatcgaagagggcaaggtggttgcatatgatccgaacggcgaaaagatttattcacgtgtccgcccgggtgaacttgcaaatgttgatgaagctttagagtcattggttggtggataccagcataaagacttaattcttaaaggtggtaaaggaactggtggcggttttcaaggtgggggcaaaggtagagcgcctgcaggaatgaaacgcagtgaaatgtctgtttctcagaaagcagaatacatcaaagaacatggcaatgatgccttcctaaaactaccgaactaa

SEQ ID NO: 59635 - DNA, 402 bp, Acinetobacter baumannii
atgggtcttacctacgctttaaagggggttaaaggagtagaaaatctaataagctctttaaatgatcagtatgacggagtaagtataagtgcaacgattattgttacgtcgatcggagtagtactgtggatcttttattatttctttaactcaaaatataaacagtctttaaaggaagtatctgaagggtgcattgattcttttatatcattatttagattagctggaggaattctactagcgtttactaccttatatctattagaggaaggatttgcatcaatattaatcgcttttatttattacggacttttatcaatctttaattcttcggtattagtttttatgaaaaagaaaatgtttacaaagcccaatagagagttaaagcagtttgcccaataa

SEQ ID NO: 59636 - DNA, 1110 bp, Acinetobacter baumannii
atggcaacagatatcaaaaaactatttgaagcactcactcagcaccaggcctatctttatcgtgcttcatcaaaaacggtaaatgagttattggctttattcaatgatgatacgagcaagatgctatctaagcttcgggatttattggatgagcttaatgagtcggagaaagttgctttagctggtggtaaatatacaacttcaaatttaagggaaattagggatttgattgcccaatggtttgccagtgttaatttagcattacctgaagcttttgccgtttctgctacggcgctggctgtttatgaggccaattacgtagctaagctctatggagcaaaaattaataagcctgatggggaaaaactatttttatccgctaaaaaagttccgttggcaggtggcgctcttgtcgatgatctgctttcaagaattgctgaaagtgcccgtcaaaaggttgagtatgcaattcgagatggtattaattcaggcaaaactaaccaagaaattgttcagcgtattcgagggagcaaacggcttaactatgaagatgggatcttaaatggtaccaagacggatattgaacgtatcgtaagaactgtacggagccatgtagccaatcaagcctatctaaatagcttcaaccaaattggctttgaatatgtccgatttgttagcgttttagatggccgaacttctaagctttgcgcttcattagatggttcagtgtgggcgattaatgatcctgcaaagcgtgtaccgccgttacatcctaattgccgcagcattctcgtaccagttgagaaggacggggagctagttggagaacgcccgtatgtgatggatgagcgaagagttaaggacattccaaaagatgagcgaagccaattaatagggcagctagatgccaacactacatttaaagagttcttcaaaaagacagatgacttcttccaaaaagagtggctagggccgaagcgttacaagctctacaaggaagggaagtatgatttcgaaaagttctttgatccagaagggcgtttatatactttaagtgaactcgaagtattagaccgtaaaacttttgaaaaacttggaatcttgcattaa

SEQ ID NO: 59637 - DNA, 1452 bp, Acinetobacter baumannii
atgagtgatgtaacttttcaacatgctgaatatgttaagaacttgccatactggcaaaaacttgatgatgtttgtgaaggtgaagatgcagttaaggctaaaggtgaaaaatatttgccgatgccaaatgcacatgataaatcacctgcaaataaaagcgcttatgaggcttatcttacccgtgcagtcttttatgaagtaacagggactacattaaatagtttagttggtgcagcttttgcaaccgatccaagttttaaatttcctccggaacttgctcatttagaacgtaatgcaaatggtgctggtttaagtacttatcaattggctcaaaatggaattcgccatttattgaagcattatcgttgtgctttatatgtagattatcctgatgtgccgccagctcgtaatctagcggaatttaaagcacaaaaagcctatccgatgattcatttactaaatgcccttgatgtagtgaattgggattcagtaatgatcgataaccagaaaaagctttgcttagtggttatacgtgaatttaagtctgagcgcggtgctgatggatttagtaaaaccgaacaagagcaatatcgtgtacttcgtttagagcaagagggaaatggggaatatatttattccgttcaggtgtacacaaagggtgaaaagggtaactgggttggcggagagaagaagtttccaacagattacaacgggaatttctggacctatataccttttacatttgtaggtgcaattgataattcagaagagattaaaaagccaccattacttcctttggctaatctcaatttagcccattacagagacagtgcggactttcaagagtccgttttttatatggggcaacctcaatattatgcgaagggtgttaattgggagtggtatgaccaagccaagaaacgtggcatctacattggagcgaaagtacttttgcctttacctgaaaatggtggtttaggaattgtacaagccgaccctaatactcttgcccgggaagcgatgaaagataagtgggaaaaaatgaaggagatgggggcgcgtttaattgagaagggctcgggaagtaaaaagaccgctaccgaagcgaatagtgatgacgccgttcagcattcagttctttcgctctgtgtcgttaatatgaatgaagccttgtcagcagcattacgatgggctgctaagtttgtaacgcctaatgtggatgttctaactaaagatgatttgatgttcgaaatcagtcaagaatttaacaaacagggttatttagctgagttagctcgacagttatttgaagcagctctacaaggccgatcttcatttaaatcatggtgggaatacaaccaaacaggtatgttccctaaacaaaaatatgaagaagagctacagaatgttgaagcagagcaagatgggactttaaatcaaaaggtagagtga

SEQ ID NO: 59638 - DNA, 1428 bp, Acinetobacter baumannii; identical to SEQ ID NO: 59606

SEQ ID NO: 59639 - DNA, 471 bp, Acinetobacter baumannii
atggcgacactaaaagagcctgtgaaaatctttatagttcagtctcttgcttgtcgtgatacacctcaagaagtggctgaactcgtaaaacaagagtttggcgttgatatagatcgtgttcaagttgcaacttatgaccctacaaaggttgctggtaagaacttaagcaaaaagtatgtcgaactatttgaaaaaaccagagatgagtttgataaaggcttaattgatattcctattactaataagtactaccgattgaagcaataccaaagacagcttgagaagactagaaacgtcaaaacagccttaaaaattcttgagcaagccgctaaagacattggtggtcaatttactaaccgccaagaaattacaggcaaagacggcggaccagtccaaacagttaattcagaaattccagttccaatggaagattacttaaaagcgcggagggaagtcttagatgagtactga

SEQ ID NO: 59640 - DNA, 642 bp, Acinetobacter baumannii
atggagcagatcagaccatttccaccgactgattttattgatcaagcagatgaagaagaagcaataagactaacaccagcaccagatctaaaaaaatgggttgttgctaattacttaactattggtggacctctttataatcccgatcatgatcacatagctgagctgcttcacgataatgaagaatttttagcatttgcttgggcctcttctgcatataaaagcaagcaagctatggtgttaggtcagtgcgaaaaagtcatgttcaatgttggtggatggcgtaaggccagacaagagcaacagatgcgtgattggtttggttttgtacctacttatttaataactgtcgacgcttctttctgtgagcgtgcaaacgatacagagttctgttacttacttgaacatgagctttaccacattggagtgatgagagacgaggacggagaaattgtttatagcgatagttctggtcttcctaagcactatcttgctggtcatgacgttgaagagtttattggcgtagttaaacgttatggaccaagcaaaaatgttaagcgacttattgaagtcgcaaaaaatccgccgtttgtttcgaatcttgatatttcaaaatgctgcggcaactgtgtaatcaattga

SEQ ID NO: 59641 - DNA, 303 bp, Acinetobacter baumannii
ttggcgattggttttgaaagtaagtttcaaccgatccataccaaacactggcgctttgattttcatattgtgaaattgcgtttgctcattgaaattgagggcggttcctggtctggtgggcgtagtggaaaactgtcaaataaagcatggagtcttgatcgatatgatcatgctgaagagatgggttacaaaatagagcgctttcatccagactctgttttgtcgggatatgtcattaactggataaaagacgaattagcgagaattgaagatggagcagatcagaccatttccaccgactga

SEQ ID NO: 59642 - DNA, 279 bp, Acinetobacter baumannii
atgaaacgtttaaataaattagcccgcatgactccagaggaaaaatctgcacttaaaaaagaattctgggaagctgcaaatgatgaaccatttccgccagaagtggttgctgtggttctggatgtttcaacttcccttctgcagcaaaagcgaacccatggtggtggaattccatatactaaagtcagtccacgtaaagttctttatatcaagtcagacgttattgagtatgtaaagaacagaaaaggaacgaatacctctaatgtaagcggctcataa

SEQ ID NO: 59643 - DNA, 222 bp, Acinetobacter baumannii
atgagtgaatttgaaatggcttattttgacgcaaagctctttatttcaaagtggactacaggggttatttataaaggtttatatatcgaaatggatgagagtagcaccttcgcatataaagtctttgataatgaaaattgtggtgaagagttgtgcggctttctcaacatgaaagatgcaattgagtatgtggatgaagttaaagcggaaagtaaggagtaa

SEQ ID NO: 59644 - DNA, 1557 bp, Acinetobacter baumannii
atgggtcgaattcatgaggcacagcgccaaccaaccaaatttgataacaaaggtaagcttcctgatactaaaaagctcagtggtatccgttctaaagaagtgtcaggtggtgggtttgggcaactcagatttgatgatacaccgggacaaattagtacccagctacaaagcagtcatggtgcaagccagttaaatatggggaaattgagccatcctaaagataaagcggaaagtgaagaccgcggagaaggttttgaactgcgtacggatcaatggggagcattacgcgcggggcaaggtttattggtatccacccataaacaggataatgccaaaggcgaacacctcgatgccgaagtggcgaaaaagcaacttgaaggtagtcaaactaacagtaaggcactgagtgacattgctaaaaaccagaaaaccgatgaaatagaatcgattgaacagttaaaagattttgcctcacaaattcagcagcaaatcgctaaatttgaaaaagctttacttcttttgagttcaccggatggtatagctctaagtagttcagaagatattcacatctcggctgatgcacaaattaatcagattgctggagacagcattaatataagtactcaaaagaatgtgattgcccatgcccaaaataggctcagcctttttgctgctcagagcgggctaaaagcagtagctgcgcaaggtaaggtagaaatacaagcccagtctgatgctttagatgtgcttgctaataaaggtattacgatttcttcgacagaagactgcattgaaattagtagtcctaaagaaattgtaattactggtgcaagttcacaaattaccttaaatggttcaggaatctttccgaaaactggtgggaaattccaagtcaatgctggacagcatgtgttccaaggcggcgcatcggcaagtgttaaatctagtttgccaccaccaccaaaacgtgcacaaggtgtacttgagcttttgcacgactattcacatggagcttttgttaaaggagctggttataccgtaactgataatttgggcaaagtcgttaatggaaagctagatgataaaggatttgctcgtgtttcaggtttggcaacgggctcagtgaaggttctttttgatccagatccgcgtaatccttgggatgaggcaagtgattttaaacgcaaggtagagtggccaaatcaaaatgacgtagaaggtagcattggtattgaatctggcagtaaagggttaactgaaacattgaaaaatgactttaaaaagttgagtcaacttgcgagcaatgtgaaatctgtgcagcagaagattgaatcggttaaaaaaatcaaagatcaaggtgctaaagcattattgccaatggcgatggaacaggttttaggggggagtgatggatctaagttaagtcaatcatttgttagtcaaaatagctttatgccttcaagtcagcagagtaacccactcagaagattggctcaagcaagctctgacaaaacagcaataacaaaaatccaatcaccttttgaaacgtttgtataa

SEQ ID NO: 59645 - DNA, 1614 bp, Acinetobacter baumannii
atgggccgaattcatgaggcccagcgccatccaaccaaatttgataataaaggaaagcttcctgatactaaaaagctgagcggcattcgttctaaagaagtgtcaggtagcggttttgggcaactcagatttgatgatacaccgggacaaattagtacccaactccaaagcagtcatggtgcaagccagttaaatctggggaaactcagtcaccctaaagataaagcagaaagtgaagaccgcggagaaggttttgaactacgtacttaccaatggggagctttacgtgcggggcaaggtttattggtatccactcataaacaggataatgccaaaggagaccaccttgacgccgaagttgcgaaaaagcaacttgaaggtagtcaaactaacagtaaagcactgagtgacattgctaaaaaccagaaaaccgatgaaatcgaatcgattgaacagttaaaagattttgcctcacaaattcagcagcaaatcgctaaatttgaaaaagctttacttcttttgagttcaccggatggtatagctctaagtagttcagaagatattcacatctcggctgatgcacaaatcaatcagattgctggagacagcattaatataagtactcaaaagaatgtgattgcccatgcccaaaataggctcagcctctttgcagcacaaagtggactaaaagctgttgctgcacaaggcaaggtagaaatacaagctcaagcagatgcactggatgtactgagtaaacttggaattactatttcatcaaccgatgacaaggtcatcattagtagcccgaaagaagtcaaaatcacgggcggctcatcgcaaattactctaaatggttcaggaatctttccgaaaactggtgggaaattccaagtcaatgctggacagcatttgtttatgggaggagcgagtgcaaacgccagtgctcctgagttgcctaaagctaaacctatgcagggagcattggagctactgcggagttatggtggagataacttcttcaagcaaaatagttataaagtcattgattcattaggtaagcaaattacgggcaaactcgatggaaatggttttgcacaagtaacaggtattgcacccggaccagctaaagtagtttttgagaaggataatacaagtgcatggctacaaagcagtgattttaaacgtaattatacgtgggctgaaccagtcaaaagtgttcaaggattaatgaaaaatgccctagaagcagtggggcaaaatacgatgtctcagttgcaaaataatcttctttcaacggataaaaatagtttcaaaaatttaggtaagaatactttagataatttagctggccaaacagtagcccagattaaaaatcaggtaactaatactgcccttaatactgtttcaaaacaacttaatctcaatttatctgccgatcaaatgaaaagtcttggtcaaatggcgacgaatccaagtcaatctcttgaaatgcttaaagagcagggcggagattttttgagtgatcaaatgaccgcaaaattatttaagaccacaaatcaagagtcacctattcagcagggcgatttagatacttttgtacggtcaaaaaagtag

SEQ ID NO: 59646 - DNA, 840 bp, Acinetobacter baumannii; identical to SEQ ID NO: 6027

SEQ ID NO: 59647 - DNA, 207 bp, Acinetobacter baumannii; identical to SEQ ID NO: 43916

SEQ ID NO: 59648 - DNA, 141 bp, Acinetobacter baumannii
atgactagaagtgtctctattgatgtgctaaaagttattttggcactttttgttatagctctacactctaaaatatttatagattttaatgatatattatattttttttcaatttttctttatctgtttatgctttattga

SEQ ID NO: 59649 - DNA, 168 bp, Acinetobacter baumannii
atggaaaacatgttaactcacttagtatctaatgcatatgatcagcaatttgattctgcatatcaattatttatgaattatcatcaaggggaacaatggagttggaaaaaccagtattttaaatgctatcagaaaacacatcatgtggatagcagccagcattcgtaa

SEQ ID NO: 59650 - DNA, 168 bp, Acinetobacter baumannii; identical to SEQ ID NO: 57636

SEQ ID NO: 59651 - DNA, 1431 bp, Acinetobacter baumannii
atgagacaaaataaattgatcaataaaaaactattactcagtagcttaattggtgccattgtacttggcactttggggtgcggcagtaaaacagaaaccgttcgtgtagcgattggtacacaagacaccaccattaactgtgcaacaggtgggttgctcattcgtgaattgaatttattaccaaaatatttacccaaagatggtgaaaacaagaatgttaaatatgacattcaatggaaaaactttacctctggtgcaccacttaccagtgagatggtagctgggcgtttagacttgggagcaatggctgactttcctgcggttaataatttagcggcatttaaaaaagctgggaaagaaagcatatttttagcgccattgtcaggcagtattaatggtagcggcaatgcgattgttgttccaattgactcaaaagtaacttcacttaaagagctaaaggggcagactatttccgtaccttttgcgtcaactgctcatggacttttgctacgagcaattcaagctgaaggctggcaacttgataaagatattaaagtgattgctcaggcgccagaagtggcgggacctgcattaaaaagtcataagattgctgcacatgctgacttcgtaccatttggagagttatttgcttaccaaggttttgccaaaaaaatctatgatggtttacaagcaaaatcaccaacatttcatggttcgcttgccagcaaggattatgcacagcagcatccggaagttataaaggcttatttacaggcaactattgaagcgaatcgtctgattcgggaacaaccagaaaaatatagtgaacttattgctgaaaaaacaggtattcctgccgaagttgtttatctatttcatggccctttaggtctgcaaactcgtgacttaacgtggaaacctgaatatcgaaaagcgactcaaattgcgatagataccttaaaagttttaggcaaaaacgacggtacgcttgatgtaaataaatttattgatgatcaatacattaaggatgcatttcaggcatctggacttaattacagccagcaactgtctgactatgcaaaatcacctttggttgccaatgatgctttaacaggccaacccatcaagacatttgatcgggtgactcaaatttgggtaaagggtgaagaaaaagtgcgtagctatgaaacgcctgagcatgctttttctgatttaaagaaaatacaagccgatggaaaaacggtgcgtgtggtttatagccaagatcatcagtccgacattaagttacttgccaatttggcatggtatgccacagacaaagcaggacaaattcaagcctttttattaaaagatgatgctgaaaaatgggctaaacaacagggcggaaaagtatatgactttaaagctattcagcttgtaacacagagctga

SEQ ID NO: 59652 - DNA, 870 bp, Acinetobacter baumannii; identical to SEQ ID NO: 49028

SEQ ID NO: 59653 - DNA, 246 bp, Acinetobacter baumannii; identical to SEQ ID NO: 57639

SEQ ID NO: 59654 - DNA, 1587 bp, Acinetobacter baumannii
atgactcagcagcaggcatgtgtaatatcacaactcactttggagtttccttcaaaagtgatgtttaaagaattgaatttctcacttgagcatcatcaagtatcagccttaattggccgcaatggtcaaggtaagtctttacttatgcaattgcttcacaagatttcacccactagagaaatgcatataagtggtcaaataaactggcaaaccaatcatgcatatttatctcagctcactcgtctccaatcagtcacaattgcagaagctttagaggtcaaccatctttacaacgcttttcaaagagtggaacaaggcgaagctgaatacgatgattatgatttgttagaaggacattgggatcttcctaatatttgggaggctttactacgatctgctcagctaccaaccgatttagactttcctgttaagcagttgagcgaaggccaaaaaaccaagttagccttatccgcattatttttaaaaactgatcattacctattacttgatgagccaagcaaccatctcgatcaagaagctagacagtggctaattgctcagttaaagaaacatccagcaggcgcttttattattagtcatgatctgactttgttaaatgaagtcgaccatatttatcacttaaatgagcatggcctacagcacactacaggaaattatgaaaaattttatgagcaatatcagtcccaaatcgaggctttagaacagtcagtacatcagcatcaacgtgaagttaagcacatgaagcaaaagcagcatgaagttttaatgaaagcccaaaaacgtgaacgtgctggcaacaaacttcgtgactcaaactcgcaagctaaaattttgctcgattttaaaaaagaacaggctgggcaaagcctaggagcaattcattcccaacatcagcgtcaaatcgatcaaagccagcaagacttgaagagtaaaaaagtacttctagaaactgttaagccccaacaatttatattcccctcttttaacaaaagaacaggagaaattcttagaattgagaacttaaaactcaactatgggacacaacaaccaattcatctcgccttaagagcttgtcaaaagattcatttggttggccgaaatggtattgggaaatcaactttgctgaaacagattgatcaatcagctgtaactgctacagatgaaattaaactgtttgcaaattgcttctatctcgaccagaactttagctttttattagaccatctctctgctgttgaaaacttaagaaatattaacccaaatattactgagttagagtggagaaatttattaggtcagcttcggattcgtggtgataaaagcacatatcccttagctcaactcagtggtggtgagaagttaaaagttgctttactaggtttgagccatgctcagcctatgcctgaacttttactacttgatgaaccagaaaaccacttagatatcgagtcaagagagttatttgcaaatgctatttctagttatgaaggtgctgtgctattagtttcacatgatttaagttttgttgaaaaatgcggaattgttgattcaatttatttaaattaa

SEQ ID NO: 59655 - DNA, 444 bp, Acinetobacter baumannii
atgaattaccgacatattattgtacctgtagatggttctgagatttctttggcagcagcacgacaagcggcccatatcgctaaagcttttggtagtaaacttacagcaattagtctggttgcagtggacccgtttagtggtgtcgatttctattacatctctcctgttgtaaaagattattttgttgaagcgcgtgctaatgcagaaaaaacacttgcgaaagtaaaagccctatgcgctgaagaaggtgttgatattgaaacacaaattattcaaggtgaaatctcatctgatggcattcttaaagctgtagaagagttgggttcagacctgattgttattggttcacatggtcgtaaaggtttccaaaaacttattttgggtagttttgcacaagatgttctaaacagcactaaaatccaagttttggtggtaaaagaataa

SEQ ID NO: 59656 - DNA, 234 bp, Acinetobacter baumannii
  misc_feature (219)..(228): n is a, c, g, or t
atgacaacaacagcttatgatactcatttcatggcttccgacatagcctttacagtaaatcgtacagaagttactctaaatattccttttaggaaagtgaaacgtttgggcgatattgtatttggtatggctggatgtttattttgtatgagagattttagcgaggcccttattgattttatcttacaaaataaaacacaatttgagcttccgagatcnnnnnnnnnnatttaa

SEQ ID NO: 59657 - DNA, 162 bp, Acinetobacter baumannii; identical to SEQ ID NO: 49124

SEQ ID NO: 59658 - DNA, 162 bp, Acinetobacter baumannii; identical to SEQ ID NO: 49124

SEQ ID NO: 59659 - DNA, 213 bp, Acinetobacter baumannii
atgagagacgaggacggagaaattgtttatagcgatagttctggtcttcctaagcactatcttgcaggtcacgacgttgaagagtttattggcgtagttaaacgttatggaccaagcaaaaatgttaagcgacttattgaagtcgcaaaaaatccgccgtttgtttcgaatcttgatatttcaagatgctgcggaaattgtgtaatcaattga

SEQ ID NO: 59660 - DNA, 471 bp, Acinetobacter baumannii
atggcagcactaaaagagcctgtgaaaatatttattgttcaagctcttgcatgccgtgatacccctcaagaagtggttgaacaggtcaagcaagagtttggagttgatattagtcgtagccaatgtgaatgctatgatccaacaaaatattcgggcagaaacttaagcaagaaatttgttgagctttttgaatcaaccagagagaaatttgatgaaggcttaattgatattcctattgctaataagtactaccgtctgaagcaataccaaagacagcttgatagaactagaaacgttaaaacagcgctaaaaattctagaacaagctgcaaaagatattggtggacaatttactaatcgccaagaaattacaggcaaagacggcggaccattacaaacggttaattcggatgtgcctgttccaatggaagagtatttaaaagcgcggagggaggtcttagatgagtactga

SEQ ID NO: 59661 - DNA, 471 bp, Acinetobacter baumannii
atgattggttttttcggaatacttatcattgctagacctgggggagatatttttaaaatagaaattatcttcccaatgtgtgctgctctattttttgctttttatcaagtgcttacaaaaataactagtatgtatgaaagcagccttatatctaactattatcttggattctatgcattttttttaacctccttggtactacctttcttttgggaaaaaatcgctcctaatgacctcatattttttcttttagtaggtgtatttggtacgttcgcacataccttatttaataaagcatacgttcttgaatcacctgtaaaattagcaccttacagctatatgcaaattctttttgcaacacttttaggatttatattttttggaacaattccagacttaacaacttttttaggtattttcatcatcttctgctcaggtctaaatatttgcttgcacaaaaaggaacaataa

SEQ ID NO: 59662 - DNA, 354 bp, Acinetobacter baumannii
gtgcctgctgtgctatctacagttgcagtatacgtctggccattgatcacaacagtgaccactgtatttgctgcatctgccggaacgtttttcaatacgcctgtaacagtaacgttgcctgacgcttctgatgcattaatcacattgtcagctgttactgaatcaaccgtaaagttaacaccatctgtatttgggccaactgcatcgacaatagctgtgcctggtaatgatgggttacctgctggatctgtagcaattgctgtaactttatcgccatcatttaaacctggatttggtactgtccaagtaccatccggtcctgcaacaactgttgttgtactgccatctggataa

SEQ ID NO: 59663 - DNA, 435 bp, Acinetobacter baumannii
gtgaaatttaaatctgttgagttaagcggtgtgggcggtattgattatttaaagattgataaaataaacccaaaattcaatattatttgtggagaaaatggggtcggaaaaacaaatatattagaagcattagcggtccctttttcgaatgagatatctaggaaatttattagaaatgtaaattttcttaaaggaaaaattaccatagaacatgatatagaaaatgaagatactctcatttctgagattgaggatcagaatttaattgggcaagttgtttatccagataataaagcttatctattatttgtggattgtaatagaggtctcagttatcaaacaatgacttcaataagttctgatgaaccaactgccggtagtttcaatcactctaataggatgtgtattaatggagatgatatcaaaaaaacctaa

SEQ ID NO: 59664 - DNA, 255 bp, Acinetobacter baumannii
atgaaaaaaattatctttcttggtttagcgcttgtttcgttaacggcttgctcatcagtacaaaataaagattcaactcctccaaaaattggttcaccaaatcctgctagtcaatattgcgttgaacaaggcgggaaattagaaattagaaatgaagcaaatggtcaggtaggttattgccatttgccaaatggacaagtcgtcgaagagtggaaattattccgtgatagttgggcaatctggtttaaccgatga

SEQ ID NO: 59665 - DNA, 348 bp, Acinetobacter baumannii; identical to SEQ ID NO: 57227

SEQ ID NO: 59666 - DNA, 279 bp, Acinetobacter baumannii
  misc_feature (210)..(219): n is a, c, g, or t
atgaaaaaaattcttatcttgtgtgtctccttaaaaggaagtaatgaacgacaagaaaaaattaaacagcaacatcaaagtttgcaatcggtcattcacgatatacaaattgattttgaatttttcgaagcaatttatgggaaaaaacttcctaatgagtatttaacttttttaaatttaagtcgtcagtttgctggattatgtgatcannnnnnnnnngtagatcgtcggcagcgtcagatgtgtataagagacagggattatgtgatcatgaattag

SEQ ID NO: 59667 - DNA, 516 bp, Acinetobacter baumannii; identical to SEQ ID NO: 57167

SEQ ID NO: 59668 - DNA, 465 bp, Acinetobacter baumannii; identical to SEQ ID NO: 57112

SEQ ID NO: 59669 - DNA, 795 bp, Acinetobacter baumannii
atgaaaaaatcagctcaacgtgtgcaggattttcaggaaattccggctcataacgcaattcctgatttgctttggttccgtgttcgtaatgcacccgcagaaacggtttatcctcaacatgcgcatgcatggggtgagtttatttatgcgtttagtggtgtactcgaagttaatattgatcaaattaattatttaaccccgccaccttatggtatttggcttcctccttataccaaacacagtggtattaaccgcaacgaagtgactcatgcaactttatatgttcatgaaagtctgtgccaaaagttaccgcagaaagccggtatcctattaacgtccccacttgtacctgctttactcgatcacttgaggcaaaacccacaagatgaaacccaagtcgaatatatacgcctactccaagttttattagatcaactcatacaggctgaattagtgggtagttatttacctacaacagatcatccagctttagcaaaaattctaaatgatttacatcaatgccctgccgataacagcaccttgcaagaattagctgaacgaataaatatgactgaaagaacattggcacgttacagtcaaaaagagctgggaatgtctttacatgaatggaggcaacgattaaaagtaatgaaagcaatgaccatgcttaatcaaggaaaaaccatagaaagtatcgcttttgatttgggctatgccagcgcatcggcatttatttatatgtttaaacgttggatgggttttaccccagaccagttccgaaagctctatcaataa

SEQ ID NO: 59670 - DNA, 2673 bp, Acinetobacter baumannii
atgaatattctacaacgtaaatcctccatggtcttatatgcttttgagcaatcaattggagattttgttttaaattataaagacttaaatattggtagtcgtttgattgaagacattacagaacgggaaatatcaaaaggtcgatcttttgatccgaatcaaattaaagatgttgttgaggcgacctacttaggtgagttatttcaaatagctatagacttgactagtaatgattcttctcatgatttagtcaagtatttatattcattatttcatgattttgaaatccatttagtcagaaatgcgattagtcatccgaatcgacagtttttagattttttttggtacagattagctgcagtagcaactgatcctgtaatagatattcttggattagacaaagttaagaaagcttttatttctgcaaatgaaggtattttggatgatcctcctgatgactggcttaataaagtagtctgggaaattccaaataatttaccaagtacttttgaacatgctgtaacaggattaattggtagaaataaagaaagaaagcaattagaaacttatatgtctcaaccccgagtttctactgttgctctagtcgccccaggaggagtaggaaaaacagccttagctttagatcttttacattatattgtccatagacctagtgcagtaaatcgtttggatggagttgtttttgttactttaaaaactgagaaattgacagctcaaggtattcaacaacttacagctattcaaactatcgcagaagttaaaaacaagatagtggaatctataaatgatatttttgatgaagatttaaaaaattttgaggatgtggcctcgttatatgatcaaaaaagaatcctgctatgtattgataatttagaaacagtattgagagaagaacaaattctttttgatgattttaataatacactaccaggtggatggaaggttctcatcactagtcgaataacagttgagaatactaaaactttaagtttgcatcctcttgatcaaaaaagtggggaaattttagctagaaaatatcaagagtcccgaggtattagtactctagaaaatcatgattatgaaaaaatatcaaaggcttgtttcttcaatcctttagctatacgtttaaccatcgatttaattaatttaggacgcgatattcccacttctattagtgaggcacaaaaaaatattgctgagttttcttacaataatttaatagaagccttaaaaccaacatcaatacagattttagaagcaatttttgtagaaaatgtatcaacaagggctagcttatgtcatgttctcgaaaaagatttagatgagatctctgatagtgttggtgagctatctaggacaagtttaatagttaaagcatctcaaaaagatatcgaaacttatagcttaaatgattcgatcaaagatctacttttattagatccaaaaaatttagaagttagaaataaagttcagaacaaattactagagcaaaaaaatcaagttcgtgaaattgattttcatcaagagaaacgtcaataccctatttggcatagagataatattcctttagacactccagaaggacttaaaattctagttaaaaatgtaaatatggcagtgcgtcgtaagggagaaacaagtaccttatctgaactaattagaaagttaagagatgctgaaaatatttataaaacatacgcaatttactataaatctttagctaaattattagacaaactttctgatagccatggtcaaaaagatgcacttttaaaaggtttggctatagatgatactaatccaaatattttgtatatgttagcgagatattatgcagatcagggagattatgaagcttcaactaagcagtatcaaaagttaatagaactaggatggattcaagataatgaggaaaatatagaattttctagaaccatatataatggttatttcctaaatttactttactcgaaagaatatcaacgaattctagatgaaactaaaaagtggaaagaagatgagaatttctcccctttattaggggtctatcgagctactgcttggaaaagaactattgaattatatggagctgaagaaagtgataaaattgaatcagctattaatagttcattagctatttttgatgaagtatttcgaaagtatggttacagtgtagaagcatgtaagcaagctactaaagtattcgaagaaatcatattttatgcaaacaacccccttaaatcagatgaaaaattaaaaatttttcttgaaaaaaccaaaaagaatatcacagaaatttcaaatacatacttggattatgattggacgaacttatataagaaactaagttctattcagatttcagacaatcctttttataaccttaaccgatctgggtataagtcgccaagtcaaatgtatgctgatggttcaaaagagggtgatttcatatttgtaaaaatagaaactattagaaataactatctattttcttcagataaaaatcaaacacaatattttgtgcattctaatcaatatagaggagatgtaaattggtacaagttaaaagaaggagagttgttaaaagttcatcctctaccaccagattctagtcaatcagcgataaaggtcaaagcagcttttagttgctag

SEQ ID NO: 59671 - DNA, 468 bp, Acinetobacter baumannii
gtgatagaaaaaggggcaatcatttccgactgtaacaaatatcgttattcactttggcgtatttgggataaagaaaaaccaatatttacctttgtcggcttaaatccatcaactgcagaccatcagcaagatgaccgaaccataagacgatgcattaattttgctaaaagttggggaggtggtggcatttatatggctaatctatttgcatatagagctactgatccacaagaaatgatgtcccaagaagaccctattggtcctgataacgatgcccacttaaagcaattagcagcagaatcccacaaacttattgcttgttggggaaatgatggtgtttttaaagcgagatcaacttttgtaaaacaattgcttacggacaaactctattatcttaaattaaataaaagtggagaacctggacatccgttatatatacattcttccactcagatacagcctttttag

SEQ ID NO: 59672 - DNA, 357 bp, Acinetobacter baumannii; identical to SEQ ID NO: 57314

SEQ ID NO: 59673 - DNA, 303 bp, Acinetobacter baumannii; identical to SEQ ID NO: 44626

SEQ ID NO: 59674 - DNA, 192 bp, Acinetobacter baumannii; identical to SEQ ID NO: 57217

SEQ ID NO: 59675 - DNA, 255 bp, Acinetobacter baumannii; identical to SEQ ID NO: 57173

SEQ ID NO: 59676 - DNA, 1365 bp, Acinetobacter baumannii
atgtttaaagctgaaaaagtcctgtggggcgaaggtttatttttaagacctcaacatttccagattcaagatacctatcatgaacaacgtttaaatcatacggttcgtgctgttgtgccattttcctatggcgttcaaaaacttagttttgatgaagcacagttaagtacgcatattcttgcacttgaatcagtagaaatgatttggcaagacggtgaaatatatcaagcgcctgcttatgacttattacctgaacctattttgcttgatgagcttaatttacgtggtgaaatggtcatctatttggcattaccattattacaagccaataaacaaaatttaatcgatcaaaatcaatcacaaaaggggcgctatcaatcacatttggttgagacccatgatctgttcacaaacgcgacagaggctgatatcagcttattacgtcgtcgagctgtgtttaaattattagatgcacatagtaatcctgatcataatttagatggtttcctgtatttgccaataggcaaaattaaacgtcagagttcaggtgcttttgaaattgaccgcaaatttattccgcccattttgcatgtcgatgcatctgagaccttggtttcaaatttaaaaagaaccttgaatgttattaaggcaaaaattaaaacgattcaaaccaataaccgagaaaatgagcagaaattaattgaattccgttcaggtgatatcgtttcgttttggttggtaaatgctttaaatactgctcatgctggtctgagccatttcttgcaatatccgcaaattcatccggaacgcttattctttgaattgctacgtttggcaggttcattattaactttctcgacagcttatgaagttgatcagttgcctgcatataaacatcataatttgcaagagagcttcacccagctcgacacaattttacgtgatttactcgatacgattatttcgagtcgttacatcagtattgcccttaaagaaattcgcccttcatattgggtgggaagtctcgaaaccgataagattactcgagataccagactttatattgctgtatcaagtagcgtgatgcagacccatgagttgattcaaatcgttcctctacgttttaaaatcggtagtactttagatgttgaacaacgtgttgttgcagcattaccagcaattccattacaccacttaatccaagttccgactgctattccagtacgttcgggtgtgagctattttgaaatcgaaccgcatcatgaactctatcaacgtatgttggattcagaaacgatttgtatttatgttccggctggattccaagatatcagtattgagctgattgctgtcatgaacgcttaa

SEQ ID NO: 59677 - DNA, 408 bp, Acinetobacter baumannii; identical to SEQ ID NO: 58145

SEQ ID NO: 59678 - DNA, 687 bp, Acinetobacter baumannii; identical to SEQ ID NO: 55381

SEQ ID NO: 59679 - DNA, 270 bp, Acinetobacter baumannii
atgccttgtattcattgtaataaagcagagttgcgcaaaatcgctgatcgtttccctgtagaaattgagcgaattaaacaatgggaacgtatggttagcgctgcatcccgtttaggttcttcaactttctttcactccgataaacgaggacatggcatcaatgaattagttgaatggtccaaaacaacaagaggaggtaaacactacgatttaattccactgacagaagatcaatcagcatgttcttctgtttatggcttgtgcgagtaa

SEQ ID NO: 59680 - DNA, 273 bp, Acinetobacter baumannii; identical to SEQ ID NO: 57251

SEQ ID NO: 59681 - DNA, 1083 bp, Acinetobacter baumannii
ttgacatctgacaaaaaactcagaactagattcgtatttattgatacttgtgtatttagaagtaaaaattttaattttggtatttattctttgggaagaactcaaaggtacattgaagaatcaaaaattcatcttttgcttccagatataactaaatctgaaattgaaaaaaatattaaaaaatgcgccaatgaagcttataaagaattattatcttttactaagaaagacactataaaaattcttaaatgtatagataattctccatttggtggcgaaataaatattccaactcaagaagaaatttataaaagtatttatgctaaatttgaagcttttatagactctccaaatgtagaactattatcaacaaacaatgtaaatccaaaaattatttttgataagtactttaattcagaacctccttttgataaaaaagataaaaaatatgaatttccagatgcatttgttctagaaacaataaatgaagcaagtagaaaaaaaggtgaagaaatatatgtaattagtagcgacaatgatatgaaatcttatgttgctctaaactcaaacttattacatctaaataatattaatgaactaaatgatttaattattcataatgataaaaaccttgcagaacctgcaaaatttgctgacgaagtttttgaacaccttaaagaaaatattattgaaaaagcaaaaagtaaaatatatgaaggtgaattcgaaataactcaactatacgaatatttttatgatgatataatcaataatattgaaatagaatctattgaaatttgtgaaaaaaacttacaagaagtatcaatcactgaagctgagtatcaagttaattttaatactcgattaactgtagaaatatcattaccagactttgaaagttcaccctgggatccagaagataaaaggttcgtatttataaacagagaaaaattcacaaatcaatttcaagaaatattttctgcttatgtcactctcatatatgaagatggaataattcagaaggcagaaattattaatttatcatttgaaagctcaactttcgaattaagccatcaaatttaa

SEQ ID NO: 59682 - DNA, 1458 bp, Acinetobacter baumannii
atgagaaatatagtaccagaagcacaaactaaagaagaaatgcagtgtggttttaaaccgcctattttggatgctcaatttacaaatttaccttttaatcagttaggtgatcgggagtttgaaattttagtttattcgctattaaatgaagaaattaagcaaaataaacacccatattttacaaaaattgctttaatgcaaggagtgggagagcgcgggagagactgcgttttatatgataataaaggggtttgtggcataatccagtgtaaaaaatattcctctcgactttctaaacctcaaatcttaaaagaattaataaaatttgctttatactcaattttggatagtagtcttcttccaaatattgataaatttaaatatattttttatgtttcaaatgatttttctgaaccaagtattgatctgctttataaaaatactcttattttagatgatattgaaaatggtacagttgataagtatgtcatacaaatacttgaggaatatgagtcatttaggtctctaagagataatcctccatttgaaaatatttataatattcttaaaaatttaaatattagtggtgttaatggtacagaattaacaactagactgcaaatactaccaaatatactacaaagtttttttaatattagattaggagtggatcttgatagcgcagatgaccttattcgaaaagcattagatgattatggattaaaattattaactgatgatgatcttaagtttattaaagatagaattgatgatacacctgttgaacaaagaataggatttggttttgttgatttctatggttttagtaatgaatttttccagaatcttgattctaatgaatttggtgaaattttaaaagcaattgtggattttcaaatgttgttaaacaataagttggttaatcttgctaataaaaaaattattagttctatttttaataaagttactattcctctattatatacaaaaaaaattcatccatttagtgctagtttatgcggtctttatttagttaagcgagtaatagtaagtatacttcatggtgggatgccagaaaattttaaattttctttagttaaagaagccagaaaaagtgatcaagaaatttatgaagaagtcataagtcatttattagcgtccagtgagcgagttataaatggtgactatagtgagttaaagggagacgaggccgaaatttcaaagagaattaaatattatgaacatatacatgaaggtatgaatagtatagatgatcttaaaaaacaaatatatttagatcttaatattttaaagccggttttgaaagaagttgaagaagatcttagaaaactattttctgagaaaagaacaattatgataactgattcttctttttggaatgataataaaaaaattaagaaattttttgataatacaaaaatagtaggaaaatcgtaa

SEQ ID NO: 59683 - DNA, 642 bp, Acinetobacter baumannii
atgaaaaagtatttaaccctatttattattggctcagcacttctaagcggatgtagcaacgcttctgacagcacaaagcaaacagaagtaaaaactgaaaaaccggcacctaaagtgttgtctgctgaagatcagaaaattattgataagcataatgagtacatacaaaaatactctatggaagataaagaagtctttcagaagcacatgcgcgagattcttcctgaagtagataagatcacggacaaacgtaaacgtgaactacttcaaatgaatatttatatgattttgaatgactatgacaaagcacacgcattaaatgataagcaacttgcagacaaaccaaatgacacagcaagacttacatttagatgtcagttgtttaccatgcaagggaaagaggctacttcgattaataagtgctatgactacgtggcagaggttctaaaagtagagctgaataaacctgaaaacaagaaagacccaaactacaagcaaggcgaattctcctacttactggctaagtacaaagcggggcatcctgaatataaagagaaaatgaagaggttcattgatagtacaaatgatgaaacacttaaagcctctttaaaaacagtctacgatgcagaagtagtaaattag

SEQ ID NO: 59684 - DNA, 1407 bp, Acinetobacter baumannii
atgagtagttttgatgaaatacaaaatagagaagctgggctgcataaaaagttatctgcaaaacagatggggatgattgcgattggtggagcaattggaaccggattgtttatgggaagcaaatttgcaattagttttgcaggtccagcagtcatcgtcagctatgcgattggtggtttaattgcttttgcacttatggcttgtttggctgaaatgacagttcagcatcctacttcaggttcatttggtgcatatgcagaacattatataagtccacttgctggcttcttagttcgctactgttattgggcttgtattgtactggcggtaggtacagagattaccgccgttgctgattatatgaagctctggttcccgaatgtagactcttgggtctggattggatttttttcactgaccttacttgttgtaaatgcctatagtgttaaagcttttggactagtggaatactggttttccacaattaaagtttttgccattattgtgtttattcttttgtctattggtatcttgacgcaaagcaatcagggaatgacgcaagttgtaactcatttatcaggacatgggggcttttttccaaatggctttagtggggtctggattggagtaatcatttcaatatttagttatttaagtatagaaatgattgctgtcgcggctggcgaagctaaagacccggaaaaggcagttaaaaaagcattcaaaagcacagcacttcgactcattttgttttatttattgtccttattcctaatcgttactttggtgccgtggactgttttgattggagcagatgcaacaagcccttttgttatggtcatgaagattgtcggtatcccgtatgcggatagcattttaaactttattgtaattgtagctgccttatcagccatgaatagcatgctttatatttcaactcgtatgctgtttagcttatcacgtgcaggtgatgccccaaaagtctttggtcgaattagtagtaatggggtaccggtaaatgcgctgttgttatctgcggtagggattggtattgctagtattgtttatacgattaatccagcttccgcatttccaattatgattgcgctatccatgtttggtgcgttgttcacgtggggaagtatatttgtgactcatatgttttttagaagacatatggttcagcaaaatatacaactaaaatttaaaattcctgctagtcgatttatctctttgtttgggtttattgcgattttaagcattacagtgactacctggtttaccagtgaatttaagtctactttacaatttggcgtacctttagttctggttcttatatttttctattatttgaaacgttctaccgtaaagttaaatctcaactctagtgaagaaacattgaagtga

SEQ ID NO: 59685 - DNA, 219 bp, Acinetobacter baumannii
gtggatcttaatagcatctcatgggtactatttactgggttatcagtagatttagcttgtctagtaaacgttgaacctgaaggtacaacatatgcgcttaaccccccattcccagatagaaatgtaggatcgtcacgtaaaggcttaccaagtgattgcattcgcgctaactcagtagcatttaacaagcttgcattagtggtatctaaacttgcttga

SEQ ID NO: 59686 - DNA, 288 bp, Acinetobacter baumannii
atgacgcgcctgcacgatttcgcaccgcttccatctttacaggaatcatcaaagagttggaccgatcttttgcttgagacagcaagtagtatttctgaaaactgcccaatgcctttatcggatgcattaaaaatgcctttgagttttgaaagtacttacttcaattcatcagcatgggaaaaccgcaagaagtatttagaaaatgaaattgaacgtcataacgtattcttaaaattaggtcaagaagtcattaagggattaaatgccctagcaagtagaggccgatag

SEQ ID NO: 59687 - DNA, 288 bp, Acinetobacter baumannii; identical to SEQ ID NO: 46104

SEQ ID NO: 59688 - DNA, 771 bp, Acinetobacter baumannii
atgaagttaattgaaaacaatgcttggcagtatctatctgttaagttacccgccgtaggtgcattcatcatgctaattttattgccagcactacaatggggtgttgattatgaagttattcctgaaaaatatcatgcatttgttactggtactttgatgcttgttctgtcatggattggaaagaaaatttctcaaccacgacttaatggcccgcaattaacaggccagttagtagggatcaattctttattgaatatcccaacaccaacaaagcctgatgaattagcttggattgcagaagcaaaaaagcatcttggccttcaagaaatacctggtaaacagcataacccaactattttaaaatggctctcggagctaaaggcttggtgggctgacgatgaaacggcttggtgcgggaccttcgttgcacattgcttgaaatcagctggaattgcttatcctaagcattggtaccgtgcattggattatgtgaattatggtacaaaattagctaaacccgcttacggttgtgtagctattaaaactcgaaagggtggtgggcatgtttgttttgtagttggccgtgacaaaaagtctggaaagttagtatgccttggaggcaatcagtcaaataaagtttgttatgcactttataatgactctgactttcaagaattcagatggtatggtcgtacaactcaaccagctagcaaacgttacaacttaccgcaattaagtggcgtgacagcaattagagttactgaagcataa

SEQ ID NO: 59689 - DNA, 372 bp, Acinetobacter baumannii; identical to SEQ ID NO: 57285

SEQ ID NO: 59690 - DNA, 1203 bp, Acinetobacter baumannii
ttgcagccacgagatcgtagtcgagaatcttcacaagcatgggtacagaaaactgctaataatttagatcccgaaagcctaggccgctcaggtcgggcagatacgggagcaccgatagctggtgatgatttagttgttgaatcaggaaatggccgaacaatggcaatcaagcttgcctatgagcgtggtactgcagaagagtataaacaatggttgattgatgaagctgattactttggttttagcagtgagcaggtccaagcaatatctcaaccaatcttgatacgtattcgtgcaactgagattaatagagctcaatttgccattgatgctaaccaagatgataagttgtcttttacagctactgaacgtgctaaagctgatgctaaacgtttagatgagaatttactggctctttttaacccgagtgaagatggcgatttattagcagtaagtaatcaaaagtttattcaaggttttttaagtaaattaggtgatacagaagctgcacagtacacaacgaaagataaaaaaccaacacaagcactgataaacagaatcaaggccgcaatttttagcaaagcgtacaatgatgatcgtttgcttgaaatgatggctgatcatacaaaaccagatcttcaaaatatgcttaatgcgcttggtgttgctgcgcctaaatttattgaagcacaagctataagtcgtggaaatgttcaagatatatcggatcaaatcgttgatggtatggagcaagccattgatcaacgtgttgctaatgcaattattgatgctgcaaataccattttatctgccaagcaaaatgaccaagatattgttgagttcgtaaagcaacaggggctttttgaggatctgggagaaggtgttgctgagctcgccgtgtttcttgcaaagaatagccgcagttcaaaaaaaatgagcatgttatttaaagcattagctgaatttgcagagaaaaaggcattagatagcatcaatgtaggtttgtttggtgaacctgaaccagtaagtgtaaaagatgctatccaatatgcacaacaagtgcttggtgatgattttattagtgtgcaaatgtacgattcgttattctctaatccatttaaatatttaaatttaattcattatgtgtctaaagacccaatttttgtaatcaatgctttgattttaaataataaaaaaatataa

SEQ ID NO: 59691 - DNA, 687 bp, Acinetobacter baumannii
atggcgaaaaagagcgatttgcaacgtcgagtacttatcggaagaaaacttgcaatggcgcgtgacatggctcaattacgtcaagaagacgtagcattagaaatattcggtacaccgcataaaaatcgaatgagtgaaatcgaaaatggtaagttaatgccagatgcagaattactttctttgctatgtcaaaaatatggtgtttcagctgactggattcttggttttacgattgaaccggaactagataaaacagcttctgtagcaggtattctgtttaacagtcttggtgaaatgatgagtgaatatactcaagctatggcatttcaattgagtatggctgcggcacagcatattacttctttccctaaagccttaacggttgagttacttgaagcctcaaaggggcttattcaagcatgtttatctcaagaacagtctatccaagaaaaggttttacctgaacttcacaccctcatgcgtatagtgcgtgagtgtgaacaaaatcgtgcgaaacaaatccgtaacttagaaatggctatcgatgatgtattccaacgcgaagagaacgatttacagcaaaaagctctaattgatctgatccaaaataaaaaacgttttagcaaggcttctttacagcaacaagctatagctgaagtaaaacaaataggtctatttgctgaataa

SEQ ID NO: 59692 - DNA, 720 bp, Acinetobacter baumannii
atggcacgggtaacagcttcaacactattacaatctcagctaactaacgaacttaagcttggttttctgggtcaggctttagcaattgtgcaaggtaaaatcttcttagaacaaactgtacgtttattaggtgaagcaaaagatttagctgaatactcaggccgtgaagttacttttgatgcttctcgtggtgtgactggaaaattagcagctgcatttaatacatctggtgacttgtttgctgaagtaaataagtttattgctgcggccaaattggatattaaccaacgtacaggtggctctaccgtagcatttgacttatatgttggcgatactgggtcagtattctttaatcaactgtcaagcgacaagatgccagttaaaaccggatacactgctggttacggtcaaattgtccgtattggtactcttgcagatggtactaacgtttaccacgcaccgtcagcacaagagcttgtagctgaagcagatacagcgtttgatatgcttttagttggtcgtggtaatgagccaattcgtgcgccgttcgttggctttattcaaactcctctttcagttattgaaactcgaccagacgcgcgtgaatcagtacttactttaatcggtgctcaagcagccgaaatgaacccgttagaacgttatgctgatcaaagctatgtcatccactgtatcaatatgccatccctcaaaaattcgtaa

SEQ ID NO: 59693 - DNA, 249 bp, Acinetobacter baumannii
atgaatctggctttattcgattttgatggcacgatcacccataatgataccttcagtttattccttaaattttctttgagtaaaaaaactcaaatattaggtggcatccgtcttgcaccttatatagcgggttataagcttgggtgggtaacggataaaacgatccgtactaagctctgccaagtgggatatgtcggctatgatgcagcttctttgatatacaaaggacaagagtttactaaaaaataa

SEQ ID NO: 59694 - DNA, 246 bp, Acinetobacter baumannii; identical to SEQ ID NO: 59301

SEQ ID NO: 59695 - DNA, 180 bp, Acinetobacter baumannii
atgcgtgctgaaggtgcatttaacctagatattcttggttatagttgggatacatcgaaaggtgaaaatcctgatcttacattacttggttcaagtgctaactggattaaatatgcaaccagcaacaaaatgacagcaggtaccttacttgatttatcaggtacagcgacaactggttaa

SEQ ID NO: 59696 - DNA, 666 bp, Acinetobacter baumannii; identical to SEQ ID NO: 47001

SEQ ID NO: 59697 - DNA, 687 bp, Acinetobacter baumannii
atggcgaaaaagagcgatttgcaacgtcgagtacttattggaagaaaacttgcaatggcgcgtgatatggctcaattacgtcaagaagacgtagcattagagatattcggtacaccacataaaaaccgaatgagtgaaatcgaaaatggtaagttaatgccagatgcagaattactttcggtgctatgtcaaaaatacggtgtttcagccgactgggttcttggttttactattgagccagaactagacaaaacagcttctgtagctggtattctgtttaacagtctaggtgaaatgatgagtgaatacactcaagccatggcatttcaattaagtatggctgcagcacagcatattgcatctttcccgaaagccttaactgtagagctgcttgaagcttcaaaggggctaattcatgcttgtttatcgcaagaccagtctattcaagaaaaggttttacctgaacttcacactcttatgcgtattgttcgtgagtgtgaacagaatcgtgcaaaacaaatccgtaatttagagatggctattgatgatgttttccagcgtgaagagaatgatttacagcaaaaagctttaattgatcttatccaaaataaaaaacgttttagcaaggcttctttacagcagcaagctttagatgaagtgaaacaaataggtctatttgctgaataa

SEQ ID NO: 59698 - DNA, 459 bp, Acinetobacter baumannii; identical to SEQ ID NO: 59290

SEQ ID NO: 59699 - DNA, 225 bp, Acinetobacter baumannii; identical to SEQ ID NO: 57342

SEQ ID NO: 59700 - DNA, 246 bp, Acinetobacter baumannii; identical to SEQ ID NO: 57264

SEQ ID NO: 59701 - DNA, 900 bp, Acinetobacter baumannii; identical to SEQ ID NO: 57237

SEQ ID NO: 59702 - DNA, 255 bp, Acinetobacter baumannii; identical to SEQ ID NO: 57173

SEQ ID NO: 59703 - DNA, 1272 bp, Acinetobacter baumannii; identical to SEQ ID NO: 59319

SEQ ID NO: 59704 - DNA, 534 bp, Acinetobacter baumannii
gtgaacgcatttgttgatatgaaaaaatctgaatacgcattagttgcttactcaaacgtagcagctaaatctgaggagcgaaaagcattagaaaaagcagtaaagaagtggctgaaacatcctggtaataaaatccgacacgttgagtctatagggcgtgatctcaatatgcctcacggcaccggacctatgtataagcgtttatgttgtcgttgcgaaacttgtgttgaatgggcgctttccactggtttaatcaaatctaagccaaaaccagttgtaaaacgtggtccagatgctcgccaattgcgtattttggcacagaaaagccaattgactccctacgctacagcttttaatgaagattgggatttactggccttagaagtggattattcagttacggcatttcaacttgaacgtatttatcaagggcgttctgaaattgatcacaactttgtttggaatcgagttaagcgtgttgctgatcgtttagtagctgaaaagttaagagctaaagggggagtgtgcaaatga

SEQ ID NO: 59705 - DNA, 765 bp, Acinetobacter baumannii; identical to SEQ ID NO: 57243

SEQ ID NO: 59706 - DNA, 549 bp, Acinetobacter baumannii
  misc_feature (531)..(540): n is a, c, g, or t
atggccttaagtgcttggggctttactgatttaccttcttataaagataaatatgatcctaatgagaaagatatagtgataaagacaaataattggttgaatgatgaggcagcagaggaaaaaactcagcaaggtcttactgcctttgtagctcttgatgacgcattcatgagtattgcatcacggatttatttaattagaaatgccaaggaaacgattgatctacaatactacatttggaccaatgattttgtggggaaccttattttacatgagctgctcaaggcagcggatcgtggcatcaaagttcgcttattaattgatgatcaaaacggtataaagcttgatggtatattaagaagccttttacagcataccaactttgaaattagattatttaatccttataaatttcgttacttacgtatcttcgattatctcttccgatttaaaaaagtaaatcatcggatgcacaataagctcattattgcagatggatcgattgcagtaacaggcggtagaaatattagnnnnnnnnnnaaatattag

SEQ ID NO: 59707 - DNA, 330 bp, Acinetobacter baumannii
atgaacaaagccattatggaaaaaaccacagtgcatagagctatgtatcgtaatgatctaggctgggtggattttgagtatggcagtgataaacagggcattaagcatattatcaagcgccgtatggaaagtgatggcatgacatatgatgaagttgtgcatatgcttgtggatactattgtgcaaacaatcgctcaaggtagtacacaacggcgtacagaacgtggattatctacaagaataaatattgtatttaattcgcatgaagcgtcattgattaagcgagaaggtagtaatgcatggctgcttacagcttttgaagtgcattaa

SEQ ID NO: 59708 - DNA, 591 bp, Acinetobacter baumannii
atgcatggctgcttacagcttttgaagtgcattaaaaaaagcccggtagttagagatgggttgcgacatcttctaacctacacttatgaccctatacgttctcgtgtcataagtggagcgggctttgtatatataataatccatgcatttcttattttcaaatatggaaccattcacgcttacatatatacaaaagcaatacccttaatacagttcttattaagggtgttttttatgcaaattcaaatcggtattgatattgtcttaattcttgcatttttagcttatctttccgttgttacaggatggaatagcaagaataaagctgcgtatattaaacaattccgtcatgtacctataagcctcttatttaaagaaatcagatatatgtatttcataagtatggcatgtgtattgatcactattattcttgttgattggcgaatctataacgttgcttcatattttgatgcattaagcgtttcattatggatattcataatctatttcaccattttttcaacttaccagatcggcactgcaatactagtaaagcttttgatgattttcagtaatagagcaacttcctaa

SEQ ID NO: 59709 - DNA, 339 bp, Acinetobacter baumannii
atgatcacatctaaaacaattttagacatggttgagtactggcttaatcatccggtcaatgggaagtatggttctgattttggtgcacctctttatgatttgctaatggcacctttagactcgagggtggcagatagttttcttattaagatgaaaaaggatctaccaatattatctgagcttaactctgaccaattagccctgtattcacaaaccgaaggatttgagacggttcatattcatttaagcatcatgaatgtgaatatagatcttaaccaagtagcagaccgattgggtaaatcagtaacaggtgagacatatgacattaacgcaagctga

SEQ ID NO: 59710 - DNA, 543 bp, Acinetobacter baumannii
ttggcaacaccatatataacaataggctgcccgaccactggtggcggtcaagtaatttctggaaacagtatgtttctaattgacggtattcccgtcgcctgcgtcggcgataaagcaacatgcccaactcataaagtcgttgctacgattgtctcaggcgatccatacatgcaaatttttggtaaggctgctgctcgagtgaatgactcactttcatgtggctgtaaattactgcctcaacaaaacttagttgtgcaagacaatggaggtggagccgttcaaggttctcaagcaagtaacgctactcaagatagctttatgcctcagactgatgaacacgggattaaatttcagttaaaagaccaagaaacgggtaaaccacttgcacaacaatacttcaaattacaaggtcctgatggcagtgaaattgaaggatttactgatgaaaatggatttacagagctaatcaaaacaggcaccgaagcaaaagaaatcgacttaacaactttcgatttatctcagccaatggctaagtgggaataa

SEQ ID NO: 59711 - DNA, 225 bp, Acinetobacter baumannii
gtgggtgaattatcagaaaaagttgataaacagaaacgcttgcaacaacttagagaagaacgaaaaaaagaactctatacgggtttggtaaatccggtgaagagctttgattcagttcaacaacatgctgaacaaattctgcaatccatggatcagccaagtgtaaaagagaaagctaaaaagccgaaaaagtcttttggcaatatctttagtgtatgggggtaa

SEQ ID NO: 59712 - DNA, 246 bp, Acinetobacter baumannii; identical to SEQ ID NO: 57264

SEQ ID NO: 59713 - DNA, 363 bp, Acinetobacter baumannii
ttggttaatggtttttttgaaaatacaaataaaaaaatttacatcagaggtaatggatctttaaaaattaaaattaatgaaaatttatttaacttagatattttatcttcaggtgaaagacaaataattattcttattggcaacttaatttttaatgattcagtatccaataaaaaaatatttattattgatgaacctgaactatctctgcatatttattggcaagaaatatttttaaattcacttattgaaggttcagaggatatacaatttattattgccacccattccccctctattgtttctgaatattcagatttcattattgaaacaaacagtaatcctgaagattttattaattaa

SEQ ID NO: 59714 - DNA, 414 bp, Acinetobacter baumannii
atgcaagttttaatggctttggcatacctctttacagggcatgatatgggcttacgtgacgaaattcaggcagatattgccgaagcatttaatgatgatttagcggacgccgttcatacctttacatgtgagcggatctcaaaaactaattgggatcctaaaactgaaacatatgttgaagttaaagaaaactattctggccgaggtgtactttttggctcatacagtcaatatgagattgagacgcttggagtgctggctactgataaaaaagcaactgtgctgcaaaatgaagtatccatgactccaaaaattgacgatgaatggctaacagctttaggctcatttcgagttatccatattcaacaagatccagccagtacaatctggaaatgtcagcttcgaaaagtgtag

SEQ ID NO: 59715 - DNA, 615 bp, Acinetobacter baumannii
atggaccctataagctttactcggcctatcgatgaacaatatgtgagtacgggcttgcaaaccgcacttgctaaagcatttaaacaagtatttgcacaaaactttgaacagtccatacaagatttattggattacggttgtcctcatatcggtagtaaaacagttgtagaacggttctctaaacaaaacggacttgttgtattacgccgaaataacacctctgacacgttaatgcgaattatctatgccaattggagcagcatgggtaataaaagaggattagcgtttttagagtttgttttacgaatgttgtgggggaaagatcattttcagattatccggctatggcatagcttggaaaagctaaaagaatatccagcctatttgtctgattttgaaaagccaaattacttcttaacaagtcggattagaattgttttagataaaactgttgatgcaaatgaagtggtagagctgtcaccgatattacggcgtttagtaccagcaaatattgtcgttaaagttcactcaatggcgtttgatagagatttaggcactacaagctttgcagcggcaatagcagctaagccttatgcagtctataacttcctttaa

SEQ ID NO: 59716 - DNA, 459 bp, Acinetobacter baumannii
atgcaacaagctcaagacaatgttttagtaggaatcgcagaacctatcaatggtcagggagaaaacttattaattgatcatttcttaggatatgcaagccatgaattagaaccacaagaaattgataaagttgttaatggggaagtggttgaaggcatcacggaatatgctcagggccattactataagatttcagcaaatcctgaaaaccaaaatgcaaaagattttgaaatcagtattcattttcaggatggcccaattccagaacatggtgtgaatggggttaccagtgaagcattgttaaaagtacttattcaccgtactaaaaccttggatgaaaaatttccgagtgagttcaataaacaagccattatttatatggaaagtgcgctagaagaatttaataagcgtacagctgaacgccgtgctcgtggtgttgaaggcacacttgtaaagtaa

SEQ ID NO: 59717 - DNA, 279 bp, Acinetobacter baumannii; identical to SEQ ID NO: 53681

SEQ ID NO: 59718 - DNA, 258 bp, Acinetobacter baumannii
gtgcaagataggaattatgatgatttgattttaatagataaaggttattttcttaataattcatatgtttctatagagaaatatatgaattataactatagattattacataattttattaaaaattttttaaattttatgttagttaaattaaattgtgtggatggccctattgattcttttcttattagggaggcagataaatatttagaatcctctgatgatttatttgtcatttttaataagagtaatatttaa

SEQ ID NO: 59719 - DNA, 321 bp, Acinetobacter baumannii; identical to SEQ ID NO: 57247

SEQ ID NO: 59720 - DNA, 201 bp, Acinetobacter baumannii
atgactgacttaatcgataaggcacaagaaagtgctgattatttattgcagcaagaaattgcaaaccgatgccgttttgaaggcgaatctgaaaaagaatgtgttgaatgtggtgaagaaataccagagcgccgccgtgcacttggtggggttaaattctgcattgaatgtcaaaccaagatagaacgtaaacggcgctaa

SEQ ID NO: 59721 - DNA, 456 bp, Acinetobacter baumannii
atgaacaaaattctattatttagtttgattcttattagtggtattgctggatgttcaaatgaacccgaaattatattgccaaaagtctctcaagtcggtgtggaaaaagccgaaaacatcataaaagaagcagctctccaacctataaaaacaattgatagtactgatagtcgtgataatacaatgaaaatatatcagtttgatggtgttcatacacaactagagtttagtgaaaattatattctgatttcctggcatcaacatgataaagcaagcatagataaagcagtccgtttaggaatggcaacacttggtgatgatgctggctattttattcataaagtagatatgcagggagaacatactgaatattcaattcaagggtataagttagtccaaaatttatgtgtctctgaattgtgctcaataaaactggaaagaaaacctcttatataa

SEQ ID NO: 59722 - DNA, 342 bp, Acinetobacter baumannii
atgaatcaaattgatcaagcaattaaccaggaacacatcaaaaacccaaatgaagaagtagtggctttagtagtcccaattcaaatgggtgaacatatgattactcatatcactgttcgtaagcctggtgtcaaagctctaagtggtacaactctgcaagcaatttaccaacatgatgtagatgctctttgcaaggttcttcctcgcgtcacatcaccatcacttaccgtacaacagatctaccaaatggatactgtagatttcgccaatttaggagggcatttggtcacttttttgtacccggaagcagtacagaaggaaatcaaggctcagacgatttag

SEQ ID NO: 59723 - DNA, 285 bp, Acinetobacter baumannii; identical to SEQ ID NO: 57978

SEQ ID NO: 59724 - DNA, 2664 bp, Acinetobacter baumannii
atgatcaatacatcgccattgctgaactatgtctcaagtcatcatgatattaaagccattaatcagtggcgaacggatgtagaaaagcaattgcaagattcatatgaaaatgggcaatctattcgagaaatcattaaagctcgttcagatttagtagatgaagcgctcgtctttttatggaaacatgcagaacttgaccagtcaaaactaggtctttttgcagtaggtggttacgggcgccgtgaaatgctgccctattctgatgtagatatcatgattttgtctgaagatgaaatcagtgaagaaaatgaaaagcgcatctctacatttatttcctctttatgggatgtaggaaatttcaaaccaggtattagtgttcgtaccattcaaagctgtgttgaacaagccgctaccgatttaactgttgccactacattaattgaagcgcgtttaatcacgggcaatacacaacttgcgaaatggcctcgccgtattgtttcacagacatggacagacaaaacattttatgacgcaaaaatggccgaacaagccaagcgttaccaccaacacaacaatactgaaagtaatttagaacctgacattaaaaatgcaccgggcggtattcgtgacattaatcaaattggttggattgccaaacgccacttccgagtgaaccgtatctatgacttagtgcatttaggtttcatttcagagtttgaattggctgttttagaagaagctgaaagctttctttgggaaattcgacatcatttacaccgtttagccaaacgtgatgaaaaccgtttactctttgaccatcaaagagaaattgctgctaaatttggttatgttcgtcaagaaggccaacctgtaaattacggcgttgagcaattcatgaaacgctactaccgtacggcgcagcaggtttcaacactcaatgaaatgttactggcgtattttagtgagtcagtcattactcctcgactccccaactatgaacgcaaaattgaagttgttaacgatcactttaagattgtcgacaataaacttgcagtacaacatcataaaatttttgcagagcatccgagcgcgatcttagagttattctatattttagcgaatcgaccagatattgaaggtattcgcgctcgaactttgcgcttactcattcttgctgcgaaacgaattaaccaaagttatcgtgataacccagagcatcaagcattatttatgtcgattattcgctcaccatatcggctatacgataccttggtcgcgatgaaacgttatggtgtgttaggaaactatattcctgcttttggtcaaattatgggtcttatgcaatatgacctattccatatctatacggtcgatgctcacaccttattattgctgcgtaatttaaatcgttttagagaacctgaatttgccaaagaattccctgtagtaagttcggttttccaacgtcttgctcgtcaagatattgtctttattgctgctttattccacgacatcgcaaaaggccgtggtggtgaccatagtgaacttggcgcagaagacgcgattgagtttggacgtgcacatggctttacagagcgtgaatgcaaattaattgcatggcttatacaaaaccatttgctcatgtcactcacagctcagaaaaaagatatttctgatcctgacgtcgtgaaagattttgcagaaaaacttggcgacatggagcatcttgattatctctacactttaacagttgcagatattaacgccacaaatccaaaactttggaacacatggcgcgcatcgcttatgcgtcaactttatacgcatgcccgtgatgtaatccgtacaggtttaggtcgtcctgttgactaccaaatgttaattgaagacaccaaatttgcagcaagtgaattactggtaaataactttgcattggctgatgtcgaaaaagtatggcaagaacttggtgatgaatacttcattaaagagtcggcagatgaaattgcatggcatacacaagcaattttaaaacatggtgataatccagagccattagtcctcttgcgtgcccaccgtaaagcagctcaagatgcggtgcaaatctttatttatacacgtgaccaacctaacctatttgctactactgttgctgttttagaccgaatgaacctagacgttcaggacgcaaaaattatcacagcaagtacagcatttagcttagacacttatgttgtactcgatcgtttcggtacattgcttaccgacccagaacgtgaagaaaccgttaaaaatgcattagtgaaggcgcttagccaaccagaccaatacccaggactcatgcaacgccgtattccgcgtcaattacgtcacttcgatatcgaaaatacagtcgacgtaacattaaatgaagccttacagcaaaatatggtcgaaatttcaacactcgatcaccctggcctacttgcacgcgtgggtggtttatttatgatgcaaggtttagacatccattcagcccgaattgcaactttaggtgaacgtgccgaagatattttctttgtcaccaaaaaagatggtaaaccgctgaataacgaagaggtcaaactcttctcggaaaaactgaaagctgcattagatgaagcatctaatcaaatttgtcagcactga

SEQ ID NO: 59725 - DNA, 504 bp, Acinetobacter baumannii
ttgaaacaagttagggcttgggacttcggggcaaccgaaaatgaaggcgactttacagtaggtgtgcgagaagctctaggcgcagatggttttacttacattgtcgatgttacaagaggacagcttggtccagacaatgtgaataagcgtttagaacaaacagcaaaaatagatgggaaaaaagtttctgtgcgtctaccacaagatcctggtcaagctggtaaatcacaagctagttcatttgtgaagcttcttgcgggttatagcgtgatagctaagccaatttcaggtgacaagcttacacgtgcacaaccatttgcggcccaagttaacgtaggaaatgtacgaatgctcaaaggtgaatggaataaggattttattgatgagcttcgtcattttcctaatggcacacatgacgaccaagtggatgcagcttcagatgcgtttaatgaattacatgaaggttttgaagccttctttgctgatatgggatttgctcgatga

SEQ ID NO: 59726 - DNA, 651 bp, Acinetobacter baumannii
atgatcgcattcaatcacgttgttccggtacttaatctgtcggtgttcaacgtcagacgggcaccggccttcgcgtttgagcagagcaagcgcgcgaccataggcgggcgctttatccgtgttgatgaatcgtgggatctgccacttcttcacgttgttgaggattttacccagaaaccggtatgcagctttgctgttacgacgggaggagagataaaaatcgacagtgcggccccggctgtcgacggcccggtacagatacgcccagcggccattgaccttcacgtaggtttcatccatgtgccacgggcaaagatcggaagggttacgccagtaccagcgcagccgtttttccatttcaggcgcataacgctgaacccagcggtaaatcgtggagtgatcgacattcactccgcgttcagccagcatctcctgcagctcacggtaactgatgccgtatttgcagtaccagcgtacggcccacagaatgatgtcacgctgaaaatgccggcctttgaatgggttcatgtgcagctccatcagcaaaaggggatgataagtttatcaccaccgactatttgcaacagtgccagtccgagaacatgctttccatggtctctgagctcgcctttgggaccgacatatcggtag

SEQ ID NO: 59727 - DNA, 411 bp, Acinetobacter baumannii
atggataagaacgcattacaagaacaattcgaattaatagcgattcagaacggctggaatattaataaatatcctgcgggttgggacagtcatagtgatgatgagtatgttgatgagttggtaaatggagcttggtgggttttccagcaccagcaatcgaaagtggatcaacttaaaggtcagcttatcaaattgggttttactgataatggtggcccattaatgaaaccgccgctagggattgcgccaaaatttgatttattggatgagctaagaagttcaattggaaacctagttcaaaagtataaacacgatgctcatgcttcaagcctttttggtgatcaagataaagcgcgaatttataaacgctttgctaatcagttggaaaatttactgaaaggtggtgcttga

SEQ ID NO: 59728 - DNA, 801 bp, Acinetobacter baumannii
atgaatgcaatttctaattttacttttcataatgattataatgttcgcgttcagttaattgatgctgagccgtggttttgtcttgctgatgtctgctgtgttttatcagttgatcgtacttctcgtttattacgtgatttggatgaaaaggggttggcagattgccacacccctacaaatggtggaaatcaaaagattaaatttgttaatgagccaaatctttatcggatcatctttcgttcaaataaaccagaagcaaaacaattccaagattgggtatttaacgaagttttgccaaccatccgcaaaacaggcaaatacgaagcaccaaaacccgttgagaaacgtaattaccttaacaatagtgacatgaacaatattaaacgtttgatatggacatgcgctgatcatttcggtcacaaaggatcctttaatcaagcaatttgggcttgtttgcgagatgtgactggtgtgcctagtccagcaaagtttgaagtggagcacttgccagtgttggcggaggaatttaaacgtattttaaatattgttcagccgtttcttgatatgcagtatgaatgccagactcttttaattaaaagggtgattcgtgggcgtgccgatcatacggtattgcaagctttactagataatatgcgtaatgctgccaatcaatctgataatcagttcaaggaagcattacaaaagcagttgcctgcaatgtttaatcaggagtgtttgaatttgattaatcgcagacctaatcactatgaccactatgaatacaatgaacgattgatttga

SEQ ID NO: 59729 - DNA, 267 bp, Acinetobacter baumannii
atgttgtttgatgaacctacttcggcactcgacccagaaatggtaggcgaggttcttgaagtgatggtgcaacttgctcatgaaggtatgaccatgatgtgtgtgacacatgaaatgggctttgcaaaacgggtatctaaccgtttaatttttatggatgaaggtaaaattcttgaagattgcccaacccatgaattctttgataatttagaggcacgtcatgagcgcgctaaaattttcttggaaaaaattcaggcaatgcactaa

SEQ ID NO: 59730 - DNA, 405 bp, Acinetobacter baumannii
atggttaatactgattatgtacccgagtggtacatcacacctttccaacatgtgaaatacacgcttgctagaaatcaaatgcatatggatctgctgtttgaaaatatggatgaagctgatcaatttttagatatgggggcggatgcacaggtaagtactttttctgatggcgaatatgcaattgtccaaattggagatacagcggataaggagcaaatacaagtttatggattgcttttgcacgaggctgttcatatctggcaaatagtcaaacggcgaatgagtgagcgcgagccaagtgttgagtttgaagcatattcaattcaagcgatcgctcaagacctatttgaaatgttcgaagctagtgaggtaaatcatgggatggaaggggaaaaagccgactag

SEQ ID NO: 59731 - DNA, 1113 bp, Acinetobacter baumannii; identical to SEQ ID NO: 57087

SEQ ID NO: 59732 - DNA, 507 bp, Acinetobacter baumannii; identical to SEQ ID NO: 46629

SEQ ID NO: 59733 - DNA, 465 bp, Acinetobacter baumannii; identical to SEQ ID NO: 52864

SEQ ID NO: 59734 - DNA, 327 bp, Acinetobacter baumannii
atggtggctaaagctcaattgaaaggtcgtcagcaagagttttacgctccaccgctacaactagaacacaaagaacctaaacacgttcctgtgagcaatgacgaggctcaaaagcatctcaaatcattgatggaaagattaaaaatcaatggtcgtaaacctgcaccagttcaaaaacttgaggcaaaagaaaaagagcctgagcttataaaagagttgggccctgatcctttcgataatccacacgaatacgcagagatgtgccgtcgggagggtatgccaatccctagaaatattcttcagctaattgatggggcgaatgcatga

SEQ ID NO: 59735 - DNA, 318 bp, Acinetobacter baumannii
atgtcatggctcatgattttaggactggcagctatcgtattttttaatcgttattattttttggaaccaaatgtaaaagttaaattaccagtacttatgaataaaatgttgaattattcagctccttgtttattaagtgctatttgtattccagtaattttttttgaaaataatgaattaagaggatttttagataatccttacttatacgcaacgatattttgtactgtcgtggctttctattttaaaaaagtgttaccgagcgttctgctgagcctagcatttttttattttataaattttctaataaatcattaa

SEQ ID NO: 59736 - DNA, 537 bp, Acinetobacter baumannii
atgggttcaatgaacgctattcctcaaactttcgagttttggcaagatcggcgaatgccttatgtggaaacccgaaggtcttgttttggcagaacatgttataagtctcatagccatccaacattttcaattggtgctatagatgaggggaatagtgtttttcaaagttcttttggcactgcacaaaagatcacggcgggtacattagttattgtgcccgcacatgttgagcattcatgtaatcctatgccaaatcaggcatggagttaccagatgcttcatttagatctagcatggttaaatcaactgtattcagaatttcaagagcaaggtcttgatttacatatacctcagcataagcctctcattataaaagacgaatctttatatgaagcttttactgaaatgaatgagacattatttgatgcgcaaaaattaatttttgaaaaaagagcaggctcttctccattgcctgattcatttgttattacctcattttattttagaagaaatacaaaagcctcaatatttatataa

SEQ ID NO: 59737 - DNA, 1281 bp, Acinetobacter baumannii
atgaacacttctctttttccatcaatgaccttggatttagaaggtatgtttaaaccaatctcactgtatatagggttgagatatactcgcgctcgacgcagtaatcattttatttcttttattgcattggtttcgatggtcggtttgacacttggtgtcgctgtactaattacggtactttctgtaatgaacggtttcgaccgcgaattaaaaaatcgtgttttgggaatggtaccgcaagcgacagtttcatcgacgcaaatccttacggattggcctgaactggttaaacgagttgaaaatcatccccacgtgacaggagttgcaccttttacccaattgcaaggtatgttaactgctcaagggcaagtggcaggtattatggtgacgggtattgatcctaaatatgaaaagaatgtctctatcattcaaaaccatattgttgccggtagtctcgactcacttaaaaaaggtgaattcggtatcgtacttggtaaagacatggccgattcgcttggcttacgtttaaacgatagcgtgacattggttttacctgaagcgactccatctccagctggtgttgtacctcgttttaaacgctttaaagtggtaggtattttcagtgtaggtgctgaagttgactcgatggttggatacattgctttatatgatgcttcaaccttattgcgtttacctgatggcgctcaaggcgttcgtctaaaattagatgatttttttgccgctcctcaagttgccgatgacattgtgaaaaatttaccaagcaatttctacgcaaccaactggacttatacacatggcaacttatttaatgccatccaaatggaaaaaacattagttggtttattgcttgtactgattattgttgttgctgcatttaacattgtttcgtctttagttatggtcgtgactgacaaaaaatcagacattgcaattttacgtactttaggtgcatcgccatctatgattactaaaatctttatggtgcaaggtacggttattggtgtgatcggtacagttgcgggtacggttttaggggtaattctggcacttacgatcagcgatattatttcttggtttaataatgttctcggacttaatctgttcgatgcctattttgtacattacttaccttcttacttaagatggcaagacgtgacaattattgtgattgtttctttactcttaagtttcttggcaactatttatccggcgcttcgtgcagccaaagttcaacctgccgaggcattgcgttatgagtaa

SEQ ID NO: 59738 - DNA, 237 bp, Acinetobacter baumannii
atgccagctcctgatccatcgagtttcaaaactaacaactcggaaagcagttcaactgataatgaaaaaagaagttataaaaaacagtacgcaacgcgtaataaagtgagtgcttctagaacatcaaataaacgagtagtaagtccagcaaaggccaccgcagtaaaacctaaaactgcacctgcagccactgtcaataaatcaaaaagttcgccttttgaccctttaattaaataa

SEQ ID NO: 59739 - DNA, 2889 bp, Acinetobacter baumannii
atgataagtttatcaccaccgactatttgcaacagtgcccttcagctgactacggcgcgctttctgggaacgtttcttcctgatctccttcaaattccctcattcatccgtttttacattgcggcacagttgaacatcagccgaccagagatcctttcccggtatgctgaaagagacaatacccgctgggagcatcaggggcttatcaagctctattatgattatcatgattttggtgatttcccctggtcattcagactgaagcgtttgctctatactcgcgcctggctcagcaatgagcgtccaggtctgctgtttgattttgctaccgcatggttgctgcaaaataagatcctgctacccgcagcctcgactctgacaaggctgattggcgaagtacgcgaacgggcaagtcgacgattatggcgaaggctggctttgttgcctgacagctggcagaaaacacaactggacggtttacttgaaatacctgaagggcagcgtatgtcggtgctggaagagatgcgaaaaggtcctgtcactatcagtgggccgtcatttacagacgccctggagcgatatacccgactgcgtagcatggagttttcccggctgaatttctccggtctgcctgccatccagctgcggaatttggcccgttatgccggaatggcttcggtgaaatacatttcaagaatgcctgacgaacggcgactggccgtgcttactgcgtttgtgaaagcacaggaaatttcggcgcttgacgaggccgtggatgtgctggatatgcttattctggatatcacgcgttctgcaaaaaatatcgggcagaaaaagcggctcaggacccttaaagatcttgatcgtgccgcgctattactggcacgggcatgcacgttattacttgatgagaacaccgatgaagcagctctgcggcaggctatttttcgccgcataccaaaggacaaactggctgaatccgtcggcaaggtaaatgagctggcgcgcccgcaagatactcattttcaggatgaaatggtggaacaatatggacgggtgaagcgcttcctgtccgcgatgttgcgtgacttacactttcaggccgccccggccggggagcacacgttgtcagcaatccattatctggccgaactgagtggctcaaaaaagcgaattctcgacgatgcaccagagcaaatcatttccggcccctggaaacgtctggtctacgacagagatggtaggattctacgagcgggttactcgctgtgtcttctcgagcgccttcaagattctttgcgccgtcgtgatctctggctggagaacagtgaccggtggggggacccgcgtcaaaaattgcttcagggagctgaatggcaggcacaacgcatcccagtatgtcgggcgctgggtcatccatcagacggaactaaagcagcagaacaactggctacgcggcttgatgacacatggaaatcagtggcttcacgttttgcctgcaacgcagcggtcagcataagcaatgaaggtaagcatccctcactgacgattagcagtctggataaactggatgagccaccggcactgatacaattgaatcgtcgggtaagagaactgatccctccggttgatctgactgagctgttgcttgaaatagatgcccgaaccggttttacccgcgaattcagccacgtcagtgaatcaggtgctcgggcgcaggatctccaggtcagtctgtgcgcaacactgctggcagaagcctgcaatatagggcatgaacccctgataaagcataatattcccgcgcttactcgccatcgtctgagctgggttaaacaaaattatctcagggcagaaacgctggtcagcgctaatgcacggctggttgattttcagtccacgctgccgctcgcggggtactggggaggtggtgaggttgcctccgcagatggtatgcgttttgtcacaccggttaaaacggttaattccggaccaaatcgtaaatactttggttcaggacgcggtatcacctggtacaacttcgtctccgatcagtactccggtttccatggcattgtcgttcccggtacgcttcgtgattccatctttgtactggaagggcttctggagcagcagaccgggctgaatccggtagaaattatgacggacacggcaggatccagcgatatcatttttggcctgttctggttactgggctaccagttttcccctcgtctggccgatgcaggcggggcgatattctggcgggcagataaaacggcacattatggtgccctgaatgagctggcccggggatgtgttgaactgtcaaaaatagaatcccaatgggatgaaatgatgcgaatggcgggctcactgaagcttgggaccatccatgcatcagagcttattcgttcactgttgagaagtagccgaccatctggtctggctcaggcgattatggaagtgggccgggtcaacaagacgttgtatcttctcaactatatcgatgatgaggattaccggcgtcggatcctcactcagctcaaccggggagaaggacgccatgcagtggctcgagccatttgctacggacaacgtggtgaaattagaaaacgctaccgtgaagggcaggaagatcaactcggtgctctgggtctggtgaccaatgcggttgtgctgtggaacacactttacatgcaggaggcgttgtcacatcttcgcaaatcgggggaaacacctgaagaggagcatctggcaagattatcgccgctgatacatggccatataaatatgctggggcattatacgttttcgttaccggaagatattctgaagggcgagttaagaccattaaatttcaatacaaacaatgaattaacctcttag

SEQ ID NO: 59740 - DNA, 651 bp, Acinetobacter baumannii; identical to SEQ ID NO: 59726

SEQ ID NO: 59741 - DNA, 381 bp, Acinetobacter baumannii
atgggtattaaagaaaataatgctcgtgcgaagttacttgcgaagacacttgatgaagcgactggtaaattgcttgacaatgacaagtctccatcacgtcgtacaggcgaacttgacaatcgtggcagccacttctacttgtcactttactgggcagaagcacttgctgcacagaacgaagatgctgagttgaaagctaaatttgctccacttgcaaaagcattagctgaaaacgaacagaagatcgttgctgagcttgctcaagtacaaggtaaaccagctgatatcggtggttactatgcagttgacccagcgaaagtaagcgctgtaatgcgtccaagtgctacatttaatgcagcgctttcaactgttcaggcttaa

SEQ ID NO: 59742 - DNA, 1104 bp, Acinetobacter baumannii
atggaagcagggctcattaagcaacaggatttcgaaaaccggaaaacagctatcattcaagctgctcaagatcaacgtaatcagattgctgccgaatatgctcagaatgctcaggatattgaagataagtatcaacaagatcgtctgaataccataattgcttttggtgggaacatgatgggttcactcacatcgatgtttggttcaatgtttggtgagcaatcgaaagcatataagattatgttcgctgcagataaagcatatgcgattgcagctgcaggtattgccattcagcaaaatattgcagcagcttcaaaagtaggttttcctcttaatttaccgttgattgctggggcggttgctcaaggcgctagcattattgcaaacatccgtgcaatcaaagatcaaggctttgctgacggtggttacactggatctggtagaaaatatgaacctgctggtattgtccataaaggagaggtggtctggtcccaagaagacattaaacgctgggggggagttggtttagttgagaaaatgcgtaagagtgcaaaccctgaagcttttctcaataacaatgcctcggctgatagtgtcatgcgccgtgcattgatgagttctaatgcctttatagaaagccaaaagcaagctgacatctttaatcaaccggttcaagatactcagattatctataaaggtaatagagacacacctaagttggcgtcttcggcaaattctgacttattccatgatggcaaggtctacttctcatcaaatggtttagttcaggatcgatcaaatcttgaggatgttcaagacttcacgataagtcaagcttctcgacctcaagctgagattatgccttcaattgaaccttctacaccgacaatcaatttcaaaattgaagtgattaatcaggtgagtggagcgacagttgaagctgaacaactggatgagcaaacagtccggatcattgttacagatgaactggataagcagcttccaagaaaggtaccgaaacttgttagtgatcaaatcggtaatccaaactcaactattagtcggtctttgactgagaatacgacagcaagacggaatcgttaa

SEQ ID NO: 59743 - DNA, 129 bp, Acinetobacter baumannii
atgtatgcaaatgcacgaaccaaaaaaggcggtattttaggtaagatttatcctaccgacttacaaaaagatcttgaaacgattaaagaactttatgcgcaatatgatattgatgtaaaaattaactag

SEQ ID NO: 59744 - DNA, 240 bp, Acinetobacter baumannii
atgggacgagctattattacaacagatgctcctggatgtagagaaactgtagagcacgatggaaatggttatttagttgaagtaaagtctgtcactagcttagagatggcaatgagaaagttcattcagaatcctgaattgactgaaattatgggaacacgttctagagagattgcattacataaatatgatgtacatcaagtgaatcatcatatgatgacagaaatgggaattaaataa

SEQ ID NO: 59745 - DNA, 1023 bp, Acinetobacter baumannii
atggcaacagggaatagttacggtgggctagagcattgcaatagcacaagtctgattactccacgagatgatttaccgaaatcgaatgaacctactgaaccttcaaaagattatcaacgtttcttaggtttatgcagtcatgaatattttcattcttggttagtaaagtttatccgcccagaaaattttgcgaactacaatctgcatcaagaaggctatacctcgctactgtggatttttgaagggtttacttcgtattacgatgatttaattttattacgtagtggcgtgatttcccaaaagtcttatttagatttgttgaagtcacagattgatcgctatttgcaaaacccaggacgttttgttcaaacagtagcagaatcaagttttgatgcttggattaaattttatcgtcaagatgaaaattcgaataatgcaggcacgagctattataacaaaggtgcattagttgccttatgtttggacttaggcttacgtttacgtggttctagccttgatgccttaatgcgtcgattgtatgaaaatacgcaaaacggtgttcaggttaatgagcgtacaatttttgatttatgcgaagagctaacaggcgatagttgggtagagcaaatcaatcatttgattaatactactgaagagttaccactcgatcagttattccctgagtttggtttaagttatacgcttaaaaatgataagactttagcttatggtttaaagctagctgataagcctgaaggtgtgttagtacaaaatgctcaccgtgagggagctggtgctaaagcgggtatttctgctaatgatgtcattattgcaattgatggactaaaagcgaccacaaaacttattgagaaatatgctaaacaaaagggtaattactcagtcttggctttccgccgtgatgagttattgtcgtttgaagttacaagtgacagcataaacttaactgaagttgaacttattattgaagatcaaagcaaagctgacaaatggttaaaggcctaa

SEQ ID NO: 59746 - DNA, 162 bp, Acinetobacter baumannii; identical to SEQ ID NO: 58219

SEQ ID NO: 59747 - DNA, 171 bp, Acinetobacter baumannii; identical to SEQ ID NO: 59608

SEQ ID NO: 59748 - DNA, 297 bp, Acinetobacter baumannii
atggacatgcgtgcaggtatggatacgaccatggctcaggtggtgagagcctttggctacatcaaaccgcattgtgcttacctgttctgtaataaacgtggccatcgcatgaaagtgctggtacatgatggattgggcatctggctgtgtgcccggcggctggaacagggcaaatttcactgggctcaagttcaccaaggtgaaaccgtggccctcagcccggaacagttacaggcactgatccaaggtttgccctggcagcgcattggacgacagcaggtggtgacgatgctttaa

SEQ ID NO: 59749 - DNA, 327 bp, Acinetobacter baumannii; identical to SEQ ID NO: 59734

SEQ ID NO: 59750 - DNA, 261 bp, Acinetobacter baumannii
atgatggatatcgaagcgaatgcttcattcatgttctcggccacagctgctggttggattgatgcaatcaaaacccgtgatgtgtttacactgaccttcgacatcagagacagcaaaggaagtaaatattcgttcaacttcccgcaattggaagtcatggaagccaatcacccggatggtggtggtgatgacatcattactgtagatatcaactttgcccaagttcgtacagcgccaacaattgtacgcgctcttgtgtaa

SEQ ID NO: 59751 - DNA, 288 bp, Acinetobacter baumannii
atggataccgtgcaatccttagttaatttaagtcctgttgatactggagcataccgtgcttcacatattgtttcgattggatctgctgatttcggcgtgcgtgaacctgaatcaaacccaattcaagatgcggctattcaagctgtaaaaattaaattgggtaatttggtctatattcagaacaataaagcttatgcaccccgtttagaaaacggttggtctgatcaagcgccacaaggtatttatggcctcacgtttaactttatttctcaaaagtacggtggctaa

SEQ ID NO: 59752 - DNA, 948 bp, Acinetobacter baumannii
atgaatttaagcataatgcaaattagatcaacagcttgtattttggtattattaacccatataagtgcagcattttatgtcaataactcaatcggatttcaaaccccattaattacttttattaatcagttttcaagatttggaacccctcttttttgtgttattacaggctttctttttgcaaaatatttttttaatggtattaatataagatatttttatcaatcacgaataagtaaaattttaataccttacctagtatggagtttaatttatactattattgtgtttttcttctcaaagaaacttttttttattttcattcaagaacctataataagcttactatctggtaaagctttttaccacttgtatttcatgtctacgattttacaattttgtttaatcttccccctacttcgactacttcgtaatataaatgcctttatactattaatatctgcacttattcttaacattatatccctagtttttctatacaaatcagatatttactttatttttggcataattttctttaaatttagagattttaaattaaaccttaaacttaatttaacaattcttgcaacaataacgttgtttatattgtttgaagtagtaataaataaaaaactttttgagtctacaagattagaaaatttaatttacattccagttttatttgtaactctctacagtatatttaataaaaaaatatcaaataacctaattaaaattgggtattactcaatgggtatttatttaattcatccaatactaatacttgtactaaaaaaaataataccaaatattttctttcaacaatacccaacatcattgtttattttaatacttttgacaacaatatgcttttgtatggtattttgctcaatcatttcaagatttaatttttctaagttgctaataactttaccgaaaaaataa

SEQ ID NO: 59753 - DNA, 537 bp, Acinetobacter baumannii; identical to SEQ ID NO: 59736

SEQ ID NO: 59754 - DNA, 171 bp, Acinetobacter baumannii; identical to SEQ ID NO: 59608

SEQ ID NO: 59755 - DNA, 3147 bp, Acinetobacter baumannii
atgttgaacagtattcatcaagttttagatagtttgggtattagcccgcagaaacgtgctattcatgttcaatttacgtcttcgatattgaatgcccaagtatttctgcaaagaattgatggtgtacatgcactcaatgatggtttaaaagcagaacttttatgcctatcgacaaatgcaacgattcaacttaaatcttttattggcgttcaggctgctgtagatattgtgacggagcgaggtgagttaactcgcgttacaggcattattactcatgctcaacagggccaatcagatggaagtctaactttatataagctgaccttagaagatccaaccgcattatggaaatatcgccgtaattcacgtgtatttatgaataaaagcgtggttgagatatgggaaatattatttaaagaatggcaaactaaaaatccgctatttgctgcaagtttaagtttagatttaagcggtctaacacaaacttatgatgtgcgtccttttgtgatgcaacataacgaaagtgactggaatttccttacacgcttacttcgtagtgaaaatatcagttggctcattgatgaagctcagcatattgttccaagtaccgagacacctattcaagctcagaaactcaggttaattgatgccaatagtcaatatcagcctttagaccgtaaaacgattcgttaccaccgtagtagtgcggtcgaacaatatgacagtatgactcgcttaactgctgagcgttcccttcaacccaatgttatgcatatacaacgttggcaagcagaaatattagatcaagaagaagggattggaagtgttcaaagtaagcatcagcatagtgaacattatgacaatgctacacttggcttggagcaagcttggaactattcgcctgcatggattggtgacttaaagggtgaggatggggttactaaatctggaaatcaacaagttgaacgattaaaccagaacctcaacaattattatgaagcacaggctaagcggtttattgcacaaacaacagttcgtgatgcctatgtgggctactatttcgaattaaatgaacatccagaaatagatcagcatgaaagcacagatagaagctttttgattatctctaaaagttttttcaatcagaacaacttacctaaagacctgaatgatcgaatcaatggtttattggcgcaaagtaactgggcaatacaaaaccccgagaacagtgatgaacgtcaagcgaatcaactgattttacaacgtcgtcatattccaacaacaccagcttatagcccgcaaattcatagtccagtcactcatccacaacgcgcaaaagtggtgggacctgaaggtgaagaaatctatgtagatgagtgggggcgtattaaagtccgcttcctatttacgcgtagtgatgaccatagccatgatggtggagcaggaaccaacaacaatgacaccgattcagcttggattgacgttctaacgccgtgggctggagaaggttatggtgtacggtttttaccgcgtatcggtgagattgttgttattgacttctttaatggcgatatagaccgaccatttgtaatgggtcgaattcatgaggcacagcgccaaccaaccaaatttgataacaaaggtaagcttcctgatactaaaaagctcagtggtatccgttctaaagaagtgtcaggtggtgggtttgggcaactcagatttgatgatacaccgggacaaattagtacccagctacaaagcagtcatggtgcaagccagttaaatatggggaaattgagccatcctaaagataaagcggaaagtgaagaccgcggagaaggttttgaactgcgtacggatcaatggggagcattacgcgcggggcaaggtttattggtatccacccataaacaggataatgccaaaggcgaacacctcgatgccgaagtggcgaaaaagcaacttgaaggtagtcaaactaacagtaaggcactgagtgacattgctaaaaaccagaaaaccgatgaaatagaatcgattgaacagttaaaagattttgcctcacaaattcagcagcaaatcgctaaatttgaaaaagctttacttcttttgagttcaccggatggtatagctctaagtagttcagaagatattcacatctcggctgatgcacaaattaatcagattgctggagacagcattaatataagtactcaaaagaatgtgattgcccatgcccaaaataggctcagcctttttgctgctcagagcgggctaaaagcagtagctgcgcaaggtaaggtagaaatacaagcccagtctgatgctttagatgtgcttgctaataaaggtattacgatttcttcgacagaagactgcattgaaattagtagtcctaaagaaattgtaattactggtgcaagttcacaaattaccttaaatggttcaggaatctttccgaaaactggtgggaaattccaagtcaatgctggacagcatgtgttccaaggcggcgcatcggcaagtgttaaatctagtttgccaccaccaccaaaacgtgcacaaggtgtacttgagcttttgcacgactattcacatggagcttttgttaaaggagctggttataccgtaactgataatttgggcaaagtcgttaatggaaagctagatgataaaggatttgctcgtgtttcaggtttggcaacgggctcagtgaaggttctttttgatccagatccgcgtaatccttgggatgaggcaagtgattttaaacgcaaggtagagtggccaaatcaaaatgacgtagaaggtagcattggtattgaatctggcagtaaagggttaactgaaacattgaaaaatgactttaaaaagttgagtcaacttgcgagcaatgtgaaatctgtgcagcagaagattgaatcggttaaaaaaatcaaagatcaaggtgctaaagcattattgccaatggcgatggaacaggttttaggggggagtgatggatctaagttaagtcaatcatttgttagtcaaaatagctttatgccttcaagtcagcagagtaacccactcagaagattggctcaagcaagctctgacaaaacagcaataacaaaaatccaatcaccttttgaaacgtttgtataa

SEQ ID NO: 59756 - DNA, 930 bp, Acinetobacter baumannii
atgaataaattaatggtgtatgcctatactggtgttgtaatcacaatgctgttttggggctcggcatttaatgcgatgtcttatgtgattcaatatatgccacctctttcagcagcagctgaacgttttacaattgcaagccttggtctatttattctttttgcagctataggaaagctacgttgggccgcattacggcaaaatttagttatctatcttattattggaattataggtattgccggttttaacctaggctgtttctatggtttacaaaccacctcagcagtcaatggcgctttaatcatggccacaacacctttaattactttattgttaacaattttacttgatggagaaaaactaacacttaataagtctattggtgttgtatttggcttaagtggtgtactttttgttattagtcatggccatatttcaacgctactacatttaaaaatagcaatcggtgacttattcatcttactaggtggtgtcagtttttgtttagcgaatgtgctatcacgccgttatgtaaaaaatgctacacctttagagaccacaaccttttccatgatgttcggtgctttgactttaatcatattaagtgtaatttttgagcacccttctcaagcaattgctatggcgcctatcactgcacacttggctatgggatacgtcattatttgttctaccatgattgcttatttattttggtttaatggtattcaaaaactaggtgcaggccgagcatcaatcttttttaactttgttccggtttttagtatgttagttgcattattagctggtcaatcacttaatatctggcaacttataggcacaggtttagtcatgcttggcgtgatgagtagtggaggatttattcagattaaacgtcctgcacttatagctaagccttgcacaaagtaa

SEQ ID NO: 59757 - DNA, 1116 bp, Acinetobacter baumannii
ttgaatgctcaattcgaagctggactaattaagcagcaggatttcgaaaaccagaaaacagcaatcattcaagctgctcaggaccaacgcaatcagattgctgccgaatatgctcagaatgctcaggatattgaagataaatatcagcaagatcgtttgaacacccaaattgcatttggtggccaaatgatgggttctcttacatctatgtttggttcaatgtttggagagcaatctaaagcttacaaaatcatgttcgctgcagataaagcttatgcgattgcagctgctggtattgcgattcagcaaaatattgcagcagcttcaaaagctggttttcctcttaacttaccgttgattgctggggcagttgctcaaggggctagcattattgcaaacatccgggcaatcaaagatcaaggctttgctgaaggtggttacacgggtcgaggtgggaaatatgaagttgctggagctgtgcacaaaggcgagattgtatggtctcaagaagacattaaaagatgggggggagttggtttagttgagaaaatgcgtaagagtacaaaccctgaagcttttctcaataacaatgcttcagctgatagtgtcatgcgccgtgcaatgatgagctctagtgcctttatagaaagccaaaagcaagctgatatctttaatcaaccggttcaagattctcagattatttataagggtaatagaagcgtacctatcgcttcttcttcggccagttctgatctataccacgatggcaaggtctacttctcatccaatggtttagttctggatcgctcaaatctggatgatgttcaggactttacttcaggacgtgcttcacgccctcaagctgagattaagccttcaattgagccagcttcatcgataatcaatttcaaaattgaagtgattaatcaggtgagtggggcgacagttgaagccgaacaactggatgagcaaacagtccggatcattgttaaagatgaaatggataagcagcttccaagaacggtaccgaagcttgtaagtgatcaaattggtaatccaaactcaactattagtcgatctttgactgagaataccactgtaaggcgtaaccgttaa

SEQ ID NO: 59758 - DNA, 162 bp, Acinetobacter baumannii
atgtctgctgagactgtgcctgtacctggcaatgaagtgttgcctgcagggtcagtcgctgttgcagtcactgtatcgccatccaccaggttacctgggtttggtactgaccagctaccatctgtgcctgctaccacggttgcagttgtgccatcaggataa

SEQ ID NO: 59759 - DNA, 219 bp, Acinetobacter baumannii; identical to SEQ ID NO: 53012

SEQ ID NO: 59760 - DNA, 261 bp, Acinetobacter baumannii; identical to SEQ ID NO: 59750

SEQ ID NO: 59761 - DNA, 315 bp, Acinetobacter baumannii; identical to SEQ ID NO: 44769

SEQ ID NO: 59762 - DNA, 870 bp, Acinetobacter baumannii
atgaaagaatcatttaaaagtaaatataaagatttcacaaagaatcatcttttaatatttgcatttggttgtttaggattacttcttttaattggcacaggaattattaatatattttggggaggtagtttttttctaaatgtcgctaacaattacaatacaataaaagattatatggctctatacctttcaatgttaggagtcgtagctactttatatgccagctttgtagttatttatgcatacgatgcatggaaagatcaaaaaaactttgatactgatgtagagcttctaaaacaatgtgatgaaaatctatgtcgttttaaaaatgatatggatagaatttgtaagaaggttatatatatacatgaagtatataataaaaataaagaatttcacattgcccattctttatatagaaagcctttggatacagaaaataaatatctagaagatttttttattcatatacaaagataccttgactataataagcacgaagtaagacttaaatctctacttaatgaatattatagtttggccgatgaattcttgtatcttaataatgattttataaataatatctatcttcccatatataatgaaataaaaaatatcagcactataggatggacagattcaactttgatgacttctttcctgtcaagagatagacaaaaagacaagctagttcaaaaccactataaaacactaaataacttttataggaatgtttatataattgaagaagtgaataaatcaactggtcaaaatgttaatatttttttaaactacagtgagtcatttgatttgatgaataaacattacaatgatatcaatgacataataaagaatcgtatgagagcataa

SEQ ID NO: 59763 - DNA, 2442 bp, Acinetobacter baumannii; identical to SEQ ID NO: 57316

SEQ ID NO: 59764 - DNA, 129 bp, Acinetobacter baumannii
atggccgcaggtattcctgatgtgtttcgtagtcaggattttgacatcattattgtgggctatgtgattatgcgcttggctttagttactcagtggctcagagcagcaaaacatgatcctgaacggtga

SEQ ID NO: 59765 - DNA, 567 bp, Acinetobacter baumannii
atggtctggaaggctatcgatgaatcaaaagctttacttaaaaataagatctttttgaaactatgcttaatgtatggctgtcgtaacggcgaactaaggaaagctctaaaaagtgactttgatttaaagcgtaaggtttggatcgtaccagttgaaaataataaagttgggaaaaaaacaggtagagaaattgttcgtccaattttgccagaaatggaagagttaattgttgaagctatgtcattgaatgatagtgagtacttcttaacaaatgatgatgatgtaacaccaatgggccatggttcctcaaattctcttgcagcgaatgttatggagcgtttgcgaagacactataactttcatatgccccactggtcacttcacgatttacgtagaacagctcgtacaaactttagtgcattcacgagtcgtgatgttgctgaactcatgattgggcatgttatgccaggtgagcaaggtacatatgattattatgaataccttccacaacaaatagaagcttatagaaaatggttggataaacttaactctctaactattatttaa

SEQ ID NO: 59766 - DNA, 834 bp, Acinetobacter baumannii
atgattttatttggcaaaaagaaagttaaaccaagccaaaaagcttatgccgtcgtgacgggtgcaggcagcggaattggacgaagttttgcaattgaactggcgaaacgtggtggtagcgtagtctgcgcagatattaatttagaagctgcagaagaaactgtaacgttgcttgaacaacagggtgcaaaagcatttgcaatgcattgtgacgtaggtaaccctgaacatgtcacaaatttagctgaaactgctgaaattttacttagtcatcctgtcacccttgtcattaataatgcgggtgtaggtttaggcggtaagtttgacgaactcagcctagaagactggaactgggtcatgaatattaacctgtggggtgttattcatggttgtcatgcatttgtgccaaagttcaaaaaactaggttacggcgcaattattaatgtagcttctgcggcgtcttacactgctgccccagaaatgaccgcttataacgtgactaaagctggtgttcgtgcgttgtctgaaacactttcggctgagcttcgtaaattcaacattaaagtcaatgtgctctgcccgaccttggtgccaaccaatatcattaaaaatggtcgtattccgggccgttattcaaaacttgcagaccatgcgctcatgaactacgcactcaccacaagtgatgatgtagccaaactgacacttaaccgtcttgatcaggatgagctttataccattcctcaaatcgatgcgaagttgttctggctgatgaaacgtgcatcaccaagtttgtataccaagttccttggtacctcttacaaattatttaaataa

SEQ ID NO: 59767 - DNA, 816 bp, Acinetobacter baumannii
atggctttggcaccattaaaagaaattcccgaatggtgggaactttgtgagcgttatcgatacgacatctatgctttcgccgtagaagcattaggtgtcgaacccacatggcaacaagaattactttttgaatctattgcatttgatggtagccgtacttcagttgcgtcaggtcacggttgctttggaaaagggactttaatcaaattagccaatggggacttcatcccagttgagcgtattaatttaaatcataagattctcgctgcagatggtaagacagaactagatgtaattaaaacagtaaccggttatcaggaaatgtaccggtttgagtatgagaacggtaaatctcatacattcaataaatcacatatcctttgcttaatctctttatacgatggtaatggttggtcgaagggcgacaagattgaattgcttgtttctcaatatatgaacctaaaacctgaaagtagagaacagtttgcatcttataggcttatagatggtgaacataagcctttaaaaatcacatcggttgccgagcttggtgaaggcaaatattacggttttgtactcgatccagatccatttttcttaggtgaagataacttagtactacacaacactggtaaaacggccagtgccggtattgttgccttatggcatctcttgttttttgatgaatcaatcatgatgtttactgctccgcagattgggcagttaaagaaacaagtctggaaagaaatcagtatcaatctagcacgattgaagcaagggcctttggcttggcttgctgattatgttgggtactag

SEQ ID NO: 59768 - DNA, 279 bp, Acinetobacter baumannii
gtgatttcaatttaccaagctcgtttcagagcaaagttaattgaaattgagccgaagctgaaccagtacaatcctaagaacgtacttgaaatccgtaaggtcgataaaaacggccttcagcaagaatttgatagcagcagcttaaacaacggccacattgcaatcctgttagcagtttgggctagtacaaaaattgctaaaggcttttcaattactgaagggaatcagtttgaagaagatgcagtagatccaacaatgcttcctttttcaatcttttaa

SEQ ID NO: 59769 - DNA, 255 bp, Acinetobacter baumannii; identical to SEQ ID NO: 44740

SEQ ID NO: 59770 - DNA, 402 bp, Acinetobacter baumannii; identical to SEQ ID NO: 44639

SEQ ID NO: 59771 - DNA, 1815 bp, Acinetobacter baumannii
atgatcgttgatttctttagacatggttcaggtttatcaaaaggctgtctcgattatttgttaggtgaagatcgagagcgtgaacatgctcaagtgctcaatggtgatgtagaactgacagcacaactcattgatagcagtccttttgccaaaaaatataccagtggttgtttgtccttttatgagcatgatttatctgaccaggataaacagaaaatcatgcaaaattttgaggaatgtttattcccgggactagataaagaccaatatcaaattttatgggtacagcaccaagacaaaattaatcaggacacaggtgagacaaggcttgagcttaattttgtgattcctaatgttgagctttcaacaggcaaacgcctacagccattctatgcgccagtcgatttagatcgagtcgatctatttaagcagatcactaataccgaacattcactgtatgaccccgatgatcctgagcatcgacagctatttttaaataaaaagaacctacccaaagatattaaggattttaaagcgcagttacatcaacgtgtttaccgagcggttgccaatggtgatgttgccgatcggcaagaattggtgcaatggcttgaatcgaatcaaatcaatgtcactcgacaagtaaaaaactccatatccattgaaaacccatatgagggcgcaaaacgtcccatccgtttagagggcgagatttatgagcaaggctttagagctactggcgaatatagacaagaagtacaacaacgaattgaagaatacagaggaacaacttctgagcggtatcgaacaaacgtcacagactatcagagacagcttgaacataagagccaatatcactgcgaccgctatccaacagtcggacgagaaaatagcccagagcattcaaaacaacgcccagacggtcgagaagcagttaagcctgtatcaaaccttgctgcaatcgaaattgagccatttaacgcaattaaacgagcaaatacagagccaagaacaacaagcccagaatcaagcggtacagaaaaaacttaccactttgaatatgggactgatttcagtagcagttattttgcttatagcaattttctcgcttggtctcgtcaccaaaaacaagtacagcgagatgcagacgctaaataccgtgatcaacgagaagcaaatgagggtcgaccatttgaaccgatcgggaggcagtttgacgatcagcacatgcaagcgaccagacagcaaagcacagcgcctatgtattcagatcaacaagaacgcaggcgaatggcagaacggctacatgattccaatggggtattaaacgatgaccgaattagaaacacaattattgagaatcatcgaagaacaacagcaacaattaatgcaacaacaagtgcaattgcagaagcaacagcaagctttagacacaatgcaaaccaaaattatccaagccttgtcagcacaatcaaagacaatcaagagcgatcagcaaagcttacagcaagcacagaaatcattagcgacaatgcagaagcaatttcacgagctagaacgaagtacagcaagctataccgagcagatcaatggcaaagtccgagagatgagccttatcacagccaacaacgaagaaattctggagagaatctcaaccacacagcattctgtctcgtcagaagtagccaaagcgcagcagaatttgctcgaaacatccgagatattgaaaaaaatctcgtccagatgaatgagcgtaaacaagagatagaaaaacctcgacctaagcaagatcgaggtatggattttgggatgtaa

SEQ ID NO: 59772 - DNA, 639 bp, Acinetobacter baumannii
atgtgtgcaaattacgaacccatctcaaaagatcgagtacacctgctagatctattcgagccaacattcgactataaagccgacgtttatcctggttacgactgccctcttatattttctaaagatggccatatcgaatggagacaagtaaagttcggtatgattccaccatggaaccatgacttaaagttttcgaaatacacttataacgccaggactgagacggtagataaaaagccgagtttccgacatgcgtgggctaaaagccagtttgcactaataccagtcgaaaagatttatgaaccacgttacgtaaatgggaaagctgaacgctggggaatttatcgtgaagacggattacctttcactgttgcagctatttacgattcaacagtaattgatgggcagcaagttagatctatgtcaatgctgactattaatgcggataaccatccgttcatgtcgcagtttcataaacctgaggatgaaaagagatctatcatcgttattcctgaagagtatcgagaagattggctaaactgtaaaaaagaagaggctgaccaatttttctttgaaatgccagtcgcagagtttaagtcaaattattttccaaaacctaataaaaaaccgccagcctaa

SEQ ID NO: 59773 - DNA, 495 bp, Acinetobacter baumannii; identical to SEQ ID NO: 59318

SEQ ID NO: 59774 - DNA, 900 bp, Acinetobacter baumannii
atgcgtactttaacacaaattaatgtaccttttcatagtgctgatttagtaattattgaattcaacaatcagccatttactgccatgcgcccaattgttgaaggaatgggcctcacatggcaatcacaatatgaaaagttaaaacaaagatttagttcagttatcactgaaatagtgacaactggaaaagatggtaaacagtacaatatggtttgtttacctgttcgtaagctttttggatggttaatgactataagtccaaacaaggttaatcccgaaattcgagatactgtgatcatgtaccagcaagagtgcgacgatgtgctgtgggaatactggactaaagggcaagcaataaaccaacgcttaaccatttctccagaacaacaaaatgcactgcacgagatagttgatcgccgtgcagggagggatcgaagcttaagagcttcaatgtggattcgtcataatcgccactttggaattgctaaatatagccaattgctttcaatccattttgatgaggcgaagcagtatcttgagctcttgccgttacaagagctagttccagctgaaacagatacacttaaacgtttagaaaagtttgtagataatctcgctgctcgttatccagcattagaaaaccctcttgcttatgacattgcacagcaattaggtgaggagctaaagtatcaatctccaaaaggacctaaaaacttttggatatcgattcaagaaagcggagcagtttctgtacagcaatattcactacatcacacaccagttaatgttgtgcaattgcgtgaacgctttaatcaattgtgggattttcttcataaagatgaggtgcttgaacttgggaaggttttaaaacgctttcctttcgaacctgtgaatcgataa

SEQ ID NO: 59775 - DNA, 501 bp, Acinetobacter baumannii; identical to SEQ ID NO: 46382

SEQ ID NO: 59776 - DNA, 543 bp, Acinetobacter baumannii; identical to SEQ ID NO: 59710

SEQ ID NO: 59777 - DNA, 654 bp, Acinetobacter baumannii
atggctttttttgaatacgaaacacagaataaaactataaataacagttttggaaacgttttaaatccgtttaaagatcgttttgctaaaaatcctgtcttatggtctggtctaacagtggatcgagctgtttcccattatcaggaactttacgcattaggtacactttcagctgcacattttggaattgaaattcgcccgtaccgtgcaaacagtaaaattgctcaagcaaatattccaatttttgatccttcaaacaaagttgcttggttagccaataatgtagatgtatcactactagatgcccaaaccgatgcagtgcatgtggggcattttcaactcaaccatgtaactggtaatgcttcaaatgagttgagcatttcatttattgagactaaagaagcagctattgcgaatagtgctaaagctataaaagaaataatgtttaataaggatggtactcagccgccaccaattgaatacttaatgagattaaaaatatatgcttttgataaagctgcaagaaatcaaaaccaatttgaaattgagcatctagtttcacttcaagcaggcaatttgccccttgatgcctctaataaagcacatgccattgttactttaaatttcatcaaaatgtttcccaacttaaaataa

SEQ ID NO: 59778 - DNA, 288 bp, Acinetobacter baumannii
atggaaagaccagataaagatatttttaaatttcaaggaattaacacctttttaactgtgtttgctgaggaagttattaaaagccaacccaatttagcagctaatattttactaaatataaaaaatttagctgatgagaaccatcctttagtggagcaagcttttatacttgataattttgaaaaccctgaactagctaaagatacggtttttcaagcacttagtggctttaataatgaattagcacgcctacttttaatgacaaaaaattcattaatggatagttaa

SEQ ID NO: 59779 - DNA, 711 bp, Acinetobacter baumannii
atgagtcttaaaatgaaagagaaatatcttttagaaaagaatgtgaaatacattttgttttcacaacgattaacagtaacgggtcttagtaaattatccggggtgcctcaacctacactcttccgttgggaaagtggacaatttcaagcgcctactattaagacagtagagaagttagcgaaatggtgtggtttaactacagaagaattgctctaccaagatattgaaaaaattttaaaaaataaaagctctgattccaatcttaaacttgataacaatgttgatcttaataataaaatcaacatagaaggagatttagtacctgtgatttcttgggtagcagcgggttcatttacagatgtacaaactgtgttaaaggatacggaagtaatagaatggcttccaccaatgaaaaaggctggtaagaatggttacggccttatagtcactggatactcaatgtatccaaagtttgaacctggtgatcgaatatatgtaaatcctgattatcctgtgtttgatctaaaaaccaatgatcttgtaattgttgcatgtgcaggtgaatcagaggctacttttaaaaagttaattattgaaggtaatgaaaaatatctagaaccgcttaatacaaaatggcctgagcagattattaaattaactgagggttgtaagttggtaggtaaagtagttggtatgcatagggagttttaa

SEQ ID NO: 59780 - DNA, 459 bp, Acinetobacter baumannii; identical to SEQ ID NO: 59290

SEQ ID NO: 59781 - DNA, 225 bp, Acinetobacter baumannii; identical to SEQ ID NO: 57342

SEQ ID NO: 59782 - DNA, 246 bp, Acinetobacter baumannii; identical to SEQ ID NO: 57264

SEQ ID NO: 59783 - DNA, 357 bp, Acinetobacter baumannii; identical to SEQ ID NO: 44786

SEQ ID NO: 59784 - DNA, 567 bp, Acinetobacter baumannii
atgccaaatttaactctcccaacacgtgcattaaaagttgtaaatacatcaattgagttatttcaccgccgcggttttcatattgtgggcgtcgacagacttgtgaaagagtcagaaattaccaaagcaactttttataactactttcactctaaagaacggttaattgaaatctgcctaatggtgcaaaaagaacggctccaagaaaaagtggttgctatggtcgaatacgaccacgacacaaacgcaatcgacaaactcaagaaactctatgttctacataccgatgtagacgggctgtactacctgttatttaaagctatttttgaaatcaaaaatacctacccaaacgcatatacaaccgccgtgagatatagaacatggctaatcaatgaaatctatagtcagcttagagtacttaaacccgatgcttcttttaccgatgccaaattatttttatatatgatcgaaggcactattattcagcgtttaggctcggatgaggttgatgaaagaatggttgaggtgtttttgagggggatgggaaatattgcaaatagaaaatga

SEQ ID NO: 59785 - DNA, 477 bp, Acinetobacter baumannii
atgcctacacagcgcttggctcattatcttcagcaagaagcggcagtaatttgctttcaaaataataaagtgtctgctcaaaaaattgattcttttttcaaaaaggaaccagtcacaaaactcgatcctagcagtgtcgtttggatatccagtaaacctttggaactgatgcaaaaatcatctttcgtgaccgtggagaataacggttcaacggttgttggtgatgactcaataaccccaggccacactgtgacgcaaagagctggtttagatgcccgacaagtcaaaaacttggaaaaagttttgatcatgcgtggcaccattattagaccactaaatttgaactggaatgcaggcgatatattcgaaattgatagtaagaagtatatcgttttaacagctgcacatcatatagatacaggcgcaatcgggggatcaatggggacttcatcaaagttctggattgctaatttgtag

SEQ ID NO: 59786 - DNA, 1164 bp, Acinetobacter baumannii
gtgtctgctatttgtctttcaatagcagctactcattttgtgtatgccgcttcaaatgttgtaaatcctgtaaatgattcttcccaagcaaaaggaattattaaaaatcaatatattgttatattaaataaggatgcaggtccttctaaagatttcgcacaaaatattgctaaacaacatgctggtaaagttttacaaagctacgatactgttcttaaaggttttgcaatttatttacctgatacagcaggggcagcctttattgaagcgatgaaaaagaaccctcatgttctttcagtagaaagcgatacaatagtaaatattgatgcaactactcaaagtaatccagattggggactagatcgtatagaccagaaagctttaccattaaattcgacttattcttatttacagaccggttcaggtactacggcttatatcgtggatactggtatattatctagccaccaagagttttcaggacgtgtgttaagcggttataccgcaatatctgatggcaatggtacaaccgactgtaatggacatgggacccatgttgctggaacagtaggtggtacgacctatggtgttgctaaaaatgtcaatttagttcctatccggattttggggtgtgatgggtcaggggcctcaagtaatgttattgctggtttagactggatattaaaaaatggtaaaaaacctgcagttgtaaatatgtctttaggtggggcaacaagttcttctttagatagtgcagtggaaaatttatataataatggttatgtcatggtcgtagccgctggcaattcaaatacagatgcatgtacatcttctccagcaagagtaagtaaggccattacagtggctgcgacagataataccgatactcgggcaagctattctaattatggaagctgtgttgatatttttgcaccgggtagccaaattaattcttcttggattggaagtaatacagctaccaagatattaaatggtacttcaatggcaaccccgcatgttgctggtgtagttgctgaaatgcttcaaagtacacctacggcttcacctcaaacgatctctaccaatcttttaaatcaagcgagcagtaacgtagtaaaaaacccttcaggtagcccaaaccgcttgttatataaatctccttaa

SEQ ID NO: 59787 - DNA, 1455 bp, Acinetobacter baumannii; identical to SEQ ID NO: 45459

SEQ ID NO: 59788 - DNA, 273 bp, Acinetobacter baumannii; identical to SEQ ID NO: 57251

SEQ ID NO: 59789 - DNA, 276 bp, Acinetobacter baumannii
atggttttgatttccagctcatgtgttgatgtagtcgggttatccgcactttttgcaacacgtgtaacagctacattcccattgccagcattgttatatacacctactgcattattacccttcttaaagttcacgtctccttgcaccaacttgccgttagtaatcatcatcgccagcattgttgtgttttctaatgccgagccaagattgttagtacttgtttgtaactgcgaaatttcagtatttttaagagttgcaagatcttgtgaagtttga

SEQ ID NO: 59790 - DNA, 819 bp, Acinetobacter baumannii
atgacccatttaaattataaaaatattaaaggtcgatctaaggaaacgggtgccacacttattgttgtacttattattttattgattgttatttctgtcggggttttggcaataagagtagcgattgtttctctaaaagttgcaactaatagccaagttggccaattaaactttcaatcttcagatactcctttagagcttattgtacagatgaacccaaccacattgacaaatattaccaatgtgattggagcagcactgaaagcacatgaaagtaaccctggtgcggaatataacttttgctataaaccaacttctacatctgtaagttttgctcaaactcggggagcaagtttgcttcgagctggcagcgccaataatgctgtggttgaagacggtggagtagcaggtttctgcgatttaacaagtgactatgggagtaatcgtcaagcggtagttactcaagttgctgtcagtatcccaaccgatgccatggctgatattccgggttcaaatctacctcgggacataaatctttccgaaggaacccaacttcctaaaagcatgctatctacgcaacgtatccgggttattacaacagcgtttttacctgcttatgcctcaacttctttagaaactctgcaatctgattgcttaagtacgagttccgcaaaaattagtgacaactttgatagtgcattaacggataagcaaaccctagctgattgtttggcaaaccataacgtaccttttagtactcaagttcaagaatttaactataccaataagctgactgaaatcacggcaccaggttcataa

SEQ ID NO: 59791 - DNA, 1815 bp, Acinetobacter baumannii
atgtcagaatggttcatatccagtatatgctttaaaaagcgcactacatattatttagtattgagtctcgcaattaatattcccttaactgtatatgcatcagacaatatcaatagggaaaatattttaaaagctgattttgatactaattttttagtgggaaatgcacagaaaattgatattggtcgatttaagtacggcaatcctattttaccgggtgaatatagtcttgacgtctatattaatgggcagtggttaggaaaacgaaagtttgtttttaaaagtactcgttcgaatgagaatgcaaagacctgttttaccccagatatgcttttagaatatggagttaaaccagaaattcttcatcatgaagtaagtagtacctttacctgtaatgacttggacaagtgggttaacgatgctttttatcaatttgatacttctcgtctgagacttgatatttcaataccacaagttgctttacaaaagaatgctcaagggtatgtcgacccacgtttatgggaccgcggtataaatgcagctttttttgcatacaatgcttctgcctatcatattgtaaataataaccatgaaacaaatcatgcgtttacgggtacaaatgttggtctaaatctctatgattggcaattacgccatactgggcagtggaaatggcaagatcataatgaaatacaagaaaaggtttcttcctacacatcaaataatacatatgcccaaaaggcttttcccaagctcaatagtgttgttactttaggtgattattttaccaataataatttttttgatgccctaccttatcgtgggattaacatatcaagtgatgaccgcatgcttcctaacagtatgctcggatatgctccccaaattcgaggttatgccaaaaccaatgcaaaagtagaggtacgtcagcaaggaaatttaatttatcaaacgactgttacacccggaagttttgaaattaatgatctttatcccacaggcttcggtggcgaattacaagtctctatatatgaaacaaatggagaaattcaaaagttttctattccttatgcttctgtcgttgagatgctacgacctaaaatgagccgatattcttttactttgggacagtttagagatgctaatatcaatctaaaaccatggctagtgcaaggtaaatatcaaagaggtattaataactatttaacaagctatacaggctttcaggcaactgaaaactaccagtcttttttaataggtagcgcatttgcaactccaatcggtgcaatttcatttgatgcaactcagtcgtcagctgaattcgaacaaaagctcacccttaaaggacgaagttatcgtttaagttataatcgactatttactccaaccaacaccaatttaactttagctacgtatagatattccacagaaaattatttgaaattacgcgattcaattttaattcgcgacttgcaacaacaagatattgatagcttttccgtggggaaacaaaaaagtgaatttcagatcacattaaaccaaggccttccaaatcaatggggtaatttttatttagtaggctcgtggattaattattggaaccagcctaatcgtaatcaacaattccaatttggatatagtaatcagtttaaagatctaacttacagtatttctgcaattactcatgagtttgaccaagaaaatcaaaattctggtcacgaaacgcaatatttattgtctttatcttttccacttcaatttaaaaaaataccgttaattttaatagttctatttcagaagatagccgaactttag

SEQ ID NO: 59792 - DNA, 720 bp, Acinetobacter baumannii
atgagtggttatatcggaaaccgctttgattatggctcatcaatttcatatggagatgcaggacagacaagcctaaatatcaatggcacctaccgtactaactatacaactataggcgcttcttttggtcagtccgatacataccaacaagaaatgatcaatttaaatggaagcttggtcgctcactcacaaggtattttatttggcccagaccaagtacagaccatggtattggtatatgcgcctcaagcgactggtgctcgagtcggcaatacccctggtctaagcattaataaacaaggttatgctgtcattccttatgtaaccccctatcgcttaaatgacattagccttgaccctcaaggaatgccatcaactgttgaacttacggaaacaagtcatcgtattgccccgtatgcaggatcaatcactaaagttaacttttcaacaaaaacgggatatgcagtttttattaacacccaaacacctaatagcggccatttgccatttgcagcacaagtttttaatcaaaacaatgaaatagtcggaatggtagcccaaggtagccggatttatttacgtactcccctaactcaagatcatctttatgtgaaatggggacaaagtaatagtgaagaatgtcaacttgattatgacattcaatcaaaaatcttacaggaaaaacaatcaattattatgacagaggcagtctgcaaatga

SEQ ID NO: 59793 - DNA, 3294 bp, Acinetobacter baumannii
atgatgtatagtttaaattttagctctagacagtatttagcgcagatattaaaaacaagaggattaacatctgctgatgcacgtgtactttaccaatatcaattgtcttttcctgaatttaaagaaattgagaacattcttaaaacaagttttcaattccaaaatataaatcgtataggcgatgaatgggctaacttatttacgttgtacgctgccgaatggtttagacgtgaatatactgcaaaatgtacatgggatccgattttaactgccttagatattagggatttaccagtaaacactagaaacgaagttgtaattaaggggctgagattttggaaacgcccgattattaaatatagtaaagccaataactatttaggttcgatttttaaagagggtggattcccctcacgcttgttaaaagaagatggaaatcgttatattgcgattttccaaaaagtgacctctttatatttagaaaataaatctcatattgatgagttaagagctgaggtacaacaagaattaaagactttaccacaagcatttgagcatgatgaaacactatctttagtgcttgatattgtaagattaattatcgaaaaagtggaaaactgtcaattaactgcactccaagacccaattaccactttagatcagcaatctaagcattggcgtaatgaatttccgttgcctattgatgaagaccaaacgatcgtagaggattttttaagaaatttatttaagtcggcctcagaagaaatatctaagcatcatcaattacgccaagcgttaaaatgtactcatagcttatctgaagattttaaatatttatctagtacaatttacttgccagaagaactttcatttacactaaatgaagatgttgagttgcgacgcacacgcggtaatttagtcattaaagaagggtggaatcataaaagccaatttttatgtacgacttatctttctcagcaaaataataaagtcattgcagaaattaatagaggttttttaaaagacatatatcgtcaattccacaacgaagctttatatctatgtttagaggtggatggggtagtactcagtcatattgaattagaagatacggctctcgattttgaaaccttacctatagcttttgaaatacaagaaaaaccaaaatatattgcccaaggtgctttaaaaaccaaagcacctgaaatattcattagtctgccaactggtgcaaggtttaccagtgtagaatcagcagaactttttgaatctgtaggtcagtttttaacatttaaactgtataaaattagggggcagcaacagatattgacacaagatggtgatcaaataataatcaaatgtggacattctgatattgaatttgagcagttattgtttagaaaaaataatatcagccaattagagacttccccaagtttagcatttatgggtaagccagcattaaaaacttatggcacacataccttatttcgtgggaatgatcagatcgagactacccctttgcatttacttttagggcagcaaatgctgactttaaaaaatagaaaaggtgaaagtttattaaaaaagaaagtggttattttgccaaaacattttaaggtcatggtacaagcaggtgtgacactagatcaggctatacttgatattgaatcggatgcagaaattcacattgaagtatcgaattctcactcaagcttagtgtatgaaaagataggaatatcctataagtgccaagtgaaatgtgcggtagtacctttagcattaaacttaaaaataacctttaaatttggtggagagtgtattgttactgttccgttccctgcaagaggttttaaactaattaatgagcaaaaagaagtaacatcaaaagatttagtaattcacgacttattgaatactgaactgcaagtgtactcctatgaccgcgcggctaagttgaattttgatattgtattaaaaactaaaataaatcagggacatgctgtacctttttatcgtaagaaaataaaggttaaacaaggcatttcttctattaatttatatgagctagtagaagatgtgaaaggcgttttagccttagatgatgatttagatagttttgttgaatgcgcaattagttatcatcacagcgaaaaaaaatggaacattcggcattatgcacaccaacttaattggggtaaaagtattaaggcttattataacaatgaagctttattatcctttaagccacaggctatgtcactagtgcaaccacaagttgcacctctcgttttacttgaaaaaaatgaatggataggtaaggtttttcaagttccggaattggatatgagtcttgcaccttatttattaatacctacaaaaaattctacattgtttagagccaagcttattccagaatttgattatcctcaagatagtgaaatagaagcattaaccgaggcaacacgtagttttggtcagaataaacaatcgattaagcagtttatacggacgttaaattatgacaataatgaggtattttgggattatgtgaaaaccttattacatgattatgaccatttgcctctaaatacttttgaagtcttaaagggtctagcgacaaattatgatcaattggctattactgtatttaaacttgatctatctctcgatattttacgtcgttttgaaactgaattatctgtactatggtttttaatacctgtttcatcttggcagaatgcaaccttacaagttattcaatactggcagaaaatgcttggtgatgaaggtacttatggtcgtgtaaaggcagaaaatattttaaaaaaagtaaagaatttaacacctttattggctgaatcatttcattcattctatttaagcaaccaacgtgaatttgggcctgagtttaattttcactttttaaatgactggatatttaagggtgaatttttgggaggagtagaaaacactgagtatcaacgaatgttgcaaagaaatcatagtgcgacagaagaccaagcttggcccacggcactttcgcagaataaatggggctactttgaatgtatgcagaagctcccttttagttgtcaattggcaagtaaatggaataaagatgtggtgtatttaccattttgtttagcatatatgaatgttaagtatcactctaaactccaattaagtgcctacgatttattgcaacttaaacaaattattgcatttgacgagcaatggtttaatcaaatttttagttcaactgttaaatatttaattttagaagcgaagtaa

SEQ ID NO: 59794 - DNA, 234 bp, Acinetobacter baumannii
atgacttgttcggcacgtttacccgtatatgccttgctgattgctgcatttacagctgttggttgtgcatcagaagctggtttaaacgcttctggttctgctcaaacaagtgctagcccatctggcgtacaagctggtgttggtgtagatgcaggtgtttctggtcaagctcaaccaggtcaagttgatgctggcgcttctggttcagtttcaggttctgcagctgctcagtaa

SEQ ID NO: 59795 - DNA, 363 bp, Acinetobacter baumannii
atgaaaagtcatgatcctttgctcgataagcaatatgatgaagaacactacaactgtgttcactttgttcatgaagctgcaatggacctatacggcatagatcgggcggaagcgcttgaactctttatgcagcctaagggcaaaattacttttttatcttcacggttaaaacttttaaatccgctacccatgcccaaggaaggctgcatagtcgccttccatccgagacaaagaaataagcccccgcatgtggggctttttcgtgggcaaaagattcttcacctcatggaaagcggagtcacttatttgcctgaagaggtcgtgatggggatggggtttaatcgggtcagttattatgattaa

SEQ ID NO: 59796 - DNA, 249 bp, Acinetobacter baumannii
atgccggatgagtttgaacgggtaatcgaagggcaatatccagatgtaaagccaacagtaaattaccggatttacagttcagataatctgaattctccaatgttttacttactcggactacaactctccagtgttgccatgaaccataaagctgtgacattcaaggctgaatcgccgcgattaaataccactaaaaccggagatatctttgcactggatcgctttagtggtttgaagggggctatatga

SEQ ID NO: 59797 - DNA, 495 bp, Acinetobacter baumannii; identical to SEQ ID NO: 59318

SEQ ID NO: 59798 - DNA, 468 bp, Acinetobacter baumannii
atgtatgctcaggatgcttgtaaaagattacgtgatgaagaattgttatgcggatgtatgattgcatttgttcaatccaatcctttcgacccaaatgttccgttctacaataaatcaatcacaggttcattttctgaacccacggattgcgctactgattttgtaaaagctgcagtacgcatgattgatgaaatctataaagaaggtatcaaatataaaaaatgcggcgtaatacttacaggtcttgagccaaagtctggtcacacatatgacctattaactgactttgaactcattgataagaaagaacaattaatgaaaacacttgataacgtgcaaactaaatttggtaagaagaaattaggagtgggcgcttgctttatacctggtcggaactggtcgatgagtagggataaattgagtagaaatccgtttaaatgggatgaattattagttatattcaaatag

SEQ ID NO: 59799 - DNA, 516 bp, Acinetobacter baumannii; identical to SEQ ID NO: 44116

SEQ ID NO: 59800 - DNA, 408 bp, Acinetobacter baumannii
atggtgttgggccagtgcgaaaaagtcatgttcaatgttggtggctggcgtaaagctagacaagagcaacagatgcgcgactggtttggagcggttccaacttacttaattacggtcgatgcttcattttgtgagcgggccaatgatacagaattctgctatttgattgagcacgagttgtatcacattggcgttatgaaagacgaagatggtgagatcctttatagcgataatacggggctacctaaacattatttagctggtcatgatgttgaagagtttattggcgtagttaaacgttatggaccaagcaaaaatgttaagcgacttattgaagtcgcaaaaaatccgccgtttgtttcgaatcttgatatttcaaaatgctgcggaaactgcgtaatcaactga

SEQ ID NO: 59801 - DNA, 249 bp, Acinetobacter baumannii; identical to SEQ ID NO: 59693

SEQ ID NO: 59802 - DNA, 246 bp, Acinetobacter baumannii; identical to SEQ ID NO: 59301

SEQ ID NO: 59803 - DNA, 279 bp, Acinetobacter baumannii; identical to SEQ ID NO: 57302

SEQ ID NO: 59804 - DNA, 615 bp, Acinetobacter baumannii
atggaccctataagctttactcggcctatcgatgaacactatgtgagtacgggcttgcaaaccgcacttgctaaagcatttaaacaagtatttgcacaaaactttgagcagtccattcaagatttattggattacggttgtcctcatatcggtagtaaaacagttgtagaacggttctctaaacaaaacggacttgttgtattacgccgaaataacacctctgacacgttaatgcgaattatctatgccaattggagcagcatgggtaataaaagaggattagcgtttttagagtttgttttacgaatgttgtgggggaaagatcattttcagattatccggctatggcacagcttggaaaagctaaaagaatatccagcctatttgtctgattttgaaaagccaaattacttcttaacaagtcggattaggattgttttagataaaactgttgatgcaaatgaagtggtagagctgtcaccgatattacgccgtttagtaccagccaatattgtcgttaaagttcactcaatggcatttgatagagatttaggcaccacaagctttgcagcggcaatagcagctaagccttatgcagtctataacttcctttaa

SEQ ID NO: 59805 - DNA, 609 bp, Acinetobacter baumannii
gtggcacaagatattccggatggtgcctatgtcaacttgggtattggcttaccgaccaagattgccagctacttacctgccgataaagatgtcttcctacattctgaaaatggcctgttggcttttggcccaccgccagcggcaggtgaagaagaccctgaactgattaatgcgggtaaagagtttgtgaccatgcttgaaggtggcagctttttccaccacggcgattcatttgccatgatgcgtggtggtcaccttgatattgcggtgcttggggcatttcaggtggcagccaatggtgacttggcgaactggcacacaggtgcgccggatgcgattcctgctgttggtggtgcgatggatttggcggttggtgccaagaaagtatttatcactacagaccatgtgaccaaacaaggtgagccaaagattgtcgctgagctgagctatccggtgacgggtaaacactgcgttgaccgtatttacactgacctgtgtgtgattgatgtgaccagagatggtttaaaggtgattgagaaggtggatgggctgagttttgaggagttgcaaaggttgaccggagcagtgttgattgatgcaacgaattaa

SEQ ID NO: 59806 - DNA, 828 bp, Acinetobacter baumannii
atgctaaaagcacaaaaacttacattagcagttctcatttctgcggcaataatttcctcagctcaggcaagcgagcaaagtgaggcaaaaggatttgttgaagatgcgaacggttctattctcttccgtaccggttatatcagtcgtgataaaaaagatggaagggctgacaatagctcatttgctcaaacggcaattgtaaatatcgactctggctttactcctggtattgttggtttcggtgttggcgttgttggtgacggctcatttaaaatcggcgaaaataaaaacgctggtaataacatgattccacaacataacgatggttcagcttacgatcattgggcgcgtggtggtgctaacgtaaaagcacgtttctcaaatacaacagtacgttatggtactcaagtgctcgatttgcctgtgcttgcaagcaacacggctcgtttagtgcctgaatatttcactggtactttgttaactagtcatgaaattaaagacttagaagtggttgctggtaaatttactaaaaaccaatattctgaccaaattgcaactgaccaaaatggtttagaccgcgctgtggtttggggtgcaaaatataagtttgacgatcaaatcagtggttcttactacggtgttgatgtaaaagataaacttgatcgtcattatgttaatgtgaactacaagcaaccccttgctaatgacagctcacttacttatgacttcagtggttatcatactaaatttgctctgtacacgacaaatttcacagaacccttatcctatcagggttctgccttcttaaaattgccaaaatttccttaa

SEQ ID NO: 59807 - DNA, 726 bp, Acinetobacter baumannii
atgtatgttggcgcgagtatttttgatgaccatcaattcggttatgtcattacggtagacgttggtggtggtgttggccgggacgattctgtaattgttgtttctaaagtttggggtgaatcgcaatggggagagcgtgcacgccgtgtagaagttgttgatatccctctatgtaaaaatagagacgatatcattgagttattcgcaaaaattaatgagctgcttttacagtatccaaatgcaaacctagtagttgatgataatggtgctggtaaaggtcttggtcagtaccttaaaaagcaaggcattttctacgttccagtttattggggctcacaatgttttagtaatgacaatagaaaagagttcacgaataagcggtcattggcttatgtgggcttggctcgagcaatcgcaagtggtcgttttaaaataaaaacaaagaaacacaatgtgaaaattaaagatcagttaatccacgttccataccgttttgatgactttgcacgatacaaaatcttgagtaaagatgaaatgaaacggatgggaattaaatcaccggatatgggtgatgcttttgctttcttattcttggaaaacgttcactacactgaagcttacgaaactgtaaatgtcactgacgatacaccggaaggccgtgaacaagctgaacgtaagtcaagattcagtgctttaagagaagcagctgaaaaagaaaatgattag

SEQ ID NO: 59808 - DNA, 279 bp, Acinetobacter baumannii
gtgatttcaatttatcaagctcgttacaaagcaaagttaattgaaattgagccgaagttaaaccagtacaaccctaagaacgtacttgaaatccgtaaggtcgataaaaacggccttcagcaagaatttgatagcagcagcttaaacaacggccatattgcaatcctattagcggtttgggctagtacaaaaattgccaaaggcttttcaattactgaaggcaatcagtttgaagaagatgctgtagatccaacaatgcttcctttttcaatcttttaa

SEQ ID NO: 59809 - DNA, 273 bp, Acinetobacter baumannii
  misc_feature (239)..(248): n is a, c, g, or t
atgggggagtttgcaaaaagattatttgataaaacaaagaaccctgccggagtttctattcaaacagcatttgtcggttttggtagtgacttttctagtttgaattcttctgatgtaaaaaatgcctgccgtttaagttcgagaacccagtctgaccgaaaaggagatgatgcgtgttcaccgaatcaatctacaaatgcggtagctgcaccaggttatgggaatggtggttttttccnnnnnnnnnncgtcggcagcgtcagatgtgtataa

SEQ ID NO: 59810 - DNA, 201 bp, Acinetobacter baumannii; identical to SEQ ID NO: 57296

SEQ ID NO: 59811 - DNA, 255 bp, Acinetobacter baumannii; identical to SEQ ID NO: 57173

SEQ ID NO: 59812 - DNA, 285 bp, Acinetobacter baumannii
gtgaaatttgtcgtgtacagagtttctatttataggaacgggtctttaattggcagaggctcactaggcgcaaacattgaaacaggtaatattaatgtcaattttaatggtacagcggttatcgtgtctgctatcgatgatattaggactattggcgctgttacctacacacttaaagcgggttttgctcgccaggagggagtaaacattccactgaatgttagttccaatagtacttttatgatcacttcaagaacattaagtgtaattgaaatgaagaaataa

SEQ ID NO: 59813 - DNA, 348 bp, Acinetobacter baumannii; identical to SEQ ID NO: 57134

SEQ ID NO: 59814 - DNA, 516 bp, Acinetobacter baumannii; identical to SEQ ID NO: 57167

SEQ ID NO: 59815 - DNA, 465 bp, Acinetobacter baumannii; identical to SEQ ID NO: 57112

SEQ ID NO: 59816 - DNA, 1992 bp, Acinetobacter baumannii
atggctttggcaccattaaaagaaattcccgaatggtgggaactttgtgagcgttatcgatacgacatctatgctttcgccgtagaagcattaggtgtcgaacccacatggcaacaagaattactttttgaatctattgcatttgatggtagccgtacttcagtagcatcggggcatggttgctttggtaaagggactttaatcaaattagccaatggggaatttatcccagttgagcgtattaatctaaatcataaaattcttgctgcagatggtaagacagaactagatgtaattaaaacagtaaccggttatcaggaaatgtaccggtttgagtatgagaacggtaaatctcatacattcaataaatcacatatcctttgcttaatctctttatacgatggtaatggttggtcgaagggcgacaagattgaattgcttgtttctcaatatatgaaccttaaacctgaaagtagggaacagtttgcatcttataggcttatagatggggaacataagcctttaaaaattacatcggttactgagctaggtgaaggtaaatattacggttttgtactcgatccagatccatttttcttgggtgaagatgacttagtacttcataacactggtaaaacggccagtgccggtattgttgccttatggcatctcttgttttttgatgaatccatcatgatgtttactgctccgcagattgggcagttaaagaaacaagtctggaaagaaatcagtatcaatctagcacgattgaagcaagggcctttggcttggcttgctgattatgttgggtaccagtctgaactcgtatacatcaaaggctataaagaaaaatggtatgtctttgcgaagacagcaccaaaacatcaacctacaaacttagctggtaaccacggcgataactacatggtctgggtcgatgaggccagtggtgtagatgatgctgtccttgatgtagcttttggtgccttaacgcatgaagacaaccgtgcagtaatgacctcacagcctacccgtaatgcgggtatgttctatgagactcatcacaagttaagtcatcgagctggtggtgtttggattgcactcacatttaacggggaagagtcaccactagttagtgaacaatccttacaggaacaacggcaaaaatacggcagcagggaagatgctcagtataagattcgtgttttaggtgaattcccagacttatcagatgagttcttaatcaccaagcgtcaaaccgaagaaatgtatgttggcgcgagtatttttgatgaccatcaattcggttatgtcattactgttgacgttggtggtggtgttggccgtgacgattcagtaattgttgtttctaaagtttggggtgaatcgcaatggggagagcgcgcacgccgtgtagaagttgtagatattccattatgcaaaaacagagatgatatcttagaactatttgcaaagattaatgagctacttttacagtacccaaatgctaacttggttgtagatgataacggggcgggtaaaggtttaggccaataccttaaaaagcaaggtattttctacgttcctgtttattggggctcacaatgttttagtaatgacaatagaaaagagtttacaaataaacggtcattagcttatgttggtttagctcgagcaatcgcaagtggccgttttaaaataaaaacgaagaaacacaatgtgaaaattaaagatcagttaatccacgttccataccgttttgatgactttgctcgttataaaatcttaagcaaagacgaaatgaaacggatgggaattaaatcaccggatatcggtgatgcttttgctttcttattcttggaaaacgttcactacactgaagcttacgaaactgtaaatgtcactgacgatacaccggaaggccgtgaacaagctgaacgtaagtcaagattcagtgctttaagagaagcagctgaaaaagaaaatgattag

SEQ ID NO: 59817 - DNA, 459 bp, Acinetobacter baumannii
atgcaacaagctcaagacaatgttttagtaggaatcgcagaacctatcaatggtcagggagaaaacttattaattgatcatttcttaggatatgcaagccatgaattagaaccacaagaaattgataaagttattaaaggggaagtggttgaaggcatcacggaatatgctcagggccattactataagatttcagcaaatcctgaaaaccaaaatgcaaaagattttgaaatcagtattcattttcaggatggcccaattccagaacatggtgtgaatggggttaccagtgaagcattgttaaaagtacttattcaccgtactaaaaccttggatgaaaaatttccgagtgagttcaacaaacaagccattatttatatggaaagtgcgctagaagaatttaataaacgtacagctgagcgccgtgctcgtggtgttgaaggcactcttgttaagtaa

SEQ ID NO: 59818 - DNA, 540 bp, Acinetobacter baumannii
atgaaacgggcacagtttatttctgtttggaatgaaactttgcaagagcaacactttgccattacataccgcgacattaatcatttaaaccttgtggtggttgccaagaacccagctgaacaagcaacgttagaacaagatatctgtcggtatattggttattgcgataacttgtatgaaggtaaagtgaatgtacatgaagttgtagaaaagccaattgaagtaaaaattaaaggctctttggcttctgtacataacacagatatggttaagacacagatcaaagaattacttgtagaacgatacgggcgtgaatcattgagctcaagtcgttggctggttaatggctttaatacgcaagaaatggggaagctgattaatgacaatattgtggctttccaagaccggatgagtgactttaccattatgctttcaaatgagttgaataagcctaatgagtgggtgtatgtgacaaaagacagcattactgttgagttggaacgcaccgctgatatttcgggggctacatggaccctataa

SEQ ID NO: 59819 - DNA, 228 bp, Acinetobacter baumannii
atgcgattaaaaatcttttgtagaaaacgtgcttgttctcaattaattgacttatctcaaatggattgtttgcaagtctcccaaagtgaacatagaggcggcatggttagtgaaagcttttatgacgtttttatctcacttaaaagtggatacatctttgatgcaaccattgaagataaacagcatgacaagctattggaattaattgagtttgatcaaaagatttga

SEQ ID NO: 59820 - DNA, 459 bp, Acinetobacter baumannii; identical to SEQ ID NO: 59817

SEQ ID NO: 59821 - DNA, 693 bp, Acinetobacter baumannii
atgcgatctatcattgaattctggtcgagctttcgattgttgccttctgcatggctgctgttggtgcaattcattttacttattctggctatgctgacttttgataatgaggcttacaggaccttaacttgggcgctaggggtacttgcattactcattattgctaaagttattcgccaaacacccatgttcacttttctcggtctcgcatttgtcagtggggcaattatagcttcggtctttattttattaggctatagcaatttaaccatccagatttttgcccatagctgtgaagccttagcttacttttcggctgcttatggtttatttcgctatatgtttgccgaccgatatttaacccgcgatgagttgtttgcagctgccgcagtttttaccttgctggcttggggatttgcatttttatataacatttgtcagttactcattcctaatagctttcaaaatccaaaccacatccatcacttacaaacttggttagatttactgtttttaagctttagtttgcagtcagctacgggactgtctgacttaatgccccttagtccaccagcacgtgttttagcgatgttacagatgttttgtggtgtgatgtatttggccctaatagttacgcgtttaatcgctttacaatatatcaagcacacgcctaaaaagaattctgataaataa

SEQ ID NO: 59822 - DNA, 759 bp, Acinetobacter baumannii
atgagacgaaaggaaactgggcacgtatttgaaattgaaaaacaagcaaaacttactaaacgcttggttggtatttccggtcaatctggtattggcactggccctcatcttgacgtccgttatggtggttcaatgtctggccagaaagtttcaaatgaacatctggctcgattacaagcaggtggaaaaccattatcttcgtataagatcagttcaaattatggtccaagacaagccccaactaaaggggcttcttcatttcataagggtattgatttttcaatgcctgaaggcacaccgatcacgaccaatgtcgccgtgaaagatattaagacatggtatgacagcaaaggtggtggctatgtcagcgaggtgatctttgaggatggtgtatctcttaagttgcttcatcaatctccaaagatgcagagcaaggtgaaaggtggtgcgagtaagggaagtgataaagcagcaggtgacattcagtctcaacttgatcgtcaattagatgctcagcgctctcttgaaaatgaagtagcttctgaagtacagcggatccagaataatttaaaagttagattggaagacgttgataaggcaggattctcgccagaacgaacagctgaaattaaggcagaattacagcgccgtgctgataatgatgtggctattgccaaacaagcaattagaagcaaactggaagactataaggagtttcgtaaaactgaggaacagttagttactagaagagtcctttaa

SEQ ID NO: 59823 - DNA, 246 bp, Acinetobacter baumannii; identical to SEQ ID NO: 59301

SEQ ID NO: 59824 - DNA, 837 bp, Acinetobacter baumannii
atgttcttactgaaaaatctcgtctcttcaatatcaaaagttactcaggacctgggtaatattgtatcgataacccctgtagtaaacacaggttcctctgttaatgtaaatgtttctgatatcaacattgctaatgtttcaacaacaggcttactttctaatgttatttcaactgtaaccgatacagtttcacatacaaccacagacttagtttctaatgtagttggtaccgtaacaggtactgtagggtctacaaacccaattgatactgtaaccaatattattggcggcgtaacgggtggcgttacaggtaaccctcttgaagttgttactgacattatcggcggagtaacgggtggtgttgtcggtggaacttctccaatctctccagttattgatgttgttcaaggcggcattgatattcttcaaggcgttgaaagcttaaaaactgaaattattaatacaggcattgaaactgtagctgatgcagttattggtgtattacctcaagctgagcatccagtttctgaaattgcagaccttggcacattaactttcgaaacgtctcgtgacacggtcaatggtgctcttgaagttgtttctgatttagtcggtggcgatattcaaggtgctactgaaaatgcaaccggtattctaggaacacttattcagaatggttcaacagcgactggtattgtgactgatatccttggtggcgtgacaggtactatcggcggcgtaactggcggtatcggcggtgacaatcctcttggcgtagtaactgatattatggtggtgttactggtggtatcggtggtgataatcctcttggcgtag

SEQ ID NO: 59825 - DNA, 540 bp, Acinetobacter baumannii; identical to SEQ ID NO: 59818

SEQ ID NO: 59826 - DNA, 228 bp, Acinetobacter baumannii; identical to SEQ ID NO: 59819

SEQ ID NO: 59827 - DNA, 771 bp, Acinetobacter baumannii; identical to SEQ ID NO: 59688

SEQ ID NO: 59828 - DNA, 603 bp, Acinetobacter baumannii; identical to SEQ ID NO: 45120

SEQ ID NO: 59829 - DNA, 948 bp, Acinetobacter baumannii; identical to SEQ ID NO: 59273

SEQ ID NO: 59830 - DNA, 1614 bp, Acinetobacter baumannii; identical to SEQ ID NO: 57336

SEQ ID NO: 59831 - DNA, 753 bp, Acinetobacter baumannii
atggcggagttaccccaagattcaagaagacccggtggtattgcagttattcctttaacttcggatattactcaggtcacttttcaacacaaaccggttttaattagccaagaaggacagcagcgttatgctgttttcggtattccgttatctactccacttggtagtgttcaactcgataccaataaagcccctattcaaatagaagttaaatcttatccatatgctgagcaacgccttaaagttaccaatcaagactatgtaaatcccaatcaaagtcaattagatcgttacgctcaagaagctaaagaacaaaatgatgtttatagttcatttacgcaaagttcgtggcaagccttaccaaaatttatacgcccaacttcgggtaaatttaccaattcttttggaagaaaacgcttttttaatggtgaagaacgtgctccacactcaggtctagacattccagcaccaataggccaaaaagtagttgctccagcagacggtgtagtcgttcaaacaggtcattatttttttaatgggcaaactgtattaatcgatcacggtcaaggcttaattagtatgttttgtcatttaagcgagataaaagtagaaaaaggccaacatattcgtcaaggggaaactttaggtctagtcggtaaaacaggacgtgtcacaggcccccatttacattggggaatgagccttaacaatgcacgggtagaccctcaactttttttaaatacgactcattaa

SEQ ID NO: 59832 - DNA, 579 bp, Acinetobacter baumannii
atggctcagcttttaaaagaggaaaagcgacttttattaagagcgcttacaggtgcattcgcctttgcgtcagtgagtattttgtattcaacaatcgcgttactactgacctcggcacatcatttacccgatctatttattgggctggtacctttagttggtatctttggtgccttatcaacacgttatatcggcaaatatgccgaccaaggctacacacgtttactcacctggatgggttgcgggctatttttggtaagctggatttgtttctatttcggacaaactctactttcagcttatgttattggttttgctttaattcaattggcacttgcccttgtccataccagcaaccaaagtattattttccgtttacgtcccgatgctaaatctcgtattaatgctatttatatgactacttactttattggtggtgcagctggctcggcattagggatttttgcatggaatcgtggtggatggaccatgacttgcctagcaggtgtgggactcgttgtattttgtattttatttagcatgattgatgctttcttacaaaaaaagcaaatggtttag

SEQ ID NO: 59833 - DNA, 462 bp, Acinetobacter baumannii
atgctaaaagcacaaaaacttacattagcagttctcatttctgcggcaataatttcctcagctcaggcaagcgagcaaagtgaggcaaaaggatttgttgaagatgcgaacggttctattctcttccgtaccggttatatcagtcgtgataaaaaagatggaagggctgacaatagctcatttgctcaaacggcaattgtaaatatcgactctggctttactcctggtattgttggtttcggtgttggcgttgttggtgacggctcatttaaaatcggcgaaaataaaaacgctggtaataacatgattccacaacataacgatggttcagcttacgatcattgggcgcgtggtggtgctaacgtaaaagcacgtttctcaaatacaacagtacgttatggtactcaagtgctcgatttgcctgtgcttgcaagcaacacggctcgtttagtgcctgaataa

SEQ ID NO: 59834 - DNA, 1131 bp, Acinetobacter baumannii
atgtcagcattcaagccagatgatttacgccgtgcccagattcaattaaaccaatctttgcaaaatggcggggttcgtagagatcaacagagtcgccaacgcgcagatcgtgaacagcgggcatttgccgaaaaggaaattgaatatgatgattggggaagaaagatccctaagcctatgttcttgcgaccacaagatattgcacaaggcgaaaaatatgatgtagagagagtactttttacaaccttaggtcagcgaaatggggaagtgccacggcgtattacccgtgatgatattttggcatttcaagaaaatattcagctattaaaagatcagtatagtaagggtattacccctcaaaacatcattaatttaagccgacaagatgacattgatcgtgcaaatgagcaaatctatttggcggtaccagtcagcagaaaagctggtttagtgcacttacttactaatgccggcccaaatagtaaagttttaaatcatcacgttgagattgagttttcaaactttaaatctgtcgtatttgatatcgacaaacaggcattaaccactgttaaaaaccgattggctaaaggcaaaatcaaatttcagtgtgattgcgaacgtcatacgttctggtaccgctatatggcaactattggcggctacaatttaggacgtgatgagggtggctttccgaaaatacgtaacccgcatttatccggtgtagcttgtaagcatgttttgcgtgttgttaagtggattggttcgccatcaggcattgcatatcttaaaaaggaagtagagaaagaccgccagaaacaagttggtgcacgatataagcaaacagataagcaaattcagaattcgatcaatgaacaagtaaaagatgtgatgaatggttctgttaagcccatcaaagccaatattcacaaagctgaaaaagaaatgatgcgtagagcagataaagttgcgaaaaaactattagaacgtgaactgaaaacccttaaacgttttgaattagaaactcttaaagctagtcagattgaaagagttcaagccttacataaatcaggcgctattgaccaagaaatgcttaatatctttatgaagggtctaagtcgaaatgctaaatag

SEQ ID NO: 59835 - DNA, 549 bp, Acinetobacter baumannii
atgctaaatagatcagtaaatcaagttgcaaatggacgccgtttagcagcgagacgtgttgttatgaatgcactagctagtattccagcacaagtttggcgcaaagaagtaattttcaataatccagctgaagattcaaaacctgtagatcctctttcttttgaagcaaatactttatcgattcaagatgaacctaactacaagtatgaatataaaggcgctgcttatgttcatttagataaatttaatggtggttatattcaaaagaacttctcaatgaataacccctcagatttggtgctaactgctcaagtagagccatttaatgatgagttggaagatgtattggaaaggataaccaacattcccgacttgattcttaaagaaggggatcttttaggtttaatgatttatgaaaatctaatgttgtggtttgaaattgtaaatattactggttttagcctcatggctgattttggcagtaagtatgttttaaaccgtagagatgatttgtttatttcacctataggtgatggagaaaccaaatga

SEQ ID NO: 59836 - DNA, 303 bp, Acinetobacter baumannii
atgagctatttaattttcaatgaaaaaggtaaaaagactggcgacattgaaatagctgaacaatgtacttctgcaattttcaattaccaggtaatcgggaacggggcagaagtagagtttttcggaagcaatgttccatatgcagatccgcaaaacgattctcactgggtgcctattctaactttaacagctgctgcacacgatacagaaccgtttagacagcattgttgggataagctccgttataaagttaaaggtggtgataatgtggagatttatgtttcaagtggtgtaagtggatag

SEQ ID NO: 59837 - DNA, 279 bp, Acinetobacter baumannii; identical to SEQ ID NO: 57302

SEQ ID NO: 59838 - DNA, 279 bp, Acinetobacter baumannii; identical to SEQ ID NO: 57270

SEQ ID NO: 59839 - DNA, 900 bp, Acinetobacter baumannii; identical to SEQ ID NO: 57237

SEQ ID NO: 59840 - DNA, 390 bp, Acinetobacter baumannii; identical to SEQ ID NO: 47311

SEQ ID NO: 59841 - DNA, 225 bp, Acinetobacter baumannii; identical to SEQ ID NO: 57342

SEQ ID NO: 59842 - DNA, 201 bp, Acinetobacter baumannii; identical to SEQ ID NO: 57296

SEQ ID NO: 59843 - DNA, 804 bp, Acinetobacter baumannii
atgaattaccccaacgattcgcttaaatgcatccaaaacgcttggtataagcagcttgtcaattttcgtgcttggtatatgcctgagacacaattaacggctgactggaagttgagagccatcggcaacgctattaaagcatgtccgtcacggatgatggacgattcagaagcaatgctttctgaatatagaaaaagccaaacacacggtgaaaactcaaaagttattttaccaatcatgctcactgcaactgcttcagcagatcagccgcccgatattagtcaattattaccagtacccgattttgttgaaactgtcattgatgagaaacgtgtaaaagttcgtctggtaccaacaacagtaagagctcaaatcgcattctttgccaacaatcctaacgatctgcgttcagtcattgggcaattttgcacgtacatgtctagcagtgataaccgccgttttaatgtgccatttcagcaatggaatgatcatgttgttaattcaacattcactgtttttgaaaatgaactttttccatcaccagtcccaagcgaagcaatcaatctttctatctcaactgtagatattcaacttgtgggttacacacctaacgttatcggtttcggtggtcctttcgaccaaaacacgggtaatggctatgaacctgacggctcagcaacggaacagcccgcaatcaacgacaaagttgtagtgcaagctgatcagtacacgccactcgaccatcaacgtgtgaagggtgacagagaaacaggtgaaattacagttgagcgtatagatgactga

SEQ ID NO: 59844 - DNA, 1614 bp, Acinetobacter baumannii; identical to SEQ ID NO: 57336

SEQ ID NO: 59845 - DNA, 459 bp, Acinetobacter baumannii; identical to SEQ ID NO: 59290

SEQ ID NO: 59846 - DNA, 615 bp, Acinetobacter baumannii
atggaccctataagctttacacggcctcttgatgatcactatgtaagtacgggcttacaaaccgcacttgctaaagcatttaaacaagtatttgcacaaaactttgagcattctttacaagatttactggattacggttgtcctcatatcggtagtaaaacagttgtagaacggttctctaaacaaaacggacttgttgtattacggcgaaataacacctctgacacgttaatgcgaattatctatgccaattggagcagcatgggtaataaaagaggattagcatttttagagtttgttttacgaatgttatgggggaaagatcattttcagattatccggctatggcacagcttggaaaagctaaaagaatatccagcctatttgtctgattttgaaaagccaaattacttcttaacaagtcggattagaattgttttagataaaactgttgacgcaaatgaagtggtagagctgtcaccgatattacggcgtttagtaccagccaatattgtcgttaaagttcactcgatggcatttgatagagacttaggatcgaccagctttgcagcagccatagcagcgaagccttatgcagtttataacttcctttaa

SEQ ID NO: 59847 - DNA, 228 bp, Acinetobacter baumannii
atgcgattaaaaatcttttgtagaaaacgtgcttgttctcaattaattgacttatctcaaatggattgtttgcaagtctccgaaagtgaacatcgaggaggcatggtccatgagcgcttttatgatgtttttatttctcttaaaagtgggtacatctttgatgcaaccattgaagataaacagcatgacaagctattggaattaattgagtttgatcaaaagatttga

SEQ ID NO: 59848 - DNA, 213 bp, Acinetobacter baumannii; identical to SEQ ID NO: 57369

SEQ ID NO: 59849 - DNA, 150 bp, Acinetobacter baumannii
atgttgtcttttgctttaggtgttcgcgtttctcctgagactattgttaatggtacggttggaattggtttaaccgaagatgcgccagatatttcacttggtttgtcattcccgttagatattttaggttttaataaaaaacaaaaataa

SEQ ID NO: 59850 - DNA, 363 bp, Acinetobacter baumannii
ttggttaatggtttttttgaaaatacaaataaaaaaatttacatcagaggtaatggatctttaaaaattaaaattaatgaaaatttatttaacttagatattttatcttcaggtgaaagacaaataattattcttattggcaacttaatttttaatgattcagaatccaataaaaaaatatttattattgatgaacctgaactatctctgcatatttattggcaagaaatatttttaaattcacttattgaaggttcagaggatatacaatttattattgccacccattccccctctattgtttctgaatattcagatttcattattgaaacaaacagtaatcctgaagattttattaattaa

SEQ ID NO: 59851 - DNA, 2442 bp, Acinetobacter baumannii; identical to SEQ ID NO: 57316

SEQ ID NO: 59852 - DNA, 129 bp, Acinetobacter baumannii; identical to SEQ ID NO: 59764

SEQ ID NO: 59853 - DNA, 702 bp, Acinetobacter baumannii
atgattaacactagtaaaacatttaaagctaatggatatgaccatttagttgaagaaagtttcggtatattccgtctaacttctggaaacaagaacttcaaaggttgggttatttttgaattaatatcgacaattaaaatttcatcatatagaacagaagctgatattgatatttctatacattatactaatggttataagcttgatagaaatagaagcacttttacttttcaaggttctttcttaaaggatagtgatgataatttaagagctagcatatctaaatcatctactactgatggtcatggcggaatttatgtccaaccctcacaaattcgtgggcatcgtgttgcaagcttagctatggaccatatcgtacaatttctaaaaaaatttcctgaacaaacaattgtaaattcaatcaagtttgaaccagataaagactttatagatattgctaaaaatttctactctaaatttggaatacctttagaaggtagttttctgataagtgatttaataacaaatgataattggaaagaaaggttatcagaatattcaattcaagatatatttcacttaaatgaatattacacgcaagaacttcaatttttaaataagcaatatgaagtactaaaaaatattacacatcagcctgtctcttatacacatctgacgctgccgacgatactccttgtgtag

SEQ ID NO: 59854 - DNA, 567 bp, Acinetobacter baumannii; identical to SEQ ID NO: 59765

SEQ ID NO: 59855 - DNA, 816 bp, Acinetobacter baumannii; identical to SEQ ID NO: 59767

SEQ ID NO: 59856 - DNA, 3831 bp, Acinetobacter baumannii
atgtccattttaaagctcaaaccaatcactaaagacacagtattggttgcgatttattacatgattgatttcatgcattatcagagcaatattgctcgatttttccttcttataatccataagcaaatagaacttaacttgtctgtagcaaagcaagctttagcttttgcccgtcaagaaagtgactttccaaaattggatgaagttattgaagtcttatataacgaggctatcaaaaacattgatgaatcagttatccaacaccttaataatagttccagaaatgttattgaacagctagagactattgtcagtctttttgcttgcgataaagagctaaaggcttacaccactaaaaagaataaaacattacaggttattggtcttaaaggcatcaaattaaccaaagctaaagagtttgacccctatgccttttattatcagggtgaaattcttgtacgctcaaaacatcttaaagctattccagactctcttctttcagaagatcagcaacttgtaaaaggattattcttacatgtatcaaataccaattcagatgtggaatcagttggcgaatttcgtctcagatccagaggaccaattgtttctacaactggatcaggaaatgatgaatttgaggcttcagaagcaatcagaaatgatggagaaattggggtactccgagacagtaattctggcttatcaaaaagtaatgatgcaagtttatctagcgtccgaaatccaagaaatgaatcttcagatggaaatagtagagccagtactaaccggattaacagcagcggaggcggtgaactatctggtaagagatcatctcttaaacgagcaagagatcgatcaattgtacaatctgctaaatcagttagagctgccatagatgaaaagctagaagctcaattaaaagcagataatgtagaaacaatttggagcgatgcttcaaatattgacgcagctttgccatatctgcaactggcacaacgtggtgatgttttaaaaactgaaaagcggttaattgaggaaaataagaagggtattctttttactaacggcactggtacaggtaaaacctttactgggcttggagtggcaaagcgttttattaatgctggtctcaagaatattttgattgttaccttgaatgataagattgcaaatgactttgtaaaaagctcaagtccgttgaatatcaaagcttacaaattaaaaagtattaaagataacggcggtgatgaacacacagtcgtggtcacaacctttgctaattttggacaaaataaaagtttagttcacaaacattgggacctgatattaattgatgaggcacatactctatcgcaatcatccgatggtaaagcaactgcagcattaaacaaactaagagcattaaccgggcatttgcatggttttagtgaatggtttgaagataaatttgctgatcagatgccaattgaagagctcgatgaagatggtaaagaaacagaacaatacctaagtgcttataacaaaatgcagatccttcgaaatgaacaacgaaagatctggaatttgaattggaaacaccagaaaagtaaggtcaaagttgttttcttatctgctacgccatttagttatcacttttcacttgattgggcggaaggctatttatttgattatatgtctccttcagtatctgttgatgaccaaggtaatttagctgaaggctttagtaaggctcgagagcacttctatatgggaaatcttggatatcgaaagcgatatggtaagttgacgcgaccagaagcaaaggtggatacaggtgtacttgaaagacagttcgccgaaaatcttaaaaacactggtgctatgtctgggcgggatttagaagtaaattttgactatgatcgtaaattcattctaattggctctcgtgttggtgaacttattgatgaaggtttaacttatcttcgcaatggttataaagaaatagaagggcacaaaacacgaacttttgaagaatgggctgctcaaactggtaaaccaacaacaggctggggacgtcatgcctctatgcaagaatatgatcggctattcactggcaaccgatttaaaaacatatacgaaattattgcaaaacgctttgattacttagcaagacgccttttgttagaagctattaaagctgaagcttgtgttgatatggtgaaaaagcacttagcattaggtcgtaaagtagtaatttttcatgactataacgagggcggtggttttgcacctttcttgattagtaagcttgatatcgaaaaatatgaaagcccacttagagaagatattgagcttgaatataatgcattcaaagaaaatagaccggatctagtaaatctcaatcttgattatgattcacctgttgaaactttaaagaatgcatttcctaatgctcttttatttaatggccgtctttcaaagcaacaacgtgaaactaatgtagcgttatttaatactgatgatagcgggcacgatattctcattctgcagtcagatgctggttctactgggattagcttgcatgatacaactggtaaacaccagcgagtactcattaatattggtcaaccaacaaagccagccaagttgagacagacggaagggcgtatctatcgaaccggacaagcatcaaatgctattcagagatacttgactactggtactgcatgggaacgggctgcatttgcagacacgattgctggacgcgcagaaacagtagataactttgcaaaaggtgctgatgctgtagtaagtatcaaagaagcgttaattcaggcttatgaagaagctaaatatgaagagccaagtctaaatgatggtattggcggtaaagcatatgatgaagaaaatgcccgtattgctaagttaaccccatttgatcaagcactaacattctactatgccaaaggcaaacgttctgaaagtcgtaataaccgcgaaggtaaggaatggtatgcaacgcctgaacctctaggattcaaaatgattgaatgggcaggggtacacactggcgattctgtgcttgagcctagtgctggtgatggagctattggtcgttttgttccgcaggatgtagagttgacaatgattgaaccgactgagtctttagctagtcgtgctcaaatggcaaatacaggtgctaaagtaattgttgatacattcgaatctttagaatcattaaataagtaccatgcgattgtgatgaatccgccatttggtcatgctggcactttggcaattcaacatatcaagaaggcttttggtcatctttatgatggtggtcggattgtggccttggtaccacgtggttcgatggattctaaagtggacgaatttattgatagtacacctggtgcaattctgacagctgaaatctggttgcctcaatcgacctttaaaaatgctggtaccgccgtttcaactcgtatcatcattattgaaaaacatgcaggctctaatgatgttccaaaaacacgagaattagacttcacgcaccttacaagtgtagaggatctattttcagaaattcgtgatatcgcaatgcctcctagaaaactacgtattgatgagcagcttgctaagtacgaactttatgtcagaactgaacgtagtaagtatgttttcaatggtgacggcgttgataaacctcagatcaagaatatcatgctcaaattctggggttcggaagtgaatgagtttgatgaaattgttatgccttataataagtctgcagaaatcatcaagaagattgatgaatttgagcaagagaatggcactagtctagcagcttag

SEQ ID NO: 59857 - DNA, 1371 bp, Acinetobacter baumannii
atgaaacactttcaaattaatgcattagcacttgctatagcaatgagcacaatttcagcgcatgcagagactgatcagcagacttcggaatatggaactcttcctaccattaaagtaaaagctggaagtggcgaagaaaatgaaaaaagttatatagcagggaaaacagaaacagcggtaccactgggtttatccgttcgtgaggttccacaatctgtttccgtcattactcaacagcgtttacaagaccagcaattgtcaactttggttgaggtcgccgaaaatgttacaggggtaagtgtcaaccgttatgaaaccaaccgaggtggaatctattcacgtggttttgtagtagataactatattattgatggtattcccaccacatatagcttaccttggtcttcaggtgaaattttctcaagtatggccttatatgatcatattgatgtagttcgaggggcaacaggtcttacatttggtgctggaaatccatctgctgcaattaatatggttcgtaagcgtgctacgagtacagagccaacagctaacgtagaagtgagtgcaggtagttgggataattaccgtgttatgggcgatattgccaactcccttaatcaatcaggaacagtacgtggacgagcagtggcccaatatgaacaaggcgacagctataccgacttgttatctaaagaaaagctatctttactgttaagtgctgaagcagatttatctgaaaatacccttttatcgggtggggtaacttatcaggaagatgatcctcgtggaccaatgtggggaggtttacctgtctggtttagtgatggcacaaaaacgaactggtctaaaaataccactacaagtgctgactggacacgctggaatgttaaatataccaacctatttgcagatttaactcataaatttaatgacaactggtcagctaaactgtcttattctcatggtaagcgtgatgctaattctaagcttttatatgtttcaggtagtgtagataaaaatactggtctagggctatctccttatgcatcagcgtatgaccttgaggtagagcaagataacgcttctttgcagctcaatggtagttttgatttgtggggcttagagcaaaaggttgttttgggttatcaatattccaatcaggactttacatcatatgctcgttcaactgatacaaaaatggaaattggcaatttctttgaatggaacggcagcatgcctgagccagtgtggaatgcacctacactcaatgagaaatataatattgaacaaaatgcactattcgctgcgacttatttaaatccgattgagcctctaaaatttattttaggtggacaatatatatggtcgtaa

SEQ ID NO: 59858 - DNA, 1137 bp, Acinetobacter baumannii
atgaagaaaatttttatttcaattgtatttggtactcgtccagagctcataaagttggctccggtaattttattagcaaaacaagatgcacgatttcaggtagaagttatttttacaggacaacatgatgaattagttcgagatgcgatagatttctttggggttgaaattgatcatcgtcttaaaattatgaatgctggacaaagcctgaatcagcttttaattcatggcttaacgcaacttgaaaatatctatacagatgggcaaaaaagagatgcaattgttattcaaggtgatactacaaccgtgttagctgctgggctagttgcattttcaatgaagattcctgttgcccatgtcgaagcgggtttacgttcttatgatttagatcatccatttcctgaagaaggcaaccgccagttagtttctcgtattaccaaatggcattttgcccctacagaacaatcaaagcgtaacttgttaaatgagcagattccaccttcattgattacagtgacaggaaatacggtagtcgatgctgtgcatttaggaaggaaactcatagctgaaaagacgggtttgaaaaatcaacttgagccttacggaattgaattaaaacaaaacgataaagttgtacttataactgctcaccgccgtgagaattttggcgaaggaattcagaatatttgtaatgctgttgagtatttagcaaaacagcatcctgatttacattttatttggcctgtacatttaaatcctgctgtacataatgtagtgcacgataaatttaaaaatcatgctcaaattcatcttgtgaagccactcgattatccgagtttattggccgttatcgaccgctccacctttattttaacggactctggtggtttacaagaagaaagcccatcatttaataagcctgtcttaattttaagagatacgactgaacgcccggaagtggtagaggtgggagcaggagtattggttggaacaaatcagcagagaattattgaagaggctgagaaacttttaacggattcgcagcattaccaaaaaatggctcatgttgaaaatccgtttggtgatggacgtgctgcccagcgaatattagatgaaattgccagaacttataactag

SEQ ID NO: 59859 - DNA, 588 bp, Acinetobacter baumannii
atgtttttcttttttactttgtggttatattcctataatggcattgaatctccccttaaagaagcttggtcactaacaataagtgttctttcagctctagccactcttggagcagctatcattgctgcaaaactttttaatgattggagagagcaagaacaatacaatcaaaaaagttctcaaattaataaagtaattatgaatgcagaagaatttgaaaaaataataaacaatatgaagcttccacttgcaagatataatggaaacataatgaaaaaaggtgatttttttaattttcttattgagtcatattcaaaaattgaagacgaaagctcaaatatatttaataatttaaatcatttatcagaaataggtaataaaggtttctcatctgaaaaattatttacagaattccaagaagaatatttgaaatttagagataaattagaagtagttattttaagtattgaaacaattgagcctctgaataaagaactttatgacctaaaatatgcgatggaggatacaaaagaaattattaactcaaatttagtaagaactttaagagccggtttaagaaaaatttaa

SEQ ID NO: 59860 - DNA, 771 bp, Acinetobacter baumannii
atgaagttaattgaaaacaatgcttggcagtatctatctgttaagttacccgccgtaggtgcattcatcatgctaattttattgccagcactacaatggggtgttgattatgaagttattcctgaaaaatatcatgcatttgttactggtactttgatgcttgttctgtcatggattggaaagaaaatttctcaaccacgacttaatggcccgcaattaacaggccagttagtagggatcaattctttattgaatatcccaacaccaacaaagcctgatgaattagcttggattgcagaagcaaaaaagcatcttggccttcaagaaatacctggtaaacagcataacccaactattttaaaatggctctcggagctaaaggcttggtgggctgacgatgaaacggcttggtgtgggaccttcgttgcacattgcttgaaatcagctggaattgcttatcctaagcattggtaccgtgcattggattatgtgaattatggtacaaaattagctaaacccgcttacggttgtgtagctattaaaactcgaaagggtggtgggcatgtttgttttgtagttggccgtgacaaaaagtctggaaagttagtatgccttggaggcaatcagtctaataaagtttgttatgcactttataatgactctgactttcaagaattcagatggtatggtcgtacaactcaaccagctagcaaacgttacaacttaccgcaattaagtggcgtgacagcaattagagttactgaagcataa

SEQ ID NO: 59861 - DNA, 417 bp, Acinetobacter baumannii
atgcttgaaggtggcagctttttccaccacggcgattcatttgccatgatgcgtggtggtcaccttgatattgcggtgcttggggcatttcaggtggcagccaatggtgacttggcgaactggcacacaggtgcgccggatgcgattcctgctgttggtggtgcgatggatttggcggttggtgccaagaaagtatttatcactacagaccatgtgaccaaacaaggtgagccaaagattgtcgctgagctgagctatccggtgacgggtaaacactgcgttgaccgtatttacactgacctgtgtgtgattgatgtgaccagagatggtttaaaggtgattgagaaggtggatgggctgagttttgaggagttgcaaaggttgaccggagcagtgttgattgatgcaacgaattaa

SEQ ID NO: 59862 - DNA, 720 bp, Acinetobacter baumannii
atggcacgggtaacagcttcaacactattgcaatctcaactaactaacgaacttaagcttggtttcctaggtcaggctttagcaattgttcaaggaaaaatcttcttagaacaaactgtacgtttattaggtgaagcaaaagacttagctgaatactcaggccgtgaagttacttttgatgcttctcgtggtgtgactggtaaattagcagctgcatataatacatctggtgacttgtttgctgaagtaaataagtttattgctgcggccaaattggatattaaccaacgtacaggtggctctactgtcgcatttgacctttatgttggtgatactgggtcagtattctttaatcaactgtcaagcgataagatgccagttaaaacaggatacactgctggttatggtcaaattgtccgtattggtactcttgcagatggtactaacgtttaccacgcaccgtcagcacaagagcttgtagctgaagcagatacagcgtttgatatgcttttagtgggtcgtggtaatgagccaattcgtgcgccgttcgttggctttattcaaactcctctttcagttattgaaactcgaccagacgcgcgtgaatcagtacttactttaatcggtgctcaagcagccgaaatgaacccgttagaacgttatgctgatcaaagctatgtcattcactgtatcaatatgccatccctcaaaaattcgtaa

SEQ ID NO: 59863 - DNA, 225 bp, Acinetobacter baumannii; identical to SEQ ID NO: 57342

SEQ ID NO: 59864 - DNA, 411 bp, Acinetobacter baumannii
gtgggctcggagatgtgtataagagacagaaaaaatattacacatcagcaatctaaagaaatgtttaagacatataatattatttttggaacaaataaaattcccgttccagattttagtttcacctttaatgaggtagatatagagaataaaattaaggaatttaaaatcgatacaaaatctgttatcccacttttagaaaagttaagtagccttgaatttaatattaatgaaaaaaaatatcataataagaatttactagcatctatagaagcagacaatagaatattatttaaaaggtttgatactctacgtttcataagaaagtacaaactaaacgcttattttattgtttttttattagtattaattatagttatatatctgaaaataagaacaactataggataa

SEQ ID NO: 59865 - DNA, 201 bp, Acinetobacter baumannii; identical to SEQ ID NO: 57298

SEQ ID NO: 59866 - DNA, 396 bp, Acinetobacter baumannii; identical to SEQ ID NO: 45286

SEQ ID NO: 59867 - DNA, 339 bp, Acinetobacter baumannii
gtgccatttcagcaatggaatgatcatgtatttaattcaacattcactgtttttgaaaatgaactttttccatcaccagtcccaagcgaagcaatcaatctttctatctcaactgtagatattcagctcgtgggttatacacctaacgtcatcggtttcggtggtccattcgaccaaaacacaggtaatggctatgaacctgacggctcagcaacggaacagcccgcaatcaacgacaaagttgtagtgcaagctgatcagtacacatcactcgatcaccagcgtgtgaagggtgatagagaaacaggtgaaattacagttgagcgtatagatgactga

SEQ ID NO: 59868 - DNA, 381 bp, Acinetobacter baumannii
atgaaagattattttctaaaacgaagcttatttattttcctttggttcgcatgtcttgctggtttgttaagtataaaagtttcttggttaactgagactatggctacaataattttattcacttttataattctcggttcaattatattaggttatagaaatacatcttttgctccagaatcaaaaattaataatagcctcatcttacatacaggattcatgggatttatgctaatgattgatttattgtttggaaaatcagcttggtatattgatctagcacggaattttggttttcttagcttatttttattaggcacatttattttctataaaaagaattttaatctaaaagtatcaaaaataccgccttttcaataa

SEQ ID NO: 59869 - DNA, 567 bp, Acinetobacter baumannii
ttgagtagtacttctgtaataagtttgaaaaaaattataggagaagcaattgtaaattgccttgaatttaattatgaagcagcaaaaaaaattttaattgatgctgaaaaatttagatcagaccgtttaatagaaaagtctagagagtggtatttatcattcacaatcttattaacatttatctttatattattatttatttctcttaattataataattttggtttaataaataaagaaaatatagaaatgttaaatgctggagcttttgctgtaattggagcttgtttttcaattattataagatcgggcgaactatgccatgctagttatgcgggtaaaaatcttcatttacttgaagcttgttctcgccttctaggaggatttataacaggtcttattgttttttttggtattaaatcaggtattctttttgcatcagtttttaaaatagaaaattctaattttttacttccacttctttctattctagcaggtgcaagtgagagatttatgccatctattatcacacagattgaaaaaatatcactaacagagtctaaatga

SEQ ID NO: 59870 - DNA, 294 bp, Acinetobacter baumannii
atgaacgatcgagcaactaatgcaatggaggcagcagttagtactgctgctgcaaccacaacaaaattttcatatggctatgtagtaggggggagcttgatcggagtagttggcaaaattgactgggccgttgtcttctcgatttttatcggtatagcaaccttcctaacgaatctctatttcaaaaagcgtgatgaaaagcgtgctaacgagattcataaattgcgtgttgagcaatatgaacagaccaaaaaacgtttagaaggagatattgatgacgagcgaacagactag

SEQ ID NO: 59871 - DNA, 207 bp, Acinetobacter baumannii
atgagcgttaaaaaatatacacgagcagacggtcagtacttcaaagtaacaaacaaagattctagcgcaactttgatgtacggtgaattaaccgaatcaaatcaattggtcactattcacaatgttgaatttatctctgaagagcaatatgaatctgagcgaccaaagcctgagttaccctctttgagaggtaatgttttagcatga

SEQ ID NO: 59872 - DNA, 219 bp, Acinetobacter baumannii
atgtcttgcatgctgacattagaagaaattgaaattaaacgccaagagcttgagcgtcatttacatgacacgatgggcgctgaacttcaaaaatggcaaagagaaaataaattgtgcatctcagatgtgaatatccgtcttgcaagtaatcactgtttaggtgggccaaagcaaaatattgtcactggcgtttcagtagacctagattacaagccttaa

SEQ ID NO: 59873 - DNA, 228 bp, Acinetobacter baumannii
atgttccatagtgtaggtgatggtaaaggtagacgtcgtatatatgtgaatggcaatctcatcaaccacgttaaatgggcaaatgaggaaaaagggttgatctgttatttgccatatccatttaagattaataagcgcaaaggtgaagtttatacaagactattgcgtggcaatgtgcgagtggagatgattaatgggctggacaaacaaaccgagtgccttcactaa

SEQ ID NO: 59874 - DNA, 225 bp, Acinetobacter baumannii
atgaacacttataccaaaaaaattcttgtctctgatgaagatggcaatcaaattgaagtgctggctgaatgtgtagatattaaaagttcagagagtttggatgcgcctgcaaaagataatggttatgcagtcaaagcaatcttgatcgatgggcatacagttccactgggaacagatgcatgtttttaccatcctgacacaagagttttatatacagttgtttaa

SEQ ID NO: 59875 - DNA, 144 bp, Acinetobacter baumannii
atgttttattctcatgatcataagtatattttatattccagcattgaaagctttgcttgcaatcccgaagggaattataacttagttgtctacacaaagagtgggcaaagacatgaattcaattatcaaagccgagaagagtag

SEQ ID NO: 59876 - DNA, 420 bp, Acinetobacter baumannii
atgatactaataaactttggttggtgtggcataaaattcaaaagatcacatgagtttggtagattaacagaagccccattttggcaacttaaattcattttctttgagttactgaaatttcaaaaaggtgctagttcgcgcttcattaattatgcatggaatatgtataacgacactgagcagacaaaagaatgggttgctgaagtcaaagaggctaaagacaaagcctacaatgaagtggaaaagtactatgaagaaaagtatgggcgaaagatcgaagaattagagaagcgtaatgaatcactacagcgccaatattcacaggtctattatgagaagcatgcactacagcagacaataaaaataatcaatggtgaagaagttcgccccgatttccttatgggcgcggatccaaattag

SEQ ID NO: 59877 - DNA, 303 bp, Acinetobacter baumannii
gtggacaaccaacatcgcaaaattaatacatatcgtgaattaactcaggaagaagttgatttgatgaacgagatcaaagcacttggaccacaaatccaatcaatcattaaaaaagtgcaaagccatgtttcgactcagcgttacaactgtaaatgtgatgctgggcaacaggtacacaatgtggatgaatgggatcgcctagaggctgcgactcctgagcgttttgctgcaatggctaagaccgagttccaaactgggttgatgtatttagtgcgtgcggtggctcaacctactggattttag

SEQ ID NO: 59878 - DNA, 735 bp, Acinetobacter baumannii
atgagtttaaagtatttaataatttatagcctcctaagttttactattctaggtactataggctgctcaaaaccactttcatcacaaaatactaatcaaagtgaaacaaaccaattatatgaacaaggtggtaaatatttcttaggcaaaggtgttcctaaagactatcaaaaagccttttcttacttccaaatggcagccgaaaaaggatcacctatcgctcaaaatgatttagccgggatgtactttaaaggtattggaattcaaaagaatgaagaaaaagcttactattggtatgagaaagctgctaaaaacaactttccagaagctcaatataatttgggtttgatgtacgataatggctattatgtaaataaagatagatcaaaagctttagaattttataaattatcttctgatcaaggatatgctaaagctcaatataatttagcaaatgcttatctttcagggaatggaataaaaaaagatattaatttagcactagaattatataagaaagctgcagatcaaaatctttctgaagctcaatataatttagcaaatatttattctgatggtactcttgttaaacaagataatgaaaaagctttagagctatatataaaagtagcagaaaaaggtgtacctgaggcccagaataacctcgcctatatgtacgctaatgtctactcagattatgctttgcgtgctggccacattgccagctggctttga

SEQ ID NO: 59879 - DNA, 201 bp, Acinetobacter baumannii
atgcgcgtaattgtactaggtagcggcgttattggagtggcaagtgcctattatctggctcgacaaggagctgaggttactgttctcgatcgccagtcaggtcctgctgaagaaacaagttttggtaatgcaggtcaaatttcgcctgggtattcgaccccttgggcagcaccaggaattccttttaaagctgtgaaatga

SEQ ID NO: 59880 - DNA, 1230 bp, Acinetobacter baumannii
atggaacgagttgtcatcacaggtatgggaattaattcttgtattggaaatacattagaaacagtaaccgagtccttaaaagcaggccgctcaggcattcgctataacgatgtctatgcaaaactaaactttcgaagtcatgtgagcgccactgccgaaatgcattttgaaaatatcaatccagaattaaaaaaacacatgggcgtttgcgcgatgtatgcctacaactcggcactcgatgcgctacaacatgccgatcttgatgtaaatgatattgccaacaactcaaagtatggcgtgattggcggaacaggtggcacctcaacagcgtccatcattgacatgttgcataccttaaaagaaaaaggcgcaagcgaagtatcgcccgatttagcaccacgctacctcaccagtaccattagcgctaacctatcgcgtgcctttaacttaaaaggtgtatctcaatcggttgcgagtgcctgcgccacttcagccgacgcaattggttatgcatatcaccttattgcggctggtaaacaagacctcatgctggcgggtggcggcgaagaagaccattggtcgcaaacggcaatattcgatgcgatgggcgccttatgctctaaatataacgatgcaccagaaaccgcttcacgcccatattcagtagataatgacggctttgtaatcgccggcggcggtggcatggtagttttggagtctttaagccatgcccaaaaacgtggagcaaaaattttggcagaagtggttgggtacgctgccactagtgatggtgtcgatatggtggccccgagcggtgaaggcgcgacacgttgcattaaactggcactcgcagaagctaaacaaaacggctgtgaaaccatcgactatatcaacacgcatggcacttcaacgccggcaggcgacattcccgaactattggccatagagcgagcttttggtggcgaaaaagtcccgccactcagttcgaccaagtcgatgactgggcatagtttgggggcagcaggcgtacacgaagcgatttattctattttaatgctgcaaaataactttattgcgccgagtattaatattaccgaactgcgcgaagaagctaaaaagttcaatattgttcaaacgagccgagaaaccgaactcaaaacagtgatgagtaatagctttggttttggtggggtaaatacctgtctgatttttagaaaatgggaagggtag

SEQ ID NO: 59881 - DNA, 1224 bp, Acinetobacter baumannii
atgaatgcaccagtgaatgttcagcaagaacttatgccagtgccagcgtctatgcgtgagatagatcgtaagcgctatttatggatgattagtccggctctacctgtaattggtttaggtattttagctggataccattttggtccacgcccattaaagaaagtattcgctttaggtggtccacttttattacatgttgtgattcctgcaattgatacaattattggtaaagatgcgcgtaatccaactgatgaagaaattaaacttcttgagaaagatccatattattcgcgtttagtgaaaagctttattccattgcaatatgcggcaaatatttatgcatgttatttaacaagccgtaaagatacttcatttattgacaaaattttgcttggtatttcgatgggtgccattaatggtattgcaattaatacagcccatgaactaagccataaacatgatcgtatcgaccatattttatctcatcttgctttagtacctactggttataaccatttccgtattgagcatccatatggccatcataagcgtgcagctacgcctgaagatccggcatcttcacgtatgggtgaaacattctatgaattttggccacgtacagttattggttcttttaaatcagcaattgaaattgaaaaaaatcgtttaaaacgtaaaggtaaagagttttggtcactcgataacgaattgctgcaaggctggggtatgagtgctgctttccatgcttctatggtaggaatttttggtaaaggtacgattccttatttagcaacacaagcattttacgggattagtctattcgaaattattaattatattgaacattatggcttattgcgccagaaaaaagaaaatggtcaatatgaacgtacaatgccagagcatagctggaataataacaatgtagtgaccaacttgttcttatatcagttacagcgtcactcagatcatcatgcttatccaactcgtccattccaagcgttgcgtcattttgatgaagcacccgagctaccaagtggttatgcaagtatgttgctaccagcattaattccttcattatggtttaaaatgatggataagcgtgtatttgatcactataaaggcgatttaaataaagcgaatatttcaccaaaacgtcgtgcaaaaatcttcaaaaaatttggtgtagtcgatagggcattagaaactgcacaagctgaataa

SEQ ID NO: 59882 - DNA, 483 bp, Acinetobacter baumannii
atgaaacatgtaaatgtatattttaattctcaatatattgaagtgacatcgtggaatgatggtggatgttggcttttaaatttagattttgaaccaatcaaactatcaacaaatgttaaaaataaaattttgggtgagtctattcaaattgctttaaatgcagggaaaaatattcctcctgagaatgttaagaatattttattttctccggaattagacagcctaatgacggaaagagataaaaaattaatggcagagttcggttacaaatcaaaaaaagcattattcaaacatatgagaaaagtaagcataacgtatatcaatgatacctataaaatttcaccatcacatcaagatggactagattatagtttcacaggcttaagtaaagctgatgaaattattcttccaaatgatgcaacggatgaagaactagggcaagcagttcgcctagcttatgaaaagtgcacaagtatttattaa

SEQ ID NO: 59883 - DNA, 20274 bp, Acinetobacter baumannii
gtgctagatttaactaaagataaacttttaggttttgttaatcatacggggggactgaatacaaatgccgaatattcagcctctattcaagcgcaaatacctacagaactaaaagggacatattatgtctttgttgtaacagatccagcctattatcgagatggtgcaacaggtaaggttttagagtttgaaaatgatttaaataatacgcttacatctgaacaaccattattaatcattcaacctgatccagtcgatttacaggtcactgatgttttattgcctaaacaagtaaaaacaggtgaaaaagttcgtattgaatacactgtaaaaaatgtagctgattaccaagctcatggtcagtggtcagatgcagtatatctgtctagaaataatagctgggataaccaggatattttgttgggaagatttacacgtcaaggtgggttagatgctcatcaacaatatactggatttgtggatgcacttttaccaatgattcaggatgggcaatggtacattgttgttcgcccagatatttataacgaagtatatgaaggtgatattgtttataccgaaacaggtttaaacattgcccctgctgaagcgaataatgaaacagcctcagccactacttttagcgtaacagttcctaccttactgttgaatactagcactgacttacaattaagtagtggtgatcagtatctttacaaacttcaggttggacaggatgaaacacttcgtgttcgtctagactctagtgcattgaaaggttctacggagctgtatatccgttatgaagccgtacctagtgcagggcaatatgattatgcttatagcgtgcctaattctcctgatcaggagttaatagttccaactacacaggcgggtacttattatattctcgtaaaagcaagcaactctcctaaagatactgctgcaacaatccttgcggaaactttgccattatctattactaaagtgacgccagatcaaggtggtacaggtacagatgactatcgttgggtaacgatggatatttatggtgctcaatttgcagctggagcattagtcaagctcagccgtcctggtgtttatgagatcgaaccagagcgttggcaagttttagatgctacacatattcgtgcaatatttgatttacgccaagtaccacatggcttatatgacattatagtgactaatccaaatggtgaccgagttgttgagccatatcactacttagttgaacgtgcgattgaaccagatgttactattggtttaggtgggttaagccaaatcgccccaggtgaaacaggtatttacagcgtttcacttcaaagtttaaccaatgttgatacaccctatgtccgtctggatattggtgctgtggagatgggttataacgaatcacttattgaagggctaaatttacctttcttaatttttggttcaaatgtaggggggcagcccgcaggtattgtcattggcgatcaggcaaatacacagcaatacggtgttactccaacagataaaagtaaaattagtcaaattccgtgggcaagcctagatggaacattaaatactgctggaattaacttggcacctggctatgcttttgatgttaatgctgccggatatactggatttacctttaatattaaaacttatccaggtttagccgaatggatgaaaatggattttgaagggttacgtgagcaactctatatcatacatccagagtggaaattacaaggtctattagatcgaggtgtttcagatcttgataatattcaacgtggacttacagcacgtttcttagatccaaaggaacgcttaactaaaaaagaaactttagcattagatttccgctttaatattgctgcagcggcaactccgattacccgcaatgaatttattcaagatcaaatcaagcatgcgttgaaaatgcgtgatgcaattttgaaagatacttctgctagtacaagtctgaaagtattagcagcagatgaagctcaatggacacagggttggttagctgctttagaagatgcaggattattacgacctgaaaatcaggcaccagctgttaaagaaagtattcaagtccttagtcttactgcaaatttagcaagtggcattttattatcgaaagctggtgaaaatttccaaacgaaagcaagcgtattgactttctttgaacaaatgcaaaagtggtatggtgatacttctaaacgagctggtgatccagaagctttgaaagctcaaattgaatatactgaatatcgtatagatgatgaaggaaatgttgcattaagcccagttcctaaaaatattactcaagaagatcttatcttaagtaatgagagtaataagcactttatcaattttaatatttttgctggggataggtcgcaattagagtatttacgtcatttaggattattggatgagaagttccgcccaataggtgcccaagcacttgctttgagtcaatatcttcagcaaatggccgctgtaaataccgatatggtgtatgtacaaggcccatcagtaatgccacatactgatggtaagagctatgtcccgagtgagacggcgttaccatttaaactaaatttccaaaatactaccgagcagtcacttcatgaaattcggttagttacagctattgatgagcagctagatccatatagcctacgtttaacggatatgaaaattggtgatattaatattcatattccagaaaatcgtagtagttttagcagtgacttcgattttacaggtagcttgggctttattttacgagtcagtgcaggtgttgatactgaaagccatatcgttacatggttgattcaagcgattgatccaaatacaggtgaagtctcaacgcaaaatttacatcgtttattaaaattgagtgaaaataacaaaggttttgttggttataccattcaagcagcggagacggcaaaatctaatgaagaaattatcacgcaagcgcgtatatatttaaataatacaccacctgttgatagtcaaagttcaacgtatattctagataatcaacgtcctgttactacagtacaggttgtatctgagcaaagtaccgttgaaaatcaagtacattacaaagtcaaatggtctgcacaagatgatgtaagtggtattaaacatgtcacattgtatgttgcagaaaatggcagagactttaagatttggcagaagcagctgacacaagccaatggtgagctgttatttgtagggcaaacaggtacccagtacgaatttttagcggtagctacagatgtggcaggtaatcaggaaattgctaaagtatctaacgcagtaattccagatgatggttcacgtcaacaactactaactcaaattggtagtaatgaggcattgcaacaaactgcgcaaatccctcaagcaacacaagatcgtagttatttaaataacactatttttgcagaggctcaaaaaggtctagtgggtcaaacggataaaaataaaaacaccgatttaaatacagtattatctccattcactttaaatgcatttgctagtggttttaatgctagccaaggtgaagtaggcgcactcgcaatggttgagttgcctgaccatcgtattttagtcagtgctgggcaatatcgtaatcagttgtttatttatggggagcatggaggcaccaaacaaaaacctctctatacttttgaacagccgattatggatatggccttagattctaagggccaactatgggtattaactggccaagagttgtggttgttggattattcaactggtcagattattgagcgtattaaaggtcctgataatgaacctttaacacatgcgttaacggttgagcctgaaaccgatcgtatttatgtttcttcaggaaatggtattgagatttttgatgctaatgcgccaaaaggacagcaatggacacacttctctaatgcattagtctcagatttaagtttcgcaccagatgggcgtttatgggctgtacgttggacgagtgctaatgttctgtctcatttaggtaaaaccgatattattagtttgccattaactgggaaaacgaaaggccgtgccgaagttgaatatacgttaaatggcttaattgatagtttagtctttggtcaaaagggcactgcatttgaaggtttgttatttgcttctgcaaataataaccaacaattaagcaatagtagtaagtcgttgccaaaactggataatgccgctgtttggatgattagcttggcaaaacgtcaagcggttcaattggctcaaggtggttcccgtggtgaagcaatcctgattactcatgaccagcgtattttagttgctcaaaccaatcgcattgatgaaattgccttactcaaagcaccaactattactgcgagttcaattcaggatggggcatatattccactaccacttgctaatgcaactatttctttcgatcaagcaatgtggttaggaaataatggaaatgatagtacggatattgcgagtgttttaaatccaacaaattaccgatttgttgggatgggcaaaaatgttaatcaagtcttgtctcctgagtctgtgcaatgggataacgcaaccaatagtgtcattttaactttgccaaatattgcagctggacaatggcgtcttgaagtgtcatctaatttgcaaagtgtaaaacaaactcgcctagagggagtgtacaccgcagctttcactaccgtgaccgattacagtgctttcgttagcattgagtttgataaaactcgtgcagaccgtttaaatggtacagtgagttatgatgtaaaaatcaccaatatcggtcaggataatattcaaggtccattgttgttattactcgatccagggcattattttaatggcgggattgtctcggcaacgcaagggcaaggtatccaaaatgaattatggttactcgacgtcagcagttatttacaggctcatggtggatctctaaaagttggagagaaactcacaggcattactgtatctgtagttaaagctgaagatttagcattatctaacgatgcagctcgcttattaaaatttgatctgacacaccaagtttatgcacttccttatgataatcagccacctgtaattagttatgatgaaactaaactcaaggccaaagtaaatgagagctggaatttagatttaacagccactgatcaggatggtaaacagttctactggagtattgtagaagcaccgaaaggtgtcagtatcgatgctgggaatataggacaagcttctgatcaaggctatcagtcacatgcacagttgcattggacaccaacggctcaagatcgcgtagatagcgaaattctagtcaaagtcgttgatagccgcggaggttttgcacttaagcgacttaaaattcaagttgatggtgcgaatcatgtgccagttattactaccatacgagatatcgacttaactgaaggacaaagtctcagtcaacagctattggctgcagatgaagatggtgatcgtatcagtatggtggtacgtaatttacctgctggggctgagtttgatgtgactacaggtatgttgacttggacacctgcttatgatcaggccggtaaatatgaaaatattgagttagttgtatctgatggaaaacacgaaagccgttatcagtttaatattacggtaaaacaagggtatgaaaaacctgtgttattgccagtggcagcacagcaattgcgtgaaggtgagcgttttagtttgcagttagcaggaagcttaccacatggactaatgcaatatgcgggtcaggatattaaactgaactatagcgctgagtggttaccgaatggtgcgatcttaaataaagatacaggttggttggaatggactccaggttatgcacaggcgggtagttatgatattccaattcgcttagtggcaacatataccccaactaatggcggtattcctgttcgcacagttgcagcgcaaacattatctttggtggtcaacaatgttaatgctgcgcctcaatttgaatctagtccaacatggactgtgctcgaaggtgcaagtgttcgtttaaatatatttgcttttgatccagataatccagggtttgaacctgcttttaaatcgcatccgcaaagcaaagcagttcaaatgtctgatgttcctgcttccgtaagttatgaggtaacaggtttaccggaaggagcaacatttgaccctgaaacactggaaattgagtggaatccaaattaccaacaatcaggcatttacaagattaaagtggttgcaactgatgatggtaacggtactggacaaccgctttctacagaacgcacttttaccattaatgtacttaatgcgaaccgtacacctgaaattggtgatgttcaaagtataattgttgataaaggggctgtgattgaaattccaattacagcaacagataaagatggtaacccgattgaattgcaaattgaaggtttaccaaattttgcgacatatactcaaagccagtcgggtagtaatgttaagggggtaatccattttgctccgcaagcaggtcaccgaggtgattacacgattaccgtgacagcaagagataatggtgatggcgatattaatcaagtacaggtagagcgtaagagttttgtcgttacagttagaagctatagtgaagcacctaacctcagtgtgcctacacgaaacgtcgccgtagttgggcaacaaatacgtgtaccaataactgtagccgatttagatcaggacacattaaattatatcgtgcagggtttacctgcgggtgcacaacttgttcaaagtgctaaatatggttatgcagaaattgtctggactccaacggcaaatcaagtaggtcaatacgatttaagcgttcaggtatcagatcagggcttaccgccaaaagatttaggttatccagttccagaaggttttgtcgctgtaccaaatgtagttgcacaagatattcgcatagtagtacgggcaactaatcttacgccagaattacttgatatacaggttcaacaaggtggaagtgttgtacaacaagcagatcaaattattcttcaggcacaagaaggacagccgcttacatggactatgacggttaaggacgctgatctagatcaactctactggtcatttagtgctttaccaaaaggtgtcaatatcactactcaagcattaggtaatggacaaagccaacttgtattgaagtggttgccatctatgtttgctgcacaaagcagtttgggaagcagccagttaggtaactacaactttaccgtaactgtaaccgatggtagtgccaaacttaatcgtaatgtccaaatacaggttgcaaatgttaatcaacaacctgtatttacaagcctgccattacaactggtttatgaaggtgaaaccctttcatttaatttattagcacaagatggtgacaatgatgcgctgcgttaccaattagtacatgatgctaatacgccagcagatatttatgttgatgcaacgacaggctacgtcgagtggacgccagcgaataatattgtcgataaccaatttggtgatcagaaggcgtttgacctgacatttatggtgactgatggacaaatatctgttctcaaaactgtacaggttcgtgttcttgatgtgaataaggcaccgaaaattcaaagtagtaaccgtactttagtggtaggccaacagttccaacttgacattgtgaagtcggctcaaaatagcttaaacaataatagaaatatttatgtatctgatattgatggccaagcgcagactcaaggtttgattgtaagctttgaccaattgccacaaggcgcaagctacgatgctgttacaggacgcttatcatggataccaaatgcagggcaaattggtaagtttgtagcctatgttaaagtttcagatggctatgatacggttcgtcaagcaattacctttaatgtagttgcagatcgtaatgcttatgaacctactttacatattgaaactaccccggcaattccagtggttgcaggacaaattgtcacagcgacggtacgagcggatagctttagtgctattgctaatactatggttgaagttcgaggcagtgcgttaggaactgatcaatggcaagtcgcaagcttggattctactgggcgaattaaactgattgggcaacagccaggacttatagaaatccgtgcaactgctatagatattgatggttttagtcagcaacaagttcaaacaattcgtgttaaagatccgcaagataatttggccccagttttaacatggcaaggacaacttaaaggtgcagcaattacgacggcacctattgtggtacaaaacattactgacctgactgcatcaattaaagaacagcagcttatgggctataaattagaaattgcccgtaatacgacaggactattgcaatggcataccttgcaagatgtgtcgttgaaagcaagttatagcaatcaaacgctagatatttttacaattgatccagcattgtttgtaaatggagcatatcaattacgcttaactgcttgggatttggttggtcgagttgaagagctatatgccaatattgagatcaatagcgtcacaaaacaactgaatcaagcaacatatgtagatgctagcttacaaattggttcacaaacaattgatctggttcgctcaattacgacagatagccatggtgatttctccaactggacaactggactatttgatacccaactgactcataaccaacgtttaaataacagtgttggtactgttgctgcttggcaaactggagcaaaagtctggttgcaaatcccacaaggtttaacaggtgtaactgcaatacaaactcaatatttgaactttacgctgaatttgcagacgcaagatgtgactggcgaaaataagggtattcatcagttcacaccacagtttagtaatgtgcaaggttggagtttgactgcacatagctccgccgatcttcatatcgacaacttgattcaacaaggtcagagtttatataacgaaagtacaggtctggcttgggttccgagttatttcaatctgactgcaccagatggtacacgttatttactagaccaagcaggcaaagtgctttccatccactttaatacaggcgagcaatggcttgttagtcaaaataatattgtattggtaggtggaaaaacctctcaaagtattgagtttaaacgtgatagccaaggccgtattagccagattcttgggcaaggtattcaaggtgaacaggtcagcttgttgtataaatacaatagtgccaaccaacttgagttagtacgtaatctaatcactggagaagtagttcaacgctatagttacactgcaacaggagaagtccgtctagaaaaagcgatagcttatttaggtgcaagtgttgattggttgaatcaaaaccattctgcaccacaatggcaaggcgatctaaataatcaaactcaatattttgattttgctattcgtgaatcagaactagcatcaaccattaaagcgatgggtgcaacaggagctgttttagttgcaattgaaactcaaggtaatgttcaaaatattaatgttgccgatgcaactattgtgtcacaacaacgacatggtgaccatacagttaccctagtacgtattacgtcagcaggctttaagcaattagctataagtggagttggtgcagtcgccgttcgactgtctattgttggggatcttaaccatgatggtaatgtcgatggtttagatagtaccttgttgcaacaagctcaagaaggacaaaatcagtttgatctaaatggtgatggtcttattaatcatgctgatctacaaattttgtatgcaaactatggttggaaatcaaataaggcacctgtcaacgttgtaccgcaagggacgcaagcgttaaaaacacatcgtgatttatctgtaactggtcaattagaccagatcgcagttgatcgcgaaggtgatgcagtttattggaatatcttaagcagtactcatggtgttgctcagctctcatataatggtaaaaatttaagttttaaacctgaagtaggtttctcaggttacgcaacggtaactttgcaagctgatgatggatatagcaaaggacagccaattgaactgaaaatatatgtcagcgatgcaaaactagtcttaattcatattgagcggttagctgctgtcgctttgggcaatagtgctggcttgcatgtaagaggtgattttgcagatgaagagggcgttaccttaactgctgattatttacagtttgtgagcgataacccagatgtgcttacggtagatgccaaaggtaatatcacaacgaaaaagtcgggtattgccacagtccatgtgtctgctagaggtattgagggggtgaatgtcatctctgttgatcacagtatttatactccttatgctgaccaagatggttttgaagtagatgtttatccaagagcagtaaatttacctctttctgctacaagacagctcaaagttcatgatgctgatggtaattatatttctcaagcaactacagggattaaatactatattagtgatagtaatattgcagatattacagcagacggtttagtgattcctaaagtacttggcaaagcaaaaatcacgattatttatcaaaatatgcagacagaaattgtacttaatgttcagcaagaactcttgggtacaattaaagtatcgaataaagagggaggaattacatctgattcttcggggaatattcttatggttgcctcaggctccttacctgatggtacagccgtatcaatcgaaaaagttgctttagatagcgttggtattccattgccagccaaagaatatttagctggtttaggtgctttcacaattgatttatctggtgaaactgcaactaaaccattacaactcggaatcaaagttggtgattcttatattgatcctcaaacaggaagtacagaacagctgaatgaaggaacagaggtgttgttttggaggaaaggtatatttactgatgccaatggcgttgaacgtgaaacatggtggttactggataatggatttgttgatgcgaaagggatggcaagaacagcaagtccgccatttggaggcgtgtcagtttcaggaacagtggttattacaacacggataaaaaatgtggataaaaagactggagcaatgacaattgttcagtcatctactgattattccttcatatatagtatggcagctaatgctgtgatgagcgttggtcgtggtggtttggtaggtttagcgatagactctgctttcacactttatgatagtttctctgtcgtgacttatacgcttgcaggtagctatagtaaagaagtgccagtaaataaagatgatggtggaataaccattaataaaattgaagttccaaaaaataataatgtagaggaaccaagtatttctggatattcatttaatgcaaatacaaatgagttaactgttgatgtacaaaatgtatctaatgcatttgatctaaatatatggttggttccacaaggtgatcaacttgaccatccacgcaataaagcagaacatgggctcatatggaagtcttataaagctaattggaaaagtggaaatacgtattcaattgtaatagatgatggtattgctctaggtttacataacatttacctcgagaagaaattatatacttacacagataatggtattcgaatagcgagtgattattctgaatactcagattttgtaagtttaaaagttcaagcaccaaaagtttcaatagcattgagtaataaagaaattattattacagagcaaggtaagcaaacttcagattttggagttaagcgtattgttaatgctgatgaaaaaggcaatggattgttcttatatttgccatcaaataaaactgatccaattacatacaatgaacaaggaaccttagcatttattgcggggagaaacacaatttatgtgttagatatgatttcttataaaatcgtagattctatcactgttaatagttcaggcgaatacatctctgcacttctatacaatgatggttggttgtatgtcagtagttatggaccgtcaccactgattcgtattaatgttgatgagttatcaacagagtttctaaaagtacaacaaagtttagatatttcgactgctgctgtaactggctttggagatatggcaattagtcatggacgttacttggctgtgattgcatcagtttcaaatcgtggtgttctaggtgggataggcggagcagtttattggacaaaagaccctgttggtgatatttatgtaattgatttaaataaaataaattatcaaggtgaatttactgacaataatggggtagatattattaatgccattgacctaggtaatataggtcagcgtccaatgcgtattgccgaagggttatatgcaggtgagtttataatgacgagtttgcgagatgtaaatcaaggggtaagcaccattaaagttggtttggataaccaaggtaatctcacgcaatcttctgtgcataaaaaaattagactaaagccaacctatactcaaagagactataatccaagagctagaacaaatagacaggaaattcaaaactcctctgatgtcgttttagtcaattataacaatatgatgtatgctttggttgctgattataatttttggtttaatgatacttcagtatcagagtatggtatgtggggtgtaaacaaaagaataggtgggaaaatagggattatccaagacccatttgggtattatggtgaaccaatgtttattggttcaacaatacctattattggtgcatctatagagacattgactattactgataatggtttattacaagctagtgtctggatggatgaaatgggaggccctgatgatagctattattcacggatgtttagaagtgtttttgtctggaatgttcaagacttattagattctgctgataggtttattaaagctggtaaggtggatactcaaaagccaattgatgcggctttaccttctcgatttgatgatttaacaggaactaatgttttctataactctgtgaaaactattcaaagttattcacatgagcagagttctatatttgatttagatagttatctacattctgaatcagataaggatgatcaaccagctgcacctacaccttcttcagaaaaacctgattatagtggtcttgacattaaatctatgggttcagtaggaaattctctagttagagaatatgcaaaaaatctatatatttcatctatggttcaagtcgagcttgtaaagaacttgtatggttcagcgactccggaattagaaaaagttgatattgctaagcagctattcttatcaacatttgctgatgctaaaagtgcggaatttgctttaactacagctgataccgagttatttggtgtattcagccagctcattaatatgtcaattcaagagattgaagttacgctcagactttcaattttaggggagcatctattaaataaagatatgaaatggatgttggatcaattaaatattgtttttccaactccaacaatttcaattgaagcattaaacgactcaattaatttagaatctttaaatggtttattaaacggtgaagatgtagaaatccagctcactgataatgcgatgtcattaaaaggagctgggcaggctttggttgtaatcttaagtttaactaaaggtgctccaccaaatactatatatatggcttctaaagcagaaactgtggtggcgaccaatgttgtcagaagttcattccgtactgctgctcaaatcgcaaaagaggttagtcctcaactccttaaacagagtctacaacgatctaaaaatttagctgcaacggctgcatctgtagcaactaaaaatgtttcaagtatcattaaagagcaaaatcagattgtaaaaatacaaaagagtgttgctactgctattagagatgcgattgcaaagaatgcgaagacgattaaacaagttgcagcgactacagcagctattgcatctgtatcttcaataatttctcaatcaagtggtgtgactaaccctggttcaggtacttcaagtggttcggagaaaaaagagcaaaagcgtaaaaatacggattcatattttgttggtggtaattccattctaactgacaagacttacaatatatttaaagatctgatagagaacggcgatggcattaaatatgattctacaacgcaagcaagtttattgaaggagtatttagaagatttaatcgaccgcaaaattttatttgcaggttggagtaatctcgttgaagcgaaagttgtaacattatcaacaactggacagaaaactagtgatagtaaaggttttgctcaagttgccatagaactatatttacctatgagcccaacaggtagcgaaaatgaaggtttagtggtagagagtaatgttgttacatcatctaaagtgctgtggaaaacgattcagatcaataccagaaatttaagttacttatttgatcattacattactaagaaagatttaaagggggaaaaatatcagtacaactacacttatgatacgagtgctttagaaaataaaaataaaattatggctggtttcacaattaatgtgagatctgaaaataacgaagttgtatttgatgcaatgtggggagatacaattgaaattgacttaaatcttaaggctttaagagataaaaatttatttgcttctgtaattcagcacgagcttacggaaataagtcaattatatatgaaagccagtaagttgaagtcaaatgctgctgcattgaaagtattattgacagacggacgttatgacgagcatgagattgctaagcgtgctagcgatgaactgctggcagaacagttagctgtggagtttgatgatggcacaacattacatcgctatttaaatgatgaaacctctccttatggtgaatctaaatggatgggcagcctacatgaggaagctgtacaaaagcatatacaagaaacgcataatctttcaaatggtgagtattttggacaggttaattatcagctatatgtcaagtcaaaagatgcagacggtaaagatatttatgtaccaaaagtatataagtttatagattcaaaaacgggcgcgtatgaacaatcagttcgtggctattttgatggactttactttgatgctaaaaatatggctctgcaaattgtcgaagcaaagtcttcattacagcaatatatgaaagatgccgtcaaagatggaataaatagtttaaatgcccaactcttagataatctgtatgaagaaatcaaaaattcaattggttatcaaccaaatcaaaaatatctttatcgagatattttgaaacaggatgatgaaaatgaagaaatcgttattcggatttttaatgaagatttaattaaaagacttaaggaaatacaatcagatattggaattaatattatcacaaaagcagacgatggcggttattatcttaaaaaacaaggtaatatccaaaaaaatagtggttctgtgggggtcaaccaaagtctagaattgtatttacgtttctatgaaaaaactacttcttctgatacggctgagcaaaacattaaaaaagcgaatccatatgataaatattatattgtgaatagtagtaactatactcaatttgcagatgggacggtgaagcgagctaaaaatcaagatcaggctatgcagatacttctttcaaatatagttgaacagcagtatcagcttaaccgtgtgtcaatagagcatttgttggagtcggctcagcaatattggattaatttaggtgtagatgcctcattatttgatcaggttagcctatctattcaagatattaatattaatggaacaattgcttatgtagaaaacggcaatcacattgttttatcaccaaacgcagcaggctatggttggtttatagacgaatctccatttgaacatactgagtttacaatgaattccacccaaaattatggagtggcttcaaatagtcagatatcgactcaaattgatttacttacggtacttattcatgagttggggcatacaattggtttgactgatacatttattagtcaagatttaatgggtggatttattcaacaaggtatacgtttattaccaactcagcaaaacttacaaggttggcaagcgcaaaaaccatcaaatactcaacaagaagataatgacccaactcattattttgtagtgggtgctttgagtattaaccctaaaacggcacctttatggaatagtcaaaatttacaaattcagcagatgttccaaaataccaatactggattatcaggctggaaaatttttggagaaataaaacaaaatcaagaagatattgttttaaatgaaactcatcaacaacatactaatctttcacaagcctttaaacttggtgcacaagataaggtcttaacgttcactgtaaaagatcaacatttagcagactataacaatagtccagatgatgcttttgaggtggcattgttagatgctcatactggcgaagcattgtttaaggtgagtgacctgaacaataccgatgccttgtttaatctacaggcaaatggtcaaaactatttggcacatggaattgagcgagtaatcaatagcgatggtagccaaactttctttattaacttagaccaagcgctagcaggtagagatgttttattatctttcgacttacttggctttggtgcagcagatagttctgtcacactcaacaatatccgtttagtcgctgaaccattagcagtgaatgatcactaccagttcgatgaagatacaaccattacaggcaatgtattaaataatgacttattgattgggaaatcaattgaaaatgtcgttttagtaacagcaccacaacatggtgaattagtattacttgccaatggtgagttcagttacgtaccgcacgcgaattattttggtcaagaccagtttagctattattttacgactgttgatggtcaacaatctaaagttgctacagtgcaattagagattaacgcagtaaatgatgcgccagtattcaatacacaaccgcaatgggaaattgtggcaggtgagccattggtattagattttgatgcctatgttcaagatgctgagaacaacccgattactgtacaaattgcccagcagccacagaatggcgtgatcagttatgatgcagcaacagggcattatgtttatttggttgataaagcatttgttggagatgatgcgtttagcgttgtgttaacggatggtatagaatcttcacaaccttatacttttactattcatgtattggcatcaaatacagcccctgtgttacatgaacagattataagtactgatgaagatcaaactttagctttcgatccattagtaagtgcttatgatgcagagggcgaccaactgactgcccaattcagcgcgttaccacagcatggtcgtttagagcagttagcaaatggccattaccaatatgtgccagacgcaaattactttggtaccgatagctttagttactttgtgactgatggaaaattaaactcgcaagtagtgaatgtgtctattacagtaaacgcagtaaatgatgcaccagtagcagttccgaaaactatttatggttcagaagatcaagctctgctactacactggaatgacttcttggtaagtgatattgatggtgatttaataactattaaaattactgagttaccagccagtggtcagttacagcacttaacttcagaaggtcaatgggttgttgttcgaattaatgatgtatttacgcagtctgaaatagagtcaggaaaattaagatttataccggaacttaatgcttcgggtagtcaaggttatctcgcacaaggtttgggtaacaaaaaacagcactatgctcaatttgtgtatgtcgcattagatggaaaaacacaaagtcaaaacactgtaatgactattgacattgaagctgttgccgataagccagaattagttattggcgagccgcaaacagaccaagaggaattgttccgcaccacttgggaagctgctccaaataaagataagacatctacacttttagaacgtcgttatttggagggctggcgcttaattaaaactcctaatcgttcgcaaacaggacgtgatgggtttgaaatatggagtaatggcgatcaaatgcaaaatgcagctgatcagatgattactgtatatgcgaataagacggtagctggacaaaactggttagaactcaatgatgctgatgcatttgtggcacaaactttagggattgagcgtgaagtacaaactgtatttggacaaaaatatacgctgacttttgattatgcaggacgtctaggtttcagccaaagctttactcaaattggtatttatgtagatggcaagcgtattgcaagctatgccaatacgagtcctaatgatcaactgaactggcaaaatattcagtttagctttacgggaactgggcaaatacaaaatcttcaaattatcattgaggctccgctcactcatacacatggtcgaggagcaatgattgataatattgttttatctaaatctaagcttttaaatcatggtaaagaagatcaacccattgcgctctcaagtattcatgccaaattgacagataacgatggttctgaacaattaaaacttgcgttagcaggcttaccattaggtagtaaagttaatgatggtgtaaatgagttcatagtaactgaactgcatacaatagtagatattaccaattggaatctcgataccttgaaattgacaccaccaaaagattttagtggagagttaaagttacaagtcattgcaagtagtattgaacaatcaaattcaagtattgctacatctactcaggagcttactgtatttgtagaagcagttgcagatgcgccaagcttggaaactcatcaatcgcagcatgctctaacgagtcgagaagttttccatacagaatggcgtggagtgtataattcaatcctaaataagaatccgacggttgtttatggttggagtttggatggttggacaacacacaaagagcaattgtttaaattagatgcctttgaagtgtggcactctggtgatcaactcaaaaatacttctggtcaaaacattcctttacaaggtttaaactcaaatatctggattcgtttaaatgatggtaaagatacgctatatcagcaaactgcaatagaacgtcaagtaaatacagttgctggtacaacttatagcttaagttttgatttagctggcctgttggggcaagcagcaaatatggggtgtatcggcgtttatgttgatgggcagcagatcgcggtatttgatgctcctagcggtcaaaatgcattaaattggcaagagcaacaggtgtcttttgaggggaatggttgtaatcgtacaattcgtttacagctagagggtaatacatttggtcgaactgcttttgtaagcaatattcgcttagttgaaacttacacctcaactgaaaatctagtctatgcaatgattgggcaaaccagttatttaccaataattgctgcacgtagtaatgaccaagatggttcagagcaacttaagttagagcttagcggttttaaccaaggtacggtgctcaccgatggaacacattacgctactgtaagttcaactcaacaactggtggatataacactatgggactggactcaaatccactttgcaagtgactctaatcaggatatgactattcagattaaggccacatcaattgagcaaagtaaccagcaaagtacgagtactctaaaaacagtcacagtgaaaatgctaggtggacaagcatgtttaagcccttggcaattggtaaatggttttgtttctacatgggtaaaccacgttgaatctattccattacatgtcaaagcgcattggtcatgtcaaattccactgctttcagcccagttagatttaaatattctgccaaaagatgaagacgaagatctgattatacttggtcaggaagagcaatctgacgcatggttaaaagccttggagcgaactgcacaacaaaactggaaacaattgttttaa

SEQ ID NO: 59884 - DNA, 639 bp, Acinetobacter baumannii
atggctttgctgtgccttttttctccccaaaaagtatctcgtttagaaacaacaagaatttataacggtaaaactatgtcaaatttagttctctcaacacgtgctttagaagtagtaaaaaaagggattaatctgtttcatcacggtggatttcacatggtgggcgtcaacaagattgtgaaagaaaccgaagtgaataaaatgacgttttataactattttcactctaaagaacgctttattgaaatttgcctgatcgtacaaaaagaacggcttcaagaccaagtagttgcactggttgagtacgccaaacacacaagcgtgatagataagctcaaaaagctttattatttacacactgaggtagaagggccatattatttaatatttaaagccatttttgaaactaaaaatacttattcaaatgcttaccaagtcgccattaaatatagaacatggctgaccaatgaaatctatagacagcttagggcacttaatagggaagccttatttcatgatgccaaattatttttatatatgattgaaggcaccattattcagcttttaagcttagagaaaagagatgatagagaagatatgtttgcttgcttttctaaagcattcattaaaaaagattga

SEQ ID NO: 59885 - DNA, 192 bp, Acinetobacter baumannii
gtggttccatttccaactgaaacagcagcatctgtcgccttccaagtactattcgtatttgtcgtgctcgtttcagttaaagggtcatatccgagtgatcccgaagctcgatcagccactgaatcactacctagagcaacagagttagtttgtaaggtttgtgctcttacaccaattgctacagatgtttga

SEQ ID NO: 59886 - DNA, 717 bp, Acinetobacter baumannii
atgcgctattttaaaacacaatttcaaatatgtttaaaacatttcctttatgcacaacccaattattcaaatggagctaatacacattatttaaaggtaaaacctgttaatcattattttaaattattgatagatgaaagctttaaggaccttcgctcaagtatttatacagagattgcagaaaatcgtcgcgaaccttttgatcatgcaataaagtatctaatttcttcaaataaattacttgatgttgatggaatagatatctattacacatatttaccaagtgtttctattagtgccttcagttgtgaattatttttaaaagcttggatagcagaggataaagtcgaacatatttattcaccctatcatcaagtcactcatgttcgttatatgggatcttttgccacaacttttctaaaaagtttacgaaaaggaaacttacataaccttaaagaaatcttcttagctctacctgaagacatccaagattttcatatctatatctatgattgcttttataaaacttcattaaatttatctttagttgatgctttggaaaaagttaaaagctactttattgactcaagatatttttttgagaaacctaatgctcaatatgatgcatacttagtaaatgatttagcaaatttcttttatgaagtattcttatttttaaataactggaatggaaaagtacacacagatatcaattaa

SEQ ID NO: 59887 - DNA, 126 bp, Acinetobacter baumannii
atgaaagattgggtctacttctatatcgagcatacaattaaatatggtgaacctttctttaaagagtcaggctggtcattaggtttgaaaaataattatttagttatgagcgaagtcctaagctaa

SEQ ID NO: 59888 - DNA, 333 bp, Acinetobacter baumannii
atgtctaaatatcattgcaagtgtggcggcctaaaacttcccgattttgattcttacaaagtaggtgatgaagtcaacttcatgatccaaaaaagggaaaataattatcaaaacaaaatcattgtcagtcagagggcatacaaaggggaaatagtcgagataaaaggtgactcaatcatagtaaaagcccatgtaagaacctatgttttttaccgctatgaagttcttcctataaatggcccaagccagattgactatttacgtagtggtagttgtcgatgtgaactagttaaacaacataaaggtggtaagaaatatgcaattcaaccttaa

SEQ ID NO: 59889 - DNA, 210 bp, Acinetobacter baumannii
atgccacattttaaaatgaagataaaaactgagttttatgtagttgtcacagccagtgatgaagcagcggcactccaattcactcaaaaccaatattcaaatattggtggtgagccatctattcaagtatggggagatattcacccggatagacttgatacagaaattgaatggaatggtgaagagtactttgatttggagaaacaataa

SEQ ID NO: 59890 - DNA, 297 bp, Acinetobacter baumannii
atgaaattatttataaaaattattttatccttattagctgtttttcttattttgttggttgtaacttcatcttttaatctacaattgaaaatttttaaattacttcatcctgattgggttgaattaaaagattataaaattttagattacaagatttactgctcaagtaaaccttggcgacgaggaatggataggaatgctcgtggagatataaagtatcaatatacgtatcgaaatgccacttatacatcagaaaaagaagattttttggttgtatatagagataaagaaaaataa

SEQ ID NO: 59891 - DNA, 585 bp, Acinetobacter baumannii
atgtttggttatatactctcttcctttaaggagtcttgctttaaaataactatttatgcatttttttttggatggatccctttaattttaacttcaaattttgtaataaatctgatagataaatatttctattttggttttctaaaaggaattagtgatgctcaagcaggcagaaatccgttagaggaaatgttaagtggactcattccatctagtaaacctctattagcggtcctttttctgtatgcttacatacatatatttcttttaatgattggtttttcatatagatttcttatatatatgaaaaaaaatttatacaaaaaaaactatgaatacaaagatgttgttcatttttcaatcaactacaagctttatagtaaaaaaatgaaatcgctcataattctttcagattttatatttgaagttttatctggtgtaataggagcatttattgcttatattctattgactcagtctatatccaatgaaatatcaagcttattagatctaatctataatgtttttttattattatggagtaaaaaattcctcgaaaaaacagttattatctcaagtcaataa

SEQ ID NO: 59892 - DNA, 858 bp, Acinetobacter baumannii
ttggcattggtttttcagctaattttttccttagttgtaaattttgtaccttcaattttcaatactactattcaaattattaatattgatggattaagttcagatacattacaaaattttagtgaagctcgtttggttgggataggtgcctctttttttgcggcaggaattttaaattctttctttttaatattgcttgcttattatattaattattctaaaggtaaaaaaaattattttttacttttaacactttttttaattatttccattgttggcattttgttttctaggacgactattattggtattgtgttgtcaatttttttcttcttgaactataaaaatttatttaaagtagtccttttaatttttccattattatttttattaataatatatggaaagaccttatcagagtcaaatgctcaaattgcttttggtcttgattttttatttaatactaagaattctcaagcatcatcgtcatttaatggattaaaagaaatgtatgatatattgcctgataatttaagaacttggattttaggtgatgctaagtataaggttgtttcacaaaatggtgatttttcttcatattataaagagacggatgtcggttattttaggattgtattttataatggattggtgggtttgttattattttttttaatgactttttatattttaaaaaagtctttttattttagcggttttttaatatttgttttgttattgtgtttcttttctttaaatttaaaaggtgttgcgactatatattctttttgttttttattttttttagtcgattcagctttatatgggaatagtctaagagacaatataagaagttga

SEQ ID NO: 59893 - DNA, 705 bp, Acinetobacter baumannii
atgaaaaaaaatatttttattattatgggattattcttatctttatctaccattattaacgcagctacaatccgtctttcaccagtaacagtggaaattttaagccatcagaaagcatcttcaattagtttatataatcagtcaaatgaaagtgctgatttacaggtacgtatatttgaatggactcaaaataatgggcaagatcaattaacgcctacagatgaaatcaatattagtccaccttttttaaagctaaagcctaatgagtcttataatttacgggtagttagaattaatccagagccgatttctggtgaaaaaacttatcgtattattattgatgaattacccaaacctgttgatagccgaaaagcttctcaaggtgtaaatgtaatgcttcgttcgtcattacctgtatttgttgtcaataaagatgcgattactcaactaaattggaaaattgatactcatcaaaaagaaccttccctaaatattaataatgttgggaatcgacatgcactgttaaatgatttaacgcttgtagataacacagagaataagagttatccgattaaggtaaatacagtgaatggctatattcttgcaaagcaagaaaaaagttattcaattagtaattttacatatcagccaaatcataaatatagtatttctctgacagtaaatggtaagaaaaccacactttaa

SEQ ID NO: 59894 - DNA, 531 bp, Acinetobacter baumannii; identical to SEQ ID NO: 59184

SEQ ID NO: 59895 - DNA, 1158 bp, Acinetobacter baumannii; identical to SEQ ID NO: 54652

SEQ ID NO: 59896 - DNA, 828 bp, Acinetobacter baumannii; identical to SEQ ID NO: 54653

SEQ ID NO: 59897 - DNA, 870 bp, Acinetobacter baumannii
atgaacagacatgaatgtatggctgtatatacacaaaagctgcaactggtttgcgattatattcaaagacatctagatgaagacctagatgttgatcgattgagccagatcgcagctttatctaagttccattttcatcgcatttttgccattcatattggtttaaatgtgatgaagtttattcaactttctcgtttaaagcgggcctcttttcaattggcttttgaacctgatctcaagattattgagattgcattacaagcagggtttgatagtccagaggcatttactcgtgcatttaagcgttcatttgatcaaactcctcgagcttttagagataaaccggactgggaatcttggcatcagaagtttgtttttacaattccgaaaagtgagttaaaaatgaatgtaaatattgttgagcgacctgctgaaaagattgcatatttatcgcatttaggaagccctgataaagtctttgaaacggctgcacgttttattgcttggcgcaaagaaacaggtttgtcaccagtgaccaagtctagaacttatggtattccttttgctgatcctgaacagactccatctgatgagtttcgatttgatattgccggttcaattgaaaaggctgtacctgaaaatacttacggtgtacagacaggtgaaattcctgcggggcgttatgcaaccgtaagacatttgggtagccatgatcagattaaagatagcgtctattacatctttagaaactggttacctgagcaaccagaagaggcaggggattatccggttttctttcattatcataactttgtgcatgatgtgaatgaatgtgaccttgtgacagatatctacttacttttaaagtga

SEQ ID NO: 59898 - DNA, 360 bp, Acinetobacter baumannii; identical to SEQ ID NO: 54655

SEQ ID NO: 59899 - DNA, 1713 bp, Acinetobacter baumannii; identical to SEQ ID NO: 54656

SEQ ID NO: 59900 - DNA, 1173 bp, Acinetobacter baumannii; identical to SEQ ID NO: 54657

SEQ ID NO: 59901 - DNA, 969 bp, Acinetobacter baumannii; identical to SEQ ID NO: 54658

SEQ ID NO: 59902 - DNA, 1512 bp, Acinetobacter baumannii; identical to SEQ ID NO: 54659

SEQ ID NO: 59903 - DNA, 723 bp, Acinetobacter baumannii; identical to SEQ ID NO: 58066

SEQ ID NO: 59904 - DNA, 1374 bp, Acinetobacter baumannii
atgagaattgaaaaaaaatataaaaaatcaggttatttttggctaccagggcaagaagataaaaagattcatggggttctctcaatagttgatggtggcgaagcagagttggaaattattggactttttcaggggaatgaatcttcagaagatccagatagctttgatcgcatactaggttttgtagaggaagatggattagtaacacttgataactgcttttacactaaaacaaatcatgcatatgggggaatttcaaaatctacagtttatgtaaatagagtgttttgtggcgctacttggggtaaagatgaagctattacttttaataccttttcattcgcagtagattgtttagatgaatggatgagaattaatggtgtagaggttgatactgatcctcacaatgaaaaaacaactatcacatatactccatctgaaaaaagaagatttgaattagataatggaatgattcttgagattaattttgcttattctacctttaacagtttgaccgaagtcagtcttactcaacgtgcttactttcgacttgagtctaaagaacaacgtgaattagaagattttatcggtatttcttttaaaattaccaattttatgtgttttgctgtggatgatgttgtttctataaaaaatgtttcagcaacctcatcagacatccaaaaaaaattaggtgataaacaatatcctgtacctataaaaatttattatgcaagtacaacttatgtagaaaatatatcaactaaaaactggcctcgtatgttttttacttatcgtactattgaaaataatgctcaggacgtatttaacaaatggattaatgcgtatgaatatctatctcctgcaatgaatttatatttttcaactaaagtaaatgctcaaaaatatgttgatggtaagttcttggctttggcacaaggattagaaacttatcaccggagaactagtcaattaacattgatggagccagataaattctcggagttagtctccgagattttgaaaggatgccctgaagagcatgtcgaatggttacaaggaagattgatgcatggaaatgaaattaatcttcgtaagagactcaaacttattattgagccatttaaagactatttaggaacaaagtcacaaagaagtaaacttttaaaaaatatagtagatacaagaaattatttaacacattacagtgaaagtttggcagatgtagccgtagatggagttgatctgtggaatctttgtcaaaagatggaagctatatttaacttacattttttaaaagttattggtttcactgagagtgaaatagcatcggtagttaaaaactcttatcctttgaagcagaagttagaaagttaa

SEQ ID NO: 59905 - DNA, 267 bp, Acinetobacter baumannii
atgttagaagcgcgctatcgagtaaaggatctggtgaattatcccgaacgtgcagcgaaagattatgtagatcgtagtggccgtagacgtcgtctttctcataaaccagcgagtaaaggattgctgaatattgcagagtcaactttttggaaaatgattcgccgtggtgactttcccaaacccatctatttaacagcaagtatgcccacttggactgaaagccaaatcaaagcttggcttgaagcaaagaatcctaaagctgtataa

SEQ ID NO: 59906 - DNA, 291 bp, Acinetobacter baumannii
atggtttcagatttatcaaccttcgattatctatttttaaagtttcgttcactacacgtaaagctcgaagatgttgcacaggaatattatccgcacctatgcaaagaaagaatgctggaaagagtacgtcagaatagattccccttttcatgcttcagaatggatgacagccaaaaaggaacgctttttgtggatatacgggagcttgctgaagtgatcgatgatatctaccgtaagcaacacactatttttcagaacagaacccaaaaagcaattcagtcattaaattaa

SEQ ID NO: 59907 - DNA, 978 bp, Acinetobacter baumannii
atgaaagtagtcgataaacatttaattgaagagttagaaacagagttgctgaaccaataccttaatattagctggctagaagactatctgggtgaagggtccccaacgttaaagcttgatatgttttgtggtgaacttgattcaaagaaaggttccatgtcattaacagttaaagatttattgaaggctctaactgatatcaatgtggacattacacgaaagggcagccttgattcacacttgcacccacagtcaagttttactgtggaagagcgtaatcgtatttatcaggaaatggtcgagaattgtcaggaaacacggtatgaggcttttaggcaacagtatggctattcaataagtgacttggttaaccttctggatcaactcgaagttttgagaagtgatttagaaaaattaaatgagaaagaacaacataaggcctataaggaaatacttcatggatacattggtttagacccgctcaattatggattccagaatccatctttgaaaataagaatagctaaaggtagaagtactcaaggtgaatatcaaaaaattgtaagggccaaaaagaaaatattctttgatctgttgattgaacaagtacagcagagtgagaagaaataccagagcgtatataaggccgtgaaagaaaacatagatgaagtcacgcggaggttcaaaatacatgacgaggaatggatcaagtcaaagttggaagttagtggggaacgagtaaaagtgctacatgaagaaatgctgagtaaagcattaacagcttcaaaagaggataaattgcacaaagaaatagcaaagctctcagctttcatggagcagcttgagggtggttcaagtggaggttatcccttcgaaaagcttaaagatatccttccctttaacacagcttctctgaatgaagtgttgatgaagactctaaagtttgaaagaaatataaaagagcaatgtatagaataa

SEQ ID NO: 59908 - DNA, 735 bp, Acinetobacter baumannii
atgaataataaaatcattattactttgcttgtaagttgtttaatgcaagcttgcaccaaaaatgaatctacagaaaaggcttcttcaaaaactgctcaaacagaagcagttaaagctaatacaactgattcacaacagttcattgaacaaggcaaaaatgacatagccacctatggtaaagaaacattacagcacctacttgatcaaaaatatcctgatagctatacagcctttacggtggataatgttagattcctgcgccagcaatctcctgatctttttctttacacatggaacattcgattcttagacaatcagtcagatgatgtttatggctgtgacaaccagcaactttcatggaacaagaaaaccaaagatattgaatctacgttaaatgacgagtgctttaacatcattgagcgtggcaatcattctcaaaatcaaaatgagacagcttccaatgtaccagaaacctcacctgtaaaagttgtagtggaagaaaacccctaccactcttttatgtcaatcattaaagttcaatcactggtagatgatgtttctgtttcaaatgtcacggtcaaccgtggtaattgccctttataccaaaaaataactaccccaagacgactaggcttcgggcaaacaatgtcggtagatacgaacaattgcggtcgagcaaagattattgaaatagtcgtttctaccgatcaaggagactggaagttcggctcataa

SEQ ID NO: 59909 - DNA, 645 bp, Acinetobacter baumannii
atgaaaggtagaattcttgatttttcaatccagactaatactggaattattacaggcgaagatcacaaacgctatagctttgtaggcagtgagtggaaagaaacacaagcacctgtccgtggctatgaagttgattttgaaatcaatgctgaggggcaagcaacaggcgtttatcttgaaatagcagccaacccaactcctgccatagtgaacacaccaactcaaagtaactcttcatacctagctcctgctggtcaagaaagttcacataaagctaaagaggcttttagaaaatgggaacaaggtgaagacaactatcaacaagccatatttacctgctttaaaaaatttgcagattttaaaggccgtgcaagacgacgtgagttctggtatttcgagctattctgtgtgctattaagcctacttttaagcttcatgaatgaagacttagccacactcgctatgctgattacattgattccgaatattgctgtcaatgtaagacggctacatgacattgatcgttcaggttggtggatgttaattgccttagtacccattgtaggcgttctactgctgctgttttgggctgcccaagaaggtaatccatcagcaaatcaatatggcgaatcacccaaagcataa

SEQ ID NO: 59910 - DNA, 585 bp, Acinetobacter baumannii
atgagtcaaatttttaatataaaaaaagtaacccccactaaagatgatgtctactttatagatacgaatgtttggttttggtttacctactgtggatctaataagaattttattggtcgtgggcctagtgtttatcaactcaaagaatatcctgcttttatagagaaaattcttaatgtaggcgctaaaattttcacatctcctctcatctatactgagcttgccaatctaattgaacgtacagaatatacacaatatgttttaaaatataaggtagataagactaccttctctcgcaaagactttagagaaatagaagaatgtagagaaaaagttttaagggaaattaatagtgcttggaatgttatttgcagcgtatcaagtgagtgtcttgaactaaacttaaatttagcaactactaaggcggcacataattttatgagtacctcaacattagatccatatgatgccatttttattcatttcatgaaatctcaccaaatagatacacttatatccgatgacggcgatatgatgagtacggatatttcaacaattattactgcaaatcggcaccatatataa

SEQ ID NO: 59911 - DNA, 303 bp, Acinetobacter baumannii
atgaatacaaccataaaagtctttgacgtgattggcaagaatgcaatctcgatgcaaagtggcgacaaaatctacctcttattgaaaaaaaatatgaaagcagatcataaggttacacttgacttttcaggtgttagtctttttgcttctccattttttaatacagcaataggctatcttcttaaagatatggaaattgaggaacttcaaaagcaacttgattttattaatttagatgaggttggtaacgagctactaaatcttgttatttttaatgctataaattattacagaaagagttaa

SEQ ID NO: 59912 - DNA, 456 bp, Acinetobacter baumannii
atgaacgcttatggtcacggcgttaaaggacaagaacataaaaaacttggtgtatatagttgtagtgaatatgataaaagcgaaagaaaacttcatcttagtgtactagactttggaataggtattgtcaaaaatgtcatgaagcattcaaatataactgataaaattaaagctatggaatgggctttgactttaggtaattcaacaaatactgactctaaagacccaattgcgagaggtcttgggttagcattgttagttgaatttgttaaaattaataaagggcaacttcaaatttttagtaatgatgttatggcatatgtaaataaagatggttcatttacaattactactaacaaatttcctatctcaggtacattagttagtatcacaataaactgtgatgatagattctatgcttttgcttctgaaaaaaaacctcataatttcttttag

SEQ ID NO: 59913 - DNA, 306 bp, Acinetobacter baumannii
ttgggaggtgtaataaattatattgagaatcaaaatgtattaaaaaaagaagtttttaaaaaaaatatttcttgggtagggatagattttaagaaaaactctatgtctcaactacttattgaaaatttaactagttataatttcttcaactatttcaataaaaatattgaatctatttcacacaacaatacagagcgatatatcggctatcgagaacatacaagtgtattagacgttaatgcacttactgaatatttagaatacgattggctatctaatgacaagttaaagttaaaggacaaataa

SEQ ID NO: 59914 - DNA, 1140 bp, Acinetobacter baumannii
atgaaaaaaaaacctattacttttaattcagcatgcgttatctcagatgatatggtgtatgtagcaagctcactggatagctttgatgacaatcaacagtttagtcgattgtttatgtacgattatactgaagagaatggagagggatggtattatcatgatgttaattttattgtagttgatgtatgtttttataatattgaaaataataaaaagttaatagcattaagtgatgaaggtgaaattgaagagtttgatggtgaagatagtaattttaaaaatatagatggagctggtttaaatcaagagtggagtaaagatcgtggttatctctccacaataaaatttcaaaataataagttatttgcttgtggctatgatggccaagtttatattaacgaatttaactggcttgacttatcaactggtttaaaatcgagtaataatcaaatactagattttgaatctcttgaaaatgaggatgatatttctgttatagatatatgtgaaataagtggtaattatttctgtgtaggtcgtataggagataatggattaattgctaattatgatggtaagcgatggaatatattgaaaaaagttacacctgctacattatattcaattattccgaaaaaagatggaaaattaatcgcatgtggaacatatggaaatttaatagaaattaatcaggatgctactcttaatcggaaaacaaacttaagtataaaagatgatttttattctttaactgaatttaatgatattctttatataggttcggcatgcggtttatataaattttatgaaaatgaaattactaaagtgaatattcatgatgatatagataataatcttgtttttaaagtagattctactgaaaatatattatggatttttacgaataaacttataggtagatatgatggaaattcttggaaaatttttgatcatccagataataaagaatatcaaaaaatatctttaactgttagtgcaaatgaaaaatgtcctaaaactggatattggtatacagttgcgaaacctaattcgagagcttattttaaacaaggcgatgcttttcctcagttagtaactgattggggggaagtttattggacttgggatggtgaggattaa

SEQ ID NO: 59915 - DNA, 441 bp, Acinetobacter baumannii
atgttaaaagacttattacacatcgcatctatgaagaaaaatacaaaacttgatcaagataagttgtttattaaattactatttaagtcctcgtcggaagtaaccgaagatgaggttgagtactaccgaaaatatcccgatcaaattgatcaagtcacagcgcctataaacatccataaagtatttttgtggacgggtgctttcttagggattgttgtggttgctatagcgaaattcctcaaattttctggcacattagattttttgtctgaaggcgtgctcgagtttgtgatagatattatttatgaaaccggcattgccttaattggggcagcagtcaccgcttatgtgttaggtgtactcttaaataaacaacaggaaaacgccacaaagtggcgagaagaaattcgtagaaaaataaatgagagtgaagagttgtaa

SEQ ID NO: 59916 - DNA, 318 bp, Acinetobacter baumannii
atgctaggtgaaaatcatcattttttaaaaaaattttcgatcagtgatgctgctatagcgtataaaaaacctcgctcgactatacttaaatatataaaaagcggagatttcgaacttgactacaataaattgattgaatacagtcagttagttagaaaatttggtgaacttacttaccctatacaggacgaaagagagcaacaaatcaaaaaactaaaagatgaagttatgcatttaaaaaaacaacttaacttttttaaatatacttcaatctcaaacaaaaatagactattaatttctcataaacattccatttaa

SEQ ID NO: 59917 - DNA, 522 bp, Acinetobacter baumannii
atgaatgactctgatgatcgtaatcataaggtaattcttgagtatctacagaaagtactagaaagagagcgagatcgattttataaattagatgacaaagtatctaagttatttacgacagtatctactgtgattacaggatttctaattatagttaatatccttttagatcataataaaattagtattttttgttcttccgagattactattctaagtttattgtcacttacaacattctgcttcttgtgcatgtcttggaacttcctttttaaagtttttaatttaaaaaaaacagctcaccttcaacatcaagggttttggaaatattataaaaatagagaagaaatagatttttatgaaagaatcattaaggatcatgaaactgttatagatacatacatagaatctaatgaccaaaaagttttacttttaaagaagtctttaagcaacatctatttatcagcaataatgtttgttatattagttattatctatttgatttttaagtatctaaaatga

SEQ ID NO: 59918 - DNA, 147 bp, Acinetobacter baumannii
atgacccaaaaaaattccaatacaagtaccaacccagctaatcaacaacctcacaaagatatcaaatcagaagttccacctcctcctgttagatatggtttagatgaaaaaattaaagctgaagttccaaaaagtaataaaaaataa

SEQ ID NO: 59919 - DNA, 291 bp, Acinetobacter baumannii
atgacactgacgattaggtacaagaaacaatttaaaaaagattttaaacgggtaagctcaaacccaaagcttaagaaaggactcttaattttgaaggatcttattgatgagcatttggtaaaaacagggactgttccagatgagtatttacctcatcctttgattggtgagtggaaaccccatatggaatgccatattttacctgatttattattaatttgggatgtggatgaagataataatgagctaatacttgctcggattggatctcattctgaactttttggataa

SEQ ID NO: 59920 - DNA, 276 bp, Acinetobacter baumannii
atgaatactttggcaaaaaaagatgagtatgtacgtgctagggttccaaatgaattaaaggttcaagcggagcgaattctaaaagaagtgggtttaaatactacagatgctattcgcttattattaacgcaagtagtaaatcgaggtggatttcctttagagttaagaacccctaaccgtacaacaattgaggctatgaactctgttgcagaacctaaaaaatttagttctgctcaggaattgtttacggatttagaagatgacactgacgattag

SEQ ID NO: 59921 - DNA, 585 bp, Acinetobacter baumannii
atgaacgcagatatacaattcaagaaaaagcacccaaaacgagacatcattctaaacactgctactcagctctttattcaggaaaattacatctctgtgggggtcgaccgtattattacggaatccgatattgccaaagcgactttttataaacatttcccatctaaagaagaactcgtattctcttgtctaaagcaattaaagctcgatattcaaatggctgtggaagagcacatctcgaaactcacaacaccattagagaaactagaacaactttatctttggtatatagactgggtaaatcaaaatggtgttagagggtgtccatttcacaaagcaggcatggaagtaggaaacttatacccatctattctagttgtgctggatgaatatcggaattggttattcaacactactacttctattttgaaagaaatggaaatcaaggaccctatagcaataacccgcctatttctctcacttctagatggcatcatcaatagttctgtttgtgagaaatctccgattaaacccaagaaaacatgggactttattcaggccttaattgaactagagaaaaaatag

SEQ ID NO: 59922 - DNA, 2619 bp, Acinetobacter baumannii
atgttgaataatatctttggtattttagaaaaattaggttttggtgttcaaaaacgtgcgattagtgttcaactttcaaattcagaattaaattcacagataatgttgcaacgtattgatggttatcatggcattaatgatggactgtcagcagagcttatttgcttatctacgaatccctatattgaactaaaacaatttattggatgtcaggttgcagttgaccaagttacagattctggtcagctttttagaactacgggtattatcactggtgctagccaaggtcaaagcgatggtgcttttagcctataccgtttgactatgcaggatgcgaccagcttatggcataaacgacgaaatagtcgtgtgtttatgaataaaagtgttgtcgatattatcgaggtcatctttaaagaatggcagaataaaagccctttgtttgcagcgagtttacagctagacacaagcggtctaactaagacgtatgatatacgcccgttttcaatgcaatcgaatgaaagcgattatgcatatctaacccgactaatgcgggaagaatcgattagctggctggtagatgagtccaattatcttatagcaagtaatagccagagtattgaagcacagaaactacgtttaattgatgataataaccaatttcaatcgctcgaacgcagaaccattcgttatcaccgttcaaatgcgactgagcaatatgacagtatcaccagctttatcgctcagcgacagttacagccaacagctatccatgtacaacgttggcaagccgatagtctaagtcaggaagatgccagtggatcagtcattagcttacataaacatagctctcaacgagacaatgaaagcttaagtttagaacaggcatggaatatctcaccagcatggataagagaccttaaaggagaggaccaagccacagcctcgagtaatagtcagttagaacgactgaataagcatctgaatcagtatcatgctttacaagccaagtattttaaagcgcatagcagtgtacgagatattcaagtcggttattggttccaattgcttgactatccagaattagaaaaaaatcatagtcagcatgataaggaatttttaattcttaataagcatttttataatcaaaataacttacccaaagatatacaggaccaagtagaaaaactattgaccttaagtcactggcaaagcaatcatgacagtgagcacgaacgtcaggccaatgaatttgtggccgttcgtagaaacattagcgttgtgcctgagtatgatccattaaagcatcgtccggctgcccatgtacaacgtgccaaagtggtcagtgatggtgaagaaatccatgtagatgaatgggggcgaattaaagttaggttcctgtttacacgtactgaagaccatgctcatgatggtggtgcaggtgctaataatagtgatacggattcggcatgggtagatgttcttaccccgtgggctggtgaaggctatggagcacgttttttaccacgtaaagatgaaattgtggtggttgatttctttaatggcaacattgaccgcccttttgtgacgggccgtattcatgaagctcagcgttcgccaacgaaatttgatattcaaggacaacttcctgacaccaaaaaactaagcggtattcgttcaaaagaagttgatggcagtggatataaccagcttcgttttgacgatactacaggacaaataagtacccagctacaaagtagtcatggtgcaagccagttaaatctggggaaactgagtcatcctaaagataaagctgaaagtgaaaaccggggagaaggttttgaactgcgtactgatgcttggggggcagtacgcgcaggtaaaggtttactaattagtgctgcaagccaaaataatgcttcagatattcaattgaatattcaagaactgttaatgcagttgaaggagtcattagatcaacttaaaaccctagaaaacaatgctcgaaccagtaaagtctttcaagatgaaaattatcaaattagtcaaggtcttttaactcaagttgagagtaccttagaaaaattcgaagaatctaatattttagtcagtgctcccaaggactttatttcagtaagccagcaaaatcaaactcatgttgctaaagaaaatataaaaatgatggctgggaaacaatttgatttgagctcatctggtgaattcactgctcatgcagcaaaaggcttaagtttttatacacaagaaaagggaattaatgcttttgccacacaagggaatatcaagattcatgcacaaaatgatgagctagatttagcatctttaaaagattgcaagattatgagtacagaaaatgccatcacgattgcagccaaaaaagaaattatgctgacttgtggtggtgggtacatcaaaataaaaactgatggttcaattgaaattaatagccctggattagtcgaagtaaaatcttctcaaactaagtttctaaaagggagcaatcataattttcagttgccgaatatttctagcaaaatctgtattccatgtttattagatgcagctaggaaatcattaccatttgtacatcgggaaatttga

SEQ ID NO: 59923 - DNA, 516 bp, Acinetobacter baumannii
atgaatactaatcaactctttgatcatatttctcaacagcaagaatcgaatccaagtttaaatttttatttgcttttggatagtgcgaaaaatcatatctacatcagacggtggttaaagacattgccggaaaaacaattcaatcaaatagggaacttatttcacggcactattgatgaaacttcacctttagaagtatctcctttgttgctgcacatcaatcaagaaaataatgaagtactgcaacggacacttttagtcagcgagaatatagggatgttttcactgatagaaacctctttgtctaaacaaccactaataaagcatttacagccatttttacaggccgagatgccgaatggtgagctggctttgttccggttttatgatccatccattactaaaatcctagataagatgttggatgagcaggaatatcaaaaattatttaagcccttgaataattggtgggttcagcaagccagcgacacctttaataatttagtgagcgattga

SEQ ID NO: 59924 - DNA, 426 bp, Acinetobacter baumannii
atggcaattaagtttacacaagaacaaatcgattcattcattacagatcgtgaagaagaattagctttgtggaattggaataggttaaaagaaaaatttccatcgctttccaaaaaatattttgacgatgatgagaaaaaaggtgttgattttttacttcttgctcaaactcgcgtgaaaaaatatttacatggtttggaagatgacatcgactacaacaaatggcgcgctgtttatggcgagatttgcttcattgtgaataaatataatattgatgaagacaaatggaataggggaattttagaagaaaggttatggcccccatatttaagaatagacgttttagcagggattgtagaaagttgcttgaataattctgaatctcaaaaattctatgctgccttggagaaagaaacatggcagtag

SEQ ID NO: 59925 - DNA, 717 bp, Acinetobacter baumannii
atggcagtagcagcagatataggtagttttggatggggtacagtctctgaaacggcaggtactgttgttaaaacaggtactagagcaaatcctatcggcgcaatattgattggagttttaaccccatccacattaggtgatgggacaatttcaggaatgcacaatattaatattaatgtagcagaagaggatatagaggacagccgatcctctatttcacaggaacaaaaagatagagcattagcatcaagtaaagcaaaggctaaagaattagagaaatcttgtagtagtaataataaagaatgtaataaagggcaacatagtggtcgaatccaagcacaaaatggagaacgcatgattgtaactgccactgaagctggcagcgcttggacaaatcaaccagtcccaccaccattacttctatgtaagcaatatgcactttcaatgcgaatagctatgttgaaagtagagggacatagtaagcccgatcaaaagacaaacaataaacctgttgattatcataaaggtgcgacgaaggcatataaagctttaataaaatggatggaacagaaagtgccttatggggttagttctagaggggcgaataaacattcctttagctttgatgggtcatatcagcttggtagattaaaagaagggcaagattgtagacgtattgacttagatgtgatgaagggcgagatattaaagagttaa

SEQ ID NO: 59926 - DNA, 1635 bp, Acinetobacter baumannii
atgtcttacacacaagatagtaaagagaagtcacgcgaggagttgtggcaccacgcaatatcagcagtgactgtacatagaaagtcctctcgagtactcaattctgaatatttagagacactttggaattatgcatgggatgatgtgctgtctcatgtttttgatatatcaaaagaacgccatcgtattgcaaaatattttgaccattgggcagagtattctgaatcttgctatggtcagaaatctcccaaggatcttcgagtagcgtatttttctggacctgagcctgaaaatgatctccgtatcctcctttctctcggagttcggattgaaaacgtatgggcttttgaagcagataaagatacttataccaaggctttggagaaagcgcgagaacattttcctaatttaaagatatttcctggttctttgggagatttttttaaaacaaaccatctcacgtttgacataatttatcttgatttcacaggatcactggttgcaaagagcctcaaaacactgtcagttctccatgctacttttgatgagcaagcactttcagatttaagcgtgttggtagtaaattcatgcgagcctgacgctacacaagataattgtgactttttgtcagcctactattattttcaaccaatggttgaatgctctgtttacggaaagttaccacatcaagaggataataagcttgtttcttggtttagcgaatcagcatcagcacacggatatgatctaaaagatttatcagaaatggcttccaaagacatgcgtggagtttactctgcgtttgctacaagttacccactttactactcaaattttattagtcccactctaagatttttaagaaattcctcgctccgaaagcaattgtttagttccgataaagccacccacaaagaggcgtttgatcgaatgagcgatatttcatctttattgtctgagtttatgcctgattcagagttaaatgatgacaatataatcagtggggatcgcatttttaatgcagatagcttcccgttctggaacttcatagacacactgcaatcgatgggaggagctttaggacaatactggtttaatgaattttctaagcccaaagatggggcatcagttcttgatgccgccaaatttagggagtcattagcagaaactctctctggctatgatgggttactgtcagataatattaaaaaggaaattaggcgagttaattcggcgattccagatgctcgtggttgtttgttttgtgacattccaatggcgcacttatggttggagttaagtttgaatcaattaggtgcaccttatcactctaatataaataatcatcgaagatggacttataaggctaaggtaagacaaatgcatttggatgcatttatttttgatagatgtcgaagtatgtatgactacttgccgatggtggatatgtatggagatgtccttgagaaccttcttcctcaattaattattcgttgcagcattgatgccattggaaagcagattcgatggccacttcccaacctttattatggttcaaatatagcgtgtattaatgatgatattaaaggggcagattttggtgagctggaggcgagagttgagatacaagtctaa

SEQ ID NO: 59927 - DNA, 1134 bp, Acinetobacter baumannii
atgaacaagaattttttaccaacttttactgttagtgaattacataactttttacatgcgacattagatgaatatattaatctacggaaagataaagaaaaaatacaattgttctgcgtgcgtggcatattaaaaaatgttgagcaggcagttgaaaactcaaaatggtcattagtctatgatctgatcattcaagataccactggggcgattgaagttgagattccaaaacatctactatctagtttcaaaaatggtagttatgttgaagtacatggagtaccaacatttaacttttttagagagcaatgcactaaaagattaaaggggtacactatacaggcgattgaagatgatagtgcaatacaggcattccagtcgaagctgtcaaccttagatgatttaaaaaagcatagaccaaagagccatactttccccaatcaatttgatctttcagtcgctgtgatttactcctcagcaagtaaagttgatatacaaaaagacttttacaactatcttaatgaatatcgtaatgagttcgatttcgatgagaagcctgttagtttgagcaatgttgaagcattatcacaagtaataagttcctgtgttgagcacgatgttgttgtggtcattcgaggtgggggaagtagtgatgcctttgatatctttaatgatgaaaaagtattaaatgccttttccaatttgaatggatatcgaattgtgggtttgggtcataattccgatgtaacgcttttagactacttggcggatcattctgcaatcactccatcagatgcaggaatacatttaaaagggcagtttgatgaattgttttctagaaatgacctcttagagcaactaaaaattaaaaattttaagctagagagtgaccttaagacaaaaagtgatgatgtgattgcactgtctgctaatttaaaacaactgtctgatcgaacagatatacagacattgatgaatgaaaataagagcttggttgaactgaatcatgaactcaaacaacaagtaagtaatagacggaaggatgacgaaaccaacaaaagaggttccgttatgatgtttcttattgccgttgttgctgttattgcaggagcagtattaggaagactaatgtga

SEQ ID NO: 59928 - DNA, 495 bp, Acinetobacter baumannii
atgctattcaacgaacaacctttagtctctattattataccttgttataaccatgccaattttgtacaagattgcatacaaagtgtgatagctcaaacgtatcaaaatattgagcttattattattgatgatggatcaaaagatgaaactgtcgaaaagatacaaaagttggtgactcaatgtacagaaagatttgttaaatttgagttcagacatcgaccaaataaaggcttaagtgccaccttaaatgaggctcttgaatggtgccaaggagagtatttttctgctatcgcatcagatgatatgatgcttaatgataagatagaaatacaaatagattttttgaagaatagtattgactcaactattgtaggagtttttggaggatataatttaattgatgatactaatgctattataaaaactattctcaagaaagagaaaaaatacgtatttaatgaaatttttttgtgtacgctctgttggtggttataa

SEQ ID NO: 59929 - DNA, 402 bp, Acinetobacter baumannii
atgaaatttttttgtgtacgctctgttggtggttataaagaaaatctaaaaattgaagattggtatatgtggttaaagcttacagaagataatcattgtttattttatcttgataaggttatggtaaattaccgttaccatgagaataacttttctaaaaatttaaagttaatgaatatagaaaggaaaaaagttattgattattttacatatcataagttgtataaaaacgctgactcaaaagttcaatggttgaaagcaacagattatttgtatgtggataaaaaacatgcgttaagactattctatgagcttttttttaagaaaccaagtcaaatattttcaaaaaattttttgagatttatgtatcactttatgaaaacgagcgtgaaaaacaaatga

SEQ ID NO: 59930 - DNA, 1086 bp, Acinetobacter baumannii
atgaggaaaattgcttttgtagtgcagacttttgataaacgtgatcgtggtggtgtattgcgagtgattgcttatttagctaaccatttatcaaaaaaatatcaagttgaaatagtaagctgtggtgtaattaatgaattagcttataaattagatagtaaagttaatttaaaatctttaaatatgctgaaatacaatacaacattttatgttggatttaataaattattttggtttaaagaagtctataaaaatatcaaagctattatttatgatgatgttatttgggttacttcatcaccaccattatccctattattttcttttttgaaacttaaaagaaaatccttaaaggttattggttgtgatcatacttctactgtatatcagaaaagtatttttatacaaaaaattcgtaatttcttactttctaaactcgatgtaatgattggcttaactcctcaagatatagaatattataagaaaaatagtatcaattcagttctgatacctaatggaattgatttaaattctatttctagtagtgaaaatcatgaaaaatatttaatttttgttggtcgatttaataacgaaaaacaaccttttaaagcaataaacttgtttgttaatagttctctcataagccaaggtattattcttaaaatgtatggtcacggcgagcttgaaaatgaacttagagaatttatatccaaaaatgaatatagtaatagtataaaaattattaaaggtgaggttgatcctgaggttatttataaagatgctcttgcattaatattaacatctaaagtagaaggttttggtttagttttgctagaagctatttcgcgtaatataccttgtttgagttttaaaacttcttatggaccattaaacataattaaaaatggagaaaatggtttttttatagaagacgacgtaaaagattttaacgataagttgattttattaaaaggaatagatagagctaatatttataaaagtattgactcatatgatatttcaaatatttttaattcatgggagaaattgttagaagaaattgatttaaatattttaaaaaattaa

SEQ ID NO: 59931 - DNA, 450 bp, Acinetobacter baumannii
ttggcagaaaatttattttggaaaggtgaggcatgcgaaggtttggctacttggggaggttataatcagtcgccagagcatactaatttaatttttgagcgggcagcaagtgtgttattcacctttgatagatttgataataatgctattgaacaaggtgttcatagtgtgcaggaaattgctgaacagatcaaaaaaagccagacaacaacaccagttattgtttcaggttttaccgatcgattgggtaaatttagctataatcaagaattgtcttcacagcgtgctaatacagttgccaagttattggttcaacaaggtattgatcctacacgtatacagatacaggcgaatagccaaactgatctatacaagcaatgttcaggaaaaaataattcacagcttattgaatgtttagcgccaaatagacgtgtcaatataagctggtaa

SEQ ID NO: 59932 - DNA, 270 bp, Acinetobacter baumannii
atggttgtaccattagcaccgccagctaaagtaatagagtctttgttaactgatccatcactatttttatcgtactgcacagcactattagcaagagcaccaacattattgtttatgctacttattgcgctatccagttgtcctttgtttaccgcatctgtagaagaaacacctgcggctacattacttatcgttttattaccagcactaattccagaagtagtgatactcggaccgccagcaatgattagacctgttgttcctaactga

SEQ ID NO: 59933 - DNA, 270 bp, Acinetobacter baumannii
atggttgtaccattagcaccgccagctaaagtaatagagtctttgttaactgatccatcactatttttatcgtactgcacagcactattagcaagagcaccaacattattgtttatgctacttattgcgctatccagttgtcctttgtttaccgcatctgtagaagaaacacctgcggctacattacttatcgttttattaccagcactaattccagaagtagtgatactcggaccgccagcaataattaagcctgttgatcctaactga

SEQ ID NO: 59934 - DNA, 270 bp, Acinetobacter baumannii; identical to SEQ ID NO: 59932

SEQ ID NO: 59935 - DNA, 141 bp, Acinetobacter baumannii
atgtttttagcagtagcagcatcaccattggctgaaattgtccagcctgcattcgctgctgtacctgcatcagtaactgctttatcaagtgctgttaaagcatcaccaacattgtttgcacttgtacctgcaacattataa

SEQ ID NO: 59936 - DNA, 270 bp, Acinetobacter baumannii; identical to SEQ ID NO: 59932

SEQ ID NO: 59937 - DNA, 594 bp, Acinetobacter baumannii
atggctgttgaaataaaagaactctcaaatataggtaaattcaaatcgcagggctctcgctggaaaatgtttttctttgtcatcctagcaattgcattaataatcacttttactcgagatggaggaggtttttttggtacattctttctcgcctttttaggtataggttctttatgtatggtgccttatgctttatatcttctttttagaactatgttaatggtagatataaaaaagctacatcgagaaaaagaaaccgagattaaaaaacatggttttaacattgatttctccgcaataggtctattggtcgatcataaaaatagaaaacttatttttactttagatccgaaaccaatcgtttacatttgtaattttgatgatgtgaggcaatggttttctgggtcagaagtacatgaaactcaatatcaaaatagtgatggtgcttatgcaggtactagatctttgactatagctagacacattacagtacgtatagccgatcctaacattccagaaatgagatttgctgtttctagtgaccgagagcaaagtttatggataggaagattagacgcacttattaatggttaa

SEQ ID NO: 59938 - DNA, 270 bp, Acinetobacter baumannii; identical to SEQ ID NO: 59932

SEQ ID NO: 59939 - DNA, 141 bp, Acinetobacter baumannii; identical to SEQ ID NO: 58514

SEQ ID NO: 59940 - DNA, 270 bp, Acinetobacter baumannii; identical to SEQ ID NO: 59932

SEQ ID NO: 59941 - DNA, 141 bp, Acinetobacter baumannii; identical to SEQ ID NO: 58514

SEQ ID NO: 59942 - DNA, 594 bp, Acinetobacter baumannii
atgaatctggctttatttgactttgatggcacgatcactcataacgatacttttagtttatttcttaaattctctttgagtagaaaaactcaaatattaggtggtcttcggcttgcgccttatattgcaggatataagttcggatgggtaacggataaaaccatacgaactaagctctgtcaggtgggatatataggctatgatgcaaactctctaaaatatatgggacaagagtttgctaaaacggtaattcctacctgtattcgtgaaaatgctttagaacgtattcactggcataaacagcaaggagatcaggttgttgtggtatccgcttcattgggtgtttatttagaaagttggtgtcagtctttaggtttggatgttatctgtaatcaacttgaaatagataatggtattttaacgggtaattttattaatggtgattgtggttatttagaaaaagtaaatagaataaaaaataaatatgacctaacccaatattctacaatttatgcttatggagatactcctaatgattatgcaatgttggagctagcacataagaaatattatagatggcaagagatgaattaa

SEQ ID NO: 59943 - DNA, 210 bp, Acinetobacter baumannii
gtggcagggtcatacactgctgtggtgttggtgccatctgcaaagttaaccgtttcacccaacttcacattgtcagccgtgccaccattgacactaaagttcaggcctttgtctgccgttgcttgtgcagctgctgcattggtaactgccgtgtttgcagtattttgggctgttgccgcattcgttactgctgtgtttgcggtgttctga

SEQ ID NO: 59944 - DNA, 588 bp, Acinetobacter baumannii
atgtttgcgatagttggcatatttttaatagccataatgatattggcgattttaagtgttttaaagaaaggggaaagcaaaaatagaaatgcaaaacgtaaccccctcaagggaaagcgtatcattactatgaatgaacaacctacttttatgaaactaaaggaagctttgccggaacatattattttggcgcaagttgctttcagtgcttttatgacagcgcaaggatacgcgacgcgtaatttatttaatcgcaaagttgctgattttgttgtgttagataaagcatttaatatcgttgctattgttgaactagacgattctagtcataaagggaaagaaaagtttgatgcagagcgagatactttaattcaagaagcaggttttaaagttatacgctataaacgaacaccagaactggcacaaatacatcgtgattttaatattgcatcaagttcattagctccagtcccaatagaaccagatttaacaaaaacaaagttaattgctgatgcaataattattgagagagatgagccaactatgcaacctgcacaacatattaatgaagtaaagttgaagtcttga

SEQ ID NO: 59945 - DNA, 447 bp, Acinetobacter baumannii
gtgcacttggtgctgtcgtatcgacagttaccacagcattgcctgtacccacatttcctgccgggtcagtcgctgtcacagtcacagtatgcggaccgtcagtcaacactggaagtgtattgtctgcaagggtccaggtgccatcaccattattggttgccgggtagttcacaccatctacagtcaccaccactttcgcagtcggatcgttcactgtaccgcttaacgcaggtgtgctgtcattggttaatgtcgttgtcactgcaactgttggggcaactgcatctactacacctgtgccaggtactgacgggttgcccgctgggtcaatcgctgtcgctgttactgtttgaccatcagtcaggtcacctgggtttggtactgtccacttaccatccgggcctgcaactacagttgctgttgtgccatccgggaagctcacggtaa

SEQ ID NO: 59946 - DNA, 426 bp, Acinetobacter baumannii
  misc_feature (395)..(404): n is a, c, g, or t
gtgattgattataaagatattaaaattggcgaagtagttcactcagcaatagatagtcaacaatctatttcgtctattttaaattataaaattcctgaaagtttatctgggcgttggcgtttacttattgtcactgatgctgacaataaaaactttgaatacaatgctgaacaaaataatcaatatcagcaaagtctagagattgctaaagcagaatatgcagacttgatcgtaagcaatattaaggctccaacccaagttattggtgatcctgcttctttaagtgttgagtggaccgtgtctaacattggaacaggcactggattaaacacgacatggacagatacagttgtttactctactgacgatattatcggtaactcagatgatattgnnnnnnnnnngagctttggaaaaaaacaatag

SEQ ID NO: 59947 - DNA, 609 bp, Acinetobacter baumannii
gtgtttgcacttttggatgattggatagatcaggatgaattgtctcaatattggcaatctattactggggactctatggtcgttgatatccgtagagccaaaaaacaaaaagacttaggctattcaggtgctgctgctgaagtctgtaaatatgctctcaaatttggtgatctttctgtagaaaagacttgggaagctttcaaagttttaaaaggtaagcgattaagtggtgcttttggatctctttggggcgtgaaaattcctgaatcattaattgatgatttaccagatgattctgatttaccttatctagaaatgatttataagttcgtcttttctaagaagtcttattacgatttacaacttactcgtcatgtcgaacctacaggtaaggacgccgccgacgagcttcgaggagtagaaggacgcaacctgttggtgagcatggacgggcgaggagtgagcgacgctgggagggcccgcactggcgcgcttgccccgcagcacggacgaaaaaaacaacactggcaaatcccaccagttactcgtgttcgggttcggaagcgaatccgaagatgggacggatatttatgtgttttacatttatag

SEQ ID NO: 59948 - DNA, 447 bp, Acinetobacter baumannii; identical to SEQ ID NO: 59945

SEQ ID NO: 59949 - DNA, 210 bp, Acinetobacter baumannii; identical to SEQ ID NO: 59943

SEQ ID NO: 59950 - DNA, 264 bp, Acinetobacter baumannii; identical to SEQ ID NO: 54289

SEQ ID NO: 59951 - DNA, 324 bp, Acinetobacter baumannii
gtgtctttaaaaattacgggtgacttgagtggtttaaaaaagcttactgaaaatgctaaaaaacttgaaggtgaacaacagttatctttaggtactttatttaatgaggggttccttcaagctaatactaatttcgaaagtattgatgatctattcgagaaggcaggctttaaagtagaaacagaagaagattttgcggctattccgcaagaagatattgatgcttttgttcgtgaaaacactaaatttgagagtttcactgatatgcagcaacaggcgatgacggagtatgtgcgtaagcagttatttaaaggtttaaaataa

SEQ ID NO: 59952 - DNA, 837 bp, Acinetobacter baumannii
atgaataactacaaaatatttttgtttgggcgtaatgataaaagccaagctatcgatctttttttgcaacttggatattcattagctactagacgagaatcatatctccatcctcttgtaactgcactttatgcacattcagatggaaatatttacaccagtgcagatgaaccagaaatttacacaaacataattttgtcacagctaaatgatcttgttgttctacatcgtaatgatgttaatgatgcgaattgggaaaccgaaggtggtgatcagatatttaaagactcaaatgacaagtcttatatctatcgctcagatggttgggatgaattgcaatgtcatgaaatgcgacaagcaatgtgggaaaaaccgttattacctaaagctcaaccatctggcgcacctactgaatacaacacaatcaaagttgaaggccttgaaggattggttgatggtaaagctgctttaactgctgcattggcaggtgaaacagttcaaatcagtgtggaaccttgggaagaaaaaaattgggataccttcaatcctcttgaagacgatctatcaactaaagttttctttactggcatgtctgaaggcgtgcataaagtctttttccgcatcaagcctaaaactattttgattaacggtgttgaagttcctgcaccgtttaagcctaaacatagtgatattggattcatcttagataatgcaaaagattgctatagagaatctcaatatgtagggcaacacattcctttcggttggtggcgcactgaacaagaaataaagcaagtcgtagcagcacttagaaaagtattcgaggtgcagtcatga

SEQ ID NO: 59953 - DNA, 1536 bp, Acinetobacter baumannii
atgaatctagcacttttcccaaatgaattaatcattgataactttgcgggtggtggaggtaccagtactggccttgaagccgcatttggtcgtgctgttgatattgcaatcaatcatgacccaaaagctttagcaatgcatcgtgccaatcatccagatactaagcattattgcgaatctgtttgggatgtagaccctattgaagcaactcaaaatcagcctgttggtttagtttggctttcacctgattgtaaacactttagcaaagcaaaaggcggtaagcctgttgaaaagaaaattcgtggccttgcttggattgccttgcgttgggcagatttaacgcgtccgcgcgtaattatgcttgaaaacgttgaagaatttaaaacttggggccgtcttggtgaagatggcaaaccttgtccgaaacataagggcgaaacattccgtagttttgtgaaggctttgcgctatcaaggttataacgttgaatggcgtgaacttaaagcatgtgattatggctctccaactacaagaaagcgtttctttttaattgctcgtcgtgacggtttacctatcgtctggcctaaacaaacgcatggtgaccctgaatctaaagctgttttaactggaaaattaaaaccttggcgcaccgcagcagaatgtattgattggtcattgccttgtccaagtatttttacaagacaaaagccacttgctgaagctactttgcgtcgtattgcaatggggactatgcgttatgttatcgataaccctaagccatttattgtgaaatcgaaccacggtggggatacattccgtggtcaagcaattgaatcaccattacaggcaatgaccagtaaaaatggttatgcactggcaatgcctgttttgactgaatgcgctaatgcatcaagcccacgttgtatgcctgctaatgaaccactgagaacaatttgtgccggtgtgaaaggcgggcatcatgcacttgtttctgcatttttagccaaaaattacactggtgtaattggtagtgatgctgataagcctattcacacaattacatcgaaagatcatcacagcattgtggctagtcacctggtcaagctacgcaataataatatcggtcatcgtgttgatgaacctattcacactattacttcaagcggtgcgcactttgctgaagttcgtgcattccttactgctttctatggaaatgaacgtgacggaaacagtattgataatccgctgcgcactattccaacaagagatagattcggtctagttactgttgaaggtcagacatatcaaattgctgatatcggttttcgcatgcttcaaccacatgaactttttaaagctcaaggttttcctgatgactacattttcagttatggaattgatgagcatgggaacaccgtaaaactgactaaaacagaacaaacacgcatggttggtaactctgtttgccctcaactttctgaagcactagtgagagctaatttctctcatgaaaagaaatatcagggggcagcatga

SEQ ID NO: 59954 - DNA, 273 bp, Acinetobacter baumannii
atgatgactactgccacaattattctagttttgatcgcagcaaatattaatgccttgggaactttattgttggtcaaatttaaagttatcagccaaaaaaaagcattttcatatttcacttggatgttgttcatattttttataggcctttatttcaagttgtttggcgacaaggtggacattgaccgttctgaaatttggctcatctgtgtaatcggttacagcattgtatttggacctgaagattgggggatgtatgaccaaaacaactga

SEQ ID NO: 59955 - DNA, 366 bp, Acinetobacter baumannii
atgtctgaagaacaaatcgaaaaacagattcaagcaaaaggactaaatgccccgcgcataacccctgatcagcttgattcaaaaatcaagaatgtttactaccattcaccactagcaaatgttgatcctaaacaagctatggatgaaaagacctgccaagcattgcgctgtttaaccttttgcacaatcgttttagagaatggctttaccgttactggtgaaagcgcatgtgtagcccctgaaaactttgatccgttcatcggccaagaagtagcgtataaaaacgcccgtgaaaaaatttggcagttagaaggatacttgttgaaggaaaaactttatcaagctgatttagataaacagttctaa

SEQ ID NO: 59956 - DNA, 2457 bp, Acinetobacter baumannii
atgacagtacctatttccgaccgtttaagccaactgtatgttggtaacggcacaaacacccgatttgattttacctttcgagtattcaatcaagaagatgcgacgggggttgctatccgtaaaaaaggtacaactgagtttgaaacagttgacccttctacatatacagttacccttaatcaagacggctttggggggtacgtaacatttaacacaccgccttcatcatctgtatatttttatatagcgggggcaacccctcttgatcaacttcttgatattacaaattacgacaatttttatcctgatgcaattgagcgctcattggataaattgacagccttattacaagaatggggcacccaattagatttagaaaaacaagctcgtattttggcagatatccattacgatgccttggcaatggttcgcgaagatgagctagaaaaccgtttaatcagttatatcaatgctgtggtcgggataacaaatccaaatatctttgacggtatttctgatcgaatgatcatcacaaaagatggtagaacgcaacgtgaatttaacgaatctattccattttggacagatgattatgtaaatttcaaacaagaaactgttctacgtgaggaacaaattcttgatcatgtaactgagcaagaccaacagattagtgctcaattaaatggcgctattgatactgaagaacaacgagcaatagcagtagaaacctcattacaaaaccaattaaataatattggttctggtcgatatggttttaacacttatgcggactttgatgcaaagaagggaacaattcctgcaaactctgtggttaatatcgccgaggttaataacagcggtacgggccaatgggggcagggtgataatatttgggatggaatagccctaaaaaaatcgccttatgacccgctagcccaagcaaaagcggatgcttcagcaaaagcgaatgctgctgaagaaaacgccgagattactactaaacagcttattagcgaacatattgaaacagatgtatcaagccatcttttgattttggatgatgaggatgggcgtgtatatgctttttttgatgcatttgcagagttgtttctagctggttctgatgtttcagtccaagaaatcggaagaattgctgctggtttcgctaatatattaaatacaaatatttcaaataatatttgggaaatcaaagactcagttggcaatctttgtgtatttattgattcagaaaatgaattgttcttaactggacttgatgtttctgtacaacaagcactcaaaaatataaatgttaaaaccagacacttgaataccccagttactcggcaaagctcagccgatttaccggctattgaagtcatggcctcaattaacttcttgaaaaatacaggcgtccaagtttgtgatctacctaaaaacctttaccctcaacaatttagtatcgggaattcttttcttaatactgtaagtgcccctgctaaaaatccaactgattatataaaaatcgatgtttggaatgaccgaggtgataacacatcttggaagatagattcgggtgttgtgcatccaaatgttattgatttcggtattggcaagatgcttaacggataccgttattggatgggccttaacccatacacaaacacaaatgaaaatttcgagctgccatatatttttggttcaaatgatttaaataactgggagttaatgacaaatatcccttgcccatttgatgttgacccgaaaacaaattctgatgatccagcagttgaatcaacatccggtcacttatcagactcattttttacttatgacacttcgaccggagaactatttttctgttggcgaagaaatttatatttcgaaaatggtcgtgatcgaacaaaagctaaggtgtcattatgggctagatctacaaaagacggtgtgaactggtcagataagtttgaaatatatccagaatacacaaacataactggacatattcttgcgtctccagcaatcatttttaatcctgaagataaccttttttatctttatcacgtaagtgactcaataagcgggtatgtgcgaatgcaaacttctccgagtcttcataatccgaaatggtcagaaatgtttgcagttggggggcttgagtcaattgttccatatcatttggaagcaaaatatgtcggtgatcaagttgtcttacttattcactcggaagtgactgatcaattgtatttcgctctaagtgatgactttaggaatttcaaagtaagtaaaaaaatcttagaaaccgacactgatatatataagggttcatttctaccgattttcaatgatcaaaatcaaatcgcatttcacgtgttttatacaagtgatcagaaagcccagctgccttggcgcctatatcacactcaaacaaattttaattctttaggagctgaataa

SEQ ID NO: 59957 - DNA, 1065 bp, Acinetobacter baumannii
atgacaactattatccatagtaatgtaaaagcatcgcgctatattgcgagccgtttagcgttaacattaccatcagactttaagcacaaattagattttacagctgaaaattatgtatacaacggggtgaaaagctctttagcacaatgtattagtactacacgtgcaagtactgctggttatattaattcagatggagtgtatgcaaccgctttagcaaatcagccacgtatacataatgaccctaacgccggtaaagggttactatgtgaagatagttatgtgaatttaattactaattattcgaatccgcccaatcaaacggtagcaattctcggtgatacaactcgtttccttgttattcaaatgttcggtgagggttcatgtgaagttaaaattaacgatgtaaatcttggtaccatatctaagaataatccattagcatataaagcgacttctgcagggcctattagtttatcttttacaaactcaggtgaagtaaaccacgttcaagcatttttgtcttatttgccaaaaccatgtatgacaaaattaactactacaaccactcaaaaagatattcactattttcggcctaattttatagataattcggtagcaacaattgtgtttaagagaactgaattgaaagactctagtgatgttccgccaggaaatcgagcttttgtaaatttccagtttcttcctaaaacaagtggttttttatctctaacttcaggtaaaggaacagcaggttcacaaaaatcatttttctatcaattaacaagtggtggtgcaatttcagaagtaagaataggtacttctttggtagatgaagttgtagctatagcttttgattttatgcataaaaccttaaaaatttatgaaaatgggcagattagcaacttaactctgcccgatttcgcagaaaccacaggtttcgatcgttatattttaggaacatttgcagctggagcacagccagtttcaagccaattgataaaagaaatgtatgtttttaaccgtgtgttaactgatggggagcttcttaaaataaaaagctaa

SEQ ID NO: 59958 - DNA, 258 bp, Acinetobacter baumannii
atgattctaaacttaacagttaatagtgctaaacaggtcagcaattttctaaaaagacatcgaggttgggtttcttataaagagcacgactttcaatgcgaggttttagagtgcttagaggaaagcaaaacatcaatgtcagcagattataaatttaatctgtcgagatgcattagttgctatgaaaaaggtaaagagtgcaaaaccgatgacattttctttgagtttgtacaggaaatagaaaaagcgggaacctaa

SEQ ID NO: 59959 - DNA, 2397 bp, Acinetobacter baumannii; identical to SEQ ID NO: 59352

SEQ ID NO: 59960 - DNA, 837 bp, Acinetobacter baumannii
atgttattttctgaaagaaaaggtctcagtcctgtaaagattgaaatccaaagagaatctatagatgatgatttaaaaaatggtttatggaatgccttacatttaacgatttgggcaaaatatgatggtaataattacaataaaacctttagaacttcgaacttatttattctacttgtaaattattggcataatttttttaaacttccgctggatactatgcctcttaagtttaatatggctaaagaactaattaaaaagaaatttttttcttattcatggtttgaattatatgattttatagagtttacggcccaaaactgtccacctaatctaaaaaataattttattaaatttgtaaataatattcttgaaaaagaactttcagcatatagatttgttgatgaacaattaacagatataactgatgaacaagaaattgagtcaattgaaacggcaattaactcttctaataagttttcaggtacaaaaatacatttaaaagcggcattgagtttattaacagataagaaaaaacctgattatagaaactcggttaaagaatctattagtgcagtagaagctctatgtgtagttttagcaggcgatcctaaagctacattaggagcatcactaaatagtattgaaaagagtcattctttacatccagctttcaagaaagcattagcaaacctgtatggatttacgagtgactctgatggaattagacatgctctattagatgaacctaatattacttatagtgatgcaaaatatatgcttgtttcttgtagtgcatttattaattatgtacttggaaaaattagtgaaaaataa

SEQ ID NO: 59961 - DNA, 357 bp, Acinetobacter baumannii
atggatatacaaattaaaagaatttatgacgatgtaagcggtgatgacggtaagcgaattttagttgatcgactatggagtcgagggattagcaaagaaaatgctcatttagatgtatggttaaaagaaatagctccttcaactgaacttcgtaagtggtttcatgcagagtctgcagaacattgggatgagttcaaacaacgttatttaaaagaactagaaaccaaccctgcagttaaagagttattagaaatcgtttcacatcataaagtcacacttttatattcggctaaagatgtggaacataaccatgcgattattttaaaagaatacttactgtctcttatacacatctga

SEQ ID NO: 59962 - DNA, 450 bp, Acinetobacter baumannii
atggcaacaggtacagtaaaattacatcgagtgtttaaggcaccagctgaacgagtttatcgtgcttttcttgacccagatgctttagttaaatggatggcacctcacggttttaccgcaaaggttcatagttttgatgcaaaagtagggggctcatacaaaatgagctttaccaatttctcaaccgggtcaacgcattcatttggaggtacttatgttgagctcgttcccaatgaattaattcgttataacgaccaatttgacgacgcaaatttacctggcacgatgcaggtcaccattacattaaaaacagtattggtcggcacagaaatacacattacccaagaaggaatacctgaagttattcctgtggaagcatgctatttaggctggcaagagtctttatctttattgaagttgttagtagaagccgatattccagatcaataa

SEQ ID NO: 59963 - DNA, 723 bp, Acinetobacter baumannii
atgagtctgctcgctttctcctcatatgcattaaacggtgtagatgcacaaaagtttttacaaggccaagtgactgtagatactgaacgtttagctgaaaatgaaacacgctatacagccatttgtgatcttaaaggccgcatccattttggcttgtggctaaaaaagaataatgcagaaagttttgacattattgtcactcaagatcaagctgaagaattcgcgaagcacattaaaaaatatggtgctttttcaaaaatgaccttaagtgaacaaggtgctgtattcccaaaagttgtgaatggccatactgagttcagctctacagaaactgatatttccgaatggcaaaaacaagccatcatgacaggtcaagcatggattgctcaagcgactgaacatgagtttcagccacaagaattacgtttacatcaacgcgaaggcgtcaattacgataaaggctgttacttaggtcaagaaattgtggcgcgcctttggtttaaagcaaaaccaaaacactggttgcatttagttcaaggtacaggtgatgcacctgctccagcaactcaactgcacaatgacgtagaagtggttaatagtacccaaactactgacggttatattgccttagttgttgcgaaacccgccgcccttcaagaattaggtcttcaagttttagatttaccagaagctttaagtggtgatgttgctagaccacaataa

SEQ ID NO: 59964 - DNA, 831 bp, Acinetobacter baumannii
atgtttgcctcaataactatagctgaaagtatgctttactccactgttaaaattacagccatttcacaaggtagtgcaattggaacgggcactggattcttttctaccttttgtaaaacgcatgatagttttcttccagttattataactaataagcatgtaattgaaggggctgatagaatatttattaattgtcatattgaggataacaatacttataaagcttctggtaaatttttagatgtatttatcgatcttcaagaaactctcataatgcatccagaccctaacatagatttatgtgcaataaattttagctcttgcattgaacaagctacagaacaaggaatttcaattttctacacccctgtaggatttgaattaattcctgatgaatctgaatgggagttttttgatgctatagaagaagttacaatgataggatgtccaaacggactatctgatagtgtaaataatcttccgattataaggcaaggtgttacagcaactagcccaagcttcccttacaatggaaaacaagaatttatggtatatatggcatgttttcccggctcttcgggatctcctatttttttatataataaaaatggttattttgacggtaaaagcaaaagttatataatgggagctgctagattaaggcttttaggtattttgtattcgggtcctttaatatctaatactggtcaaataactttaaatacttcgtttaagtttgacgttgcatcaatgatgcacttaggtaatgcaattaggtcaagcgaattaaaaaaacttgaattatatgcttcaacttatttaaatatttag

SEQ ID NO: 59965 - DNA, 513 bp, Acinetobacter baumannii
atgaataattataaggcgatggatattgctaactatattatttggtatgttaacaaagatgaagacgttccattaggagaattaacgcctctaaagcttcaaaagattttatactatgttgctgctaattatctgaaaaataatgatgaattactttttgatgagccattccaaaaatggcaatatggtccagtagttaaagaagtatatagagagtttaagtcggccaatatatatcacataagtaaaccaaaatctctcatcgaagaatcatcagatgcaccatttggtatacataaaagagattttaaagaggaattatttttagcagataaaaaatttgttgagactgcagatcctataattgaaagattaattcgcagaaaggcttttgatctggtagaaatgactcatagagaagaggcctggagtaggtatgagcctgaaattaattcaggaattcagaatttaatatattcattgtctgagctaaaaaaggcaaaggacatctga

SEQ ID NO: 59966 - DNA, 984 bp, Acinetobacter baumannii
atgaactttgaacaagctaaaactatattaatagatttgcacttagactcttcctcatttaataagagtgagattgttgataaagctgcatatctatttagtttgtttgaggcggactttgttcaaaaaactaatcatgaaacattttataatttaccttataaagaaatttcagtcagaatatttaaaagtaatattaatgaaattcaatctaatactttagatagttttgcaaatacggtaaaagaagtattagttgataaatataaacaaagtagtaatgattttgagcatcttcttaaatgctatgaaaagtttacccatcatatcgaactagcattcatacagaagcaatttatccaagaggcttcaaatgatgctttaataatcgctaaaagggctgaaggcatagcaaatgaagccgatgcacaagccaaatcaacaattgctaactatatttcaattttaggtatttttgcctcaattatttttactctatttggtggggtgaacttaattggttctacagtaaaactcctagaaacaagctctagattgccatatctagtatttattgtttccctattaatgatttgccttctcacattattaaacatgatggttaagtgggttaattctatgagtaacttaaaaaatgctctagaaaaacatagtaatgctgccaatcagcatctcgcccatcattgctggaaagtgtggcaatgggatttttacaccaaatcagtttcattttttcttgtgattttgcttattagtttaggtggtatgtacaatgttaataaagaaaatttgtttagcatcacaacagaaaccactactaaaagtgtgccgaacgttgaagagaataccaacaagccagctacgaaattagagtccgaggataaaaataaagaaattacagttgtcgaaaaaattactttatcaaatcatccgaatgaaaaaagctccgataaagaagagtaa

SEQ ID NO: 59967 - DNA, 441 bp, Acinetobacter baumannii
ttgctggcaggtgatcagcttttacaagaagaaatctttgggccaaccacggtcatcattgaagttgaagataaagcccaactcattcaggccttacaaagcatgaatggacaactgacagcgactttaattgccgatgaagctgacttaaccgagtttgcagatgtggttcctgtattagaagagaaagccggtcgattacttataaatggctacccaacaggtgttgaggtgtgtgatgcgatggtacatggtgggccatacccagccacttcagatgcacgaggtacttcagttggaaccttggccattgaccgttacttgcgccctgtgtgttaccagaactatccacagagtttattgccggaagccttaaaagacagcaacccgttgcaaattttaagattggtgaatggtgagatgactagaaacacgatctaa

SEQ ID NO: 59968 - DNA, 576 bp, Acinetobacter baumannii; identical to SEQ ID NO: 48902

SEQ ID NO: 59969 - DNA, 315 bp, Acinetobacter baumannii; identical to SEQ ID NO: 48907

SEQ ID NO: 59970 - DNA, 414 bp, Acinetobacter baumannii
atgaataaaagagaaaaagcacttttttttgtcaacatgcttaacagaaaaatagtcgatgctgaagaacttttgaaaattcgcccctactggattaaagagtgtggagtttgcccaaaagccttagagaaaataatcgcgaattgtaaaaaggttgatgaatggggtagtttaaaccgagttcaaagagtcttagaaagcgccttaaaccataagcaaaaccacaaactatatggaaatccaaaagctaaaagtattaaagctttaaccattactgctacaaccacttatttttgggaaagcctcccagaaagcacagattacattttgctaagaacttttaagcaaatagtagaggatgcggccacctgtggaattaatgatgaatctaaattaatgggagctgaaggatga

SEQ ID NO: 59971 - DNA, 126 bp, Acinetobacter baumannii
atgacacagcgattagaactacatcaggtagagcagttaacagcttgtaaaatatcactattacttggattaaatgccgagcagaattatattgagcaattttccggtttagtcttcgcctgttga

SEQ ID NO: 59972 - DNA, 573 bp, Acinetobacter baumannii
atgcgactttttggttacgcacgggtatcaacaagccagcagtccctcgatattcagatcaaggggcttaaagaggcgggggtgaaagccagtcgcatatttaccgacaaagcatccggcagttctaccgacaggaaaggactggatctgctgcgaatgaaggtggaggaaggtgacgtcatcctggtgaagaaactcgaccggcttggccgcgacactgccgatatgatccaactgataaaagaattcgacgctcagggagtcgcggtccgattcatagacgacgggatcagcaccgacggtgaaatggggaaaatggttgtgaccattctttcagctgtagcccaggccgaacgcaggaggattctggagcgtacgaacgaaggacggcaggaggccaggctgaaaggtatccggtttggccgaaagcgcatcatcgacagaaatagtgtactggcacttcatcagcagggaactggtgcaacagatattgcccgccggctcagtattgcccgttccactgtttataaaattctggaagatgagagccgggttaatctgagcaaaatttga

SEQ ID NO: 59973 - DNA, 405 bp, Acinetobacter baumannii
atgagtgatgtaaaggcattcaacaattgcatgagtgtgttctggcgacagcatgaagccgaattctctcgctttctgacatcgaagacaggtgatagcgaaaaagcagcagacccggagaagacgaaggtgattatcgtgacgcttgccgaaacgacacctgtactggaagccgctaacctgcagcaggatctacgccgagctggcatcgagccgtgggcatgggtcgttaataacagcctggcagctgctcaaccgtcttcgcctttcctgaagatcagggcgaaccgcgagctgcctctcatctctgatgtggaagagcagtatgcaaagcgtattgcattaacagcgctacagagcgaagagccggttggtattgacctgctggaagaaatggcgaagtaa

SEQ ID NO: 59974 - DNA, 426 bp, Acinetobacter baumannii
atgagcaacatcaccatttatcacaacccagcctgcggcacgtcgcgtaatacgctggagatgatccgcaacagcggtatcgagccgaccgttattctttaccttgagactccaccttcacgcgatgagctgctcaaactcattgcggatatgggcatttccgtccgggctttgctgcgtaagaacgtcgagccgtatgaggaactgggtcttgcagaagataaatttactgacgaccagctcatcgactttatgctacagcatccgattctgatcaaccgtccgatcgtagtgacgccactgggaactaaactttgccgtccttcagaggttgttctcgatatccttccagatgcccagaaagcggctttcaccaaggaagacggtgaaaaagtcgttgatgattcaggtaaaagactgaaataa

SEQ ID NO: 59975 - DNA, 1290 bp, Acinetobacter baumannii
atgttactggcaggcgctatttttgtcctgaccatcgttttggttatctggcaaccgaagggattagggatcggctggagtgcgacgctgggcgcggtactggcgctgatctctggcgtagtccattttggtgatatccctgtagtgtggaatattgtctggaatgcgacggcgacctttattgccgtgattattatcagccttctgctcgatgaatcgggctttttcgaatgggcggcgctgcacgtttcacgttggggtaacggtcgcgggcgtttgctgtttacctatatcgttttgctcggcgcagcggtggcggcactgtttgccaacgatggtgcggcattgattctgacgccaattgttatcgccatgctgcttgcattaggtttcagcaaaggcactacgctggcatttgtcatggccgccgggtttattgccgatacggccagtctgccgcttatcgtgtccaacctggttaacatcgtttctgcagacttctttgggctgggtttcactgagtatgcgtcggtaatggtgccggtggatatcgcagccattatcgccacgctggtgatgctgcatctgttcttccgcaaagatattccgccaacttacgacctggctctcctgaaagcaccggcaaaagcgattaaagatctggcaaccttcagaaccggctggatagtgttgatccttcttctggttggctttttcgtccttgagccgttgggtatcccggtcagtgcgattgctgctgtaggggctgtcattctgtttgcggtggcgaagcgaggccatgccattaacactggcaaagtgcttcgcggtgcgccatggcagatcgtcatattctctctgggaatgtatctggtggtctatggtctgcgtaatgccggactaacagaatacctctccggtgtgttgaacgtgctggcagataaaggactttgggccgcgacgtttggtactggcttcctgacggctttcctctcttccatcatgaacaatatgcctaccgtgctggttggtgctctctctattgatggcagcactgtaacaggcgttatcaaagaggcgatgatttttgccaacgtgattggctgcgatcttggaccgaaaattacacctattggtagcctggcaacgttgctctggctgcatgtcctttcacagaagaacatgaccatcacatggggatactatttccgcaccgggatcgtcatgactctgcctgtgctgtttgtaacgctggccgcgctggcgctacgtctctctttcactttgtaa

SEQ ID NO: 59976 - DNA, 1752 bp, Acinetobacter baumannii; identical to SEQ ID NO: 26691

SEQ ID NO: 59977 - DNA, 363 bp, Acinetobacter baumannii
atgaaaatgttaacggtgtttgatccggcgatgtgctgcagtaccggcgtttgtggttcagatgtcgatcaggttttggtcaatttttctgctgatgtgcaatggctgaaagggcgtggggttcagatcgaacgttataacctggcgcagcagcctatgagcttcgttgagaacgaaaaagcgaaagcattccttgaggcttctggagctgaagggcttccgctgctgttgcttgatggtgaaacggtgatggccgggcgatacccaaaacgcgctgaactggctcgctggtttggtataccgctggaaaaggtgggtttagcttccaccagttgctgtggtggtaaaacttcctgttgttga

SEQ ID NO: 59978 - DNA, 354 bp, Acinetobacter baumannii
atgccagaaattgcatccctacaacttttcaaaatactatctgatgaaacccgcctgggtatcgtgctactgctcagggagatgggggagctgtgcgtatgcgatctctgcacagcgctggaacaatcacaacccaagacctcccgccatctggcgatgcttcgggaaagtggcctgttgctggatcgcaagcaggggaaatgggttcattatcgcttatccccgcatattccttcctgggctgccctggtgattgagcaggcctggttaagtcaacaggacgacgtacaggccatcgcccgtaagctggcatcggccaactgctctggcagcggtaaggctgtttgtatctaa

SEQ ID NO: 59979 - DNA, 468 bp, Acinetobacter baumannii
atgagcggcctcatttcttattctgagttacaacagtccgcaccgctgccggtagctattgactatccggctgcactagccctgcgtcagatggctctgatccaaggcaaactgccaaaatatctgctggcaccggaagtcagcgccctgcaccattatgttccggatctgcatcgcaggatgctgctggctaccctgtggaacacctacatctgtattaacgaagcgctggcattgaccctgagtgatttttctctggtgccgccctatccctttgtgcagcttgccacgctcaaacagcgtgccaagaaggtcattcaggcctttgctgaccacaagaatccacgttcgatgaaattttataccctagtgtttgcatcggatatggaggcctcgctggctgtaccgttcaccgtggtcgggcatggtgccgcgcaaatccttcgatcacgtactcaactaatgtga

SEQ ID NO: 59980 - DNA, 1176 bp, Acinetobacter baumannii
atgaaatctaacaatgcgctcatcgtcatcctcggcaccgtcaccctggatgctgtaggcataggcttggttatgccggtactgccgggcctcttgcgggatatcgtccattccgacagcatcgccagtcactatggcgtgctgctagcgctatatgcgttgatgcaatttctatgcgcacccgttctcggagcactgtccgaccgctttggccgccgcccagtcctgctcgcttcgctacttggagccactatcgactacgcgatcatggcgaccacacccgtcctgtggatcctctacgccggacgcatcgtggccggcatcaccggcgccacaggtgcggttgctggcgcctatatcgccgacatcaccgatggggaagatcgggctcgccacttcgggctcatgagcgcttgtttcggcgtgggtatggtggcaggccccgtggccgggggactgttgggcgccatctccttgcatgcaccattccttgcggcggcggtgctcaacggcctcaacctactactgggctgcttcctaatgcaggagtcgcataagggagagcgtcgaccgatgcccttgagagccttcaacccagtcagctccttccggtgggcgcggggcatgactatcgtcgccgcacttatgactgtcttctttatcatgcaactcgtaggacaggtgccggcagcgctctgggtcattttcggcgaggaccgctttcgctggagcgcgacgatgatcggcctgtcgcttgcggtattcggaatcttgcacgccctcgctcaagccttcgtcactggtcccgccaccaaacgtttcggcgagaagcaggccattatcgccggcatggcggccgacgcgctgggctacgtcttgctggcgttcgcgacgcgaggctggatggccttccccattatgattcttctcgcttccggcggcatcgggatgcccgcgttgcaggccatgctgtccaggcaggtagatgacgaccatcagggacagcttcaaggatcgctcgcggctcttaccagcctaacttcgatcattggaccgctgatcgtcacggcgatttatgccgcctcggcgagcacatggaacgggttggcatggattgtaggcgccgccctataccttgtctgcctccccgcgttgcgtcgggccacctcgacctga

SEQ ID NO: 59981 - DNA, 435 bp, Acinetobacter baumannii
atgaacaagctccaacgcgaggccgtgatccgaaccgcgctcgaactgcttaacgacgtgggcatggaaggtctaacgacgcgccgactggctgagcgcctcggggtgcaacagccagcgctctactggcatttcaagaacaagcgtgcgttgctcgacgcacttgccgaagccatgctgacgataaatcacacgcattcgacgccaagggatgacgacgactggcgttcgttcctgaagggcaatgcatgcagttttcgacgggcgttgctcgcttatcgcgatggcgcgcgtattcatgccgggacgcggccagccgcgccgcagatggaaaaagccgacgcgcagcttcgcttcctttgcgatgctggcttttcggcaggtgacgcgacctatgcgttgatggcaatcagctactggcactgttgcaaatag

SEQ ID NO: 59982 - DNA, 915 bp, Acinetobacter baumannii
atgaatgagttggctcttttcgcaggcgctggtggcggagtactcgcatcttatctcttgggatggcgaacagtgtgcgcagttgaacgtgatgcctacgccgcacaagttctggcgcaacgacagaatgatggaattctcgaagctttcccaatttggtctgacattacaacttttgacggaaaaccatggcaaggaattgttgacgttatatctggcggctttccgtgtcaagacatttcatccgcaggaaaaggcgcagggattgaaggtgaacgttccgggctttggtcagaaatggcacgaattatcggtgaagtacgacctagatacgtgttcgtggaaaactcaccaatgcttgtttccagaggacttacaagagtcatcagtgaccttgcccaaatggggtatgacgcgcaatgggcacgtttttcagcatctaactttggagcgccccatatccgggaccgaatatggattgtcgccaaatggagtcagcttctttcacactccgaattgcacccgtctagatggtggaagcaacagcaggaaggccttaaagaagcgtcaaatgcaatttccgacacccaaagcttcggatgggaacaagcgaggcaaggtgagcaatcatccaaggaacggtttagccggcgtggtggagaatttgcccaccccaactgcctcaatgagcaaaggatcatcaccagcgacgctgaccaggaaagacggcaagagcagggtaaacgatcggctcgatcatcatgtaatgaactcacatggtggcaagttgaacccgaactgggtcgagtggctgatggggtggccaatcgggtggaccgacttaaagccattggaaatggacaagtttcaattgtggctaaatgcgcattcgaatatttaggtggtgcaaaatga

SEQ ID NO: 59983 - DNA, 258 bp, Acinetobacter baumannii
atggctatcgaaaatctaaaatttactgaagatcaaaaaaagtttgtaactgatgaaatctctcgtttgaagggattagagaatagaaaccaaactgaagatttaattttgtcacttgttaaaagtattgaatcaggctcaccaacaaagcagcaaattagttcatttgaacgtgtaatgaaaaatgaatttaaaaaacataaagcacgtttagaattagaaaaaattaaggaagatgaaaaaaaaacttttagctag

SEQ ID NO: 59984 - DNA, 600 bp, Acinetobacter baumannii
atgaagtttaaaattgaaattttccaaatcttaagtgctgcaattttaataacagtcttatttatggcttttacttggatttgtattcattatcaaaaacctgaggaatcttttaaagaagcaattagtcttactgtatcttttatgggagtgattgctactgtagtagctgcactaattgcagtcctaatgtttaatgattggaaaatagttgcaaagtttgaaagaaataaagagatcattaatgaattttggttacaatatataaaagttaaatcagaattagttttatttggaacaaagattacacaagctaatgaaattggaacagtgcaaaaatatgaagtattagattcgatgtctgattcatttgtaaagctatactatttacagcaaaaactagaatctttttttgatattagtgaaaccaataaaaattttactgaattagaaaaaataatcaaatcctacacacaactccttgccccgtctaatgaaataaattcagaatggcaaaacaaagaaaatctattaataaatcgattaaatttactacaaccaaaactttataaagaattaaaacaacttaatccaatatga

SEQ ID NO: 59985 - DNA, 306 bp, Acinetobacter baumannii
atgaatattatagagtctattcaaaaagctaagtcattctggtttgatagcaaaagtaatattgatgaaaaagagataattaatagaagagtaaaaataattaaatatatggaggagaaagatattgactttaatattaatagtgagcctgaattaaagttttctattatacctttatggaccaaaccaccttctgaggatataggtgatagtttagattgggcttttacattacttaaagtaattaatataccagatgatattgttaaaactaaactatatgaagctttaaatgatataccttag

SEQ ID NO: 59986 - DNA, 720 bp, Acinetobacter baumannii; identical to SEQ ID NO: 49085

SEQ ID NO: 59987 - DNA, 363 bp, Acinetobacter baumannii
atgaaaccagaacagtttattcgtgagtacgggttggataaggcgagagaggttgttgagagcataccaagcaaatacatggagtgttactactcaacattgtgttactgcactaaggctaaaaagtattcagatcgatttaacccaagaattgaacttgtaaacatggcagacctcaagcttctggtggagtcgttggaaattattgagacagttggttatgaccgagacggtgccgaagagatttatgagttttcgaaggactgtagggttattcattatgcaggactagaaatcaaagtcgctagactcgctcaagccattcgcgaccacgaatcaatatacggaggcggggatgagtaa

SEQ ID NO: 59988 - DNA, 216 bp, Acinetobacter baumannii
atgagcaccacaaacaataacgatatatttatccagtacacaattgatggtagtggtgaagtaaaaaaactatcagttaaagcagaagatatttataaagatggtgttatcgacagaagcaaggtattgagtttagctgcttcaaatgaagccagtaatggtaatgctgtaattaacccgattgttttggattcaaactttcagccaatcaattaa

SEQ ID NO: 59989 - DNA, 234 bp, Acinetobacter baumannii
atgtcagaaaagcgtgaattttcggtaaaagctaaagcagaagatggcactacaaacggttatgtagttgagtttgatatttttgatacaccaaacttggatgatggggaatttaaaagcaaatccttcattccaaatgtagtcataattgatcaaaatcggatcccagtttattcaaagaaatttagagatccgagagacgataaagaatatacgattcaaggtaatttttag

SEQ ID NO: 59990 - DNA, 870 bp, Acinetobacter baumannii; identical to SEQ ID NO: 49028

SEQ ID NO: 59991 - DNA, 342 bp, Acinetobacter baumannii
atggtcaaagatgaaaatgccaagctttaccatgaattgttaatggatgcgtgtgctgcccacttaattgaagactggaaaggtgtggtatttgccgaaatcgtagacggtaaaactgttgagtctgaaaagccatatacacctgagaatgcctcaaagcttcttaatcttggtgatattggtatttcaatctggctattcattaaagaacaggctcagaggattcaggaagaagccgacaaggataaggctttaattctgggaaagtcgtcgagctctacaaataccaaaaaacgtatgcgtcgaaaacgccgcatgaaatcgaacaaatcaagttcttag

SEQ ID NO: 59992 - DNA, 2679 bp, Acinetobacter baumannii
gtgaaacttggaggtaatgaagcacaaaatgcggcaattaagcaacagaagcatgctgatgctttaggaaatactgctactgaagcagaaaaggcaactaaggctttgcaagattatcaagccaagcaaaaagatagcgttattgattcaatctataaatcaggttggcttgataaaggttacactgttgctcaagctaatgccattttagaactgcaaaaagcaaaaggaatgagtgcaattttgtctaaagatgaaattgatagcgcacttagaaatctcaagatcatcgaagaacaacaggagcgagaagataaattaactgaagctaaaagaaagcaaaccaaggaaagtgagaaaaaacttaaaatcacacaagctgaattggaagtagccaagcgatctgctgctttaattgaatcgagtggtttaggtaaatatgctgaaagcaaagggataccatcaagtgtaattgcaggcttattggctcaagaatctaaaggtattcgagaagctaagagtcatactggtgcaataggatattttcaaacaaccagtggttatcgtaaacagaacaatatgtctgttgctgatagttatgacttggaaaagtcgggcaaaattgtaattgataatatcgccaaggtttatgaaaaaacaggtgacttggctcaggcaatactttcccataatgcaggtgagggtggagcaagacagtttactaaaactggcaaggttaaaggcagtgcagagcgaaataaggaggtttcgcagtatgtagctaaggtttcaaggtattccgatatcattgctggtggtgttggcaaaggcggtttatccgatggtgatagcgatagagcctatggagagcaaatcaaggcacgtttagagttagttaagcaaggtctaaaccttcaagagcaatatgaggaggagcaagcgaagcgaaccaaggctcgtaacgaagaaattaaccttgcgcaacaaacgggtcaaacagccttaattcctaaaatcaaagagcgatataaagctcaagatgaactcgccaaacttcagcaagattttgaagtaaatggttataagtggactgaagaacaaaaacttgattacacatataaaaccaattctttgcgattagttgctgaaggcaaactctctgaagatcaaagaaaggttgctttagatggcctggaacagcaaaaacagcaagaacttgagcttatacaatcgactcgcgaaaaacagttacttgaggcgaaaagctcatacatgggtgaaactgagctggcaataaggcgatatcagattgagctggatgagattaaaaaagttgcagatgagaagcgaaaagctgggttgcttagcgctaataatatggggcaatttcagactttagatagcgcatcggataaggtttttcagagcggttttaatgcttcacaacaagtatttcaacaaaatgacccgcgagggtatgctcaatgggatttgcaaaatcggtattcaactgatgcaggagggctattaaatacatatatagaccaaactaatggtatcaatctaattgctgatgaggaacagaggagctcgcaattattggcagcgcgagagcaatatttacaatccagaaaagcactggatgaaaaatatgctcaagatgaacgggacctgaatagctcactttttgaaacccaattggggcaacttgatagcttaacaagtcagcttagtggctactggtcaaatatgactggaattgttaaaaatgcagcaggcgagcaatctggtatatacaagggcatgtatatagcacagcaagcattcgcaattggctcagccacaattagcgcgttacaggcgtataaccagattctagcaagtccgtggtatttggatgtaattagcaaatcaacagcagccaaccttgtgcttgggatggggatggcgaatgttggtctgatcgctggacaaactatagccggcttctctgacggtggttacactggatctggtagaaaatatgaacctgcaggtattgtccataaaggagaggtggtctggtcccaagaagacattaaacgctggggcggtgttggtttagttgagaaaatgcgtaagagtgcaaaccctgaagcttttctcaataacaatgcctcggctgatagtgtcatgcgccgtgcattgatgagttctaatgcctttatagaaagccaaaagcaagctgacatctttaatcaaccggttcaagatactcagattatctataaaggtaatagagacacacctaagttggcgtcttcggcaaattctgacttattccatgatggcaaggtctacttctcatcaaatggtttagttcaggatcgatcaaatcttgaggatgttcaagacttcacgataggtaaagctgctcgacctcaagctgagattatgccttcaactgagcctgcttcaccgacaatcaatttcaagattgaagtcgtgaatcaagtcagcggtgcaactgttgaagctgaacaactggatgagcaaacagtccggatcattgttacagatgaactggataagcagcttccaagaaaggtaccgaaacttgtaagtgaccaaatcgcaaatccaaactcaaccattagtcggtctttgactgagaatacgacagcaagacggaatcgttaa

SEQ ID NO: 59993 - DNA, 1122 bp, Acinetobacter baumannii; identical to SEQ ID NO: 48780

SEQ ID NO: 59994 - DNA, 711 bp, Acinetobacter baumannii
ttgaaaaaatatcttattagcattgaagcagataatagtccaaggttacaaaattttttttctcaaagtaattttcagccatataaggatgactttaaaaaaataggcatcaagggtaaagagcttacagtaaaagaatattttgacttggccgtcgctacacaaaagcaaccattaagcccaggagagttaggttgtactttatcccatatgcaggcacttcgagattttattacaagtaatgaaaaatatgcattagtattagaagatgatgctagcttctttatgagtttgggtggtattcaacttaaagtaaatgatcgtatttatggaaaaattcagcccaaaaaaatttataataaaaatattttaaaattgcatccctatagtattgctgatttatcttacacttatgcttatgtggtagataaagaaatggctaaagttctattagattatcatcataaaccacatgtatgcgatcattgggatgagttgtatcagttctatcccaaaattaatttttatgcgacattcttatttgatcatcctgaaatcatatttcatactcattccactagcagtatagagttagaacggaaactgctttcagaaaaaagtaaagtagaaagaaacatcttcgaaaagttcaatcgatcctttaaaaaaaggtggttaaaattattttatgagcaatatcgtgaattttaa

SEQ ID NO: 59995 - DNA, 324 bp, Acinetobacter baumannii
atgactaatttcaaaaaacaccctaacggctacaagtcatttttaggccgtgatgataaaggcctctactctgttcgcattggctggcaagtgtacgcatctaatgctaatggctcagttctttaccaagtaaagggtgaagttaagacgcctttggacgttgaaaagttcaaaaccgaatatccaaaagtttggaatgaaatcacacaagaaattgatttccaacgcagaaagcagctcgctataaaactgcgtgaaacaaacatccctacttatgaccgcaaagcttataaaactaagcgcggcttcactggctcaagataa

SEQ ID NO: 59996 - DNA, 963 bp, Acinetobacter baumannii
ttgaagcatgtatattatgctttaactaaagtttcaggtacattaaaatatagtaactatcttaagaaaagtattaaagatattaagggtgaaatcatagtttattcttattggaatgatgtttcttattacgcagcatgcctattaaaacgtaagggtgttattaataaagttatatccagagcacatggatttgatgtctatgaggagcgtcatcctaataattatatgccattaaaaagacaatttgggcctgatgtagataaagttttcttgctttcagatcttgcccgtaattattataaagataaatataattatccgttaaataagctcgaagtagcgcgattaggtgtagtcttgcctagagaatattatgaatattctaatatatataatgagttgaatatcttatccttgtcttattgtgtgccattaaaaagaattgataaaattatggatgctataaattatttttcaattaaacataatgttaaagtgaaatggacacatataggggctggtgaattacttgatgagttaaaaaagtatgcattaaatataatgaaagaaaatagaaattttaaagctgtttttttgggtcaattgagtaacagtgctgtacataactggctacttgaaaataatgttaatgcttttattaatgctagtgagtctgaaggagttccagtttcaatcatggaagctatgagttatggaattccagctatagcacctaatattggtggtatttctgatttagttaatgaacagaatggttttttaatgtcttcaaaagcagatattttagaaattgtaactggtttggaaactcttttattttctaaggatatttatgcgtatagaaagagtgcacgtataacagttgaaaataagtataattcagagaagaattataatgagtttgttcataaaattgaagaattagctttaaatgaataa

SEQ ID NO: 59997 - DNA, 1404 bp, Acinetobacter baumannii
atgaataaatctaagattctagcctatgctattggaccagttggttcaggacttattggtttaattactttgccaatgattacatggttttattctgtcgaagatgtaggccgtatttcaatgcttcaagtcagtaccagtttttttatattgctgttttgtttaggacttgatcaagcatatgtccgtgaatatcatgaggctaagaataaatcagcattatttaaaatagtagttctaccaagtttattattaagtttattatcttttttaattataagtttatacgacgctactattatttcgaaatggttgtatggaatttctagtgtttacttatctatagtaagtttatcttgttttattatagctttagtagctagatttttatctttaattttacgtatgcaagaaaaagctttggctttttctatgagccagttactaccaaaaatactattcttaattttcgttcttggtgtggtgtggttaggttttactaaagatagttatactttattaacagcaaatgccttatctttattagctgcctttttgatatacgtatggaatactcaagaggattggttgccagcaataagagagaagtttgattggcaacaatttaaattaagtttaactttcggttttcctttagttataggtgggctcgcttcatggggattaaatgtaatggatagattattcctacgcagtatgtctacctatacagaattgggtatctactctgttgcaatgagtatagctggagtagcaacacttttttcaggaatatttaatactatttggtcacccatggtttttaagtgggtaagtgaaggaaatatagattttaaaaaaattgataatatttcagaatacgtcttagctgcaatttattttattgttgttttagcagggttattctcatggattcttccttacttcttacctaagacctatgcggaaattcaatttttaatagtaatttgtttattgggaccattattttatacgttgtcagaaacaacagcagtggggattaccattgtccgtaaaactaaattatctatgctggcttcaattattgctatgttaattagtttgattgcgaactatatattagtaccaaaatatggcgcaagcggtgcagctatatctacaaccttaggtttttgggggttctatttatttagaactgaaatttctaaaaaagtttggagagatttcgttactaagaaagcctatgctgttacagctttattagtagttttagctataattaatgcgctatctccgcttgaaattaacatgcgaataggaatatggttttttgcactgttacttggtttttatttttttaaaaatgtaaagctcaaatcattaatggtaagagttatttga

SEQ ID NO: 59998 - DNA, 705 bp, Acinetobacter baumannii
atggaagctaatcagtttataggattaataaaattttttagaaatgaagatttcttagataaattatgctctggtcttttttattgtaattctccagaggaatacaggctaaacaaccaagaaggtattggcgaccctatggaaagctgtattcattcttatagattatctagaaatgatagtgagatagttcttgaaataaatggtcatgctttaactggtgttgaaagcctaaccctacataattcaaataatagagattcatggctacattgttggtttgaactaagaatcccttctgatcaagaagcactggatagtttaaatgcaaatattgaacgcatgaaaaaagagtttggagataatttcgcattcattccagccccaaaattaaagccactagttgaattaatacaaaaacatagtgaacaccctttgtattgtggttcagtgaaatattctagtaactcatctgattgggggaacttatgcaaatcgacaaaattttcatatcagaacgaatatagatttctatttggtgaatgtaatccacacagcctagttcactatgaattcagtattccgcaagaagatatacaggaactaatattaaaaaattctgaaataaagctcatggacagtagtgatggaacagaatggtttgttttaagacctaatcaattagataaggtcagcaaggtttga

SEQ ID NO: 59999 - DNA, 1164 bp, Acinetobacter baumannii
atgaaaggcgggttggttgtaaaagataatgctcttatgaatgccagttacaacttggaggtaacagaacaaaggttaattttattggcaattatcaatgctagagaaacagggaaaggaattactgctgacagtaagctagaaattcatgccagtgattatgcaaaacagttcaatgtcacaaaagaaggggcttacaaagctttaaaagaagctgtaaacaacctatttgatcgacaattttcattccaagaagaaacatcaaaagggattggtattgttcgctcacgatgggttagtcgtattaaatacattgatgattctgctctactagaaatcacctttgcccctgatgtagttccactaattacacgacttgagaaacactttacaagctatcagattaatcaagtttcaggacttacaggcaagtatgcaatacgactttatgaactattgataacatggcgtgaggtaggtaaaactccaattttgaaactagcggatttcagaagtcagttaggagttgaacctaatgaatacaaagcaatgaatcattttaaaagtcgtgttttagaaccatcattacagcaaattaatgaaaaaacagacattaaagtgaaggtggaacaacataaaaatggtcgttcaattagtggtttttcattcagattcaaacaaaaatcacagccaaaagtagaacaaaaaatcgaccctaaacgagatccaaacacacccgatttttttgttgaaatgaccgatgcccaacgccatttgttcgcacacaaattatctgaaatgcccgaagttggtagcgaatatgcaaagatcggagagtcagccgaagactttacgaaacgccttgctgacatgcttttagagccaagaaaattcagaatgttttacccgctactggaacagctcggctttggttctaagaaaatccaatctgcaccaatcaaacaggtcgatgaacctaagtttattgaattgcgaaatatgcaaataaacagcttgtcgttcaatatgtcccgtgacaagaaattcgctcatttaaaacaggaaaacgaatctccagatgattttatgcaacggcttcgcatcatgctaaaagacccaaaacagcaaattcaattttatgactacgtgaatgccaaaaagtag

SEQ ID NO: 60000 - DNA, 624 bp, Acinetobacter baumannii; identical to SEQ ID NO: 48684

SEQ ID NO: 60001 - DNA, 276 bp, Acinetobacter baumannii; identical to SEQ ID NO: 48683

SEQ ID NO: 60002 - DNA, 300 bp, Acinetobacter baumannii
atgtgtttaacattacctgaagctaaacaaaaacttagagcatttgctagagatactagcaaaatcaagttaactgcacatgcaaaagaaagaatgaaagaacgctgtatctctatgaagcaaattatttgctgttttgagcatggagatattactgaggggccgtacccaaatactcgtggtgattgccagttaaatgtttctgttcgtactgcaggcgaatacataacaacagctgttgcaatcaagcagagcgagaacggtgaattctcagtagtagtcactacatttagagagtag

SEQ ID NO: 60003 - DNA, 1134 bp, Acinetobacter baumannii
atgaaaaataaaaccgttatatttataggtacgactggtgcaagtttttatggttttcgttcagatataattaaaaaattagtttctgaaggccatagagtctttgcttttacttccgaatatactttagattgtttagagaaaattagattattaggtgctgagcctatcccctataaattagagcgagggggcttaaatccgattgctgatcttatatcattatactttttggttaaaaaaattaaaaaaattaaaccagatatagttttctcatattttgctaaacctgtgatatatggaagtattgctgctaaactttctaaagttccccatatcattggtatgcttgaaggacttggctatacttttacagaacaacctgaagggcaaaatgctaaaacaaaacttattcgtaacattcaggttttattatatcgattagctttacctaaactagatgatatgatttttttaaattccgatgataaaaatgacttggtagacttttataatttatcccttaaaaatatacatattttaggtggtattggtttaaatttagaagattataattatactcctgctcccatatttcctattaattttctttttattggaaggcttttaaaagaaaagggtatatttgattttattgaggcagttaaaatcgttaaatcaaggtatccgaaaacccaatttacagttttaggagggttagataatcaaaatatgggagccttatctaaggaagaactagacaatcttctcaaagaaaacttatttgaatatcctggttatgttttggatgtcaagaattggatagtacaatctagtgtatttgttttaccttcctatcgagaaggagtacctagaagtactcaagaagcgatggccataggacggcctgtgattactactgatgttcctggttgccgtgagacagtaattgatggtgttaatggttttcttgtacctaagtgggatccgcaatctttagctgataggatgtgcttcttcattgaacatcctgaacagataaatattatgggacaagaaagttacaaaattgctctagagaaatttgatgtaaataaggttaatgagaagttgttgaaaattttaactttataa

SEQ ID NO: 60004 - DNA, 411 bp, Acinetobacter baumannii
gtggctaattttcataaggaacatttagagaaagtaataaaagaaactaatatttcaccagttctaaatcaaattgaacttcatccatatatgcaacagcataagatgaggagtttgaataaaagtttgaatattcaaacacaatcttggagtccattagctcaaaataaagcattaaataatgaaattattaaggatatttctataaaatataataaaacgcctgcgcagattatcatacgttggcatctccagaatgacttaattttaattccaaaaacgactaaattagctcgaattaaagaaaattttgatgttttcaattttgaattagaagatgaagatctcaataaaatagctttacttgatagagaagagcgtttaggcccagaccctgatacttttgaataa

SEQ ID NO: 60005 - DNA, 354 bp, Acinetobacter baumannii
atgaatatccctaaattaggattaggcgtctggcaggcaacaaatcaagaagcaagttttgccgtacgtgaagctttacaacatggatatggtttaatcgatacagcatcaatttatggaaatgaagaaggagtaggtatcggtattagagatagtggaatagatcgagataatatttttattacaactaaagtctggaatgactctcatggagaaaaggctactacaatggctctggagaaaagtctggatcttttaaagctcaactatattgatttatatttaattcattggccagtggctcaaagagaaaaatatcttgagacttggcaaacacttattaaattaaaatag

SEQ ID NO: 60006 - DNA, 465 bp, Acinetobacter baumannii
ttgttaaatgatttaaataattgtgataaaaactttattttacatattgtagggaatgtagaaaaaagtgatgaaaatatagtgaagcatgatagccgagttaaattttacggtcatctaaataacacagcacttgatgatttacttaaaagagcatgggttgggttatcttctttttccttatatagaaaaggaatgcagcaagcttgtacacttaaggtcagagaatacttgaaagctggcattcctgtgtatgcaggttatgaagatgtttttccgcagaaatttaagtattatagaataggaaaaccatcaatgcagagtattttaaattttgcagaagaagttcggcttgttagcaaatcagaagtaatgagcagtgctgaaccatttatttctaaaaggagtttattaaatactctctacagagaaatatgtaaaattgaatctaaaagtcataattaa

SEQ ID NO: 60007 - DNA, 354 bp, Acinetobacter baumannii; identical to SEQ ID NO: 49134

SEQ ID NO: 60008 - DNA, 318 bp, Acinetobacter baumannii
ttgttgaaaaacggagtatctgagcaaacagcaactgaatatcttgatcttcgcaacaggaagaaaaaaccagtaactcaaagagctttacaacttgttttcaaacaagctcaagaagcaaagttaagcaatgaacgtgtattccaaattatcgttgttcgtggttgggaatctttcaaagcagcttggaattggcaggagacaaatgcagagcttgagcaattagaaaatccagttgttgagcagcatcaagccatccctgaacaaccagcaacacagttcaaaggcgttgctaagaaatttaaggggatggattaa

SEQ ID NO: 60009 - DNA, 321 bp, Acinetobacter baumannii
ttgttgaaaaacggagtatctgagcaaacagcaacagaatatcttgatcttcgcaacaagaagaaaaaaccagtaactcaacgtgctttacaacttgttttcaaacaagctcaggaagcaaagctaagcaatgagcgtgtattccaaattatcgttgttcgtggttgggaatctttcaaagctgcttggaactggcaagagacaaatgcagagcttgagcaattagaaaatccagttgctgagcagcaacaaactatccctgaacaaccagcaacacaattcaaaggtgttgctaagaaatttaaggggatggaccaatga

SEQ ID NO: 60010 - DNA, 339 bp, Acinetobacter baumannii
atgcaacctaaaaattgcaaccatacaaatctaaaaaataaaatttactctatcttaattcaatctggaaatactattccagatgaaatatctatagcaaatcaattaaatatgcatacaagaacattaagaagaaaacttaaacttgagaacgaaagttttagaaatttaattaaaaattataaaatgcacaaagcaatagaattacttataaacagcaatttaagctataaagagatagcatttttattaggttttaaatcttttagtagttttagcaaagctttcaaaacatggacaaataagacaccgcaagaatttcgagatcaagtaaaataa

SEQ ID NO: 60011 - DNA, 207 bp, Acinetobacter baumannii
atgctgagtggttgtgaaaaatgtgatgaatgcggaagccagtatttaaaaagtaaatctagcatggcctcgttgtgtcctgaatgtgcttctataatttatggatatgcgaattgtgagcatgtttttgaagagggacgttgtatacattgttactgggatggcagcacaaccacttatattgaagacttaaagaaaaactcataa

SEQ ID NO: 60012 - DNA, 162 bp, Acinetobacter baumannii
atgactattaaaaataataatcaatatgaatttttattaaattctatatttgaaggtagttgtgaaatagctattattgtttcacaaagaaagcattatttcattattgatgataaagaaaactttgctatagatataaaaccattttatgattcatattaa

SEQ ID NO: 60013 - DNA, 1152 bp, Acinetobacter baumannii
atgacatctggttttgaaaccttgaatttacatccgcaacttaaaaaggcgattgatgctttagggtttactcaaatgaccccaattcagcaaaaggttttaaaatatacattagccgggcacgatgcaattgggcgagcacagacaggaacaggtaagacagctgcctttctgattagtgtaattaatgatttactcaataatccggttaaagaacaacgtttccgtggcgaacctcgtgctttaatcttggcacctactcgtgagttggccttgcaaattgaaagcgatgcaaagtttctcacaaaattctctaatttacatttagtgaccctattgggtggtgttgattttgataagcagaagaaacaacttgatgctaattttgtcgatatcatggttgctacaccaggacggttaatcgattttgtagaacaaaaagaagtctggctcgatcaaattgaatttttggtaattgatgaagctgaccgtttattagatatgggctttattccttcggtaaaacgtattgttcgttattcaccacgtaaggaacaacgtcaaaccctgatgttctcggcgacttttagttacgacgtcttaaatttagcaagacagtggttgtttgagcctgtaacagttgaaattgagcctgaacaaaagaccaataacgatgtagaacaacgtgtttatgttgtagctaaacaagataaatatcgtcttttacaagatattttacgtgaagaaccaattgataaagtcatgatctttgccaaccgccgtgatcaagtgcgccgtctttatgaccatttgaaaaaagatggatataaagtaggaatgctatctggtgagattgctcaagataaacgtttgaaaatgctagagcagtttaagcaaaggaagcataacatcatgattgcaacggatgttgcaggtcgtggtattcatgtagatggcgtatcgcatgttatcaacttcactttacctgagcagtctgatgactatgttcaccgtattgggcgtacaggtcgtgcaggtgcacaaggagtaagtattagtttcttgtctgaagatgatgctttctatttaccagaaattgaaaaagcaattggtaaaaaactaccacttacccgattagacgggtattgctaa

SEQ ID NO: 60014 - DNA, 1044 bp, Acinetobacter baumannii
atgaactttatagttagaaaagaaactctattatttttattcatatcaactattgcagcattaatagtcggtaatcgtggtgatacaaatgatactcaaatttattacgatgtttttagatatattgaccaattacctcttcttaatccagtcagtttttatgcacaaacgggaatggaagttggattcggttggtattcttggcttataaatttatttacaagttctaacattgtattatttacaatattttcatttttaaatttcgtttttatttataaaacatgccgagaaatcggcattaaatatatttatactttcttaatttacatatctagttcttatttcttcatgcagcaatttatgcagatgaggcaaggtcttgcaatctgtattgtaatctatgcaacgatatgtattttgaaaagaggtgtcagcttagctcctgttttgctgcttctcttatctatttcattacatcaatcaagtttattgcttatagcattttgtgcgatgttttatttctttagaaagacattcttattttcatatcaatactttataagattaaattgggtaatgtttttcagtttcgttgttgtatttaagttcttgttattaagaattttgattggagcatcatcgagacttcaacagtactcagacagcgggtcttataatgaggagattagtctttttagtttacccaatatcagaacattcttgattctcatggttcttacctatttttcaagtgaaagattgcgtcaaaatgagctttatagattatttcttttcttgatttttacagctctagctatacgagttggattttctgaatttgcaattatgtctggtcgcttatctacagcattttcgtatgttgaaatatttgctctatcaatgttctttattaatagatttgcgccaattaccagaggagctttgcttctaatttattgtgcgttgcaattatttatagttctatactttcaagcaccatatttatggaatttatattttatgccattacacttatattag

SEQ ID NO: 60015 - DNA, 2019 bp, Acinetobacter baumannii
atgagtagcaaaattcaaatcccatacccattattctctgatatagatggccacccattagatgctgggtttatttatattggtgaggcagggaaaaatcctgaagtctatccgattcctgttttttgggatgaggatttaacaattccagcagaacagccgatacgttcacgcaatggatatttgtcatattatggtcgagctgggaaattgtatgtttcaagtgatcaatgctcaataactgttagaaataaaaaaagaaccttaatttatacagatttatatgcagatctatcatttacgcaaacaaatgcaaatgaacgttttaaatacacgatacagacacttgattcttttgatgatttacgacatttcaaaccttcaattgatgggcaagtagtacagattaaatctcatactactggcaagaaaaaaggtggtggactctttatctatgatgaaaactcattgcttgttgataacaatgggacaatcgcgaaatcacttgttgctaatggttcttttatccggcaatacgagactaaagaaggatattttgaatggtttggagcattaatagatggaactactaatgactatcaagcaattgtttctgctcttaaggttttaaagaatattcatctttctggaaaaattcttagtttgtcttcaattgatattgaccaatttaaagttggacaaacgcttggtatcaccattactggagatagcaatattgaatcagctttgatttttgatgatgagaaggggctctattcagcaagcaattctttttttagaggacttaatttaaagaatttaggaattgctaagaaaaatccaacaaaaacagggattggtttatatattggtagtggtggtgctgagcaaattaatcttgaatttgttgggtatgatggatggggttttggcagagcgactcatcagtggaactcaagttttgttggtgaggtttttagagattgtaagcacccattagcagtgtatggtacatcatctaatcattcaaattgttatgccaaccgttgtacatccccttatctttttggctatgctgtatctagtgatggggttgtaacagttccttccatcccatttgcttattctgatttgtcagggattgctgctgacgactgtggcaatgacggaagtgtttataagatcggttattgctccggcattgatttaaattcgcttagctgtgaacgtgctcaaggagagtatatattcgacctaactgatgtttcacaaagtgcgatatcaaaaacatatctaaataattttagtatgtatgttaacgaatataatccaaatttagttggaatattcaaatctccaacagggaaaagaccaaatttcattgttgatgggatcacaatatcatctgataaaaatattgtgcttttttctggcactggtgctggatgcgaaattaaaaactattcttttaatgatcgtgtgtggagtagtctaacaaccgatgcatcagctctaactataaacgatgtacagatcggtgatggttctgaatctacaggggagcaaggctttattgtatcggcaaacaatgattcctatgcaagagttaagaccattaaggggcgatgctttattgatccagccacccaaaaacttacatttttcggcggtagtttatatgagcgactcgctgctggaattatggttgcatgcaaagtaacattgcacccattaaaccgaaacggtaacaattctggtgaaaagcatggtgaagtatttttttcatctgcaatggattataacgctacagatatgtcaggacatcttaatgtagtgagaacaggaacattgacaacactgacaacagtatcccgcaacctatcaactggctctattttatcattcgatttagttgttgaggtaacttccccaggaacaagatttctagttgattttgaatacacttataacggcattcaaaactcaaatgggaagtgttggactgttcaaaacaagtaa

SEQ ID NO: 60016 - DNA, 2511 bp, Acinetobacter baumannii
atggcaacaagagaaaacttcgaaaagctattaggctccccaaatgtgcggaagatgcttgacctgattgccaacgctgaaggcgttcaacatggctataacacattgtttggcaatgagcgttttgatgacttatctcaacaccccggaataaaaaaacaattcactcaaactgatggtaagaaaaacgtcactactgcagcagggcgctaccagttcttaaaagatacatgggatggggtagcaaaagatctcggattgaaggacttctcacccaagaatcaggatattgctgcggttgctttgcttgcacaaaatggggcattgccatcagttttgaagggtgattttaagacagctgtgcaaaaatcaggtagcacatgggcctcattaccttcttcaccatatgcacagcctaaacgctcatggaaagatcttggtattagcaatcctgcgcgtgaagattatcaatcacaagcttcaaaaattgttgctgcatacaagcaaaaacagaaggagcaggaagtcaaagcgcagcctgtagatcaagcagctcgctctcaaaaaattgtggaagcttatcaaaaggctcaacaaaacggacaaattaagagcgcagctaatcaaccacaaggacttccagatttcgatgcaaatggcgtgattacatatgatcaaccacaagtagctccacaagctcccgaaccgtctttagctgataaggcactgggattaggtgagacagcactatctgccgccactggtgcaactggcggtacacttggaatgattggtggaacaattggtcaggcagggcgagaaattttagctggtaattttggcacaccagaagcagcacaacgtatttcacaaaatgcagctgaaggcgcagcagacttaacctacgcaccacgtactcaaacaggccaagaatatacacaagctttgggggaagtatccgagccattagtagcgttaacaccagctttgagtgaattggctttagctggtcaagctgcacgtgctacggctccgattgcacaagggcaagctatacgagcagggcaagcggttgcaccagtagtagagcgtgcaggacaaatggcagcaagaccagttcaagctgttaccaatgccactcgttctggtgttgagagtttgggcgaaatggttggattgagaacgccggaagcagaagggccagcgcctgcgaacgtcggtgcagctcaagttgatcaagcaacaattcgtcaagctctttctcaagatttaccttatccagttcaattaacagaaggtcaaatgacgcgtgatccagctcaactcaagtttgaagttgaaactgccaaggatccagaacttggtgctccacttcgccaacggcaagaagaacagcatcaagtcatgcagcataacttagatgcgtttattgatatgactggtgctaaagcaactaatatgcgtgaagcgggattatcagttgataaggcccttcaaaaacaattagaagcagataaaaacaaggtaagggtggcttacgccaaagctgacaagtcagaagaggctcaagcacctgtggatgtatcaaagcctgttcaagttggcaatatggagccaatgtcagtaattgactatctcaattcacagcctgatttaaccacaacaccaattttgcaagttgcaaagaaaatggctattgagacaggtgttgcagcaaaaggtgaagatggaactttaattccactcaatccaactgttaaggcaatggaaaaatggcgctctgaaattaacaacaatgttaattacgaagcaccaaacatccgccaagcttctatcttgaaaaacatgattgatgcacatacgcaaccagttgaaggtgtgctttacaagactgctaggtcagaacgcaagaaattgggagaccagtgggaaaaacgaaaaatcattaccgacttaacaactaataaacgtggtactgaagatagaaaagttgctttagaggatattcagaaacgaattatctatgatggatctttagatgatttgaggtttgctaaacgaactcttctgaattctggcgaagaaggatggcaggcgtggagagacctgaaaggtcagactttgcaagaaattaaaaatgccgctactgctggtgttgccccagatgggcaaggcaatcaaatgataagtgcagcagctttaaataaagcaattacacgactggaccgagatggtaaattggatttcatatttgaaaaaaatggtgcagagaaacttcgtgcaataaacgaaatatctaaaacattgttcaccacacctacttcagccgcaatcaatcatagcaatacagccgcaacattagccgccgcaatggatatcgcaatgtctggtttatctggagttcctgctccagtcgcgactgctttgcgcttagctacgaaacggattaaggacaacaagattagggctcgtgtaatcaaagctttaaaaccacccaatcctaatttttaa

SEQ ID NO: 60017 - DNA, 174 bp, Acinetobacter baumannii
atgaattttaacctaaatttacaggttgataaagtgatgaacaaactttcaagcagcaaagtattaagggtgtggacttacatcatggcttttgtatttttaattggaattttgatttggcaagcagcaccaatattgacagcaacttctaagttgattgaggtattaaaatga

SEQ ID NO: 60018 - DNA, 1296 bp, Acinetobacter baumannii
atggtacagccaattgattacacccttgatgtggtaaatcctgttcagtcttcactgcaaggttttacaggcggtttacagcttggcatggctgtagaagaccgtaaacgtgcagtggcgcaagctcaaagagatcaattagccaaagagcaaatgaataaggatttattcgacttgtcgcagaacccttcttatgaaggatacacgcaggttatgactaaatatccacagctggctgagaacctaaaacgtgcctacgacactatggacgcaggcaagcagcaaacgacatttagtttagcttcacaggcttatgcagctttgagtagccaacgccctgagattgctaaacaggttttagaagatgctgctattgcctatgacaactcaggtaacaagcaagacgctggtgttttgcgcggctatctaaagatgattgacaccagtccagaagctgctagaacctcaattggcatgcttatgtcatctgtaaatccagataagttcaaagatatttatagcactctaggtggcgagcaacgtgcaaatgaaatgcagccttatgatattgctgagtcaaaagccaaaactgcatatacagaagctcaaacaaatgacatccctttagctgctgaagaccgtcgtactggtgttgataatcaaggtagaaaaattgaatatgacaatcaatttaactacgacaaattaagtcaagatcaacaacagttctatgatggcttagacaaaactgagcgaattgaggcggcaaaattaagagcagcaaaagctgagtcttcaattcaaagggttgaacgcctagagaaagttgaaaactatgccaatgccgcaaaacaagcggctgatgcgtctaatcttgctgcaaaacttgttactcaggctaaggaaaacggtggagcatattgggatcgactcgttcgacaagttccggggacatctgaaaatacttttgcaaaagacattgaaacgcttaagtctcaagtcttccttgctcaagttgaaaagatgcgtgggttaggtgctttaactgataaagagggtgatgcaattcgatcctctattgcttcacttgatattaatcaggggccaaaagcagttcagcaaaacctttccaaaattgctcaacaaatgtcagcagcagctaagagtgcaaatcgaaaggctcagctctatgcaaccaaaggagatgggtactctccagctgttatgagtgctgcaaaaacccttggaatttctcccgcagaagctcagaagttcgttaatgagaatggattgtaa

SEQ ID NO: 60019 - DNA, 648 bp, Acinetobacter baumannii
atggtagcagcagcaatggtggcaacagcagccgttggagcagtatcagccaaccgagcagccagcgcacaaaagaaagcagcacgtgaagcatctcaagctcaaactgatgcgagtcaagctgggattgaagagcaaagacgccaatttgatgcaatccaagagttaatgaagccctatgttaatgcagggagtggagcattggcagggcagcaagatttattaggcttgaatggggcagctaaacagcaagcagcaattaataacattaataatagccctgctatgcagacttaccttcaacaaggtgagaatgcaattttacaaaatgcttcagctacaggtggattgcgtggtggcaatacccaatcagcattgtctcaattcaggccacaattacttaaccagctcataaatcagcaatatcaaaacttaggtggtttgacttctatcggtcaaaactcagcagctggtgttggtaatgctggtatgcagtctgcaaataatattggcaatcttttgtcacaaatgggtgcagcgcaagcaggtaatgccatggcacaaggtcaagcttctgcaaatcaatgggctagcattggcaatattgcaggacagttaggcggatattacgcaggaacaaaattctag

SEQ ID NO: 60020 - DNA, 456 bp, Acinetobacter baumannii
atgattacagcacatgtagagagttttgaatctaatcttgactacctcaagcctctattgccgattcattataaagaactggccttaaatcaagacaaggtgccactctcaccacagtttgacaaatacatcgccgcggaacatcgcggcgaattgctatttgtaggtctgagaagtgcaggtgagttgattggttattttattggtttcatttcacctggtcttcactactcgacctgtctcacatgccagatggatattttttatgtcctccctgaacatcgtggatcaggtgcgggcttccaattattcaaattcgttgaagagcaattaaagaaacgtggtgttcagcggttctttgttgggtcaaagatgcacaaagatgcctcttggctttttgaaaagcttggctatacaccagtagaaacatattactcaacttggttaggagattga

SEQ ID NO: 60021 - DNA, 576 bp, Acinetobacter baumannii
atgaataactttcacattattagtaaagctgatgtaaacctcctaatgttaaacatcaaacagcactccgagctgtggaaagaggatacgtttctacgcgactatccacaggggccattcggtgaaatagagtcaattatgcttcgctttcctgaaaagcgtgtgtttgagcaagaagaagaactcgagaaatacaagcgtggtgaaagccaatttgatcaacatgagagtgttgactatccagcattcagtattttaactgaagcgcgctccatcgtgtttggcttaatggcaatggtgcaaggtgagcgacttggtcgagtcatgattaataaaattgcacctggtggaagaatctacccacatgttgattctcctgagcataccgactactacactcgtttccatgttgttttgcagtcttcagcaggatgttatttgcgagctggtgatgagcagctagaaatgaaaactggtgatgtcttttggtttgacaataagcttgaacatgaagttgtgaataactcagcgtttgatcggctttcaatggtggtggatataaaggtgagaaaatga

SEQ ID NO: 60022 - DNA, 336 bp, Acinetobacter baumannii
atggcaacagttacagcaaaaaatcttgtgggttcgaagttcattgaaaatgcacagacaactcaatacacagcatcaagcgtcaaggcgcttattgataaatgcacagtaaccaatgtttcaggctcagcagcaacgtttagcattaacttggtgacttctggatctgctggtacttcaaatttgattatcaaagatcaatcggtggcggctggtcaagtttatacatgccctgaagtagtgggtcatattcttgaatctggtggattgattagtgcaatttcaaacacagcaagcgctctggtgcttcgcgtttcgggccgtgaggtgacctaa

SEQ ID NO: 60023 - DNA, 366 bp, Acinetobacter baumannii
atggaattaattgatcctaaaaccccaccacgtgaattgatttacaagtggtgtcagggtgatccacgcttaatcaaggcagttgagaaaatatttgacttgataccaagcgagtttaataaaggcgcagacgacacagaaggctctcaatacgctgctgataatgcagcaactcaagcaggcattgccaattcagaattggccaatgtgatacgtctagctgaattgagcgcgttatcaccttctcatgctcatgcattatctgattcgctcggcatctcaccagctcaagaattaacaaagtctgattatatcgatgttgcatgtcagcaaatcgaatgctcaaacttcaacttagagatataa

SEQ ID NO: 60024 - DNA, 1401 bp, Acinetobacter baumannii
atgcaaatccctattttaaatggaatatacacagatcaaaactcagactttcgaacctcatatcctcgcaatttaataccagttcccaaagaacaaggcttatctagtgggtatctccgcccagcagaaggtatcgaacaccttgctgatattaacggggtagatcgagggggtattaactggaatggtacatgctacagggtttgtgataacgatctaatccgagtaaatagggataacaccattactaagcttggtgaagtttcaggatctggctattgtaattttgaatactcctttgactacttggcaatcaactcaaaaccatatttatatctgtactctcctgataagggattgaagcaagtcacagacagtgatttaggtaacgtttatgatgttacgtggattgatggttatttcatgacaactgatggcgagtttctagtagtcacagagcttaatgatccttttgcagtaaacccacttaaatatggttcatccgaggccgaccctgacccagtaaatgcgttatttaagcttcgcaatgaggtgtatgcattaaaccgctacacaattgaagtgttcgacaatgtaggcggtgaaaactttccattcagtcgtgttgatggggctatgatgacacgtggcactctaagcccatctacctgctgcaaatacttagacacaattgcatttgtcggaagcggaaagaatgagccatgttcaatctatctttgtgcgaatggcggcactcaacgcattgcgacacgtgaaattgatcaaatcttgcgtcaatacactgaaacgcaattagcagaatgtttgcttgagtctcggattgttgatgcacaccaatggatttactttcatttgccagataaaacgcttgtctatgatgcagccgcatcacaagccacaaaccagcaagtctggttttttttatgctcaggatttggtgagggtcgttatttggctcaaaaccatgtctggtgctatgacaaatggattgttggacatccatatcagccaaagctaggaacgcttacaaacgcatctggtgaacactggggtgatgttacagagtggtcgttcaatacgcagattatctataacgaatcgcgcggtgcaatcttccatcaacttgaattggtggccctaacaggacgcacgttgtttggcgccaaccccacaatctgcactcaattttctgtagatggtattaactggtccaatgagcggtacattcgcactggtaagactggtgagcgcgataaacgtctcgtctggttccaatgtggccacatgatcaactggcgtattcaaaaatttaccggaacatcagaaagtagactatcagtcgcacgacttgaagctcaactcgaaccgttggagggataa

SEQ ID NO: 60025 - DNA, 453 bp, Acinetobacter baumannii
atgagtaatcgccttaatcaaactgatgacttggagacaggtgatcagtttgttctttataaagcgggctgcacagactttcgcgctgtccctcaacaaactgtcttagactgggttcttaaaaatatccccgttattaaaccagtttcagcaattattcagatattcaatcctaatgctaactttacagtgcaagtagagaacaatgccgtgggtacttatttggtaatgaatccttcagtagcaattactaatggaactattacgcttcctgccttaactgatgtttcagatgggcaagaactcttagttactagctctcagcaaatagaaaacttaacaattgctgggaatggcgcagctcttattggcaacccgaatacaattgcagcatctggattttttaagcttaagtttgatcgtatttctcaaacttggtatcgagtggggtag

SEQ ID NO: 60026 - DNA, 480 bp, Acinetobacter baumannii
atgtcatggacaaagcggcagattgtcgaaaaggcttttgaagaaatcggaatggctgcttatgtctttgatttgcagcccgagcaagtggaaagtgcgcgacgaactatggatgcaatggttgcggcttggtcatctaaaaacattcagattggatatccactgccaactgcgatggatagtagtgatttggaccaaaacacaaatgtacctgattatgctttagaaacgttgtacctaaaccttgcaaaacgtcttgcttctaacttcgggaaagtttttgtaccagagaaagcgacacttgcaaaagaaggctatgaaaaccttttgagaatggctgtttctaatccacctaaaatgaaatatgcatgttcgctgccagcaggcgcgggcaataagacatgtgatccgtttattcaaaataaacctgacaacgctgtattaacaccaaaacaaagcgtggagttcttcaatgagtaa

SEQ ID NO: 60027 - DNA, 903 bp, Acinetobacter baumannii
atgtctgaacaagatctagagcaagaaaacgaacttcaagaagacgaaaatcttgatggtgaaacaccagaatatgaacatgatcgagatgatcaagagtcaaatgatggtgaagatcatcaagaagatgaaggtgaattcgacattgttttaaaaggagagattcctgaaaaacaagaagaagatgactttcatggacaacccgctccagagtggctcaaaaaagaacgcgctgctatcaaagagattcgaaaaaaggaacgtgaccgtgagcgtcggatcaaagaacttgaagcaaaactagatgagtatcaaaaaccagagccaatagaacttggcgagaagccaactcttgaaggtgtaggctttgatacagaagagtttgaaaagcaacttgatgagtggaaagaaaagaagttcaagttagagcagcaagaagctcaaaagcgtgaagaacaggaaaaggctgataaagcttggaaggataagttatccgtatatgaagctaaaaaaggtcaattgaaaaccaaggtacgtggctttgatgaagcagaggaaaatgtgcgagatgcgctaagtccactgcaacaatccatgatcattgatggtgctgataatcctgacttactgatctatcacttaggaaccaatcctaagaccttaaaggagcttgctgcaatcacaagtccaagtcagttcgcctttaaagctgcaaagctagatgctcagatcgaaaaagttccacgcaaacctcagacaagtccagaacgcaaacctagcggatcagcaccacttagtggagcagtgaatgcaaagcttgaaagtcttcgagcagaggcagaacgcactggcgattacaccaaagttaatgaatacaagcgaaagctaaaacaaaatcaataa

SEQ ID NO: 60028 - DNA, 372 bp, Acinetobacter baumannii
atggataagaactcaaaagattggaaaaaaccaaagccatttaagtggcgcagtaagaatctcggatgtgatttgattaagtgctggacatataagcgcaactatatggcaactacctacgatgttgatggagatagatttgaatacaacatttatgagatcagtgataaagaagatccaaaattaatctgttcatttgaagacttcacattcctttatgaaattgaagagcgttgtgagcaattgcttaagtctttcgcaaaaggaagaacccccggattcaatgtacatgaaaagaaattgctagaagaagggacagggaaatttcacccagagaacattaactttatcccatttccagaaaaggcttag

SEQ ID NO: 60029 - DNA, 369 bp, Acinetobacter baumannii
atgacagcacatttaccaaatcaatcagtatctgttgaagatgatgaatggggtactaattgccataatcacccagagcgttctgcggtaagaagagtttgtgtagaagcagatagctttggggctgaatattcaaatatgtgccaggaatgctcagatcaatatacagcttataaagaacaaaaacgaaatgatgaatctcaatgggagcaatgcccaagatgcaaaacgttagtgcctgaactctcttcttatcgagatcctgatgaaggtagtcatgggccagtttatagcagatgttctgattgtgtatctaagttttggaagcgttggaacgaagaaaaccttgacgattattactacgactag

SEQ ID NO: 60030 - DNA, 444 bp, Acinetobacter baumannii
atggataagtgtagagaagagtttgagaagcaaaagtactggattgggctatttagagacgcggttgattttgatgaggagcttggtcgatatgttttaaacggtcaaagaaagctttacgcatttcacctcgattcatttaacgagaaatgggcaatttggcaggaagcatggcagcaccagcaagcgaaagtggaggagcttaaagcatctcatcacggtgaagtgattggtcatgaagttcactttaaaaagatcaagcaagagcgtgacgagctgcaaaccttatacatccaacaaggcataaacatgctgaagctgcaaaagcgggtggataaggcactagaacttatgcagaagcctgtgattgttggagagcctacaaactacgtttgtgcaaggttcaaagagttagagcaagcactcaagggggaaggactatga

SEQ ID NO: 60031 - DNA, 639 bp, Acinetobacter baumannii
atgaaaagattaaacgtactggttgcttgtgaatattctggacgtgttcgtgatgctttttcagctttaggtcacaacgctatgtctagtgacttactcccaacagaagcaccaggtaatcactatcaaggtgatgttcgtgatgtgttgtatgaaggctgggatttattaattgcacatccggaatgtacttacttaacaaatgctggtgtatgccacttgcataaagatccaagtcgctggcctaagctttttgaggctgctgagttcttcaagctcttcttaaatgcaactcatattccaatgcgagcaattgaaaacccaatcatgcacaagtacgcaaaaacgctaattggtggtgtgcagcaaagccaggttattcagccttggatgtttggacacacagagcaaaaagctacttgcttatggttagaaggcttaaagccattaacaccaacagataacgttaaagaagaaatgatgctgctgccaaagaatcagcgtgagcgacttcattacttgccacctggcccagaccgctggaaagaacgttcaagaacttatcctggtattgctaatgctatggctttgcaatggggtggagatgttcgttatttagctatgagggaagcagtatga

SEQ ID NO: 60032 - DNA, 186 bp, Acinetobacter baumannii
atgaccgtagatgacttgcgagctttctataaagctaaaagcgacgctgatctcgctcgaatccttggtcgagatcgatctgtaattaattattggcgcaaaggcatcccattaagcacccaggcggtttttgaaatttcaaccaaagggaagctaaaagccgatttacaagcattaaccgcttag

SEQ ID NO: 60033 - DNA, 690 bp, Acinetobacter baumannii
atgcaaactacatcagatagaattaaccagcgtatgagggacttaggtctgcaacacaaggatttggttgctgccactggagcgagcaaagggactgttaccaactggattaatgggataaacaacccaactggaaagagattagttcaactcgcccaggcgttaaaaaccacatctagttggctattaactggaaattcaactcctgaatttacacaagtcgagccgtgggatggttcgaccccactggatgatgacgaagttgagattccattctttaaggatttctcttttgcttgtggtggtggctctattggtgaggctattgctaatgaaacacgcaaattgcgaatgtctaaagcaacactgcgaaacttatcgattatgaaagagaatgctgtagcagcgacagcaattggtgattcaatgagtccaaccattaaagatggcgacacaatccatgttgatctcggaagaaggaatataaaagacgggaaaattttcgctatttgtcttggtgggcttttttactgcaaacgactctacaacctgcctttgggtggtgtgcgtattgtttctgataactctacagagttcccagagatacatttaaatgcccaagaaataattaatcagcaattagaaattattggttgggtttggcaaatatctagtttagaaaattggtga

SEQ ID NO: 60034 - DNA, 717 bp, Acinetobacter baumannii
atggaaacaataataaataaaatcataagtttaattaaaatattttggataaaagggacttcacaaccagtccaaagagttgggttaattatccttgctattggtgtgatgtcctgtactttatattctatccaaagcccaaatcattatgatattcaggacatattattagatcctgattactacccaagatatagggatcctattttttacaagctatacgtttattttattcctctagggtttcttctttcatggggataccctttactgcaaaaaattcaatcatggatattgaataaacctaaaggtgataaatttctacacttccaaaagcgtaaagaactaacggaatttattcgcaaaaactgggatttaaaaaaagctaacaatcgaccagctcttggctatgtctcgcaagttttaagccctgatgaaagctataaggaggctctagagcttgggtttattaagcctggtgaaaagcatgttcttcacaccgatgttttgcttataactgagcatggagagcaattagtttttgcaccgtgtgaagctttaggtgccaacctttcgattggtgattttgtgttattggcgacttatgggagcgaagaaaggcaggactggcactacgaattgattgccaaattaagaccgatttacaacgcatcaaagaaaggctgggtcattgaaagtgactacagaataaagtaa

SEQ ID NO: 60035 - DNA, 1026 bp, Acinetobacter baumannii
atgaatgcgccagtaaatacacaagttaatgaattacaagtattagaacaaaacgtaattgtagcggctttcgctaaacgtggtggtacagatgaattgtatgaacgtattgctcaagaagttcgttctcatgtgccagatgtaagcactaagaaaggccgtgatgcgattggttcgcttgctttgaaaatcagtaagtcaaaaactcttattgagaaatgtggaaaagaattagtagctgaacaaaaagctcaaatcaaagtgattgatgatgatcgaatctcaattgttaagaagtttgatttattacgtgatgaggttttagcgcctcgtgatgcttgggagcaagctgagaaagaccgtgtagcgaagcatagccagtttatttcaaatatcaaagttatgtatggtctttgttttgatcttccatcactggaaatcaaaaaagctatcgactccctagagagtttagttgttgactcatctcttgatgaatatgagcaggaagcaaaacttgcaaaatttgaaactattgaagcacttcgtacagctcttgttgctcgtgaaaaacatgaagccgagcaggctgaattagagcgtcttcgccaagctgaaatacttcgccagcaacaagaacgtgaggctcagattgcccgtgaagctgccgaaaaagcgacccgtgaggcggaagaaaaagcacgttttgaagctgaacgtgtacaacgtgaaaaggctgaggcagaacaacgcgaagctcgattaaaggctgaaaaagaagctgctgaattgcgtgctcaacatgctgccgaagcagaacgtaaacgtattgaggctgaacaagctgtgaagctagaggccgaacgccaagcagaagaagcgcgccaagctaaccaagcacatcgtaaaaaaatctgtaatgaagcacttaaaggcttattggctttgggtattgatgaagcaaaaggaaaagagattttgcaagccatcaataaaggcttagttccacatgtatctattaatttttga

SEQ ID NO: 60036 - DNA, 270 bp, Acinetobacter baumannii
atgttactgactactgatgaagttgaactactcaaaacatgtgatgaaagccctgaacaatacattgcagtttttcaaggtcaacagatcggatatctacgcttaagacatggcgaatttcgagttgattaccctgattgcggtgatgagaccattttgtattctcaagagccacaaggcgatgggtgttttgaagatgaagagcgtgaacatttcttaatgaaagctagagaagccatcgttaaaaagtttaatgagatggaggggtga

SEQ ID NO: 60037 - DNA, 717 bp, Acinetobacter baumannii
atgaatactcctttaaatcaatctattagattttctaaaagccgacctccgtatctttttttacgaggggcggtggatatactgccattgtctatttcggttattccgtgggctattttggctggttcaatggcaattcatgcaggtctatcattttataaagcattggcaatgtcaggaattgtgtttgctggagctgcacaattggtcagtttgagtatgatgatggagggtgtttcattattaacaatctatatcacgattttctttcttactgctcaacattttatttatgcattaactttaagaaatgatatttctattttgtctttgcccaaacgattaagtttagggtttttactaacagatgaattgtttgccttaagtgctccgaacgaaaaaaggcatcctcattatttattgggggcgggtatatgtttttatttattctgggtaatttttagtctagttggaattttattggctacggcgattccagatttattgtcctaccatttagatttttcgattattgctatttttgtggccatgattatccctatgtgtaaggaaaaacctgtcatagccggagttttaacaacttgttttagtggttttattctcaaattttttcatgttgaaggcgccattctgatttccggtttattgggaatgctaattgcggttgttgcagaaaatagaacaggagaaaaataa

SEQ ID NO: 60038 - DNA, 597 bp, Acinetobacter baumannii
atgcaaagtaaaacgttatttctattaggtctatgtacgatcttaagtacaactgcatccgctgttcctttggacgctaaaggtgccaaacagcagttaaatcaagcagcaaaacaaaaagtatttcagggtaaaattaacttagatgctttggttaccaatgaatctaatgatcttattgttgaatacaatattccttcggaaagtgtggctacaggtttggagcgacgaaattatattgctgcaaataaaaagaatatccagtcaaggtttaatcgtggtgtaggggtacaactacttcgggactacaataatttacctatagctttttaccgaattagtaataaagaagctttggttgatttgcttaatgatccgaacgttaaggctgtatatccaaaccggattaatcaggcgacaaccatggaaagtttgcctttaattaaccagcctcaagctaatacccaaggctttaatggaactggttctagtgtggctgtgcttgatacgggggtaaattacttacattcggattttggttgtacagcagttaattcaccttcaagtacgtgccgtgtcgtttatgtatgcatttga

SEQ ID NO: 60039 - DNA, 924 bp, Acinetobacter baumannii
gtggtttttcaggtaatcttaccaattttgattttattattgatggggtactgtagtgttctcattaaattggtgacacctgagcaaattaaggctcttagcgcattcgttattaaaattgctcttcctgcatttttaatccaatccttagccaataaaaatttacaagatatttggcacccagcttattttattgcttacggtggtggctctttaatcttgttttttctggcttttattatttatcgaaaatattttaaaaacagcttaacccatagtgcagtcatatcaatgggtgcttctatgtcaaatacaggttttatgggtactgctattttgactatgctcatgggtagtcatgctgcaatctatatatctttaactttaatcattgaaaacttattaatcgtcgctttaatgcttattttggcagaagcgggattacatcaacagcagcggcttttgcctttactgaaaaaaacattcataaatttaattaaaaatcctgtaattattgcaattttagtggggatgagctgtatcttgctaggtattcatctgccttcaaaacttgggcaagctttagaacttttaggaaggacagcttcgcctctagcactatttgctattggcggcagcttggttggtataggtattaccgccgtgaatttacaaagtgtattgttggctgggtttaatgtcatccttatgccagttgtgatttttgggttattccttttattaccaaacgtcagtcaagagatgttatatgccggaacattaattgcagcacttccaatgccaattgcttttggtatttttgggcaagcatatggtttaaatgaaagagcattaacacctttgatgataagtaccattattggttttattggagtaagtgggcttatcgctttgtggtggtaa

SEQ ID NO: 60040 - DNA, 264 bp, Acinetobacter baumannii
atgttattcaaaaaattcgctgttgctgctgctgttgccgctactttagctttcgttggttgttctaagaaagaagaagctccagctgctgctgctgcttctgaagctgtagctgctgcttctgaagctactgctgctgcttctgaagctgctgttgctgttgacgctgctgcttctgaaactgctgctgcttctgacgctgctgcttctgcttctgacgctgctgctgctgctactgacgctgctgcttctgctgcacactaa

SEQ ID NO: 60041 - DNA, 543 bp, Acinetobacter baumannii
  misc_feature (128)..(137): n is a, c, g, or t
ttgtcaaatgacggttatctgtttttttataccctttatctggtttgtattcgttttgtaaaagtaaaacgtaaaatttatatagaaataaaaagttttaaatttatttggggttatggggatgaggnnnnnnnnnngaggggaattactccgcaagaagggttcaccttagtggaactcatcgtaacaattgcagtcatggctattattgcaatgatggctgcgccgtctatgtcaaatttattaaaaagtaaacgtttagatactaatcaaagagatttaattagcactctatctgaggcgaaaagtcaggctgtgcttggtcgtcagaatgtttcagttaatttgaattcagcggcttctaatacggccactttattaaattggcaacctacttctaacaacaccctaacgctaaaaaatatagctgctgataatacccaaagttctttagctatcactactttaacatttaacgcaaatggagttgtgagtaatattactcaggatgcacttatatctaaagctgaggagacatgctaa

SEQ ID NO: 60042 - DNA, 411 bp, Acinetobacter baumannii
atgactgactttaataacaaattagcgaaccctaatgagcctcccatgtctttgccaaaagaccctaatgagcctccagtgtctttgccaaaagaccctaatgagcctccaatgactttgccaaaagaccctaataaagtgaaagctaatttaatgaaaaaaaagactgtatctagtagtgaaattgaaccaccactgataacagccacagaaaatagagaatggttgaaagattacattggtacaaatagtattaaagatagaatagataaattagaagcaaagcttatccttctctctcaaagaggtaaatttcctctagagtctcactataaaactgatttaattaatgaaataattgacttacgttccattcttgaaaaagaagcccgcccttatgattccaagtaa

SEQ ID NO: 60043 - DNA, 303 bp, Acinetobacter baumannii
atgattccaagtaatttttataaatttctcaaagatttgaagcgaagaactttagatgaagggcttgtgtggagtagccattctgatactagaatggttgaatatgatcacgaaaattttaatatacgaatcagatattattttgatgatgatttaggtactccatttttttatatttattatgtagataaaacacgtggtgaagactatgtttttaatacaagtaaatatgaagcagattattatgagattgaagatatctttgctattgctcaagatagtggatttaacagcccatggtaa

SEQ ID NO: 60044 - DNA, 984 bp, Acinetobacter baumannii
atgaatgatcgttatgtgatttgtactcgtgcaattaaagaaaatgagtttattgctgaaccaggtttaacaacatatttaaaaataccagtaggagaaaagccaactcctaaacatgctatagaacaaaaaaaatggtttgattctgttcagaaagcctcaatatggggaaaggactcaaaaaatccagaaaacaaaagaggagatatattagtttttattcatggttataataatgatcaagctgaagaagttatggctagacatgatcaacttaataaagaccttaggttgcaggggtttaaaggtatagtagtttcttttgattggcctagtgacaataaagctgttgcttatctggaagatcggcatgatgctaaaataacagctatgcgattggttactgatgcgataagtattttagcagaaagacaatcccctgaatgtagtattaatattcatttgattggacattcaacaggtgctttagttattagagaggcttttgatgatgcagatgatactaaattagtaaataattcgtggatggtaagtcaaataatattaatagcgggagatatatctgcaagttcaatgaccgattttaatccagtgtctgaatcattatataggcattgtattagattaactaactattctaatttaaatgattctgtactgaagctatctaatgtaaaaagagtaggagtttcacctcgtgtaggaagagttggactacctgaaaatacaccaaataaagcagttaacgttgattgttctgaatattacaaagttttatctagtaaccaagaggtttatcaacatgatcaagatgttttaatcggttatgaatcacattcttggcatattggtaataaagtatttgctaaagatctattcgaaactcttattggagatgttgatcgctctcaaattgctgaacggaaagaaacaggcttaataaatagattttccttaatataa

SEQ ID NO: 60045 - DNA, 606 bp, Acinetobacter baumannii
atgagtttacctgtcgaactggttaactactggtatgaaaatgccaaacaactgggccaactcaagtctcaaaaaaacaacccaaggttatttgatctcaacaacacaaatcatctggataaacctttgaaaccctcgatgatagataccgctgaagagcgcaaagcaaggaactatttctttgaaaatattcaaaatatctttgaaaaaaagccagatcaaataaaagcggtgcttgagacatttttaagtcgtgttacagtttcgcataccggcattcattatcgctggaataaaattgatcaattggaatcattttattgcaaggtaaaagacctgtttccccatcaattttggcatttgcttggacaagacttggtacaattgctagataaaaagaaacaacctttattactgaagctggctaaatcgagcacaacagagcatcctacgactcaagaagattatgttcgtctccagctttactcgacaaaagatgccaaagcactggccgcatttaaattttgcttacatctagcttgtattggcagacctcgatctcttgaactgcaagttgaaggtctaaaaatcactacatgcgattaa

SEQ ID NO: 60046 - DNA, 330 bp, Acinetobacter baumannii
atgacagcagtaatcgcgagcagtaaagcaaagccacttgctgaacagtggaagggtgagattaccagtggccgccatcaatacttttgtgatgagccagaaaagttagaaggtcatgatcaaggtccagcaccttatgacttgctgactggaagtctggcagcttgtacactcattactttaagaatgtatgcaaagcataaagattatgactttggtgagttttcggttgaaattgattttcataccaatcgtgagcatgaagaacatatcgagcgtcgtattgttttaaagagttgccgaacgaagagcttcaacaaaaaatcttaa

SEQ ID NO: 60047 - DNA, 474 bp, Acinetobacter baumannii; identical to SEQ ID NO: 54904

SEQ ID NO: 60048 - DNA, 375 bp, Acinetobacter baumannii
atggggacaatacagaaaaaagcaccacgccagccaataattgaacccaaaaaacttcctaatggtgctgcaattgtggtggctagcgcatttccaccatttaataaaccgagtgctttaggtactgaaagcggaggaacgagtcgcataacaattgatgtcgacatggcccaaaaaccaccaataactacgcctaagattgcacgacccaacataaacaaagccgcagaatgggcaaatgtaatgactatgccagagaaaatcatcagtagggtgagtaataaaatgatatgtcgtcggtcccatgccttaaatacacggctaatcgataagctggtcatcacagcaaaaataccagaaattgcgattgcttga

SEQ ID NO: 60049 - DNA, 1404 bp, Acinetobacter baumannii
atgaaaagaaatgagataacacggtatcctttacctgataccaccttaagtcatttagaatctgagaaaagtgaatacagagtgcgtgatagtgggcatctgtattttagagttaagtctaatggattaaaagattggcaatttagatataagaaaagaagtacaggacaatggacttggcttgggctaggtgcatatcctgctataagtggaagactagcaagaacaaaagcaaaacaatacgaagaattagttaataatggtattgatccaaaagaatatgaagaacagcaaagacaatctcaattagaagtacatctttttacttttcaacaattagctattgaatattgtgctactaagagctggactgaggaaacaagggtacgtaatgaaggtgctttaaataaccatgtttatcctgtaatgggaaacagagattatagacgtattagtaagaaagaatggttagaattaattcagcaaattcagcagaaattaaacccaagaacaggtatgccaattattgagatgggaaaccgtgtaagagggttatgtaaagagatttatgatctggcagaggttacagggagaattgcatataaccctttagtgggtctggataggtttgttaataaacatagatctcaaaacatgcctcatgtaacacaagaagaattaccagttttattaagagacattagaaatttttatgacagaagtaaagtaacttcaataggattacagttgtctattttacttggttgtcgtcctagtgaaatgcgaaaggctgtgtggagtgagtttgattttgatagaaatgtatgggttattcctgcacatagaatgaagaaaagaattgaacacacaatacctttatcaaaacaggttatagaattattgaatgaattaaagtcatacagtggtcggagtgattatctatttaggggcagaagtagatctgatactccaataagtgagaatacttttggtaaagcattaaaaactatgggttatcaaggtaaacaaacaccacatggcttccgccatatccttagtacaacattacgtgaaaaaggttttcaaaaagaatgggtagaatctgctttagctcataaagttggtggcgtagaaggtgtatataataaagcagtttatctggagcagcgcagagtaatgatgcagaattgggcagattacttagattctttggttaatggtaatacacaagctattgagtcaacagaagatacagtaatgaatcaattaattaatgctttaaagttaagcgaagaacaaaaagtattacttcaagatttgatccaaacagaaaatgaaacttggcaatttaatcagaatgaaaattttgttgagcttggaataagcactatgatgtgtgcttaa

SEQ ID NO: 60050 - DNA, 507 bp, Acinetobacter baumannii
atgaacccatctatttttaatttcaataatcacggcgtaagagttgcccttgatgcaaacggacagcctttattttgtctgcctgatgttggtcaagccttagatattaaaaacgcgacagcaagccgttttaagctaaatccaaagggggtacatgaaatgtatacccttacaaatggcggtactcaaaagctaacttttatcagtgaagaaaacctgtaccgcattgtatttagatcgactaaacccgaagcattgaatttccagaactgggtatttgctgaggtactgccaagcatccgcaagactgggagctattcagcacggcagacagcctatgaagaactgaaccgcctatgtatgcaagcaaagacccaaaaggctaaaggttcatttcatggcactggcttggcaaaccaccgctattcaatgcgagatttaaacctaagaattacaacatgcaaagccaatttacagcttacttttgagggggtacacagtgattga

SEQ ID NO: 60051 - DNA, 2019 bp, Acinetobacter baumannii
gtgagcttacaaacaaacttgaaggggcgtcttcgaaatacgatcctacctaaaacccatggtttaatgcctgtttttgaagctgttgttaattctatacaatctattgaggaaaaaggggaagggaatactggaaaaattattcttcaaattgatagagataagcaatctactctggatttggaatctaaagagttgcctccaatcgttggttttacaattattgataatggttgtggatttaacgatgagaattttagatcatttaaaatacttgattctgaacataaaattgaaaaaggctgtcgcggtgtagggcgactaatgtggttgaaggtttttgatagagttgaaattgaaagtcattttgcaagtgttgaaggttgcctaaaaaaaaggacttttaattttaatgatacatcggctgtccataaggaactgttagttaatagtgacgtaaacgaatcgggaaccactattaggttgcttggttttgaaaaaagctatagagaaaaattatcaacaaaaggtctctctattgctaatcaacttttagaacacgttctttggtattttgtacgccaaggtggtgcaccaaagattactgttattgatggacttgacagttttgatttagatgatcttctaaaaaagcatatgcattcaagtgcagtgcatgaaaccattaatatttttaatcattcttttgaattaacacatattaagtttcgtttatctgtaaacaagaagcatcaaattgccctttgtgcagcgaatcgattggtaaaagaggattcaatacaagggaaaatccctggtctttatgcgaaaatttcggatgaagcaggtgattttatctatacatgttatgtttcatcagaatatttaaatgatcgggtgagaagtgagcgaacttcttttgatattgccgaagatgtaagtgatctatttgaagagattacgctcagaagtattagggaagaggtccttaaacgaacaaaagaatatttgaaagatgtactttctaaaaatattgaagcaggtagaaaacgtgtagacgactttatcaataatcatgctcctcgttatcgtccaatagttggttacgtggatactgaattattaattgttgatcctgataaatctgacaaggatttagaattgcatttacatgcacagtggtatgaggtagagcagcagttagttaaagaaggtcacgatataatgcaacctcgaaaaggggatcatgtcgaagaatataaaaagcgcgttagccattatctgaaaaaggctaaagatctaaaacaatcagatctggcaaattacgttactcatcgtagagtaattattgatttgctacagaaaacgattggactacttgatgatggtaaatatgcacgtgaggaaatgatccatgagttgatcatgcctatgcagaaggattcaagtgaggtatttcttgactcgtgtaatctatggttgatagatgaacgcttggcttttcataactatctggcatcagacaaaactataaatgctatgcctatttcagatagtgcctctggcaaagagccagatttattgagcctaaaagtatttgataaccctattcttgtaaatgatcaaacaaattttcctctggcatctataacagttgtagagctgaaaagaccaatgcgaaatgatatgaaagaaggggaggataaagatccaattgaacaagctttaggttatgttgagcgtattcgcgaggggcaagtgaaaactaaggatggattcctcatgcctagaaatgatcatattccagcatactgttatattgtttgtgatttaacgccaacgatgatcaagcgatgtaggaattttagtttaacaatgactgctgatggcatgggatactttggctataaccctaattataaatcttatattgaagtaattagttttaaccaacttgttagggctgcaaaagaaagaaacaaggcattttttgataaactaggtttatcttcaaattag

SEQ ID NO: 60052 - DNA, 1677 bp, Acinetobacter baumannii
atgtctaaaacaaaacttgaactgacttggattggtaaagacaagcgaccacgcctagagccaagaattttactggaagatcctacaaaatcttatcatgcaacaaataaaatttcagaaaatgatatctttgataataaactgatttatggtgataacttgcttgctcttaaagcattagagcgtgagtatgcaggtaaagtaaaatgcatctatattgatccaccctataatacgggtagtgcttttgattattatgatgatggtttagagcattccatttggttgggtttgatacgtgaccgtttagaaattttatggaatcttttagataaagattcaggtagtttatgggtaagtattgacgataatgaaatgccatatctacgtttagttttagatgagatatgtggtagatctaattttattgcctgtaatgtttggcaaaagagatattctagagagaacagacaggcaataggtgatgtacatgaatatattattgtatatgcaaaaaatccttcaaattttaaagcattaagaaataaactacctatcagtgaggaacaagcaaaagtttataaaaatcctaacaatgatcctaaaggtagatggcgtcctataccgatgactgctcaagcagggcatgcaacatctagtcaattttatgaagtagttacccctactggtgcaaggcatgttcctccgaatggtcgttgttggggtattgctgaagatacatataaaaaattattatccgaaggacgaatatactttgggaaaaaaggagatgctcagcctaatatcattcgatacctttctgaagttgaaggtgtggcgccttggacatggtggccatctaatgaagttgggcatactgatgagtcgaaaaaagagatacaaagtttatttggtaaagatttatttgatactccaaaacctgagcgtttaattgaacgcattgtccatattgcgactaataaaggtgatttagtcctagattcctttgcaggctcagggacaacgggtgcagtagctcataaaatggggcgtcgctggattatggttgaattaggcgagcattgtcatacccacattattccacgcctacaaaaagtaattgatggcgaagataaaggtggtgttactgaatctactggctggcaaggtggtggaggtttccgctattacaaactcgcaccaagtctgatgaaaaaagatcaatgggataactgggtcataaatcctgaatataatcaggaaatgcttgttgaagccatgtgtaagctagaaggttatacctatacgccatcagaaactgagtactggaatcacggtaaaggcagtgaaactgattttatttatgtcacgacacagacattgacagatcaacagttacaaacaatttctgaagaagttggtgaaggacgtactttgctgattattgcaagtgcttggcgttctaaaaatatcgatcgttttaccaatctaacgttaaagaaaattccaaacagtatcattaaggcatgtgaatggggacatgatgattacagtttgaatattcaaaatctgccgatgtcagaacctgatattgaagaaaagccaaaagtgaagaaagttaaaaatacgcaagaacaaggtcaggtaacgggtgacttatttggggatcaaacatga

SEQ ID NO: 60053 - DNA, 660 bp, Acinetobacter baumannii
atgaagcgtatttatattttggtcgaaggacaaacagaagagtcttttgttgatgaagcaatggttcctttttatgctcagttaggtatttttattcagccaattattgtatctacaagtaaaagttgtaaaggggggataaccagttacgccaaaataaaacctcaaatactgaagctttgtagacaagataaaaatgcatgggtaacgaccttttttgacttatacgctttacctaatgattttccaatgaaaagtagttctggttatagttctttaaataattgtcacgataaagtagattttttggagaatgctttacagcaagatatcagtgaacaaaactttttgccctacattatgctgcatgagtttgaagccttattatttgttgatcctgacaagtttgaatggtgggttgatgatgcatcaattatagatagtctgcatcaaataaaaaatagctatacctcacctgaagaaattaataatagcccacagacagcaccatctaaacgtattttaggtttaattcctgattataaaaaagttgtacaaggtacaattattgcgatggagataggtttagatgaaatgcgtaggcaatgtctgcattttaatcattggttggatcgtttagaaaatttaagagatttatga

SEQ ID NO: 60054 - DNA, 1098 bp, Acinetobacter baumannii
atggttgaggatattcgtgataagcagatttcacgcattgttattgagggttataaatccatagaaaagtgtgatttagagctaaatacattaaatgtactgataggtgcgaatggcgctggtaaatctaatttgattagcttttttaagctaataggtaaaattgttgatgaacaactgcaactggcagttggagagtctggtggaccagactctgtattacattttggaagaaaaaaaacagaacggcttaaagctgaactttattttggtaataatggatacaagtttagtttaattcctactcaagataatcgaatgatgtttgaacgagaagcattgtggtggaatgtgcatggtgattggagagcaagaggcgggcatttcgaaagttatatagcagagcaaaaaaacaggacaaatatttataattatgtcgttccagcaattatgagttggacgttatatcactttcatgatacgagctcgactgccacggttaagcaaattcataatatcggtgataatgaatatttaagacaagatggaaaaaacttggctgcatttttgtatcggttgaagcaacaatatgagtcaaactataaacgtattgtaaaaacaattcgtttagtagctccatttttcggtgatttccatttgcgtcctacagtcgccaatcctgaaaaaattcagctggaatggattgaagctgggcaagatgagccatttaatgctagcgcactatcagatggtactctacggtttatctgtttggtcactgtattgctattacctgataaatttatgccagcaacaatattaattgatgagcctgaacttggtttgcatccatatgcaattaaggttttagctaacctcataaagtctacagctatagatcatcaaataatcatttcaacacagtccgttgagctactcaatgaatttacattagaggatctgattgttgtcgataagattaaaggagactcgacttttacaagactggattcggaaaaactatctgaatggcttgatgaatattctcttggtgaactgtggaagaaaaatatcattggggggagacctaaccgatga

SEQ ID NO: 60055 - DNA, 2850 bp, Acinetobacter baumannii
atgctttctaatcaacaaaaacaatatttatcatggttgcttacgaaaaaatctgctgacaactctattgattcacttgcttcaacgttgattgattcacaagtcgatcttaatccgcatcaagtggatgcagctttatttgcttttaaaaatcctttatcgcaaggtgtattacttgcagatgaagttggtctaggtaaaaccattgaagcaggtttagtcattgctcagacttgggcagagagaaagaaacgtattttggtcattacgcctgcaaatcttagaaagcagtggtatcaagagctttatgataaatttggattaaaggctgttattttcgaagctaagatttacaatcaacttaaaaaagaaggtagcacaaagccttttattcaagatgatattattatctgttcgtatcagttcgcaaaatccaaagcaaatgacataaggaacattgcttgggatttagttgtaattgatgaagcacatcgattaagaaatgtttataaaaagcaaaatataacagcaaatgtgattaagcaatccttagagcatgttcacaacaaagtactattaacggctacaccattacaaaactctttgttagagctttatggtttggtgagtattttggatgagcgagtctttggagatttggagagttttaaaagtcaatttattacaggtgataaggaagtaacacttccgcagcttcgagcaagattagccacggtatgtaaacggactttaagacaacaagtacagccttttgtttcgtatacagcacgacgtgcaattgttcaggactttactccatccaaagaagaacaacaattaagagaattagttgctgactatttacgtcgccctaatttgcaagccttacccgttgggcaaagacagttgatttctcttgtgttgtggaagttactcgcttcatcaactcaagcaattgctggtgctttagccacaatgactacacggctagaaaaaaaattgattgatcaagactctaatcttttggatgagttggatgatgactacgaagctttgactgagtctggagatgactatgaagagcttcttgaggaagatgaaattttatcagctcaggaaaagcaagccattgagctggaaattgctgagcttaaagagtttcaatctttagctgtaaatattaaacaacagtctaaaggccaagctttacttacagcattagagacttcatttgaggctttgcaagaattaggcgcagaaagaaaagcaattatttttactgaatcgaaacggactcaagagtatctaactgaattgctgaaaggtacatcttactttgatggattggttttatttaatggcaccaataatgatgataaagcgaagcatatctataaggaatggattgcaagatataaaggaacagatcgtgtcacaggtgcgaagtcagctgatacacgtgcagcattagttgattactttaaagagcaaggttcggtaatgattgcgacggaggcaggtgcggaagggattaacttgcagttttgttctttgatcattaactatgatttgccatggaatccacagcgtattgagcaacgtattgggcgttgccatcgttatggtcaaaaacatgatgttgtggttgtgaattttgttgatcgtagtaatgaagctgattctcgtgtctatgatttgttgtctgaaaagtttcaactctttgatggggtgttcggtgctagtgatgaaatcttaggaacgattggttcaggtgtggactttgaaaaaagaattgcagaaatataccaagaatgccgtgatcctgaagaaatagcacaaagctttgaaagtttacaaaatgagctttcagccgaaattaatgaagcaatgctgaatactcgtaatttgctgatgaatcattttgatgagaatgttctttatcgtattaagtctgatgctattcagattcggcagacctatgagcaatatttattggcattgctcaatgatgaatttacatgtcatggggcaaatgttgtatttgatgaaaatggtttccaattgaatgatgcaattacgattaatggaacttcattcaacatcggtcggtatgatctagtcaaaacaaatactcatgaacatgtcatacgtttaaacaatcctttcgttcaatctttacttgatcggtataaagcacaaactctaaagtctgcaaaattagtatttgattatgatgcttatggcttacaggtatccagtttaaagccgttcattggcaagtctggttatttaattgctgagttattggaagtatctagcttggggcgccttgagcaacatcttgtactcagtgctatgactaattcaggtcaaatcttagctgatgatgatcctgagaaactcttaaaattaccaatgaaatctcaagctgatattgctcacattgtattgcctgagaacatatgtttagagcaagaaaatcgtaagaacagaattcttgagcaagtaaatgttcgaaaccttggattctttgatcaggaaattatcaaacttgatggttgggctgatgatttaaaaaatggtcttgaggttgagatcaaggaaattgataaggcaattaaagaagcaagaaagtcagcgacgattgcagcttcattacaagataaactgaattggcaaaaaactcagcgtgaattagagatgaaacgtacaaagttacgtcgtgagttatttgatcgacaagatgaaattgatatgcaacgtaacgagttgattggtcaattagaggggcagcttgaacaaaaaattgcgatgaagaagttatttgtgattgaatggcaattaagatag

SEQ ID NO: 60056 - DNA, 942 bp, Acinetobacter baumannii
atgattaaaggtttagcgattacaccgccaatacttggcagaatcagtataggtaaaatggtcgaaaagaacggtaaacgtctgcctgaaaaggatgaccaatttactattaccagtcaaatccaaggtaaggagggatgggtcaaacatccactggacgaacagcttcgtgccaaggcaccgaatcaaaatcaaaaactcagaactattccagtacgaatggttttcaatgaccctgaactcaatctacgggcagaatacactttatttgaccgtcagacaggacgtcctatgtgtgtaggcaatggagaaacctgtcagcgattgaccaatcaaggcgtggaacaacatccatgtccatcacctgatttatgtcctttggcacaaggaggtaactgtaaaccttatggacgtttgcatgtcaatttggatgaaagtgatgaactcggcacattcatttttagaaccacaggttttaacagtatccgaactttggctgcgcgattgagctattaccatgctgcatctaatggcttactgtcatgcctaccactacaactgacactgcgaggtaagtcaaccacgcaaagttatcgtaccccagtgtattacgtggatttaacattaggagatggaatcagccttcaacaggctattcaaatggcgaaagaaattgatcaacaaagtaaagctactgggtttaatcagagtgcgcttgatcaaattgcacggcaaggctttgccaatgcaaagtttgaagtgaatggtgaggaagaattggatttgatggaggagttttatagtgatacggatgaaactgtaaatgaaagaaaagggcagacagagcctgtaacaacaacgagaaccaaggcaaatcagggggatgggtttgtacaggagatgcagaagggattgcagcgaagtgtgagagcagtgaattaa

SEQ ID NO: 60057 - DNA, 288 bp, Acinetobacter baumannii
atgagcatgagctgtccattttgccattcaatgaatgtgatgttggttgaagtaagtacgcaacaatcaaatatacccttaaacaatttggtcacaccgaccacattagctgcattgggagctacggtagcaaagtctttcaatctgccaccgatagtcggtggaatcgcaggaacagcattgggcagtgtattgaattcattcactgaacaaagtgcaccatcaccgcaaaatttgtgcttttgccacaactgctatcaaaagtttccaagtcatcttttgcagtaa

SEQ ID NO: 60058 - DNA, 417 bp, Acinetobacter baumannii
atgggaattgtagatgagttcaagaaatttaatgcggaacttaaaaatcctaattggtctgtatcttccattagttctaataacgaactcatagttagcttgtggggtcataaaccattactctttaagcatccaactgaaagaaagcaactataccgtgatcgaatagataggtggtctggaaatggatgtaatgagtttaaaaaaaaccttgatcttgcttttaaagaaaaattaaagataagaccgatcatatcaatgctgaatgattcaagtgattttcaacatatcttagacggcaaggatggtagtaaatattctaaaaaattcaatgcaaaaaaagattggattggtgaactaactgtttgggatggtatcaatttcgaaattgaatttagattggatgataaaagatag

SEQ ID NO: 60059 - DNA, 1932 bp, Acinetobacter baumannii
atgattcaatttgaccaagtttctttacgccgcggtggacgtgttctctttcaaaaagcgtctatgcaattacacccaggttggaagattggtctgactggggtcaatggtgcaggtaaatcaacattatttgcagcattactaggcagtttaggcgcagatgaaggtactcttactcgcccttcggtctggacagtggcgcatatggcacaagaagttaaagctctagacatacctgccatcgattttgttctttctggtgatgaagaatattgggatattcaaaataagcttgctcatccagatcaactcacagattcagacttggctaaactacatggccgctttgatgaaattcacggttattcagcaccatctaaagctgcccagcttatggctggcttaggttttttagaacatcaattacgtttaaacgttgctagcttttctggtggatggcgtatgcgcttaaacttagcgcgtacattaatgagtcgttctgatctactgttactagatgaaccaacaaaccacttagatttagatgcaattttgtggttagaagactggcttaaagcctatgaaggtaccctcatcctcatttcgcatgaccgcgactttttagatgcaattacagaccatattctccatattgagaatcaggaactcacgctttacaccggtaattactccacatttgaaacaactcgaagtgaacgtttagcacaacaacagcaagcttttgaaaagcaacaagaaacacgtgctcacctacaaaaatttattgaccgtttcaaagcaaaagcaactaaagctcgtcaggcacaaagtcgtataaaacaacttgagcgtatgcagcaactcgcacctgctcatgtagatacaccgtttacttttagttttcgtgaaccgaccaaaatgagttcaccgttgctgacgttagacaatgccagcataggttatggcgaaaagctaattgctgaaaaaatcagattacaaattacaccaaattcgcgtattggtttacttggtatgaacggcgcaggtaaatcaactttgattaagagcttggtcggtgatttaccacttctagcaggtgaacgtaaagcttcagagttacttaatattggttactttgcacagcaccaaatggatgctttagacggccatgccagcccgatgcttcaacttgcccgtttggcagataaacaaattagtgaagccactttacgttcatttctggggagtttcgggtttagtggtgaacgcatggacacaccatgtgaaagcttttctggcggtgagcgcgctcgtttggccctagcactgattgtatggcagcgtccaaatgttttaattctcgatgagccaaccaaccatttagatcttgatatgcgtcatgcactgagcatggctttacaagattttgaaggtgcagttgttctggtttctcacgaacgccaacttattgccagtgtgtgtgatgagcttcttttagtacacggcggcaaatgtaccgaatttgaaggtgatttgcaggactatgctaaatggctacgtgaagcgcgtcagcagcagatcaatgctcagactgctgtaacagcaaataactcatcatctgctgcccctgctcctactaaagttgataaagaagcgcaacgtaaggaagccgcacgccgtcgcgaacagactcgtcctattcgtaaaaatattgaaaaagttgagtcacaaattgaaaaacttcaaccgcgacttgctgaaattgaagaagctttagcagatagctcattatatgaagcgaatcgtaaagatgatttgcttaagctgatgaatgaacagactgagttgaaggcgaagcttgaacaacatgaagagcaacttttagaactcatgatggaacttgaggaaatggaagcttctttcgaaaactaa

SEQ ID NO: 60060 - DNA, 348 bp, Acinetobacter baumannii
gtggtgggtgcaatacgtgcgacgcaaggtaaaactttagcacttatgcaagttagtggtggttcacaatcttttaatagcgttaaccagatgcgtattttggggcgctggatgcggatgattacaatcccgaatcaatcttcaattcctaaagcctttttagagtttgaagaagatggacgtatgaaagcatcttcttattacgatcgtatagtagatgtgatggaagaactctataagtttacattacttacgcgtggacaaagcctgtatctaactgatcgatattctgagcgtaaagaatctgctgaagaattatctaaacgtgttaaccagcgtagtctgtaa

SEQ ID NO: 60061 - DNA, 402 bp, Acinetobacter baumannii
atggcagatatctctgtaaatggtaaggggcacacaaattctggagctgcagatcgtttaggtagtataggggaggctggaacagcttgttgtgttcatttaatagcaaacagcgatactgccgatgtaagcttttatacggatagaggggatgggtataaacagtatcatataaaagttcccgtagaaaacctgaaagacactccacgttcatatgcagttttacattatttcccaaataatacaggggtaatagaggtttcaatgcgtagaccaagttttagaaaagatttatttgataaagctcttggaaataaagcaaaaaatattcagttagattctccaacgatgtggagaatgattcctgaaaatgaagcagcccgtattcaatttcctgattaa

SEQ ID NO: 60062 - DNA, 549 bp, Acinetobacter baumannii
atgactaaagtagaaaatttgaatcattactaccaggtccatgttaatcatcttttatctacccgattagatacggatatatcaaaagagttttttgataaagttgtttttcatggaacagcttataattctttacagactattatagattcattcgaaacttctggtcagtcaacctttaccttgacaggcagttatggaacagggaaatccaccttagctgctgtgttaacaggtttgttacatcaaaatgatggcatacggggtgcagcacgaaatcttgttaatgataaaaagctacttaaaaaatttgataagtcttttaacttttctcatgaaaaaccttggctaataattaaagctgtaggtggtgttacttcacccactgagttgttttataaatctattctgaaagccttgcaggatgcaaaattaatagaacttctcaaagcttatagcagtgtcacagatgcgaaaaagcaattaagtgcatattttgagttttataatttgaaacgacctcagtctagacaaaatgacaccaaatga

SEQ ID NO: 60063 - DNA, 819 bp, Acinetobacter baumannii
ttgaatataaatgaaaaagatattgagaagcaagttgttgagttaggtgttgggaaaaacatggtcaatagtattaagtactgggctgatgtttctgggctagtgcctttacaaaaccaagagaataataaaataaattatgagactaaattgggtgaaatttttaaaaattatgatgcttttttagaattaaatgaatctacttggttgttgcattattttatccaaaaacgatttaatgacttaactttctctcgttggtattttaatttctcgaataagcaagtttttgataaatcagagttagttagtgatttgatcaattggttagaggcagtaggacttaaggttccatcactagcaaccctacagaaagattttgattgctttgtattgtgctatgcaaaaagactgagcagaaagcagctgaatgaagatgcatttatttctcctttgaatgaattaaacctcatttaccaaattgaacaacataaatttaaagcagatttgcttgagcaaaaaaatttacctatacaagtttttttatattgcttagttgatttctggaaagagaattttagtaaatcacctacaattagtgtggatataattgcaacaaatccaggaagtcccggaaaactatttcgtttgaataatgcagcggttgattattttttaaatcaatgtgcattaattgataatcgttttaaatggacagataccttaggtatgagaagtttagcttgcgatcaaatcagtgaagtcaatttagatgaactcttagctaatatttattctggaaaaattaaaaatgactaa

SEQ ID NO: 60064 - DNA, 453 bp, Acinetobacter baumannii
atggtcttttcatcagatggtaagcatgcatatgttaccgccgaaatgcgaagtgaaattgtgacctttaatgtgcaagatggctatttgaagaaaactgctgagttaaagctagttcatgaagacaaaacgcccgaatttaagagtgcaagcggaattattcttagtccagatggcaaatatgtgatcgctgctaatcgtggctcagacaacaaactcctcgtatttaaaattcaagaggatggattgctggctcaaccgactgtttataaagctaatggtattgaaccacgtgctttctcattcgatgcaactggtaaatatctgtatgtaacaaatgtttttactaataatattagtttgttccgctttgatgccaaaaacggtaccttaaaatcagttggagatgctgcaaaaatatcaacacctactgatattaagttttttaattaa

SEQ ID NO: 60065 - DNA, 228 bp, Acinetobacter baumannii
atggctatcactgaaacagttggctcactattgtttggtggtcatcgttcaataatgggtttatttgctgacgttgttattgaagaaaaccactctgatgagcttgtaataacagagcatccagtagaaaagggttcaccgatttctgaccactgctataaagcaccaccagaagtaacaatgaaaattggctggtctgagagtgctggcagaatgaacgggctctaa

SEQ ID NO: 60066 - DNA, 987 bp, Acinetobacter baumannii
atgcaatatacatatttaggacgtacaggattacaagtcagccgtattacactgggtgcaatgaattttggtgagctgaccaatgaagccgatagttttaaaattatggatgaagcgatagatcaaggaattaatttctttgataccgcagatgtgtatggtggcccacaatcacctgatatggaaaaaggttttgggacatcagaagaaatcattggtcgctggttagcacaaggcggtcgtagggataaaattattctcgccactaaagtttatcaaccaatggatacgggtgtgaatgatcgcagattatctgcttatcacatcaaacgtgcctgtgaagccagtttaaagcgcttaaaaacagatcatattgatatttatcaaatgcatcatattgaccgaaatacaccatgggaagaaatctggcaagcaatggagcagttgatccgtgagggcaaaattacttatgtgggcagtagtaattttgcaggttgggatattgccactgctcaatgtagtgcaaatgctcgccatcaactcggtttggtatcagaacaaagcctatataacctgactcaacgtagtattgaactggaagtcatccctgcattacgtcattttggtattggtttaattccgtggagtccaattggtatgggtacattaggtggtgtatttgatgagcttccacaaggtagccgtagagcaaccgcaggactacaacagcgaatccaagcacttcgcccacaacttgaagcctatgaaaaactgtgtgctgaactgggtcacagaccagctttagttgcattggcatggttacttcacaatcctgctgtaacttctgtgattagtggtgttcgtaccgtagaacaattgcaggaaaatatcaaagcattggatatacagctttcagtaggaacactggcaaaacttgatgagatctggccgccttgtggcgaagcaccacaagcctatgcttggtaa

SEQ ID NO: 60067 - DNA, 639 bp, Acinetobacter baumannii
atgttaaccacacttgcgggtgggcttattttcttcacagctgcttggtttattcaactttattttccaaacaatgttcgctttcatcatccttcagaagcattaccagaaattgtgctttatgtgggtggtgctttgtttcagtccatattcttatgcggccaaattatgaacacagtcgcctcaggtcttgcctcacatgccagtgcttcgcgtttactgtatataatggggtccgacaatatttttcctaaaaagtattttggaaccatccatagctctttagggacaccatttttctcggttttatttgtcgggcttatttcaatgtcagctattttcttagatttagctcaagttgttagtctgatcagttttggtgcgctcgttgcttttacagccgtaaacttctcagtttttatgaaattttatattaaagataaacaacgttcaggttttaaaaataaatttctaaacctgtttttaccgttgttatcggtcattagcattatttgtttatggctcaatctcgactcatcttcactgatttttggatgcttctggttaactttaggcattctcttattcatttataaaacgattaaaaaacaaagtattgcaattagtaatgcttattaa

SEQ ID NO: 60068 - DNA, 783 bp, Acinetobacter baumannii
atgcaaagaacgccaaaatatttagagcctatgcctaactggacggagacagaacgtccagcattgattggctcacctgcctcaattgagcatccgaatcacctgagagtggcttacttgtttattggtgtatttatcgcactctcggcaagtctaggaaatggtttaattatttccaatgctttgctctttcaaggtgaatttggccttaccccaagtgaagcagcttggctacctgcagctttcgttattggaaacactgctgcaaatttatatgtcattaaaattaggcaacagtttggacttcgtttatttgctgaaatcagtttagttttatgctgtatctgtattggtttacatttacttgtaaatagctatgaaatggctttagcggttcgattttttgcaggtattgtcgcagctcctctgacttcgatgagcgcacactatgttattcagtcttttaaaaaaccgtcagcactgaaaggtatttatgtcattttaggcctacaacagtttggtttacctttggcatggatgatttcacccggcattacccacggtgaaggatggacagatttagcctattttgaacttggactttatctatgctgtttagcaatggtggtcagcctcaaattaccgcgtagtatccgagctgccgtattagaaaaagccgatatttttccccttctttttatctttcctgccatagctttattcagtgcagtacttgttcaaggccctattgtttggtggtttaacaacacttggattgcttag

SEQ ID NO: 60069 - DNA, 705 bp, Acinetobacter baumannii
atgaaaactaaacttgctacactcatgttgagtctggcttttttcggttctgctcatgctgatgtcaaaacacttgaacaaaatctgaaaacaaattacccagacttacctgtaaaaggtgtttatcaatcacctgtgcaaggtatttatgaagtgtatacaagcggtcgtattgtttataccaatcaagatgctaaatacttttttgtaggcaatttggttgatatcaaacaacaaaaaaatatgacagaagaacgaattgccgaattgggtaaaattgatgttaaaagcctacctctaaaccaagcgattaaatatgtaaaaggtaaaggagaacgtactctttatattttcagtgaccctgattgtccttactgtcagcgtctagaacaaaatatggttggggttgataacgtaacggtatatgtattcttatatccgctgaccagtttgcaccccaatgctgaaaaagtttcaaatcagatctggtgttcaaagaacccgtctgaagcttggacaagttatatgcttaatcgcaaattgccgactaacagcaaaagttgctcaagcccaattcaaaagaatatcgctttaggtcagaaattaaatatcgatggaacaccaacattattcttgcaagatggtcaaagaatctctggtgtaccaagtgatgcaaaacaaattgaagcattacttaatcagtaa

SEQ ID NO: 60070 - DNA, 192 bp, Acinetobacter baumannii
atggactacacaataaacgatggtcagttctataaagtcattgataaagatacaggtactatcatcacctacggtgaactgtctggaactaaccagctttcaacgattcataatgttgagtttatttctaaagaacaatatgaaactgaaaggcctaaacccgatctttaccctataacaaaccaaaattaa

SEQ ID NO: 60071 - DNA, 1272 bp, Acinetobacter baumannii
atgtcgtgcactgtctttaaatcggctaatgcagtcgatcaatcaatcaatgtctatccgccgcaaaattgggatagccagattcgtattgtacgaaatcacgaatcagatacaccagatacttatacatttcgaaaagatgaaccaacaactttcaaggcaatcgggggtaaattgacttgtgatgcaatgggggtgacagttggaacagttgatctaataattacgacccgtcaagacgcaattgtctttaaacttgatgaaggtcgcgaatatggttatttagtatggagcggtaaatggggtttaaagggtatgaatattggctcaggtgcatatccagattattcaataggattgcatgcagataaagtacccacattagatgcaattgtttttgctagtcctttgtttaatcaaaacgttagttcttgggatgtaagtgaagctataagtgctccctattgtttcaccgggaatgttaatttcaatcgcccattaacaaattggaaaaccagtaaattcactacttttgcatcttttctttctggttgctctaagtttaatcaacaaattaaacatctagattttagttccgctcttgatgtaagtaattttttgaatggctgtgttaacttcaaccagcctgttgatggcatgcgtttccctgctgcgacctcactagctggattctttaatagctgcagaagcttcaaccagcctgttgactggtatacgccagccgtgcaaagcatagattatatgttttacgattcagactttaatagtccaatcaatatcaatacggcaaatgtatacagtatgagttactgttttgctaaaacccgctttaatcaaattttgaatattgatgttggtaagtgccaaagcttcactggagcttttagctcaaatccagaattcaatcaggacatctcaaatttcaatatctcaagtggcatatattttgatttaatgtttagttattgcacgaagtttaatcaagatttgagccgctggtgttcaaagttcaatgtgaatgcatctataaatgacatgctttcaaattgcggaatgtcgccagcaaactacgataagtttttgaacgcactttggcttgatataggtactactagagcagaggcgtggcgtaacagaacaacagcaagaattcttaacaattccggacttagatatacagcagcatcagcagaagcacgcagcaatcttattggtgccggttggacaattgtagatggaggactaatttaa

SEQ ID NO: 60072 - DNA, 1080 bp, Acinetobacter baumannii
atggaggtgcaaggttcttcaagcgctttgtacgcaaagaagaactggaatattgctttcttctctgatcaagcattaacaataccgcttaacgtcaagatcggtgacctacttccacatgatgagcttgtttttaaatctaactggattgatcacactaatattcgcaatgcgatgtgttatcgaatttgggaacagttttgttcaacacgttcagggtatccacgacttgaagtagaaactccttacatcggcaaaactggtaaagatgcgctacagaacggtgcaaatggtgtgccgcgtttgtactcagctttgctttacatcaatgatgaattttacggtcttggttcattcggtacggcgaaaaaacggggtaattacaacattgccaaaaacaagccaaaggaaatactcattgggatggatgggtggaataacatcacaaatcttgaagttacaaatcctactttatatgagttaaaggctccaagcagtccaactattgagacttttaatgctatttcaggttggaatgcttttactcagttgaatgatgccgactttgctctacaagcaaatacatatctcaataagcaaaacgcaattgattttatgctattcgctgaattcgtcaaatgtagagatgtcgtagatggtaactctgtaaaaaatttccagttcatcagttatgacggcaaaagattcatgtttatgccatatgacttggatacggtttttgggctcgagtggacaggtgacattgtttatgacgatacaactggttctcaaacagtcacgaattcgcaagactcattttggcgtaaagtcaaagcaacatatagcactgatattgaagcacgttataagcaactaagagatttgaaggttatatcttttgagaatgtatataacttatcgactgatattttttcaaaatatccgattagtttatatgaccttgaactaaatcgctggcctttccgcccatccctcaacatcacgagtctagagcaaattctaacttggacaaaaaaacgcatccagtttttagatacttatttcaattacacatcttaa

SEQ ID NO: 60073 - DNA, 864 bp, Acinetobacter baumannii
atgtctaaaaccaccttatacctcagcatcggccaatatttagcttcaattggtattaaagtcgaaccgaatcaatctactttcttagttgctccaacgggtgcaggaaagacgaatctcactatggaaaagttaacagttcaattcaaactggtaatcattctagtgcctactcaagctaaagttatggagttactgcacgcatattcaggaaaaaccaatattgtttctgagtatttgtttttttatgcaaatgagaatcctgatgagactattcgaaaattcaaaggtgtcattgttgcaacctatgataaattcgacaaaattattaaattaatgtctgattctcaaaagaaagaggctctactggtcattgatgaagctcataaattatattctgctggttcatttagggatgatgctttaacgcctataatttggcatctacaaaaacgttcgattccaacttgcttattcttaactgcaaccaaaacgacagagctatttgatcagcttaaaatagagattgatcatgaaatttttgtgaaacatcaaaatcctcctgtgcgtgatatccgtgttacctctttaccaaatggggaccaatacacagcaatcgctataattgagcagaaaattagaaaactaatcaaatcatcggattcatcaaaaggaaaatgtggcaaaacaattattgtacgtgtcaactctagggataaatgcgagagctttaagcaatactttgagcaacgctataaacttaactgtattgtggtacatagtaaaaccaaaggtttagcagatgttaaagagatttttgaaacacaaaaaattccaactggtgtagatatcgtatttacgtaa

SEQ ID NO: 60074 - DNA, 1197 bp, Acinetobacter baumannii
atgaacacaccttttccacttaaatcatcaacaaattttggactgtcacagttcttcaatatcgaacaactcacgctaccagagaataaatccaaagtcgaaatctcggttcccaacgtgaaaggactaaaagttgttatttctaatgcaagtaagacttttatgttcagagctgtctttaagggaaaaaagatcagcacgacattaggtaaatatcctgaagtgtccttacagcaagcaattagtcttgtagatagctaccaaattatgctgagtaaaggtattaatcctcttgaggagaaagcacgtattgaaaatatccctaagcttgcagatttcttttataaggtctacatgcctatggcgaagttaaataaaaagtcttggaaggatgatgtttcaaggttcaagaatcacattgaacccactttaggcaatatccagttgaatcagattacagcagcaatgctcagtgatttgatgcttgaaatcaaaaccgaagatcgtgccaacgcaacagtcaatcgaacacgagcactattaagtagcatgttcaatgtggcttttgaacgcgagatcatcgagcagtctccgatgagccgtgtaaaaaaactggttgaacagaatcagattgaacgttatctcagtgatgatgagttaaaacgtttaatgcatgttctagccaatcatcacgctcatgacatcgataaccaaatcattgttggtattgtggaaatgctgttattgactggagctcgcaaaggtgaagtgttgaatctcaaatggagtgatttagatgagaacaaccacctttggaagctcaatgagaataaatcaggtaagccgcgcattattcagctgaatactgaagctcagcaagtgattcgcaagatgtcgcgaaagtatcagtatgtgtttgccaatccgaaaactggactaccttttaatgatatacgaaaaactttccagaaaattctagaagccgctcagatcgaaaactttcgtatccacgacttacgccacaactttgccagcatggcagtgaataatggttgtgacatttatgtagttcaacatttattaggtcatgcttcacctaccacgactcagcgttatgcacatcttcgccaagatacattacgtaatgcctctgaaatgctcgctgaacgtatcaacagcgctcgtccaaatctctaa

SEQ ID NO: 60075 - DNA, 744 bp, Acinetobacter baumannii
atgactacttttgaaacgaacacaaatgatcaagaccaaattgattttgttgcttctttagatcaatgtgaaaatgatatttttcaaaatgattcacattttgatatttatgatgactctattaattacgatgattttgataacattcttgatattcaagaacgaattgaattcagtaaagtacaggcttattttaacgagcgagaaattgatcaatctcagattttaaaattagatgaatcattgactaatattcaagagaaacttgaatttgataaggttaatgcagaattcaatattagttttgaaaaagataatattgcggattctaaattctctgagtttttatttaatgctcatttgcatattgtcacacaatatgttgtgaaaaataacattggcttattgaaagttaatgaagccaaagataaatcaatctggtgtggtggctcttgcaactcatcaagtcaaagcattcctgactctcttgattctttagaattgactttgtccagattgaagccagcgaaaatcgtttatctacaaagcacagattatgcaagtaatatgtgtaacgattctgtattcgggtttggtctttatttgtttgatgaagccaacaaccttattactaaattggtttacaagttttttgatgaaagcatcgcccctgaaaatgctcgtaaactcaatacaccaactacttttgagcagcttgatgacagctcaagacctttcttctaa

SEQ ID NO: 60076 - DNA, 483 bp, Acinetobacter baumannii
atgtccatatatcttcccaaactggtctacgaagccttaatagctaacccaaatctaacgattaacgaaattatggatgtacaaggtacgccatactcaactgctgcccgatataggcagcgtttcgaatcattaaaaaaagagtgtgattatgctgagcaagttcaccataagataaataagactaaaattgagacttggaggaaaataaaccatcagtctcaatacatgtctgatctattaattgagcttttaaatagcagtggatttcaatctacatctcatttaagagcgatatactatgataagtattactcagtaaataatggcgaacctcaatctagaagaaattttaataggtatttcaagactgctcgtgagaatttagagcaaagtaaatttaagctcttaatatgtagatcgccagttaatcgaataggttttcatactgtaataaatcctaactacagtcccgaggactag

SEQ ID NO: 60077 - DNA, 279 bp, Acinetobacter baumannii
atgacaaggcaacgactattcgctttgggtcaagttgtgtctacgcccaatgctttggcttttgcagagaaacatcatactgatttactccaattactttatcgtcatcaaacgggtgattggggcgatttagaagatgaagacaaagaatcaaatgaggaagcattaattaatgacaatcgaatcttctctagttattcagtagcagaagataaaatttggatcataacagaagcagatcgttcttttacgacattgttgatgccaagtgattactga

SEQ ID NO: 60078 - DNA, 342 bp, Acinetobacter baumannii
atgcagtacatcaagagcctatctgacttacaacaagtatcagatgattcaattcgagcaagtatttcactgcacatgcagacactcgaacatcagtatgatgaaccttatcaagccaccctacatgggtggtttgttatttgtgaagatgacaatgatttaactgagccttttcctgagctcagtttcagcctatctgaaaagctgtcattaggtgaagttgaatttgttgagaaaaagcatgattggtatgaggtgtatatcatgctgaacgacaatgaaggcattttgatctatgtaccgactgagattttagagcgccataaaatcaatcaaatctaa

SEQ ID NO: 60079 - DNA, 570 bp, Acinetobacter baumannii
atgcaaccaagaatttttgacaaaatgaacaagactctcattaaaacatggagttgtaataagttatcggacagagctaaaggtcagcttaaatatcaactatggcaagataatgacgatcaaagctttggtatcgctctaagtgaaaatgaatcatctggtggattcagcacagaattgatcaaagttgagcagatcattttaaccttacaaaagctttatcaatcaggaaagccattccatgctgttgcattgaaagaattattcgtaggtaagtcagtcaacaatgcaagttttctaggagctgccttagttgatcaaggcgtaatccgactgcatccacaaactgcacgcttacttgaagttaacgatgaatatgaactttggccactttcatttgatgatgtagtgcaacaaagttcatcactatctgaatcttctcatgatattaaacctgtaagtgcaaaacgtggtccaaaaccgaagaatcaacaatcaactcaggatgatcactcagattcctcagccaatatggaggatgaaaatgcagtacatcaagagcctatctga

SEQ ID NO: 60080 - DNA, 450 bp, Acinetobacter baumannii
atgaaaaagctcatactcatatcattactagctgttactgggtttgctcatgcagcacccaatgtatggcagtctagttattctcaaggtttttcagaatattcaattcaggatgctcaaggcaatacgctttgggtgacatgcaatgatggtgctggtgataattatgatcactctgcacgtttggaaaccaagaaaagtagttatgaaaatacggattcaaaatatcctttaacatttctgtttgatggtaaaaaacaagcagcaccttctgcttctacaaagtggcgtaatggtgcaaatgcttggtatgaattctcccaaggaatttctaaagccaaaaagattgatgtgtacctaaacaataaaaaggtcacaacatttacccctaatcaacaaagcatcaaatctgtagcaaaacatatcgctgcatgtgaagcaatgttctaa

SEQ ID NO: 60081 - DNA, 303 bp, Acinetobacter baumannii
atgaaaactttcaaattcttattctgctttttagcaggtcttgttatttctaatgctgcattagcaaagactgaacaagtcacccttaaaaagaacatcatttttagtggtgaagcgatcattatcccaacgactaaaggtgaagttgttttaaatgcagcattgctatccaacagcgttgcaaagcaactaaaaccttttaaaaagggacaatgtttgcaagttcaatccaaaaatggatttttcaaagataccaatgatggacaatacattcaaagcattcagccatgcgtgaagaagtaa

SEQ ID NO: 60082 - DNA, 516 bp, Acinetobacter baumannii
atgggattttcagacctacttagctctgctttaacagcggcagcgactttatcaggtaatcctgatgtacagcgtgcagcaaactcagccaatgatctggttgtgtcttatcaaacgcagcaacagcaagcaatggctgaacgtatattgaaatctcctgatgggattattccagtcacagaaaagggagtcactgtatggcgagcattgcaatataacgggaatggagaagttgttggcttttctgactttaacagtaaagaagaatatctattgttaaagcaacaagaactcaaagctcagcaattgagacagcaacaacttcgagctgaacaagcgaaagctcaacctaagtatgctaccccacaaaccaagaaacaaggtgacgtatcgatctccgatattgacgcctatggacaaacactgggcggtttagaacgtgctgtcatggcttgcgcaaaatatcgtgaaaatacacctccttggaatgactgcatttatcgtcaagtaaattaa

SEQ ID NO: 60083 - DNA, 255 bp, Acinetobacter baumannii
atgacagcaagtatcaatacgaaagaaatgcaggctttgacgaactggttgaagcaagcacgacaggaccaaaacttttctatgcgcgcattagccaaacgcatggataaaccacactcgtttgttcagaaagttgaacaaggtgaacgtcgtttagatgtggttgaatatgtttggtattgccgtaagctaggtgttaatccacaagatggattacttttgattgagcaggtactcttagagtctcaagactga

SEQ ID NO: 60084 - DNA, 222 bp, Acinetobacter baumannii
atgattatcttgcaacaatggctgattaagcaacgtcaggcaaaaaacctaagtttggagcaactggcagatcggttaaataaaccatttacctatgttcaggatgttgaaagtggacaatatcagttagatgtcgtggagtatttattctactgcaaagctttagacattaacccgaatcaaggtcttgaactgattcaatcaaaccttacctcaatctag

SEQ ID NO: 60085 - DNA, 159 bp, Acinetobacter baumannii
atgaaaaaacactatccaaaactcgaatctgtatctaaagtcatcgagacgcttccccaccctcaatgcaaatctatagccaaagcgattcgggtctgtaatgataaaaagactgacctaccaacaaagctttgtgctgttgctcttgtgtttatttga

SEQ ID NO: 60086 - DNA, 351 bp, Acinetobacter baumannii
atgagtttatctaactgtgaagctggttgtgtagtcatcactggaagtacaaagggtattggtttagcacttgcccatgcttttttagatcttggttgttccgttgtaatagcgggacgaaatgttgagcatcttaaccatgccctatcctatttagaaactcatttcaataaagagaaatttattggtttatgctgcaatgtgacacaaattgctgatgtacaaacactgtgggatcgagcaattcagcattttgggcaaatcaatgtatggattaataatgcaggtagctgtcaccctacaaaagagttcattgaccttcaaccagatgaattgaaaacgaccatatag

SEQ ID NO: 60087 - DNA, 291 bp, Acinetobacter baumannii
atgcttccattatctataatattgcttctattagcattatttctaattattgctcctattttagaagttttttttaagaaaaaactcctacaagatgatataaaaacttttagagttatctttatatatgtattgatatttgttggcttttttactctagcaaagggtttggctccaactgagattacaaaacaaggtgctagaccactagatataatttcttactatgggactgtgatgactgatcctagccaaaataatggacagtacttccctctaaagataacgtaa

SEQ ID NO: 60088 - DNA, 2220 bp, Acinetobacter baumannii
atggcatatgcacgttcagaaatatatcccgtcaatatattaaatattcaggatgatgctgatgaaccagattgtattatcgtcaaaatctttagttcgctgcacccaccacttgaagaccttagtcaagcgcttggaatagatgcacctgcaaaaagattaaagaaagcatttgataatgaggaattggagctagattgggttcttacaagtaaagataattttcaagaagatgatgaaagtattgagttatcttatgtcgaatctcaattaaatgatggtaaagatatatatatttttcgctctagaagaaatctacaatctcaaaagggcaacttttatattatgccaagctctgttgagggtactattagacaactcagtcgacgtgcaaaagctctagatttactaaataagcatacgccattaattgaaaatttattagaaccacatcgccttcaacattcaccagaatcacaccaaattaaagatgtagacaaacatttagaatctctgaaaatctcattagataattcaaaaaaagaagcttttaaaaatatcctctatactttacccacctatcttatacaaggtccaccaggtgtcggtaaaacatatttagttacagcacttgtgcaacatattttttctcaggaatcagaagcaagagttttattaacagctcaaagtcactccacagttcaacatctttatcatgaagtaattcaagccttgcctgagcgttcaggcttagataatccactactaattgtcaagtgtatacgaacatcagatagtgatgatatcgatactaactccgatttagataggcaggttattgactttttgaaaaatttaactcaaagcaaattatttataaattcaaaaagatcagatattaaagctaatattttaactagtcttaaaccagatgaacgtgggcatagatatagcttaatgaatcatttgttgcgttcagcaaatatggttttcactacaaccaattcaaagtacgtagaaaatatgcttactcataaagctcaatttgattggtcaataatggaggaaactggaaaagtatctgggatagagttattaagcccaatgctattatcacatagacgtcttatgattggagaccatttacaattaccaccatatcgtacggctgaaattcaaagtattttcaaagacccacagagactttataaagctattcaaaccgcattggacgggaaaaaagttgtaggaaaaggtgattctataaattcaagaattcagtcacttcgtaaaataccctctgataaaactattgaatggcaaaaaattggatcttatgcagccaaaactcatttattgtttaaaatgtttattaataatgaagaggctaaggcaaatgctgcagaaagttttggaaacttgagtcaatataaaccaatagcaagtatgttagcagaacaatatagaatgcatccttctattgctgatattatttccagtgtgttttacaatgtagatgctgggaaagcatcccaaaaattggtaacaaataaagaaacaaaagctaagttcgaaaaagaaaatcccccattctattggttagacactagtaaactaaacaatagcccaccattagtttggattgatataccagatgtaatgcaaaagcagaaaacctcaaaatatgcggataaaccaacttggtataataatgtcgagcgcgatattataatcacaatattagaaagtcttagggggcaagttggagtatctcccaaactagcaattctttctgcatataaacagcaaataaagcaaattgaaacacaaatcaaatttagacaaaacaaaagtctaaatcatctaaatgatttttctaaacccgatgatcatcaaagtttttgtagtactatcaatagttttcaaggagctgaagcagatatcgttattatttctatggtgagaaataatatttcaccgacagtgaggagtgcatttggcttctttattgatgctcaactgttgaatgtgatgttaagtcgtgcacgttatcaaatgatcattgttggatcttttgattttcttaaaagatgggctaataaatcagatgtcttaaataatcccgattttaagtttttagcagagttggttaataagcttattgagcttgaaaatgcacagaaacttttacgtattcctagctcaaacttcttatcataa

SEQ ID NO: 60089 - DNA, 1971 bp, Acinetobacter baumannii
atgataaatcaaaagaaaaatctcaagaaaattaactttaaaagtaagtcttctccagtagataaaaaaaactggtctgataagggttctaagacgaatagtactcaaaaagtagcaaaaaggattaaggagcctactattagcgtcttagtgccttttgcttatggagaacatatttttcgaatccttccagctaaaccttggggaccttatgaacattttattttgaatactctcagtgagcagccttattcagctcaacaactcgcaagtttaattaatttgccatatcaacttataaccgaaatcatgattcctttcatgagagtgggctgggtagaattaattgaacagtctagtgaatactattttaaaatcaccgagactggtattaacgttagtgaattagaagaattgccagatataaaagatcctcaagataaaaaaagatcatttgtaattgatccaattacaggagattgttatcgtaccgaatttagagctaaaaatcgcaataatccatccaaacaatcttttcaagtgtttggttttgacagagttaataaattattacagaggaaaagtagctacgctgcaaaactaattgtcaataaaataatatctgatgccaatttgcaaactatatttaatagcgtcgctttggatggagaagaagttattagtttcatgcaacgcccatttgatgaaccatatggacaagatatacgctatgcaattgctgaggtagacataaatggcgaaataggaggtatgcccgatagactttcaaatgagttaaaacaacagattttaaatgttgcaaacaaacaaagagagaaaataaaattattaagtaatagcgaccatattgaagtagaggaactcgaaatacaacctttaaagaaaagtattagtaattcaatatatatatcacctgatcaatatgagttgatactgggaggacaacaacataaagatcatttattaggtttaataaataacgcctattctaaaataattattcactcaacatttattcatcctgataagttaaatgagctaatgcctttgttgttatctgctgctaaacgatcagtgcaagtcgatttaatgtgggggcaacttgatcccgatgaaacagaccaaaaagcagtacaacaatatcagcaagtaattgatacattagagcaatgtcaaaaaaaagcttatgatgagggattagagtcgtattttaaaatccatctagatgctagtggttctcatactaaatttataatttgtgacagtgcggatggatgctataaagctacatttggctcttgtaattggctagcatcaggttttcataaatttgaggcatcagtgtgcattagttcactggattttgttgccgaatcgtttaaaattgcgagcattttatcaaaaggaaagcattttcttgcaagtgattttagccaagagttagcaagattaggcaataagttgagaatagatgctaataatcttcaaggaaatgaaaaattaattaatatacaaatggttggtgctaataatcatgaagattttctactaagagcgcgtgatgaagcagaaaaaagaatagttatatgtagtcatagagttggacaagttgcagataatagtattttcccaacaattttatctaatgacaaggcaagcaaaactgcaatctatggtcgagcaactggtaaaagtggaggaatgactaaacatcaatcacttcaactgaaagctgattatgaatctaaaggatttaatattgttattgcagatgaaccccaaattcatgcaaaaattttagcttgggatgataatgatgtattaataagtagcctaaattggttatcagcatctagccttgtagaccctttgcgagaaattggcatttacataaatgatagtaatatagtagataaagttattacagccattaataagaccttaagttga

SEQ ID NO: 60090 - DNA, 1413 bp, Acinetobacter baumannii
gtgtgttcagcggacgcttacgtatttacaacctcaatcatggatgaagctgtcaatctgaataatcctgagattgaaattgattcagtatttgttttaggtaaacaggctcatgttgaagaattggtacaatttattggtcgattgcgcattgcaaatgtaccttgccacatcttattgcacacaggtttgactagatctgatcaagaccctgaaaaactacaccgtaagcaccaaaaacgcttggatgactttattactcgtgtcaatgatattgctcatgcattagcaagtttagctgaagactataagtttgatttccaagacaatgaaaaaccaagcatttatgataaagtcaatcgaatgaatgaaagtttcaaagattggtttgattgtaaactttttgccgtatatcaaggtaaatcaattcagaatactgccagtcttgtttcagccttgtatttaattgacacaagctacttttatagtagctatgaatatatgacgtggcgtattaagcaattcttgccgaactgtaaaattcaattctgcgaagatacaacagctacacctagctatatcactcatttttttgatgagaaaaaagttaatgctgacaaggcttatgctgaaagtattaaccctgcgctcaaaatttttatggaacactttcaaatagggttaaaaaaacctgaatccttaaagcagttatccactaagtttattgagcataaacagcaagatgaggaatacattaatagcttagcttatcgtggaagcaatcctgctccttaccctgacaaagttgcccaaattttgaatgaaattgtctacttagctcagcacattggcaatatacatgatattcatcagattctaaccctgagaattttcaatacaatttctaaagtggctaatgcatataaagataatgagtttgtgcggaatctaactcataagttttacaagcttaatcccgaaagatacttaaccaatcagtaccaactgaaaggaccacaagcaagtaaattactgtgtagtactttaaaggcagtgcagaaacagaccaaccttccaatgaaatccatcattaaagcttatcttattaaggggatgacccatgatcctatttctgattcatttgaaatcgaagaaagcaaagcacttaactatcttgcgacatattttgatgtcattgatcgtaacaagaacaagcctgagcgacgctatcttgagtttcaaggaattgctctaggtggttttgaatatttgcatctaaaagattggcaaggcaaacatcttgcgcctaaagagccatttattatggatgataaaacctatgatgcttatacaggtgcgaccaatatgttacgaaaagctactcaggaagagattgatgaattgtttggttaa

SEQ ID NO: 60091 - DNA, 225 bp, Acinetobacter baumannii; identical to SEQ ID NO: 59156

SEQ ID NO: 60092 - DNA, 237 bp, Acinetobacter baumannii; identical to SEQ ID NO: 59157

SEQ ID NO: 60093 - DNA, 219 bp, Acinetobacter baumannii
gtgcaaatacacgcatacggtaataataatacttcaccacataaatcagggaacaatgcacatgtacataaatcaattggtaaacatggtgaaccaaatactatagaattggctgatgatggagtaacacaggtttcaacgcgttctaaagaagcccatattggtataaaaaatcctaaagatttttgtcaaatttctggccgtaaccatggagactaa

SEQ ID NO: 60094 - DNA, 324 bp, Acinetobacter baumannii
atgtcagcagaaagatatatttactttaaagatttagattggtttcatgaaaatgaaaaacttattattgagaatcttaagaaacttcatacatacttgaagagtgaggaggatgataaaatagtttatttgaaagaaaaaaataaaattgaaggagattgggattatgatattcgattcttttttaaaaaagattatattttttttgaaatttcatcacatggtgaagaaataacatttgatttgaaatatatctttaactggctacgaagtaaaactcaaattgttatacaggatgaggatggagaggaatcaaagtggtaa

SEQ ID NO: 60095 - DNA, 900 bp, Acinetobacter baumannii
atggattcgaaaataatttcagatctaacgttgctcgaacagaacattcttgagaatttttgttactactatcagtgtgatttagaggaagaattgggaaatccattatatgcagcaatgacagacaaaatcatgctccgtatgaaagaaaatgattttcgactcagcgagcaagcattaagtcttatagaggggggggatgatattaaattgattcctttcaagccagaccaagtttttgaacttctagtacagatcaatagcttaagagaagatatggagcagttgaaaaagacgctccaaaaaaaacgttactcaaatattttaatgacgtatgttgctgtattgggagggaggatatatttaatttacaatacgactcttgaaaggcaagctaaagcaacaaaagcagtaatggaaaaacatacaaaaagcttgtacccaagacgagaaataatatgcagagttttacgtgagcaggtagttcaacgcggtcgtaaatgggataatccaactcaggcggttacatcaattattcctatattaatcaaagaatttgaaaaagatgatgtcatttggatcaagtctgaaattactcgcatgcaggatgagcttcaaaaacttgaacaagatgatgtccctatgtttgaatcacggtcagataatttaataaaacgtaaaaaagcatcatctactgtaaaagctaaaaaaataactaaacttcaagagcaactaaaaaagctagacagaatccttcactctaaaaatccttcagttatgctgaaggatctggaatacaacttgccatataacaatactgcctatttggatgaaacgatcatccattggttgagggggcaacctgaaatgttggaggaaattgtgttgagtaaaaaataa

SEQ ID NO: 60096 - DNA, 1902 bp, Acinetobacter baumannii
atgaaacgttctattttatttatttcatcagttggggttataacaggccatgtatatgcagcagagacagactcacaggctgtaaccaaccttccaacgatttcagtaaaagctgagaaggaaaacagtttaaaacaagaggtaggacaagcatcaagtgccactaaaggacttatgcaattaaaagatgttcctcaaattgtaaatgttgtaccgaaacaaattctaagagagcagacagtgacttctatgcaaggtgctttgcaaaacgttgctggtttgagctttagtgtgggggatgggcaacgtgatcaggtcatgattcgcggtttctctgcaatcacagataattatgtagatggtattcgcgatgatgctttgtattttcgtgatatgtcgaatgttgaacgagttgaggtactaaaaggacctgcttctgtattatatggacgtggttcggcgggaggtttagtcaataaaattaataaaaagccaatggatcaatccttgcgtgaagtgagcctgattggcagtactacagggcaacgtcgtgcagaagtcgatgtaaatgaaaaagtagccgagaatgttaaagttcgtttaactggtgcagttgaagactcagatggttatcgcgatcaggcatttttaaaacgacaggcggtggctccatctgtacagtgggatattactgataaaaccaaacttttacttcaggccgactacttgcacgatgatcgtctagctgatcaaggtttcccgacagatccaattacaggtaaaccagttaagacaaatcctaaaactttttatggtgcattaaacggtaaagaagttggggatgtcgatactgaaatctcaagccagactatcagcttagatcatgagtttaatgatcaactcaaatatcatggtgcagttcgccactataactactcattagatcgtcaatatagtgttgatacacatcctgctgataagacaaaaattactttgactcaaaataaacgcctgcgtaatgaagatggtatatatgttcagcaagaattaagtggtttatttaatacaggtttcttaaagcacaataccttaattggtgctgaatatagcaaacagcataaagatgagatactttggcaaggtgctaagacaaccactgatttatataatcctaaattagactactgggcacctattaataccggaacaacagttgcacgcaataacaatagtaatacctttgaaaactatggtgtgtatctgcaagatttaatgacagtaacagatcagcttaaagttttagttggtttacgttatgacaatctatctcaagatcgtgatgataaaacgagtacgaatttagacttaaaccgtactgacaatacttattctccacgaattggggtggtctatcagccagtaaataatctttcactttatacttcttataatcgttctttccagcctttggctgattcatttgttttttatcaaaacagtgatgatttaaaaccaacaaaaactgaaaattatgaggtgggtgcaaagtgggatgtgaatgatcaattgaatgtgacattggctttatttgaaatgagccaaaccaatattcaaaaccaagatccagctaatccaaatcaagcactattggcaggcgagcaaaaaacaaaaggtattgaactttcattaacaggtcagttgactgatcagttgtcagtgctagctggctattcttatatggatggtaagattgaaaagtcgactgttggatttacgggtaatcactcagcgcttacgccaaacaacacagctaacctgtggttaaaatatcaaattaatagacctcttgcgaaagtcgttattgcaagttcatccgatttaccagtgcagcgattaagttaa

SEQ ID NO: 60097 - DNA, 660 bp, Acinetobacter baumannii
atgaaatctttatttcctactattgccttgtgttccctgttaatggcatgtagtcagaacaatcaaccacccaaaacagatgaagcgaatacgaccaatcaagcggtgtcaaaaagtcctgatactcaatcaatctatgctccttataccgaggaagcagttaaagccaaactcaatgaaatgcagatgattattgacaatggtcatgtctatttgcctgctgaggtcaaggaagctgagtcttatatcaatggatggaataagtatcctgatgtgcttaaagccatgatggaaactgaccttgatccaaacaacactcaggaagctgccgacattccgcttgaggatgaatcttcactagttagcgatctaaatgttaaggctcgcattagtgctagagaatctcaatctgcttttaatgtacaaggggcaattgaatatattctagaaattcagtcgaccagcgatcagccttttgttctacaaggcatgaaaattaatcgtggtcgttgtggttattacaccgctgactttcatagcaagatgcctgtgcaaatgagctatagctctacagtatcgtacttgttgaaatgccgtggtgatcaggtagttgaagctgaattaatcactgatcaaggcaatgtgagtttatctttttga

SEQ ID NO: 60098 - DNA, 783 bp, Acinetobacter baumannii
ttgtcgtgtacagagtttattcctataagtgataaaaagcgtagcggaggtgcaagagcatttttgccttgtaatgaaaattataaatataaggtaggatataaagctgaaccaataattaaggatgattattttgatgcaattgcttttatacaggataattataatagagatgatagaaagctatttttgacaaataatgggaagaaaaaagaaaatcaaaaatcatataaatggaggcatggaataaatcagttaactccttttaattggattaaattaccagttgcagagctttataatgtaaataatcaaatgctaattgagttagtggatgatattgaaaaaggtggtgttggtgaatacatttctttaatagaaatggctcctgttatttgtgaaacagaagaggaactggttttaaagacagagatattaaagaaaacgttaggcaataaattaccaaaaggtttaaaagtacctaaaaaaatttctaaaaattcgataatttattatagagatgctgctgttagagcatatattttattaaatgcaaatggtgtctgtgagttgtgtgataaagaagcaccttttagagatgagaatggtaatccttatttagaagtacatcatgtattacctttatcctgtaatggttcagatacaattacgaatactgtagctctttgtcctaattgtcataaaagcattcatttttcgaatgaaaagataaaactatatgaaaatttatttaaaaagaatcaaagattaattagagaatag

SEQ ID NO: 60099 - DNA, 576 bp, Acinetobacter baumannii
atggaaacaatattgggtttatgtattggtgtgggcctgagcgctgcctgcggttttcgtgtgtttgtaccgctattggtcatgagcattgcaaccatgatgggctggttcgagccatcaaaaggctttgaatggttagctctgccatcggtatgtttggccttaggtgtggcaacggtgtgtgaaattgcagcctactacattccgtgggtcgataatgccttagacacagtcgcaacccctgcggcgatgattgcaggtacgctcaccacgatggctgtaagtagcggagaaatgtctcagtttgcgagttgggcagcagcaattattgtgggcggtggtacggcaggtgtagtgcaaatgagtaccgtcgctgcacgtagtgtttcaactgcaaccacaggtggcttgggtaattttgtagtcgcaacaggtgagtggattggagcaatcttactttcagtttcagcaatgttagtgcctgcgcttgtggcaatagtggtgctgattgcagttatttgggtggtacgttggattcgccataaaaagcaagaacaggcgcacaccccgctatag

SEQ ID NO: 60100 - DNA, 633 bp, Acinetobacter baumannii
  misc_feature (609)..(618): n is a, c, g, or t
atgtttcagcttgagcaactaagaatagcaattatcggcttagggtatgttggattacctttggcagttgaatttggtaaacataaacctacaatcggatttgatataaatgaaaatcggatattagagttaaaaaatggacatgaccatacattagaagtctcttcagatgagctaaaacacgtacagcagttagcgtatacagcaaatattcaagacttacagaattcaaacttttttattgtcaccgtgccaacacccattgatgattttaaacaacctgacttgacccctcttataaaagcatcacaaagtattgcgaaggttttaaagaaaggcgatatcgttgtttatgagtcaacggtttaccctggtgctacagaagaggtatgtatacctgaattagaaaaacattcgggtttaaattttaataaagatttctttgttggttatagtccggaacgtattaatcctggtgataaacagcgacgtgtaaccaatattttaaaaattacatcgggttccactcctgatgtcgctgattatattgatcaggtttataatttaattattgaggtagggacgcataaagcaccaactatcaaagtnnnnnnnnnngggtttataatttaa

SEQ ID NO: 60101 - DNA, 336 bp, Acinetobacter baumannii; identical to SEQ ID NO: 47445

SEQ ID NO: 60102 - DNA, 198 bp, Acinetobacter baumannii
atgcatggactaggatttgttttggaaagtaatttactcactcaaaattatttggactcaggaaagttggttagagtttttgcagatgaactatcgattcctatttctgctcatcatttggtatatcctcgaacgcatcaatttattcctaaaattgaactgtttttaaactggattcatgatgagttagcagattga

SEQ ID NO: 60103 - DNA, 297 bp, Acinetobacter baumannii
gtgaagaaatcaaaacttttttatcaggggctatttgcttcattacttaatccgaaaacgattgtcttttttattgcactttttcctcagtttattgatattaaaaaagaaatattaaatcaatttctcattttatctttaaccttttgctttatcggatttttaattcatttagtttatgctaatttttcttcaatttttaaagagaaaatgcttgccggaaataattttgcaaaactgaataaagtgagtggttgtattttctttcttctcgccattttacttattactcaataa

SEQ ID NO: 60104 - DNA, 444 bp, Acinetobacter baumannii
atgaattatcaacatattattgtacctgtggatggttccgagatttctttggcagcagcccgacaagctgcccatattgctaaagcttttggtagtaaacttacagcaattagtcttgttgcagtagatccatttagtggtgttgatttttattacatctctcctgttgtaaaagattattttgttgaagcgcgtgcgaatgctgaaaaaacgcttgccaaggtaaaagccttatgtgctgaagaaggcgttgatattgatacacaaattattcaaggtgaaatctcatctgatggcattttaaaagctgtagaagacttaaaatcagatctgatcgttattggttctcatggtcgcaaaggtttccaaaaacttattttaggtagttttgcacaagatgttctaaacagcactaaaatccaagttttggtggtaaaagaataa

SEQ ID NO: 60105 - DNA, 1716 bp, Acinetobacter baumannii
atgttaattaacgatttttctcaacatcgtgaaaaattaatagaaatgaaaggatattatgatgcttttttcacaaactctaaaataggtaatttcaaccaacttatatattatatttcaaaaatagatcaaatgttttccagattaccaacgaattatcgctcggaagccaattatcaagatattaattttagtcaagatgatatagaaaagataaatgatctttttcaagataaattttatatccctactttaagaggtatgcgacctgtaacagatataaataataaacaaccttatctggaacgtgcccaaaaggattactttcaagataagtctaggtttaatgctgaaaatataattaccggtgaatgtttatactatgaattaaaaattcacttacttggtaaacctgaacaacgtgaacttatcaaaaaatatgaagaaaaattgagtcaatatttttttgataatgatgtagttacattaattccgatgtttggtaaagatgagaatggaaatgaaaatgacgtagtccatattaaaattggtgatgaagaacaatttccaatttataaattaggagatggtttacaacaagctatcattatgacctatgaggcttttattaaaaaagataagactcatgctttttttatagaagaacctgaactacacatgcacgcaggaatggtgcgtcagttaatgaatttctacttaaatgaaacacagcattactatttttttaccacacattctaaccacttgttagatatggtagatgaatcagatcaagtcacaattcaaaaaattatcaaagtattagatgatgataagacgttttctttcaaaatttataattgtgacaaagaccatgaattattaacatctttaggagttcgcccctcatctgtttatctagctaattgtacaatttgggttgaaggcgttactgacagaatgtatttatctaaattaatggataaatatttaaaggaaatcgaattttcaaaacctgaaaagtataaaaaatacaaaagctttatgcctaacttccattatacttttattgaatatgctggtggaaacataacacattggagttttattgatgattatccatcaaaagaagaggcactaaaatttcttgaaaatagcaaaggcctgactgccaaagctatttctaaaaatatattattattagcggacggggataatgaaggaaaagcaaaaagattacaagaatgggaatctgaattaaaaccagagaatgtttatattctaccttgtaaagaaatagaaaatacattggattcatcgataattcataaggcatgtttgataaagtttcaaggaataaataaaacaaaggatcaaatcacattaaacgatgaaaccattatcaatctaaatcatagaggatttactaaagatacttctaattttgatatcgatcaattgaattcttctactaattttataagtagtgaaggtatcggaaaaattattgatgagattattatcaaagataagaacttattacttcaatcaaatccacctcgcttattttcagatgcttctggtacaattgatgacaaagtcagtttttgtgaaatatgcaaaattttaatgacttacgaagattgggtgcttaccgaacctgcaaaagaactttgcgaaaagatctttaaacatattgaagcctgcaatacttaa

SEQ ID NO: 60106 - DNA, 1035 bp, Acinetobacter baumannii
atgaaaatattatttttaataaattccttaaaaaataaatctggaagtgaacgggttgcttgtattcttgcaaataaacttgttgaaaatcttgattatgaaattacgatcattaaccgtgatgctaattcaaaagaggtagcttattatctaaataaaaaaatacatgtagaaagaatttctggatcctattttcagttttacaaaggacttagtgattatattaataaagagcaaccagataaggttatagtacataatatggggaaattgtctctactgtgtgcttttttaccgaaagtaaaaaaattggtaacactagagcatgtatcttttgtgagtcgaccaaagagtgttcgactattaagcaggattttttataaacgaattgatcaagtgataacactgacccaaaatgataaagtacaatttgataagtttcattcaaatgttttggtcattcctaatttttctcctttttctatcgcatctcaaccacaaaataataataaacaaattgtaacgattggtcgtttaactgatcagaaaaactatattcatttacttcaagcttgggagaaaatatatcaatctattcctgattggcaactcaatatttatggtgaaggtgagcataaagagatgctacaaaattatatcagccagcactttcttaaaaatgtgagtttgaagggtagtacttcaaatgtaaaagaagtttatgaacaatctagtttttttgtaatgtcatccaaatatgaaggtctcccaatggtgctaatagaagctcagagctttggtttacctattgtttcatataattgtccatatggcccaagtgatgtcattcaagaaaatcaaaatggtttattagtggaagatcaaaatattgataaattggcagaagccattttaaaacttgcctcatctccaaatttattagatcatttttcacaaaaatctttattaaatgctaaaaaatatcaacctgaacaaattttaaaaatttggaatgaaaaaatcttgcaaggataa

SEQ ID NO: 60107 - DNA, 162 bp, Acinetobacter baumannii
atgctatccattttattattaatattgggtttagcaggtttagtgggtacatttataattagtttaatcctccaccaacatgtttatcgttatctgattcttattccattcattatggcagtgattgctggagcttttgtgtttggtggtgaacatttatag

SEQ ID NO: 60108 - DNA, 855 bp, Acinetobacter baumannii
atgaaatcgcaaagccacttatttccgattattttaatggctcgattacttcgtgtatccgtttctcgcttttatgattggctaaagcgaggcatgagtaaaagatcaattcagcgaaatcagcagacaattttggtcaaaatagcccatgaagaaaccaaacaaagctatggctatgttcgattaactaagcatttacaagcgcaaggtatcaaaataagtatgtatgctgtgcgccaaataaaaaaatcaaatcagttgtattgtaagcgccataagcgtttcaaaagaatcacgaacagtgatcacaaccgttctatttatgacaatttactcaagcaacagttttcaatgacgaagcctaatcttgcgtggtcgagtgacattacctacatttggacggctgagggctggttgtacttggcagctgtcaaagatctttacacgaaacaggttgttggctatagcttaaatgagcgcatgacagccaagcttgtttgtgatgcattgaatatggctattcgcaatcagaaacctgctaaagatctcattgtacattcagatagaggcagccaatattgcagtaatgaatatcgaaacttacttgagaaatttgattttcagggttcaatgagcaaaaaaggtgactgctttgataatgcaccgatagagagtttctggggcatactcaaaaatgaactagtccatcatcgcaactacaaaacaagggaagaagccaaagcggatattacaaaatatatagagttattttataatcagcgaagaattcaaaaaggcttggattttaagacaccaaatcaaatggcagaagacttttatcggttagctgcctag

SEQ ID NO: 60109 - DNA, 465 bp, Acinetobacter baumannii
ttggtagctgaatatgatcatattgtttggactggaaaactggatcaatggtttgattattctgaaggaaagttaaattatcggactttaaaatttgaaaaaaattattcggaaggcgattttcagggaaatgcagtcatcaattatggggatgaacatgtaccttatactagaatttctgaacataaacattttgctccttgggaaacgcatgagcaaactatttatttcaaagaatatagtgcagattgtaccgatgacgatatcccttactatcctgtacgattagctgatgataaaacagtattagataagtatttggccttggcaaaggtagaaaagaaagtaacatttgctggtcgcttaggaacttatagttatatggatatggatgtgactatcagacaggctttagatatatcaaaagagcttattaataaagctcattcttttgatcattcctag

SEQ ID NO: 60110 - DNA, 441 bp, Acinetobacter baumannii
atgattccttgttttaataaaaagtcttttgagtctttatatctcaccttcaaagaaaataagtcagggtggggattagataacttatggccaaaacaattaggagattcttctaaaattggtattattgatgaagtaaaagtctttcatactcgacctgtaggctctgctggtaatggagttggtaaacagagttttaaaaaatcgtcccttttttcaaaagcgaaattaattaccccactcgatgaactaaataccctactaaaaaaatatgatttgagtcaggaaacaatttgtaaaggtggcttagatcaacagaatatttatctaaatactgagaatgttgaatttataaaaaaaataattgctggatgtgatagtcgtttattaaacggaacatcaatttcttttggattagataaagttggactaagtaaatga

SEQ ID NO: 60111 - DNA, 180 bp, Acinetobacter baumannii
atggcatcgacttggccattattaaattttttcacaaaatctgtaatttctgatggaataggatgggcacctacactttccaccataattttttgggctgcgtcatattgtaaaatagcaaatttagtaccgcgtactttttcaattgagttgaggcttttatctcttacaaacaaataa

SEQ ID NO: 60112 - DNA, 567 bp, Acinetobacter baumannii
atgtttatgcaacaaagccacttaaaactccactatggaacacagcaacccatcaattttgccctcaaagcttctcaaaaaactcacttagttggtcgtaatggtgtcggtaaatcaaccttgcttaaacagattgttcaatctgctgtagcgcctacagatgaaattagcctatttgtaaattgcttctatctagatcagaacttcagctttttgttagaccatctctctgctgttgagaatttaagaaatattaatcctgatatttctgagttagagtggagaaatctattaggtcagcttaggcttcgtggtgaaaaagggacttatccattagctcaactgagtggtggtgagaagttaaaagtcgcattgttaggtttaagtcatgcagagactatgcctgaacttttattactcgatgaaccagaaaatcatctggatattgaatcaagagagctatttgcaaatgctatttctagctatgaaggtgctgtgttattagtctctcatgatttagcttttgttgaaaagtgcggaattcatgagtcaatttatttaaattaa

SEQ ID NO: 60113 - DNA, 519 bp, Acinetobacter baumannii
ttgtttggtagctcaattagtttttatctgtatagtgaaaaatttggtgttcaagtttttacagtaggtactttactgaaaaaaatacttaactgttgtttagttgtattatcttgtttatatgcaatttttgaaatcaaaaaaagaggtaatgatcagatattgcaattaattatattcgttggttgtattgagttgatattcttgggctttgttactttttttgaaaggtttaatttggcttttaattttgtttttttatatttatttgtaaaagaaattaatttttttcagaaaatttctttagcatttttagtggcttttaggtctttgtgcctctatatttttatttattttcctattttttttggtgattatagtgctgtgatggtgaataattcttataaaaatgaaatgatgctaaagcctttatattatccaactttttttctattagatattcacaataacggatattctgataattttatttctgcaaattcaatttggcgaaaataa

SEQ ID NO: 60114 - DNA, 306 bp, Acinetobacter baumannii; identical to SEQ ID NO: 55036

SEQ ID NO: 60115 - DNA, 831 bp, Acinetobacter baumannii
atggcaaagattaagactcgtgctcgtactctagatatgttagggcgtcagcaaattgctggtattcctacagcattaagtgagttatttaaaaatgctcatgatgcttatgcggataatgtagaagtagattacataagaaaaaaaaatttactaatccttagggataacggattaggcatgactcgtgcagagtttgaagatcgttggctcacgataggcacagatagtaaatttgaagatgaagatgctatcgaaaaacctgcaattgatataaataaagataaacgtcctgtcatgggggaaaaagggattggccgtttagcaatagcagcgattggtcctcaagtattagtgatgacaagatctaaaagagacaatgaattaggtgaacttgtcgtcagtttcattaattggagtttgttttctttagcgggtctagatttatcagatattgatattccaatattaacaaaacaacatggtgaaaatgcaacttttgaggatgttgaatctcttaaacatcaagcaatagaaaatgtaaaacatctatcaaacaagatttctgcatctaaaattaataaaatatgtaatgagattgaaagttttagctatgatcctaatttttggagaaatgctctaaataagcaagatgaaaattcaagattaatcgcgaatcgagattatcttcaggtatgtgatactggttgtggaacacactttataatatcgccagttgactctgtaattacgaatgaaatcggtccacaactaataggcgaattgtctatatttttccaattaatgctagtttccgtgaccataatttag

SEQ ID NO: 60116 - DNA, 2001 bp, Acinetobacter baumannii
atggctgatgagatcgttactcgacaacagcttgtagacgctgggttagatgctgaaagtttgcaaaaatttattagtggtttagatagtgaagatgttttaactcgtttggggcagatttatccaactcttgcgaaacttgtccgaattcttatggagacaggtggctggaaagcatatgagactgaagctatcttgttggctacaactccgttagtaaatccttcagttggatatgcttttgatactaaaaagctgtatttgtggaacggcacgatttggaaggatgaaggtaaaagcccgctagacgtggctaaagcctacaccgactcatttagctccttaactaaaaactccactgtttatcatccttttagtacacgaaagcgtaataatgtaaatgaaagtacagttcctgctacacatgttgcatacctaaaaccgtacattcttaatattaatgtgatgaatgctaataaggatcacttttaccgcgtccaacaaattagtaatcctgatcacccgactgctgcaaatagatggatttttgaagttttagcaagagcaaactttgataccgcagaaactcgtgtaaaaacgattccttcagttctgccaattgtcaaaaactctggcattagaactttcttagttgaagatggtgatttaaaaattagcattactttagatactaataagtgcccaacaactgatttctattcggttgcttcaactgacaactcttatacttacatcttcgatccaagtctctattactatgcagcagttggatcagcggatttagcagtaattaatgctcgtatagacacgtttattaaacctgcacaacttaagaaccttcttaatgatctgcggaacccaatccaatctgtacaaatcaagttgattggtgattcattaacttacggtttgggtgccacagataatggtgggggtacaccaggaacacatggccccgcaactaccaaaacttgggctaatctactgcgtgattacttgggtgttgcattctgtacaagtgcgcgctttggtgatgatactatcgccacaacaggagaagcatattacacagcagcagggacaagtgttctaacatctgagctatccaattacacgttcaaaaacagcgcaacaggtaaagtgttcactttagctgaaatgcaggcactatcaggcacaaacgcaagttcaccaactggtacttatcttgatattaagagcccttcacttgctggcgtagtcactgatatggagtttattttcaacggaaatgaattcaccattaactatgcaaagctaagtaatggcagtgaaacagaatcaaatattgatatattcgttgatgatgtttaccactctagcttcaatgtctatgctgcttcagctgcgtttggattctcaacaaccattagtggtcttgttgatggtcaaaagaaaattcgcattgctaaccggttaacgaatacagcgatttatgctcgattagtttctattactgctcctcgcaagatttcagtaattaatgagggtgtatctggctggaatactggaagctggctatctggtgacaacatatctaataagatcagtgttaaagataattacgttattatgatgttgggtactaatgaccgtcaaaacacgctgaaaattggtacattcaaaaataactatcttcaattacttgatcgaattggtattaagaatcccaaggctcagatcatcattatggcaccgcctgctgtaacccaaagtgaagatccagatgccacagcatataaatttaggattgctgacctgaactattcgttggttaaaattgctcaactaagatcattatcaattattgatctatttgaaatgacctcaagattaaaagcccaaggggtttcattcttaatttctgatggtctgcatctcaatgataatggttatacagagtgtgcaaatcacataatcagccagattttaaatgcttaa

SEQ ID NO: 60117 - DNA, 336 bp, Acinetobacter baumannii
atggttgccactatattgtttataatttcggcgttcctaatactctgggttagcttgagtaaaaaggagaagcttactccacaaagcgagcaaaagtttgatcttgaattagcagaccaactagggcgtctaagatataaattagaagaaagcgcatattcaggtaggaaaatatttgttgatacaaaggattatcaaaatgagtttcaagatcttattgctcttgaggtaattttaggtgatgcaaatgttgagttaacccataaagataaaacgatcccaacagtgaagcaagttatggagaaattggtaaatgaacctagaccatctccataa

SEQ ID NO: 60118 - DNA, 240 bp, Acinetobacter baumannii
atgacattgacttttaaaaagttactttgtattggtggtggtgataacggtaaatttgttgaacacaaagaattccaccagatttttattgatggcatgtttttagaacctgaaacttataagcctacttatttgatgaatcctttgacaaaaggagaagaattgttctttgttttaacggacttaacaaggtctgaggcagaggagattttggcaggcttattagaaaagagtaggtga

SEQ ID NO: 60119 - DNA, 462 bp, Acinetobacter baumannii
atgactgtaatgcgcacacaaggcacaaatgtatttctattcgatggcacagctatcacgaaagccgtttgtatcactggtattgatcttggtagtgatagtacaagcaagattgaaaacacatgcttagaagaaacagattctaaagcttatttaactggcttgaatgatccgggtgatggttctattacttttaacctagatccagaaaaagaaagccatttaaaaattttggaattggcaacagctcgtacacctttaacaatttacattggtggtagtgatggcacagcagagccaactatcacaaccggcacagtaactttgccgactacacgtaccttctggtcattccaagcaacacttgccccatcaactccaacatttgaagctgactccctcgtaagctaccaagtcactatgcagcgtagcactggtgttcagattattcctaaagcttaa

SEQ ID NO: 60120 - DNA, 198 bp, Acinetobacter baumannii
atgaaaacaactgaagaatatgcatatcaactcagccttgagttattcaagaactgtgaaacatttaaagaaaaagaagcagccatcgaagaagcttggaatcttgccatgaagttcacaacttttggcacccttattctggaatataaccagaattatggcttagtagatcctcttccaaaccactgcataccttaa

SEQ ID NO: 60121 - DNA, 525 bp, Acinetobacter baumannii
atgaatgctatgttaaagccgattgaaattgtaaaagttgaagatggagaaccaatgacaagcacattgcaaattgctttaggtttaggaattcaacatgcaacaattattaagttggtaagaacctatatgccagactttcaggaatttggcttggtcagatttaaaatccaaccaagattggaaggtcagcatggtggtggtgatgttaagtttgttcccttaaacgagcaacaagcaacattcttgatgacattgatgcgaaatagtccccgagtaattgaattcaagaaagcactggtcaaagccttttttgaaacacgtgaatttatccgatcacaagaccaaagttataacaatattcacaacaaactatctttacagcttgatcttgagaaagccgatgccagtcttgctggcagcattcttggaagttatcgcaagaaaagagaccttctaatggcagcaataaccgaggtcgaaacactgatgcaaccatgcttatttgatagcgagacaatttaa

SEQ ID NO: 60122 - DNA, 285 bp, Acinetobacter baumannii
atgagtaaatgctttctaggctggaatgacaagctagtcgaaatacatattaaagatagtgtccaactctctgatataaacattgattttactttctacccatgtggacaggaaggtgatttctttgaatctgaggctgataagtacattgtggttaaaacccctagagcctgttatcgcttcgaaattgaagaattgtcaaaagaaacggatttcagcactaaaggtttaatagaaacaaaagtgcatgccaaatatcgagaatcccaactagttttaacttaa

SEQ ID NO: 60123 - DNA, 405 bp, Acinetobacter baumannii
atgagcaataagaagaagtccccatatagtgattaccttaattgtcaaatatttgaaggcgatataatacagcatccatcaggtgaaaagggcactgttgtatttgaacaaagaagtgaaagcgattcagataactggcttgttcaatatgaggacggaattaaatcgagattatgtcttcaagttggagataaaggccaagcatatgtagttgagcctgatgatattgttgctagatttggcggtaaagccaaagtagaagaggcttcaaaaactaaagcgattgatgatgtttattgttgggagcttggcaagtggtttaatcatcaatattgggtagcacagatggcgagcactcatactggtgtgactctccgtgaattggcaattgctgcaaaagtataa

SEQ ID NO: 60124 - DNA, 1338 bp, Acinetobacter baumannii
atgaatgaatacttaaaaaaattgctaaaggcattagctgaaaagaaccaagcaatgcaaacagcattatctaagtcggccgcagctggtactacaccagatgaagaaaccgaaaaagaaatccaagccctcgaaaaagaaattgcagcaattgaagtcaacatcgagcgcactaaaaagcaaattgctgctactgaagctgctgctgaaaatgccactcctgttgctggtgataatccagaagaatctaaaaaatctgcaaaaggtgacccagatccaaaaggcgacaataagattattgttaagtcaaaccttcctaaaggtgttggatttgcgcagtatgcacaagcaaaactgatttctcagttgaatgctaaagaaggtcgcttcgagtcgccattggaagttgctaagaaaatgggctttggtgaagaagttcaagacttaattactaaggcgactcttggtactacgactgattcaggttttgcagcgacattggtacatgagaaccatttggttggtgagtttgttgaattgcttcgccaagctactgtcttcgataagcttcaaggcttccgtgcagttcctttccgttcaaaaattccttctcaagtaacaggtggtacggcttcatgggttggtgagggtgctgctaagccacttacaaacccaacttttagtgaagtagaaatcggagagcacaagctagctgctattacggtttatacccaagagttgatgcgtcgctcagatccttctgtaagcgtgttggtgcgtgatgacctaattgctgcaagtgcgacattggtcgataacaccttccttgatgctgtagcagcttcttcaactcgtccggctggtgtgcttaatggtgtaaccatgacgccaaacactggtgagacggcagctgcatacgaaaaagatttactagcattgatcaacactttcgttactaacaacctaagtttagatggcgcttatttcttaatgtcagaaacacgtgcagcacaaatcgcgttgttacgtgatgcattgggtaattcttacttcaacggcatggcattacgtggttctcgtaccttgcttggtattcctgtaatcacttcacaagcacttggcaacaaaatcattcttgtgaaaacaagtgaaatcttacttgcacaagatggtggtgtggatgtttcttatagcgaccaagcgacattagttgatggtggaacgactcaccatttatggcaagaaaacaaatttgctgtacgtgtagagaagttcatcacttgggctaagcgtcgcccagtggccgcagcttatctggactacacaactactccataa

SEQ ID NO: 60125 - DNA, 261 bp, Acinetobacter baumannii
atgaatggttcaaaatattatgttggagattttgttcaggtggtttctgtcggcgcaacgctgccagaagatttgattggacagattttcactgtagttagtaaaaactggaacttgcttgtattgcgaccgcatacaaaatccgattatgcgaatttacatattactgcggattcctttcgtatgtataagtcactaaaggcaagacacatagagcataaacttaaagacgacactccaaaaattaaattcataatttaa

SEQ ID NO: 60126 - DNA, 234 bp, Acinetobacter baumannii
gtggactggattaagctagataagcaaaaacctaatgagggtcaggctgtaattgtatggattgacaagccacaatctccgcccaatataaaaactggtatttattataaatggcaatcatattgtgatggcaagatgactgctgaaggggatagttttacgggattgtcctcacaagatgaaagccaagtaaagctttggcaaccactattaattcatgaacccagaacatga

SEQ ID NO: 60127 - DNA, 156 bp, Acinetobacter baumannii
atgatcaatgaagaattattagagcaacttgaatcggttgctaactttatgcgtggcatgcagtttgatccacgtattccagttgatacgaaagaagctttaaacaaccgcgtacaacgaatcgatgaaattgttgagaagtttcaggaagaataa

SEQ ID NO: 60128 - DNA, 273 bp, Acinetobacter baumannii
atgatctctgatgcgtacaaaatgaatgaagaaatattagaaaaagctagccttctttcacatcaaatctatgagcgcttaaacactccaagtattaagcgtaagaccttagagtatgaattggttcagctcatccaaagtcatatgagcaatggactggacattaagtccattcttattgatatgagtaatgatggaataaatgcgagtgtatatctaaatgaaactacaaacactcaagccgagactacagatagaacgtgcctcaagtaa

SEQ ID NO: 60129 - DNA, 570 bp, Acinetobacter baumannii
atgactgtgcgcaataatacttgcgtagccacagctatgcaacgtcgtcaccaaaattttatgaaactcctagaattgacctatgaggacttcgattatgatttctcaagggttgtatttgataaggatgtgaactccactgtagagatcaagtgccctaaacatggctggataagaaccagagctaaaaagttattagcaggcagagggtgtgttgcttgcaatgaagaaagcttaatggatcaaggggcaatgatttacctaatccgttgttatgatgatcaagaggaattctacaaaattggaattactacaaaatcgttagaaactaggttccctgatgaaagcagcctgccatatgattttgacgtattaagtttgcagaacggagatagaaagaagctttacaaattcgagacgctactattgcgacttttggaaaaataccgatatacacctaagaagcatttttgtggtcgcaccgagtgttttagcaatattgacctaattaggcagaaatttaatatttttgatgcatttggtgttgactcgtttaaacgcgcggtataa

SEQ ID NO: 60130 - DNA, 732 bp, Acinetobacter baumannii; identical to SEQ ID NO: 46632

SEQ ID NO: 60131 - DNA, 516 bp, Acinetobacter baumannii
atggctttaaaagtcggaattattaaaagctcggacgtatcaaaatggtgcgaatacaaaggtgctgatggagaggtacaggcagaatttaaagtccgtggtatcgcttataagccttttcaggtagctattgaacgagcaggaaatcagatctcgtctaaaggctatgatgtgatggtcaaagatgaaaatgccaagctttaccatgaattgttaatggatgcgtgtgctgcccatttaatagaagactggaaaggtgtggtatttgccgaaatcgtagacggtaaaactgttgagaccgaaaagccatatacacctgagaatgcctcaaagcttcttaatcttggtgatattggtatttcgatctggctatttattaaagaacaggcccagaagattcaggaagaagccgacaaggacaaggctttaattctgggaaagtcatcgagctctacaaataccaaaaaacgtatgcgtcgaaaacgccgcacgaaatcgaacaaatcaaattcttag

SEQ ID NO: 60132 - DNA, 1509 bp, Acinetobacter baumannii
atgtcaaattgcccgaaaaaatatattgtcgcttttgatcagggaacaacaagctcaagagcaattgttttagatcatgatgcgaacgttgtcagtattgctcaaagagaatttacccagatttaccctcagccaggttgggttgagcatgatcctatggaaatttgggcaactcaaagtgctgtatgggtcgaagcattggctcaagctggcataaagagtgaacaagttgcggcaattggaattacaaaccaacgggaaaccactattgtctgggacaaaaaaacaggaagacctatttacaatgcgattgtttggcaaagccgacaaacaacggaaatatgcaatcaattgtataaagcaggttggcaagaatatatccgtaagactactggtttagtcattgatccatatttctcggccacaaaaattaaatggattttggatcatgttgaaggcagtcgtgagcgtgctgaacggggagagttattattcggtacggtggacacctggctcatttggaaactaactaatggtgctgttcatgtcactgattttaccaatgcatctcgaaccatgctgtttgatatcgaaaagcttgagtgggatgaaaaacttttacaagctttagatattcctagagcaatgttgccagaggttcgtagttcatctgaggtttatggatatacacataccattagtggacaagaagtagggatcccaattgccggaatcgcgggtgatcagcaggctgcgctttttggtcaaatgtgtgttgagtcgggacaggctaaaaatacctacggtactggctgttttctactcatgaatacgggtaaaaagattgtccgttcagagcatgggttactcacaactattgcctgtggtgcgagtggtgaggtgaattatgccttagagggtgccgtatttaacggtggttcttgcgtacagtggttacgcgatgaattaaaggttattaagaatgctaaggattccgagctttatgcaacacgtgtaaaggataataatggtgtatatgtagtacctgcttttaccggattaggagcaccgtattgggacccgacagctcgcggcgcaatttttggtctgacacgtggggctagtattgaacatattatccgcgcaactctagagtctattgcctttcaaactcgggatgttttagatgccatgcaacaagatgcagaggaagagcttcgtacactccgtgttgatggaggagtaacggaaaataatttcttgatgcaatttcaggccgatattttaacgacaccggtagagcgtccaataatgaaagaaactacagcattgggtgcagctttcttagcagggttggccactggtttttggcaagatcttcatgagttaagaaataaatctgccatagaaaaggtttttgaaccgaaaatgccttctgaacaagctgaactcatttataaaggttggctaaaagcagttaagcgtagtcaaaattgggcagaggattga

SEQ ID NO: 60133 - DNA, 318 bp, Acinetobacter baumannii
atgaacgacttagaaataaatggttataagatttttgaaaattatgatgaagctgtttatgcagctaaatcaaaagaagatgtttacgattttttcgttgaaaactatggccctactgaagaatgccaaggcgaaacgaaggaacaattcattgaaaacctaattgaaatagatgttggtagtgaatttgcacaacgaatgagaacgtacatcagtgatgatactggcgaggtgtctgaatcttcgcattatgaacaatacaaagaggttgcttctaaagacgaaggaactgaagtaattgcatatttagtttggtga

SEQ ID NO: 60134 - DNA, 402 bp, Acinetobacter baumannii
atgtcaaatgaattaaaagacccagcattgattagcagtgctgaggcaaagcttgcgtgggctaatggagttgatattcaaatcaagaatgtaaattgtgtcaactggtatgacttagatgagagcaaatacaatcttgatatttttgataatgttcgtgttgatttccgcctcaaaccccaaaccatcaagcttgaacttgagctgccgaagccttttgagccgaatctggatgaaaactattggtttatagatagcacagaagagaaaggttacagactaactcgctttgacaacgatgaaaatgatcaggacgttatgcaattcggagcatggcgcaccgaagtcgagatcaagcaagtcgtagagcaactcagaaagatacgaggtactaactcatga

SEQ ID NO: 60135 - DNA, 597 bp, Acinetobacter baumannii
atggataactacaaaatcaaagtttgtcgtaatagaggtgtagtcaaaacaaggtttgttgagggctttggcaaaaattacatcgtttcaaacttgggacaagtattttcagtcgctcgttcaggaaactggaagcttaagcagttaaaaccaaatgttaatcacaaaggatatagccgagtaactttgaagaatggcggggaatgtaaaacactaagcttacatagagttgttgctcatgcattcattgaaaaccatttaggtaaaactcaggtaaatcatataaacggaattaaatccgacaatgacgtagcaaatctcgaatggtgtacaccaaaggaaaacattcatcacgccttaaagaccggtttaacaaaggtttcctctggcgagaaaaagtctcaattaactaatgaggatgtcttgcagatagtttctagatatcacaatggcgaaatgttgagagagatttctaaagactaccccgtttctgaacaaacactaagttcaattgttaatggaaagagttggtcaagcgtcactggcatccaacactcatatatcggcaagggagttaaaagatgtcaaatgaattaa

SEQ ID NO: 60136 - DNA, 1122 bp, Acinetobacter baumannii
atggcgttaccgattattactgctgaccaaactttattggttcaagcaattattgtgtacctatacgctgatccgggtttaggtaaatcatcgatgggctttactgcggaaaaagcaatttcttttgactttgaccgtggtgctcaccgtactggtgaattacgtcgtggtgcagttgtacaggttcatcaatggagtgatgttgcaaaccttactcctcaggacttagcaccatataaaaccgtagtcattgataccgtgggtgcaatgcttgaatgcattaaaacccatctattgctaactgctaataaccgtcaaaaagatggctctttaaagttaaaggctcaaggtttagcgaaccaaacgttcaagcaatacatcaatactttgatcagtttaggtaaagatgttgttttcattgcacacgcatcagaagatcaaaacggtgatcaaattatttaccgcccagatctaggtggtaaaaaccgtaacgagctttaccgtatcgcagatgtcatgggttatctaacaactgttactactggtgaaggtaaaaatgcccgcgttattaatttcaaaccttcgcctacacatcatgcgaaaaactcaggtgctttaggcggtgaaaccggtgaagtatgggtacctgatcttaaagcacaccctactttcttggctgacctgattactcaagctaaagatcacattaacaccttaacgcctgcacaacttgcagcagctaaagcccaagaagagctagaaaactggaaacaaagctgtgaggaagcagagcatgcaggtgaccttaatcaattaactgagtcgcttgataaagaacacatgtattaccagaacatgcgccaagcaatgttaatgagagctaaagcattgaattgcacgtttgataagcaacgtggcacttggattagtccaccagaatttaacggtatctcagatcaacaaagagatgaacttcaaaacttcatagctgaacgtggcctcgatgtaaaaacagtttgtgaacacttaggtatcgatgccctcattcaaatagaagcggcaaaactaactgcagttaaacaagaaattgaaaccttagcgaaaacggggatgacagcatga

SEQ ID NO: 60137 - DNA, 441 bp, Acinetobacter baumannii
atgaacgtaaaagttaactcattcaactcatttgcatttgtcagcatggctgctcttgcaatttctggtggttctttagttgcttgccaattgcaaccagctttccaaacaaaagaagcacctactctttttacccctaaaacacaaccaagtacttacagtgtgttaaccgcaaaaatcacaggtaaacatacaggtgttgccgtcatcaaattagatagcttccgtttaaacgttagctttgattttgaagctcatttagacagttacggcgttccgggttctgaatttaccgctgttgatattactcaactcacggtaaatgaaattactgatgttaatggtaagtcatataacgatttcaccgaatttgaagacatccgaaatatcaatgatcttctaaaaggcttcatcgaacgtaacaagttggtggaggcttaa

SEQ ID NO: 60138 - DNA, 438 bp, Acinetobacter baumannii
ttgattcatactttagaatcattaaatatatgggttcaccaaaatacccatattactgatctcgcagaaactttagttccagctcaaggttggttatatgattatgatagtgagttggcattaagtaatgcatggaaacttcttaaaccacaaacttatgaaaatgtatctatttcaacagtagttccaattttaatttgccctgatgatttagatctagtgtgcaatgtggttatggtggaacaagttgtttcagcagatcaagtcgtatgggctcgttttggttacgcatttaatcatattcatgatgttgtgacatccgtagtctgggaaaccccaccttctgctccgcagttaagttttccattaagcgaatttgaaaaagcatataatgatttaaaagaattagacaaaaaatggactgaaaattttatctag

SEQ ID NO: 60139 - DNA, 387 bp, Acinetobacter baumannii
  misc_feature (363)..(372): n is a, c, g, or t
ttggatttttttaatttttatcgtgatcttcaagctgagttaagcaactatccttggctagaaatgctagtttcgctcacacttttgatcctttttgctgcattagcaaatttcattgctaaacgaattattgttcggggaatacgtcatttagtgactaaaattaagtcactcaaccagtcggtttttgcccagcatagtgtcattaagcgatttgccaatattgtgccggccattgtcattatgaacggtattactaccgttccgcatttgtcggaaaaagcggttgctttggtacagatgggcgcacaggcatttatttttctcacgattgcgctcaccattagtgaattattaaatatnnnnnnnnnncagccaacaacgtaa

SEQ ID NO: 60140 - DNA, 855 bp, Acinetobacter baumannii
atgtacccaaaatctagaaacaagccgattaaaggttacttgcaactcgttaaactcattatttttgttgtttgcggattaatgattttgggtacattcctgaaaaaggatgtatttacgttgttggctggcttcggtgcaatggcagccgtattaatgttagttttccaaaatacaattttgtcattggttgcgagtgtacaaattgcctcttatgacatggtacgtattggggactggattgaaatgccatcgctcaatgctgatggtgatgtcattgatatttcattgcacacagtgaccgttcaaaactttgataaaacatacaccacgattccaaccaataaactagtgacagacacttttaaaaactggcgtggtatgagtaatgcgggctgtcgccgtatgaagcgttctctttatatcgatcaaactagcgtgcacttcatgaccgaagaagagcaacaaaaactcaaagattttttattgctagatcaatacctcaatgccaagcaatctgagattgacgaatttaataagcatttaggtagtcagtcacgttataacaaaagacgcttaaccaatattggaacatttagagcatatgttgaattctatttgcgccagcataaggggattgctcaaaatcaaacgcttattgttcgccaactacaaccaacgagtgaaggtttaccgttagaaatctatgcatttaccaataccactgcatgggtttcttatgaagcaattcagtccgatatttttgatcatctgattgcgattttgcctgagtttggcttaagagtgtatcaggcaccttcaggccatgattttcagaaattaacagtagaataa

SEQ ID NO: 60141 - DNA, 315 bp, Acinetobacter baumannii
atgaaattagaaaatatagtaattattgaaaacagacttttccaatactcaactcaaatttactttgaaaattttccatttgatggtgatgagttttatgtgccagttggtgattacactaagccaattggtttcctaaagtttaagcaaattgctaagccaggctgctttgaattatccgaattagtgtccctagattatcccagcccaaatccacaattttcgttgtcaggtgttttatactctcgccagaaagcgatcgaagcccatcaatcaatttgcgcttatcagcaggcggtaaatcggttgccatga

SEQ ID NO: 60142 - DNA, 351 bp, Acinetobacter baumannii
atgtttaagacatataatattatttttggaacaaataaaattcccgttccagattttagtttcacctttaatgaggtagatatagagaataaaattaaggaatttaaaatcgatacaaaatctgttatcccacttttagaaaagttaagtagccttgaatttaatattaatgaaaaaaaatatcataataagaatttactagcatctatagaagcagacaatagaatattatttaaaaggtttgatactctacgtttcataagaaagtacaaactaaacgcttattttattgtttttttattagtattaattatagttatatatctgaaaataagaacaactataggataa

SEQ ID NO: 60143 - DNA, 1452 bp, Acinetobacter baumannii
gtgataaagacaaataattggttgaatgatgaggcagcagaggaaaaaactcagcaaggtctcactgcctttgtagctcttgatgacgcatttatgagtattgcatcacgaatttatttaattagaaatgccaaggaaacgattgatctacaatactacatttggaccaatgattttgtggggaaccttattttacatgagctgctcaaggcagcggatcgtggcatcaaaatccgtttattaattgatgatcaaaacggtataaagcttgatggcatattaagaagccttttacagcataccaactttgaaattagattatttaatccttataaatttcgttacttacgtatcttcgattatctgttccgatttaaaaaagtaaatcaccggatgcataataagctcattattgcagatgcatcgattgcagtaacaggcggtagaaatattagtagtgaatattttgaagcaagtagtaagtttcaatttacggatatggatatcttattttacgggcatgcagtacgccatgcccaagctgtatttgctgatttttgggaaagtaccttaagtgtaaatgcaactgacattatcggaacttgtgctgagcaccatttaaaagctttaagagagcactatgaacaactccaccacgaagaccatagcctcactgaagataagctttacgatgcacagagctatttaaaagagcttttagagcataaccctattcaatggtctaaggcccattttgttgctgactctccgaagaaaatactgggcactgcaactcaacatgaaatgctttatggccaagtcatgtctattatgggtaaacctaaacaacacttagaattagcttcagcttattttgtacctacccaacaaggtacttattacttaaagcaactacgagttgaaggaataaaagtccgcgctttaacaaattcttttgctgcaaacgatgttgcgatcgtacatgccttttatagccaataccgtatagaaatgcttaagaatggtattgaactgtatgagtttaaacctgttctggaacgacgacgtagaacatggtacgaaatcgtaacaggcagcgttataccagcaaaaggaaaaaataagtcgagcttgcatgccaagttttttgatgtagatggtaaagtctttatcggatcatttaactttgacccccgctctacctatttaaacaccgaagtaggtttggtgattgagtccagtcaattacaaactcagatttctgttatgttagatcaacatttacctcaagtagcttatcaacttaagctaaatagccaaggccaaattacttggctagattaccaagccaacggccaagtcattgaatatgataaagacccgggaaccagccgctttcagagaacaatgattaaagcagtctcttatttgccaattgagtggatgatgtaa

SEQ ID NO: 60144 - DNA, 255 bp, Acinetobacter baumannii; identical to SEQ ID NO: 44740

SEQ ID NO: 60145 - DNA, 195 bp, Acinetobacter baumannii
atgacgaataattttaatgctgaacaggcaagaaaaaatgcgaaagacgtaaaaatagatcaagcactattgttagaaaaaattttatctggaaccgaggaaatctcgaaagaaggtaagcgacgggcaggttttaatgtttcaaccaatattgagcaatctggtacaacagtcaatattgaagtcagtttctaa

SEQ ID NO: 60146 - DNA, 162 bp, Acinetobacter baumannii
atgtctgctgagactgtgcctgtacctggcaatgaagtgttgcctgcagggtcagtcgctgttgcagtcactgtatcgccatctaccaggttacctgggtttggtactgaccagctaccatctgtgcctgctaccacggttgcagttgtgccatcaggataa

SEQ ID NO: 60147 - DNA, 531 bp, Acinetobacter baumannii
atgagtcaccctcagtttagagatgaagcaaatagaacaaatatcgtctcattcgccgatagcgcgctcggaagtcgtaccactttgtatgaaatttttaatactatagaaattcaaaatgccaaaatggtcgggcagctagttttaacccagatcggagataggaaattttcacttgattgtacaggctctactgctgatcaagatttaattattggcgataagctaatacttaaaaagggcacaatggagtatttaagagcttataacatcggagcaacactgaattttgggtcagttcctgctaattcaagtgttgaacgtcctatcccaattggagtgtcattagcaaactcaagagttaatgttactgcaactccatctactccattaccagatggtctcttatacaattactttgtgaaaccagacgacttatcaaatgtaactgtccgagtcagaaatgtaactggttcggccattaatgcaggcggggatattatctggcaagcgttagtatatctaagataa

SEQ ID NO: 60148 - DNA, 531 bp, Acinetobacter baumannii
atgagtcaccctcagtttagaaatgattcaaataaatcaaatattgtttcatttgcagatagtgctctgggaagccggactactctgtatgaaattttcaacactattgaaattcaaaatgccaaaatggttgggcaattggttttaacccagattggagataggcaattttcacttgattgtacgggctctactgccgatcaagatttaattattggcgaaaagctaaaattaaagaagggtacaatggagtatcttcgcgcttacaacttaggagcaactttgaatttcggttccgttcccgcaaattctagtgttgagcggcaaattccaatcggggtttcattggcaaactcaagagtcaatgttagtgcaacaccatctagtcctttacccgatgggcttttgtataattattttgtaaaaccagacgacttgtcaaacataacggtcagggttagaaatgtaacaagttcagcaatcaattcaggaggcgatatcgcttggcaagcgctagttcatcttagataa

SEQ ID NO: 60149 - DNA, 411 bp, Acinetobacter baumannii
atgcttgaagaatctgagcataaagatattgcctatgatgtatatcaattactcaatggtagctacccactacgagcttctggcttcttcttagcattcttcactattttaggtctaattcctgcgactaccttgtttattccggttttaagaaaaccgcaggaaatgttgactagaaaattctggaaagacgcgcgccgtggtgtaggacttatttttggtccaaaagatggtgtatttggtagcaccattggccagattttcgattatttacgtcctgacttccacccaaatgaccatgacacgaccgaatatctggagtactacaaaaagaaattacttaacgagggcggtgcaattgcgccttactttgtgaaggaatttacaccaccagttcgcgcagtttcataa

SEQ ID NO: 60150 - DNA, 417 bp, Acinetobacter baumannii
ttgaaacagcaaattaaccagccttatcccatttctactgaaactattcctgccagtgtaaatacatgttttcctaagcgcactgcaagtaaagaagtcattgtttttatttatgatgcctactcaacaaaatggaaatttgaagatgtaacaagcagagcatttcgtaataatggcaaaccttttattttattagattggaaccgtctaaattataatattcaggctggtagtgtgcatgagatggggcatgtatttggtctaaaacatgtttgtgccccgaaggctacaaaacgtactccaaccaacattatgacaagtgccgaatgtaaattaggcagtggtggcttaagaaatttagggtttactccagtacaactacaaactattttatcgacttacaaccaatatccttaa

SEQ ID NO: 60151 - DNA, 1800 bp, Acinetobacter baumannii
atgacctctattgactcatttcctgatgatgaaatcgaacgagttgtctacctatatagttgtttaaagttaaattcgagttctgaatctgacaatatattaattgaagttctacttgttgagcttgatgcggcaaaccctaatcgtttaaatgtatctgaaaattcttacaacaaatatgatgtcacttttcgagatttggatacagtacaaattggcacaatatggaaaggccaaacacgaatagagggaagaaaattctcttttaataactgtctaagaacagttaattttgagtttgatttttccattaacgaaccaaagatcattagatttgatgctaagattcctgattcagacgaatactacttatataatgaaaaaatattcattcctaaaaatgaatacagtgcaaatgtgccttttagatattacccatttttaatgagtaaatattgtattttaaaatcaaatgataatatcgaagtacttacaagttgtattcattcactccatgctttttatatccctgcaagaaaggacattagaggccatatcatcaatgaaaattacagtatttcacatatagttgatttatttttagaaaaatatgaaattcaaaatgttgaaaatgttgaaaaaatatctgttgtactgaaaaaaaatatggttaaaaccataggaaaagaagcgatcacatttttggcaaatctagcactaaacaaaaacacccaagaaaaagtgctaaatatacgaaattcgttaaatgacataaaactcgataaaactggaaagccatatccatctagatttcctagtgtaattcctccgcattcaacaacaatgagcttaactgccgaaggtatttggcttgaaaatggaaaacgatttttaattacacacgtatctaaagtttctcctattgctgattttcctatagtagcttatgcacctgtaacagaatcagaggaacagatagaaaccattgataaagataaagttcatagacaaggtcgaaacaaaaaaaaacgcaataacactcgtatcaacacccaagaagacccatctcacaacagaggtgaaaataaaaaacagactgatatttcagtagattttactgacttcgatattgagattattgaagaagtaattgaaactgaatcaaatatacaatatattgaaagtaaagaaaaaaatgaaaataaagataaagaatcatcaggcaaccgttatggcaatagaaagaataaacctacaaaatctgaaaattcagaaaaaaaaccgaataaactagatgtagatgatcttgctcttatatttagtagtttaaaaaacattgaagctaaaaaagattctactaaattaactaaagtatcttgcattgatcaaagtggaaatctttcagacaccttttcacttttacagataaagcccatcgttaaattccctattcataatacttggattaacgatgacgttggaagattacttttgtttttaaagttagagttagccgaatttcatgatcatctttaccttattgatattaagaaaaataacaaaaataatgaagcattttgtttttttctatttattaccaaagagatgcttaatgaaaaaaatataaccatgatttgtgaagcaattgaggggaaaaaaggaacaaaaaaatggttcgatatttgcaagactaacttcaatcaaaaaagagccatgaagcacatgcatactgaccaagctgattgggttgcaagttttaataaaattttcaaaatattaataaaaaagaaaaaattataa

SEQ ID NO: 60152 - DNA, 1164 bp, Acinetobacter baumannii
atgcaaacatgtcatcatttaataagttcaatacttattacaactgtacttttgatcggctgtacacaatccaaagatgctgaacagtccgcagcagaaatgccgccggtggtggtcagtaccatcactgtattaccgcaatctatgaatgtaattgaaaatcttcccggccgtgttacagcttaccggattgctgaaattcgtccgcaagtaggtggaattgttgataaagtgctttttaaacaaggctcttatgtgcaagcaggtcaaccactttttaaattaaattctgaaatctttcaggcagatgtaaaaagcaatcaagctactttaaaccgtgcacaagctgaggtgacacgtttgcaggtgctgttaaaacgctacactgaattggtaaaagtaaatgcggttagtcagcaggaatacaacaatacggaagcagattataaaaaagcaaaagccgatgtggcgcaaatgcaagctatgttaagtagacagcagctcaatcttaaatatgccactgtcacagcacccatctcaggaacgattggtgaaatcttagtgactgaaggtgcattggttggtcaaggcgatagcaatgcgatggccgtaatacaacagattaataaagtctacgtcgatgtaaagcaatcaattagtgattatgaaaagctacaggaagctttgcagcaaggtgacgtgtcaaacatcaaacatacggttgaaatcctgaatagtcagggtaaaccttataatgtcacaggtgaaatcctattttcagatactaaagttgatcctgacacgggtgatgtcacgattcgtattctagtcaataatcaaaatcaaaaacttttgccaggcatgtatgttcgagtcaatatgagccgagctcaagttgaaaatgcgctgttagtacctgaacaagcgattcaacatgatattagtggtaaagccaatgttacgattgttaatcaaaaaggtttagcgcaaagcaagcctattcagcttggtcaacgttatcaaaatagctatgtagtaacacaaggattacaagcaggcgaaaaagttattgttgaaggcgctgatcgtatacagcctgagcaaaaactaaaaattaagcagtggcaacctacaaatactcaggaaagtggaggcaagaaataa

SEQ ID NO: 60153 - DNA, 3102 bp, Acinetobacter baumannii
atgtctcaatttttcattaagcgtcctgtttttgcatgggtgatcgctttatttattattttgttaggtgtactcagtattcccaagttacctattgcaagatttccgagtgttgcgccaccacagatcagtattactgcaatctatccaggtgctaccccaaagacactgaatgatagtgttgtgacattgattgagcgggaaatgtcaggtgtcaagaacttactgtattacagttcaagttcggatagttctggaacagcaacaatcaccgcaacctttaaaccaggcacagatgtagaactggcacaagttgatgtacaaaacaaaattaaagccattgagtcgcgcctaccccaaacagttcgacaacaggggctgatggttgatgctgcatcatctggttttttaatgatggtggggttgagttcaccaaatggcaaatatagtgaaattgatgtcagtgactatatgactcgctatgtaattgaagaattaaaacgggtcgaaggtgttggtaaagtccaaaactttggtgctgagaaagccatgcgaatttgggtcgatccagaccgcttggtctcttatggattgagtattcaagatgtgaatacagccatccaaaaccaaaacttgccgatatcaccgggtcgtattggtgatgttcctgcgttgaaggggcaacaaatcaccattcctttgactgctcaaggtcaattagaaactgtagagcaattcaagaacattagtttacgtgctcaacaaaatggtgccattgttcgattatcggatgttgctcgtgtcgaaattggtgcgcaaatgtataactttgcgattttagaaaatggtaaagcctctacagctgtggcgatacaaatgagtcctggtgccaatgctgttaagactgcagagggtgtaaaagcaaaaattgaacaattaagtctagcattgcctgatggtatgaaattctctataccttacgacactgcaccttttgtaaaagtttcgattgaaaaagtaatcatgacattgcttgaagctatggctttagtttttattgtcatgtttattttcttacataatgttcgatacaccttaattccagcgatcgttgcaccgattgcattgcttggcacattttcagtcatgctacttgcaggtttttcgattaatgtgctgaccatgttcggcatggtgcttgcgattgggattattgtcgatgatgcgattgtggtcattgagaatgttgaacgaattatggcgacagaaagtttatctccagttgaagccacatctaaagccatgaaggaaattaccaatccgattattggtattaccttagtgttagccgctgtattcttgccgatggcattggcgtcaggctcggtggggattatctatcgccaattcaccattaccatgtcagtttccattttattctcagctttccttgcattgacattaacccctgcgttatgtgcaacaatgttaaaaccgattgatcaagaccatcagaaaaaaggtgtttttgcatggtttgatcgcagttttgagaagctgaacaatcgctacgaacgtagtttatttaaagtaattaaacataaaaccctcgcaatgttatgtttcttaggcattgtcattgtgctgatttttagttttaaacacgttccgactgcgtttatgccagaagaagatcaggggtggtttatgacttcaattcagcttcctgcggatgcaactcaagaacgtacccgtaaagtcgttgctgagtttcaaaatcatttagaccaagaaacgggtattaaagacaatatggcagtcttaggttttggttttagtggttctggtcagaatacagcgatgtattttactaatctattgccattcgaagagcgtactattacggcacaagaagtcgtgaataatgcaaatatagcgatggctgaaagttcagaaggtcaaaccatgtctgtgttaccaccagccattgatgaattaggtaactcatctggtttttcactgagattattagatcgtggcaatattggcatgcctgctttaagagaagcgcaagatcagcttttagcattagcagcacaaagtaaaatcgtggcggaggtctatcctgaaggtttgccagatggcagttctgtacagcttaaaattgatagagataaattgcaggcattaggtgttaatttcagtgatgtgaccgatattatttcaacctcaatgggttcgatgtacatcaatgactttccaaatcaagaccgcatgcagcaagtcatagtgcagcttgattccaaatcacgcatgagtattgaagatattcttcagattaaagtgaacagtcaaagcggtaaattggtttcaatgtctgaaataattacacccatttggcaacattcaccacaacaatacaatcgttacaacggtcgtccatcattgagtatttctggcagtccagcagcaggtgtatcttcaggacaagccatgactgagatggaaaatttgattaaacagcttccgaaaggtgtgggttatgagtggactgggatttctctagaagaaaaacagtcggaatcacaaaccttgtttttattactgttgtcgatgttagtcgttttccttgtcttggcagcactttatgaaagctggtcaattccattctctgtgatgctagttgtccctctagggttgattggcgcctttttagcagtaatgttacgtggtatgccaaatgatattttctttaaggtcggcatgatcacgattattggtctatctgcaaagaatgccattttgattgttgagtttgcaaaagcattaagagaagaaggaatgggtttagtggaggcaaccgttgcagccgctaaattgcgcttacgtccaatcctaatgacatctttggcatttacctgtggcgttattcctttagtcattgccagtggcgctagttctgaaactcaaaaagcgattggtacaggcgtctttggcggcatgatcagcgcaacaattctagctgttatttttgtaccgattttctttattgtcgtcatgagcatggttgagaaattctcgaaacgtaaagcggcacattaa

SEQ ID NO: 60154 - DNA, 1515 bp, Acinetobacter baumannii
atgaaagctacgaatcttgatccgaaacgctggtggatattgctcgctgtcgtgcttgcatttctgccgattgtgattgatatgactgtactgcatgttgcggttccatcattaacccaatcattgagtgcctcaagcaaccaagtcttatggattattgatatttatccattacttatggctggacttttagttccgatgggaactttggctgatcgtgtcggcaatcgtaagattctgctgattggcttggttatatttggaattgcctcagtccttgcggcattttcccaaacggcttctatgctgattgccgcacgtgctttattagcattaggcggtgccatgattatgccctgtgtattgggtattattcgcagaaccttcgaagacagtcgcgaacgtgccattgcgctgggtatttggggcacaatcggatcagccggtgccgccattggaccgctcattggtggtggattgttagaatatttctggtggggttcagttttcctcattaatgtcccaatcatgttagttgtcgccccaatgtgctatttcttattatccaaaaatgaagctgtaacctctggacattgggcatttggtcaggcgctattgctaattttcggtttggtttcatttgtatatgcgctcaaagcaggcttaggcggtaaacagtcgttgttaattgtccttcctttagtcattttttctattggattattaaccatatttgtacgcaaacagctgaattctcctcaaccgatgctagatctttcactattttcacgccctgctattttagcaggcattattatggcaatggttgctgcaggcgctttggcaggtgtggaattaaccttagcgatggagctgcaatatgtcattcgtttaacaccactacaagctggtctttttatggttccgattatggttgctgctgctattggtgggcctattgctggatttttatctaataaattcggactgcgtctagttgcaacattttcattaatattggcagcaattgcgttgatcagtttgagttattcagattttcatcatccgggaattattgttccctttattttagcttcaattggactcactctaagtatcggtttaacagcttcatccattgcgatcatgggctcagtacctgcagaaaagggcggtgcggcaggttcacttgaaagtacaggttatgaactgggtacaggactaggtattactttatttggtgttttcatggcctatatatttggcagtcatcttcaagtgccgtcagatttaactgctgttttagcagaaaaagccagactatcgattggtgatacctatttagtggcgagccagttacccgttgaacaaggtacagcattgattaacgcaggtaaaattgccttcagttcagctcatgttaatttattattaacagcagggattatcatcggcatactctccattgtggtattttttatgctagcgaaatatcgagatgagaattcattgtga

SEQ ID NO: 60155 - DNA, 1062 bp, Acinetobacter baumannii
atgatgagcctactcaatttaggcattacgctgttatctttcatgattggctattttgtttatagctgggcgataaaaataggttttctaaatacgcaagttattaattcaaatgaattttcagttacctttgttgactttatctggctgtttttagtgctattaacaggcttttttctttctactatcctcgcctttaaatatggaaaacgctatacacagccaattagtgatttagcagatgttattcaacaaattcaacaaggtaatttagcactcagaattaaacagccacatcatgatattccacatgaaatcaagtcccttattgagaacttcaatgaaatggcaaaccaacttgaagtatcagttaagaattcaactgtttggaatgctgcaattgcacatgaattacgaacacctgtgacaatattacaaggtcgcttgcaaggtattgtcgatggtatatttattgccgatcaagctttacacctaagcttattgaaccaagtcgaaggcttatcttaccttgtggaagatttacggacactgacacttattgaaaataaacaattacgtttagaactagaaaagaccaatttaaaagatagtattgaaaaatgtctgcagatgtttaatgaacggtttcaggttaaaggtttaactattattttaaatttgacggataaattggtttgcgttgatataagaaggatggaacaagtctttattgcattattttctaattttctaagatattcgaatgctggacaaatcaatattacaacgatggccacagcagaacattggctattaatgtttgaagatgaaggtcctggtattgatgaatcgcatcttgcacatctgttcaagccattctatcgtctggaagactctagatcacgtctagatggcggtactggattaggcttggcagtgattgatgcaattattgaagcacaccaaggtcatatttattattctaaatccaaaaacttaggtggcagctgttttactattcaactaaatcgtataaatcgtaagacatcaactcatttataa

SEQ ID NO: 60156 - DNA, 729 bp, Acinetobacter baumannii
atgtatcagaacttacaacatagctttgaaaatagcgtaattctcgttgtagaagatgattatgatattggtgacattcttgaaaaatacataaaaaatgaaaacatgaaggtcatccgtgcattggatggacaacaagctttagagtgcttaaaagccaactctatagacctgattctccttgatattaaattacccaaactaaatggctgggaaattctacaaatcatccgtcaaacaagtcatttacctgtcattatgctgactgccttagatgatcaagtgaataagatcatggggctaaaaatgggtgctgatgattttattattaaaccatttaacccaaatgaagtgattgcgcgaatacaagccgtacttagacgaagtacaagccaaaatacggaaataactaatattattcgttataaaaatattgaaattaatccagatcatcatcaagtttacatttcaaatggtcaaagaaatcagctgctcaaccttacgttaactgagtataagatactggttttgatggcaaaaacaccaaataaagtctttacacgtaatgaattgatccaaaactgtatgcctgaaagtgatgctttagatcgcactgtagatagccatatcagcaaattacgcaaaaaacttgaagaaaattatgtaaatggtttattaatcaatgtccgtggcgtggggtatcgcttagatcaaaatcatgaaatttaa

SEQ ID NO: 60157 - DNA, 1257 bp, Acinetobacter baumannii
atgggcttaaaggatttgcttggtctgaaagaaagtgatgaaaaaaaactacgtgaaggattagcacaacttagggctttaaatgatcatttatcatccatgtattctttgaggtctgacttaagagatttaacagataatcggcatactgttagttcacttttacaaggtgaattagataagattaaagctcaccaacaaagtttaattaataaaacgaatgagttatctcaactaaaagccaaattagatgagtctctaattgctattgaaaaaattcaatctgttttagctaatgatgaaaatggtagttctatttattctcgtatattagaagtaaccaatgaagataatctagatattttggaagttgagtccgaaaaaattcacacagcttatagtcaattatttgatcgaaatggtgaggatacttctaaagttgatcgagtaaattatgtaattgataaaattttagatcaatatgacaaattgtttgatgaagtaaatgataatggtgaaacgaaagttaaagaatacgaaagaaaaattaatgagttagttgcatactatgacgatttatttatttctgatgatcctgataataaaagtaaaaatgagcagataaattttcagttatcgagagtccaaaatttttatgacaaaatttatggtaatgaagaaaaaaacattactgcattaagtgaagatttggataaaaggttagaaaatttaaaaaatgttgaggagcgagcaaaatcagttattggattatcaagtgaagcagggcttgcaggtggttttgttgtaaaaggacaagaagccaaaaaaggacaattcatcagtattattgtatttgtattagttgtattagcaatttttggatttaatttttatttgtttgataaatcagattttttgaatatgaagtgggatacattcttattcaaattattgatcaacgcacctttgatttggattgcaacaattgcgaatataaatttaaatcgtttttctaaattagagcaagaatattctcataaagaagcattggctaaatcttatgaacggtacaaaacagaaattcaagagcttgaaaagttaggagttactggttcagaggagcttaaattaaaacttttagaaatcaatcttgaagcatttaaagttaaccctgcggaacattctgataaagctaagcctgatttctctatatgggatttgattcagaagaaaaaagatgagaaacctagtgagtaa

SEQ ID NO: 60158 - DNA, 1440 bp, Acinetobacter baumannii
ttggcggagattaatattgagcagttatgtaatgggtgtgaaaaatcagttacccaactaaaaaaaagatataaagggaaaaaatattgctcaacttgttatgctcgaatttttaaaaaatgtctttgcccaaaatgtgggttatctgctcgattacctaaaaatgatgatcaagcgatctgtaatgaatgtattaaaaaacaaccttgtataagatgcaatcaagttaacagaccgataggaacgcttacagagtatggggtcgtttgtaatagttgttctgtttattttagagaggttgaacgatgtgagcgatgcaatgttcaatcgcaaaaattaacgaaaatatcacgctttaatgatgacctcagagtttgtccgaaatgttcaacaagggattatgaaacatgtccttcatgtcataaatatcgcttgttagagttagatgaaaaaggaaataaagtttgtaaaaaatgtataactcaaccgaataaaccttgtattgaatgtaaaacgatgatctcagcaggatgcggtgatctatgtgatgattgctactggattaaaaatctatggtcaaagttccatcaaaatatttatttgttcgagtcatcttttttaaaaaaacaatatgaaaactacgtgctttggttggtcgatttagttggagcacatcaagcagctttgtatttgaataaacatactcatttttttattaaaacagaaatgttatgggagagtaatattcctgatgcagaccaattattgttgactttacggacgagtggacttagaaagtttgaattagtaacacagtggctcgatcaaatgcatggggtaaaaatctcaactataaataaaaatgaatgttctgagatagatcaagccaataagttgattgatcagttaccgcagccctcattggcttttgatgttgtatttgcttataagcaaaagctcgatgaaaaaatgcatcaaggaaaaacatctgctcgatctgtaaggcttgcaatgaagcctgctgttgcattgatgttatctattcaggataagcaattactgccagatttggcaaaagtaaaagcttatttaaatgagtattcaggtcaggctgctgcattaacagggtttattaatttcttaaacgatcaatatgatacggatattgattatatttccttaaagcattctaacttcataaaagaagcaagtaagcggaaattggaaaaagaattgatctcgatgctcagcccaaatactgatttcaatgtcatggtatgggtgaaaaatggcttacaactattccatgagatgagttatcaggattcattgaagatcaagttggaaatgatcgttgaaataaaagatggctataatgttttgtacaataaccaaaattattggttgcctaagaacattgatccatcttttaaaaagtaa

SEQ ID NO: 60159 - DNA, 1107 bp, Acinetobacter baumannii
atgcctaattatgctcaaaattggtttatacatacccccattgaacaaggtgaagtattatcatcatggctcattcgttcagccttagacatgggatgttcccctttaacacttatagaagcattgtggggtagatggagagcattaacgattgatcttgatcgaggtatgacggaagatcggcttgaattattatttgtacattcttttgatgataaacaaaaaattttgaaaacaatgctaactaatgtggctccctatctagttaagagttcaaatagtggatgggttttaagtttaggtcagcgtagtagatcaaatttttcaggtcggcaggtgtgtactcaatgttttgaaagtgatggtagatcagcttatttacggttaatgtggcgaatggggtggcattgttgttgtgaaaaacatcaaataaatttaattgatcattgtccgaattgcggtgtagtcattcagccatttaaaatagatttagagcatggatcattagcagtatgtttctcatgccattttaatttgactttatatcagccacaacctagcaatattcaaattttagattttcaaaaaaatgcagataacgttttaaaacaaggctcaggtttatataataatcaaaatatttcagctaccgaatggtttgcgattgctcgtgcatggataagtgaaatcagattacttgtagatacagataatattcaacttattgaaatgtttaagagctttggtataaatttaaataccataactcctttcacaccaattgctttcgaatatttaaatacaaacgaacgtataattttgctttccatcttgaatgaaattatgaaaatcccatgtgagttgattattgaccgctcttatgagtacgggattagtagtgcaaatttttgggataagcgtaaaaaactaccgattcaacttcaacaaatgaaatcagcaatgatcaagcctataagagtatatgctttacaacgtgtgagttctcataatggaaaaccaaaagcaaaaaaaaccgtgcaacgtaagtggcttaatttgttaagaaaatcaagaaagaaacggagtcataagcttggcggagattaa

SEQ ID NO: 60160 - DNA, 921 bp, Acinetobacter baumannii
atgaaacaatatgattaccttgctgagcatgtccttgacactatgattcttagtgatgctgaaagaattaatattctttatgaggatcggtggattggttatcagaaagcaattgcagttttgaatacactgactgatattttgaaacgacctagaaaattaagaccagaatgtcttttaattgttggtgattcaaatatgggaaaaactaagattattcatgagtttgcaaaagaatactatactaagagagttgatgatatggacatgcagcttatgtcattgactaaaccagtcattcctattcaagcccctgctagggcaaatgtaaaagatttatatattaatatcttagatcatttttttgtcccttttcgtgtcactgatcctgaaagcaaattaaggtatcaagcaacccatctactgcgtaaatatgaaaccaaaatgttaattattgatgagttgcataattgtttaagtgggagtgctaggcaacggcaagaagtgatgaatacacttaaaacgctaagcaatgaacttagtatgaatatcattggtgttggtactcgtgatgcatctcttattcttcatacggatactcagtatgccagtcgctttgaaattatagatttgcctttatggaaattggatgcggattttttaagacttcttttaagttatgttcgcttacttcccctaaaaaaattatcaaacttggcatcacaagaaattgcgaccttactctatgaaatttcaggtggtaattttggtgatttaaatcgtttattggtggaatgtgcaaaagaagcaatattgactggtaaagaagaaattaccctcgaaattgttaaaaaattcaagtggcttaaaccaacagagggtgctcgtaatattcgcactattcagcttaattctatttag

SEQ ID NO: 60161 - DNA, 1905 bp, Acinetobacter baumannii
atgatacaggatgattcagtaaagattgatagaaaacgcctagttattaaaccaaatgcaattgttggttataaaggtaataaatataaaattatcaatattttaaatgcaaaagatgtcgtgattgcaaatttggaatctgctcgaagtttacaagtgagcataagggaattatctgttttaagtgaagataattctaagcttaaccaaggtgaggatatttctgctgagtcatggcaaatcgctttagatcattatgaaattattagggaactcattgactattccacagttgaggcggttaagaagactgcaagtgaacataatcttcatgtaaatactatttggaaatggcttaaagcttaccgagaaaacaagtctatcttagctttagtcccaaaaaaacgtggttggacaacagaaaaaacaaggttgtcgcctgaattaaatcatattattcaacaagcgatccatactaagtatttaacaagtttaaagccaagtgttgccaaaacaattttggaagtgaagcttgagtgcttcaaaagaaaaattgaaccacctcatgacaatacgattcgctatagaattgaagcccttaatggctatgaagtgactaaggcaagatacggaaaaaaggctgctaaagataagtatgaagcatcagcagggacttttccgaatgcagactatcctttggcgtatgtgcagattgatcacactcctttagatatagaaatcgttgatgaacaataccgtgaaacaataggcaaggcatatttgacattagcaattgatgtttttagtagaatgattgttggttattacctttctttagaagctccaagtgcaacatcggtagcaatgtgtatttcatcagccattatttcaaagaaaagaaaactgcttgagttagatgtggatggtgagtgggatatcgaaggtattatggattcagtccattctgataatggttctgattttagaacaaaccatctgcataaagcatgtctaaagtacgatattaattgggagtatcgacctattggtggtgcaaaatatggtgggcatattgagcgtttacttggaatcgtaaatcttgaaatgcatgttttagatggaacgactaaatctaatatttttgaaaaaggaacttatgattccgctaagaatgcttgtttaacacttcgtgaattagaacattacatcgtctattggattgtaaatgtttatcataaaagcaagcattcaatacttgaaattccgccacaacaaatgtgggaagagggtatttggggaacaaaatttaaagttggtactggtttaaaagaaagggttgcggatgaagcaacactatttttggatttcgcccctgaatttgaatcaaccattcaaagaacgggcgtaaaaaaagataaacttttttattttgctgattgtttaagaccttggatcaatgcgattgatccaactgacgatgagaaaaagcgtaaaagaaagtttatttttaaaagagatcctcgtgatatttcaatgatttggttttatgaaccgaatacaaatacatattttaaagtacctacagccaaacgtgaaattccatcaatcggattgcatgaatatagacaagtccaagcatatcttaagagtgagcgattagatacagttgatcaagatgctatttacagagcaattatttatctccgtgaaaaagtagatcaagccgtgactttaactaaaaagcaacgccgaatgaatcaaagaaaaaaagagaatggtaagatagttgctgcactacaccatgaaaataaaaataattcagttatccatacaaatgtagatgctccaaagtcacaaaatagtttatgggatcaaaatttaactgcttttgacgatttgaggtaa

SEQ ID NO: 60162 - DNA, 711 bp, Acinetobacter baumannii
atgaaaagaataagtgatgaatatagtcccgttagaaaagcccaaaccgtttacggaagtatttcggggaattactcttttaggggagaaaaaacgatttggtttgaatccactttggagcgtgattttctttttaagcaagaatataacagtaatgttattgatgtggttgaacagcctatttctattccttatataactgaattaggaaatgaatcggtatatacccctgattatttggtgcaattttcaagtgcaatttataatgatattgatttctttcctgcaccattattgattgaaattaagcctagaaaaaaattaaaggaagattggaatacccttagaccaaaatttagggcagcttatgctttagcttctgaaaaggcatggaaattcaaaattattgatgagtctcgtttgtatgatcaatattgggaaaatatcaattttttaaaaagattcagacgttctcatgttgatgaggtagatcagagagtattaattgaaactttattaaaactaggcttttcaacagttaatcaattgcctgcttatatttttaaagatgaaaaaaatgtattaaaggctattcgccaaatatgggttttaatttcaaaaaatatacttgcttgcgatctatataacccttttactactgaaactgttatttgggtaaatgatggctctaaagcacaaggagttatttaa

SEQ ID NO: 60163 - DNA, 816 bp, Acinetobacter baumannii
atgaaaaaaagtggtttatgtaagctaactggagaatatggccaatttattaaagctcacttaatccctcaagctttaacaaaaccagaaataaaggggaaggttatgagagaaataggcgaaggctatagagcaaaaaaagctaattcaagttggtatgattcagaaatagtaactcaaagtggagaagatatacttacagagttcgatactgcagcaataatagaattacggaaacacaaattgatttggagtagttggaacgaaaatgagttgccagatgatcaattaataaaaatgaatgatagttatggaattcgtaaacttgatgaggtaaatcataaatcattaagattattttttttaagtttattatggcgctcatgtgcttcaaaaagagttggattcaatgaaatatccttacctaaggatgatatagaaaacttaaaacatatgttgataaacagagatgcagggcaatatttttactttccaatcttacttgtacaattgtcaactaaaggaaaaatacataatcacacacctttaatagaagacttcacagttgaacctatttatggacaaggtcctgagcaaacttttaaaatcgtgcgattctacttcgatggcttagttgtgcatatacgtttaactaaagatgaagagaggactagaaattctgggaatgtatttataggaagaagtaaagaattattattaaccacaataacttatgatgaatcatttcaaaaacaaaatatgcaagcaattcaagaccgccatcaatttgaagctaaaaatgggcttttaaaatag

SEQ ID NO: 60164 - DNA, 1005 bp, Acinetobacter baumannii
atgatcaaaatagtattattcattgaagattccttacaatattatccaatcatttataaagtgaaatatcccatgaataaaacttttaaagccttaggtagtattcacccattaaaaataggtatgagttacttattactaatcgttatctcagcgttgttattatatttatgtcctgaatttaagcttacttctacaacagtcagcgatccaaatagcttaacttcatcattgtatttcacttttgtaaccataaccaccttaggatatggtgatattttacccaataatgaattaacaagaattttagttatttttctatcatttggaggagttgttttaacaggtttattcctaaactctcttgcacatacaatttcaaaaattacgcaggtagaagatgaaaataaaatgagacgggagaaatttgatgaggatgtgaggaaatttctagatatatctattctgttgaaacaaaattttgatgactttaagttttccgcaactggcctaatcacgcctttatcaaaatataactccaatatagaaattgccagattaatggaaatggattttaaaattaacgatttatgtgatctttttaaaagaaatattttaagaagattttcattaacgaaatcaaaaattgaggtcttttatgaaacttttgatattttaaatagcaatttagaccaattattaaaattagggtattttaatttcaacaaaaaggcattagtaattgtagttaaatacttgagtcactgtaaaagagttgattcccgagaaaatattttgcattttgctcgattaaatcaaaatgataatgagtggatacgcacaatgctattaaatgcaaaagatgatgtgcaaattacagatattgcaaatgcaatggatgactatattgtgttaatagatcaaatcaaactcactgttggtttaattgtaaatattgaaagcctgatacattcacttgatcaggcccaatgctctcatgaataa

SEQ ID NO: 60165 - DNA, 918 bp, Acinetobacter baumannii
gtgagttcaggcgcaaaaattcgattatatgcttgtgaagaagcagttttaggaacaactccagcaaacccgatctggtataccgttcgaagagtaacagatggtttatctgaaaatgtttctactgaagaaagcagtgaagtggttgattcacgttttcgacaaggtggggtagttactgaagcagaagtagcaggtcagttagagtttgaattatcacttggaacatttgatctattcctaagtgctttagccttcaataactgggcgacaaacagcttaacaattggcggtgctgttcgaaaatcattaacgttagttaaagttttcgaagatgttggccaagtctttatttatcgtggagtacaggttaattctggtgaaattactatccagaccacggggaaaatcactggtaactttggtcttgtaggtagctcgtttactcgtcagcaaactaaccctgtagtgaatccagtggcagcctcaactcgtccgctggtgagtatgccgaacgtggaaaacttgcttattaatggtcaatcaattcaaggtaaggcttgtctacagtctttgactatttctattaacaataaccttgaagcgatccgttgtattggttcaggtaaatacacacctgagttctacattgaaaagatgatggatatcgaagcgaatgcttcattcatgttctcggccacagctgctggttggattgatgcaatcaaaacccgtgatgtgtttacactgaccttcgacatcagagacagcaaaggaagtaaatattcatttaacttcccacaactggaagtcatggaagccaatcacccggatggcggtggtgacgacatcattactgtagacatcaactttgcccaagttcgcacagcgccaacaattgtacgtgctcttgtgtaa

SEQ ID NO: 60166 - DNA, 999 bp, Acinetobacter baumannii
atggcagttaacatcagatttgattattatcattttcgagctgataaatctcgttttcgaagaaaagaagatgctcaatttttctttggggaaatattgacgcttgatttttgtcaaaaattagaaacatatttcaattttaatcgaagtgaatttggctctaatggtaaattaattaaagaatttaattcaggaaaaaaatggataaaatgggtttccattgataagatcaaagatggatataaactattgtttacatttaatgatcttgaggttgatcctcgtattcttgaaaatactaaaaataatgtcttaactcaaaaaattccaaaagaacatggtttaagaactttgcttcatgtcatcattaaaacaaaacctgttcaaaaaactgaagcaaacctatgtatacaacttgtacctggtatgagccaaaagtttattccagcgttattaacagagttattttatcttacatatgattcatctttttggttcgcaacagacccaatgactcaagaagaaattaaatgtaaacctttagtggaagtaacctctgttacaactagtagcattattgaagccgtaaaccgtggactattgcagagtattattctagttgaacaaacaaaagttacccaaagttttgaccagaatagtgtattaaaggatcaaaccaaaagtttaggcattactattgaagacaatcattcatttttaagtaaattaacacctgaatctttaaaaaaatggttaaatagaactaaaagtaattataaaaatgaatttacgactgatccaaaaacatatctcatgattaaaaacttacataataatagcgaaacaaaatacgaatatgtcgatgatgtaactctaggtctaaccaaaagagcttatctcaattgggcagaccgtgatataaacacaattaagggtttagagtccgaagagccaaagccaattgttcagtgttttgctattatgcaagccaatttctga

SEQ ID NO: 60167 - DNA, 498 bp, Acinetobacter baumannii
atgctaaatcaagctattaaagtgtttgattttcttaagattaaatatcctgacaatgctcattatggtgcagtttttttcgcaccgttcttgtttgcaactatatttagtatagttgcgacttgggcggcatttaaccttaagaacggtaattattttcttagtgagcgttttggtgacttatttactttgttagccatacttcctggtttttatattgcctcattatcagcaattgccgcaattaataaaaaagcaatagatagagttatcaatgaaaagaatgccccatatattgaaaaacctgagccagatagatcagaaacatttaagcaaacattaactcgacgcgtgtttctaactatgctatttgcatatctttcaagtgttagtttactacttgctttgagtttagcccttttgaaatttttatttactcttaacaaagattcaaattttatagttttttcttgctctaatttatttttcagctattaa

SEQ ID NO: 60168 - DNA, 291 bp, Acinetobacter baumannii; identical to SEQ ID NO: 44729

SEQ ID NO: 60169 - DNA, 801 bp, Acinetobacter baumannii
atgtccctagatgatgaacttaaaagagtgtttcgctctcaaaatcaaataaataagaaaattgaagcatttagtgctttccaaaatactaactcactagccaaagtcatggagaaattcaataaaaataatcatttatttttaaattatcacaatctctataaatcaaatgcaattttagaattaaataaatggaataagctttttaatcacgaaatttttaagagttcaaatattaataagtatcaacttccagattatttacacaagtttcaaaaacaaaatatttctttttttaaaatttttgaaaaacaggaatttattgaaaatttcattgatacatttataaaagaggatatagataatttcgaagaggggctagaacctcaagagggtgatctaaatatttttggcgaaatgatcttgcaagaggcagaagtcccttctgactcatctcaagatagttctaacgatgatactgcagtactgataaatggaatacttcgcattttatttattgtatgttggttctatgtcactaatttagatcaatttaatgattttcaagaagcgatggaattttatataaatagtattgagtgtaaaggtgtaactacttcagcattaaatttaagatcagcacctaatattgctagtgagcttattgtcactatacccaaagatagtggattaaaaatctatgatgaatctcaaaatggttgggtgaaggttaaagtaaatcttaatggtcttgattttgaaggttatgtatctgaggattttatacgtaggatagattga

SEQ ID NO: 60170 - DNA, 846 bp, Acinetobacter baumannii
atgggttcaatgaacgctattcctcaaactttcgagttttggcaagatcggcggatgccttatgtggaaacccgaagatcatgttttggcagaacatgttataagtctcatagccatccaacattttcaattggtgctatagatgaggggaatagtgtttttcaaagttcttttggcactgcacaaaagatcacggcgggtacattagttattgtgcccgcacatgttgagcattcatgtaatcctatgccaaatcaggcatggagttaccagatgcttcatttagatctagcatggttaaatcaactgtattcagaatttcaagaacaaggtcttgatttacatatacctcagcataagccgcttattataaaagacgaatctttatatgaagcttttactgaaatgaatgagacattatttgatgcgcaaaaattaatttttgaaaaagagcagtctcttctccattgcctgattcatttgttattacctcattttattttagaagaaatacaaaagcctcaatatttatataaagactttttaaacctgatcgatgtgatttcatcctcagaggtttttatttctttagaagaacttgctcaacgagtaggtttaagtagatatgcaatcatacgtctatttaaagcaaatgtaggtttaactccacatgcatttcaaattaacttaaagattaatcaggctcgagagcagctcaaacaaggcgtgccacttgccgaattggctgtaaatttaggttttagtgatcaaagtcatttccataaagcttttaaagcacatacaggggtaactcctcggcagttccagctcgcagccgcgcaataa

SEQ ID NO: 60171 - DNA, 672 bp, Acinetobacter baumannii; identical to SEQ ID NO: 57210

SEQ ID NO: 60172 - DNA, 156 bp, Acinetobacter baumannii
atgcaactaaaacaggtattgggaaaaatcaaagacattacttttggcgtgatcgcagcaccgctacttatcattattatgatatgggcttcgatactcgatcaaagagcctttaagaaagaacgcaaccaaaaaaaggaacaggataaaacctaa

SEQ ID NO: 60173 - DNA, 501 bp, Acinetobacter baumannii
atgacacctgatgaaaaaaagctatatgcactgatggcagttgcagaacaacagcaaaacttagtcaatcaggccgttaaagagcttcaaatcaccgaagaacgcattcagaaggttatcgcagggcaaacccatcataccgtatcaaaatcgctaaatacgggtttacaggagggtacagcggagcttgttaagaccgctaaagcacttggacgcttaaaaaattcgattgattcagccagtgatcaattctcatggaaaatcatcacaatagttttggggatttttgccattcttatgcttggcatcatttggttatttgctgtttatatcaaaccgcttgagaatatttctaagattgaaagtttaagagaggatggtattcagcttgagattcgaagttgtactgttggagaagaatctaaaccatgtgtgcgtgtgatgaaagaacagtgcaattatggaaaaaatcatgatttatgtgtgatcgaccctatatag

SEQ ID NO: 60174 - DNA, 810 bp, Acinetobacter baumannii
atgttgaagcggtcaagtttagaaagaaaagagttcaagcaggaagagcttacactaatgaagaagcttgatttaaatgatattgagattattaagtctgataatcttgcacaactcttaatttggacttctgaacttgctcaacataatcatgctcaatttattgaatttagtaataagttagaaaatattgatgaaatagaagaacgagaagaaattaataaaaaaattaatttttataggaaaagtgcattttcagagaatcaaatcaaagatttctatataaaaaagctactggatcagggagaagcgaccataaggggatatatcaaacatccgattaagcaggatacgaaatatgctgtaatttcttaccatggatatgattttattagttttgcaacgcctgaaattgttgaaaaattccccctgaatttcattgattttgtgcaaatggaagcaccaaaaacactggctgatatacaccccgatgaagctctactgctatcaactatcaagaattttataaagccctttaaagaacaatataaaaaaataacgagcaaaaatagggagattaaagaacataatgcggtcgtacatgaaatttatataaaaattaaaaataaagaagcaactctgcaaaaatcaacagactcgaagcctaaagaatctagtccaaagtctactgaaaatagtgctgtaccagtagaaatgaagcaggtggccattcagaaaaatatggctccacaagaaaagccgattacagtgattaagaagcgaaagtttgctttaaacaaagaaaagtaa

SEQ ID NO: 60175 - DNA, 345 bp, Acinetobacter baumannii
atggcaaaacaagacgtagtgaaaagacagaaggaaatcaaaatccgtttgacggatgaagaacatgaaaagcttttgaagctatgcactaaagccagtctagctagttggatgcgtgaaacttgcttaggtgaaaaacagccaaaacgtaatcagatccgcgaagtagatcctcagttactcagacaacttgcaagtattggtaataacctgaaccagattgccagaatcatgaatcaacagagcaaagctaattctgcgatagaccgaattgctgttattactgctttagcaggcgtagagcgagaactacagagattgcacgatgatcataaaaatacatag

SEQ ID NO: 60176 - DNA, 1494 bp, Acinetobacter baumannii
atgatcataaaaatacatagtcgtggtgtaggtggtggctgtggtcccgttgattatttacttggcaaagaccgagatcgggaaggcgcaaggctagatcgtggcgaccctgaacaaatgattcagctgattgatagcactaactttgctcagaaatatacgtcaggcgttttatcgtttgccgaacgtgatttagatgaacaccaaaagcaacagatcatggatagctttgaacgtgcattacttcctggactagataaagaccaatattcagttttatgggtacagcaccaggataaagaccgcctggaattaaattttgtcgttgccaatgtggaattgcatagcggaaaacgcttacagccctattatgacaaggcagaccgcccacgtttgaacgcttggaaagacttagtaaacgatcattatcagttaaaagaccctaatgaccctttgaacaagcgtgaactatgtacacccaataatttacctagaaccaaaattgaagcgtgtgaagctattacaaacgggcttttaagtatagcggaacgtggagagctaaaaaatcgtgatgatgtagtcaaaactcttgaatcagcagggtttgagatagcccgaaccaccaagaaaagtatcagtatcaaagaccccgaaggggggcaaaatatccgtctaaaaggggctatctatgagcaagattttagatttggcaaagaacttcgagcagacatcgaacgagcaagccaagaataccgagcagatcgtagcagccgagttcaaacagcacgagcaacgcttgataggcttactcaacgaaaacgagaaagtaatcaaatccgctatccaagagcagaacaaacgtctgttcccgattatgttaaaaacttggagcatcgtagctttagccatcgtgacaacgcttttattgatgtggggaattttgacgtatcagagttacaaaatcggcaagaacgcagacttaatagcccagcaacaggccacaattcaacagttgaaggacgcagggggcaatttgaatataacgaactgtatagacaacaagaaccgaaaacgcacatgcattcagatgaacaccaaagcaggaagctggaagggtggctatctagtgccaatggggtattaattgatgacagaactcgaaaagcacttactcgaagccttggaacaagctcaagcacaacagcagcagagagaagccgatttacagcagatgttcgaagctacacggcaggaaaatcaagctatcaaggcagccttcaagagcttactggaaagtatttccgaaacagatcggaaacaagcggacaactggaacaacttaataaagcatgtcagcgacttgaatggacaactgaaagacttcgagaaacaaaacaggcttttgaacaatcagttaaccacaatacaagagcagttgataaagttgaaaaaatgaataaacctcaaattagttacagtcctaaaatgaggtga

SEQ ID NO: 60177 - DNA, 336 bp, Acinetobacter baumannii
atgaaaaaactagtacttatatttatcgctatatttgctactggccacgctttagcagatacccttattccgcgaagtgcgttaggggataaaggtaaatactatttaataaaacaaacaaaatcaggtgatattgtcacagctttagataagcgagtaggcgttgacagtattgtctatacctctactaaaaccaactgtaaaacaggaaaaatgcaggaaattggatacagtgaaatttctgctacagcaattaagccaaatccaactcagtggtttgacttagtacccggttctagcaaacacgacctatataaatttgtatgtaagaaataa

SEQ ID NO: 60178 - DNA, 321 bp, Acinetobacter baumannii
atgtttaaaattctcgcgataagtttactaggtttatctttaatagggtgtggaaattctgatcctaatgcgccttcaaaacctaaaaaacctaaaacagaaatgcagatgcaagcggctaaattctctagtatgtctagatgtttaaagtcgattcaagatacaactaaattacctttgaagcctatgacagataaaccagaaaaagttacgggttttcttggggatacagagagacagttttattgcggaatcaaagaaacaggtactgaaggtactttcgtagaaggatggtacaccgaagaagtagaagtttattaa

SEQ ID NO: 60179 - DNA, 1008 bp, Acinetobacter baumannii
atgctcaaattaagaaaaagtttaaataaaatttcaaaaaactataatacagttgaagttattgataagttacagctttctatcacccaaaccaaccctaattacttatttctaaaaagtttaagcaatttttggaaatttactataataaatattctatttataactataacctttctcttttttaattcccttatagctccagataatcaaattatagtaaatttattaattatggtctgcattagtctgttatatatatttatactacaacctatattaaataccataattttaggtcaccctgattatgaaagaacattgggctattatcttaaatattggtgtttaagtggatttattctctgcagtttgaccccttggcttccagatttaccccatcaacttctaagttatggatggtttatatctacaactatactactgagtgctttgctgctagatgcaacaccatatatgaatagattagagcaaagtgcatttattaatatcgataaatggataattaatatcggcttaatctctcttagtatttttcttatttctgtctttcttattattggtgaacctaatcatatctggttcataatttatagtctgatcccgatctgtttcttattttacccagaatctttccgccctctcttctatatttttggatacaataaagaagataccaacttaacagataaacaaataatgtatagaagtattggtattatcttctttaggctattctgggtttttggctttagctatttatttataaaatcttcctcacaaccttttatgtatgctgcaggcttgattctaggaagtatattaataaccggatttagtgccaagaatctctcttctacacttaaatatttaacctacatcgccttatgtatagcaacgttatacaccatactcttccctttaatattaatttattatttatatcaaagctatcaagcaaaaaaaataattttatctagctgctaa

SEQ ID NO: 60180 - DNA, 723 bp, Acinetobacter baumannii; identical to SEQ ID NO: 45462

SEQ ID NO: 60181 - DNA, 900 bp, Acinetobacter baumannii; identical to SEQ ID NO: 57237

SEQ ID NO: 60182 - DNA, 1188 bp, Acinetobacter baumannii
atgtcaggaattgctgagtctattgctagaaccattgtaagatggattggggcaaaaaaagcaattttaacggttgtattactaggtgcaattttaacctatagcggtgtaagtttatttgttgctgtatttgcaatttatccctttgcaaaccagctttttagacaagcgaatattccaaaacgtttaattccaggaaccatcgcgctgggtgcatttacatttaccatggatgcattgcctggtacaccacaaattcaaaacgtaattccaaccacattctttggcaccaatatttatgccgcaccatttctaggaattattggtgctatttttgttctatgcatgggtttggcttacttagaatggcgtcgccgagctgctgcaaaagctggcgaaggtttcttgggttttggcgtagacaatacaccatctcaagaaattgaagccgatatgaacttgcaaaataatggaagtacggctcgtcagtttttagcgtttgtgcctctcattcttgttgccgtaatgaacaaatatttgtctaaagcaatcaaagagtggtatccaaatggttttgattttgctgcaattggattagcggattacaccgtagacgttgcaaaaactggtgcgatctgggcagttggtcttgcgctgattgtcgggattattactgcaattttgtttgattatcaacgtgtagtgacgaacttcaaagaaggcattaatgccagtattggtggctcacttttagctgtgatgaatacagcttctgagtatggtttcggtgcaattattgcgtcattaccgggttttgccatgattagtcatgcaatgagcagtacttttacaaatccattagtcaatggggctgtgacaacaactgttttagcaggtattactggttcagcttctgggggtatgagtatcgctttaagtgcgatggctgaacaatataacgccgcgattttagctgcgggtattccaccagaagtcatgcaccgtgtagttgcgatggcgtcaggcggtatggatacgcttccgcataatggtgccgttatcactttactcgctgttacaggcttaacccataaacaatcgtataaagatatttttgcagtcacggtaattaaaacgttagcggtatttgtggtcattacggtctttaccgtaacaggtattgtttaa

SEQ ID NO: 60183 - DNA, 411 bp, Acinetobacter baumannii
atgcttgaagaatctgagcataaagatattgcttatgatgtatatcaggttttaaacggtaattatccgttacgggcaacgggctttttaatggctttcattaccattttagggcttattccaacagcaactttatttgtacctctactgcgtaagccaaaagaactgttgaccagaaaattttggaaagatgcacatcgtggcgtcaacttaatttttagtccaaaagatggcgtatttggtagcaccattggtcagatttttgattacttacgtccagacttccatccaaatgatcatgacacgaccgaatatctggagtactacaaaaagaaattacttaacgagggcggtgcaattgcgccttactttgtgaaggaatttacaccaccagttcgtgcagtttcataa

SEQ ID NO: 60184 - DNA, 603 bp, Acinetobacter baumannii
atgatgtatagtttaaattttagctctagacagtatttagcgcagatattaaaaacaagaggattaacatctgctgatgcacgtgtactttaccaatatcaattgtcttttcctgaatttaaagaaattgagaacattcttaaaacaagttttcaattccaaaatataaatcgtataggcgatgaatgggctaacttatttacgttgtacgctgccgaatggtttagacgtgaatatactgcaaaatgtacatgggatccgattttaactgccttagatattagggatttaccagtaaacactagaaacgaagttgtaattaaggggctgagattttggaaacgcccgattattaaatatagtaaagccaataactatttaggttcgatttttaaagagggtggattcccctcacgcttgttaaaagaagatggaaatcgttatattgcgattttccaaaaagtgacctctttatatttagaaaataaatctcatattgatgagttaagagctgaggtacaacaagaattaaagactttaccacaagcatttgagcatgatgaaacctgtctcttatacacatctccgagcccacgagactag

SEQ ID NO: 60185 - DNA, 540 bp, Acinetobacter baumannii
atgacgtttgaacaaaccgtagaactatatgcttcagtacttcgccaattacttcctgttggtggttatgacaatgcacaagacactgttattgcaattgatatcaacactcatgcaaaggtattggctcaagctgacatagatgcaaagcgattgctttcatttatagaaggcattccagttgaactattagatgaatatgaaaagtctttaggtttgccactcaaatgcacagtaaatggggcaaaaaccattgaagaaagattacagattattcaatgggttcaaaagactaaaaacgtgcttaatcggacatatttagaagaactactggagcttttcggcgttgagttgattgatttagtacgttacacaccgattcaatgcaccgcaccatgtacgtctccagtcaacaccgaaagcctacggtttaaagtcaaactcatcttaaaagcaccagttaaagccgaaatgggctgcattattaaaaattacttacctgcttatttgcggtatgacattgttgaggaacaagtatga

SEQ ID NO: 60186 - DNA, 1047 bp, Acinetobacter baumannii
atggcattttcgacaaaaagtttttctcaaattcgtcaggatattgttcaggaaattagaaataagactggtttaacaattaatgatgactcagatgctgcaattcgcgccgatggtacagcttcagtagttgaaggtttgtatcatcatcaaatctatattcaaaaacagatgtttgttgcaacagctgatgagcctttcctttatttgcatgctgtgcggttggactgtccacgtaatggtggctctaacgcaacaggacgtgtcaaagccaattcaaacacggctgtaactattccagcgggtacaaaaattactgatggcaaaggccactattggctcacattgtacaaagagcaactaactgcgaataaatctagagaaattcaagtcattgctgaacaagctggcgtgagctggaattttgatggtcaacaactcctatgggttagccccttagcaggtgttgcagcacaggtcgacgtcattgaaatgtctggtggcgtggatgttgaagaagttgaagcttggcgtcaacgtatgcaagcgaaggaagcacttggcttaatccgtgaccgtgaagctgatttagagcgaatcgttaaagatgtatcaggtgttgcagatgtttttatttttccgaaacgtcggggacttggttcattagatgttgcagtaacagcagctggtaatccacccaactcaccaagtactgcattattagccgctgttcaggctactttagaagattattcaggattctggacagatgttagagcttatgcacccactaaagaatatataaaccttactgttctagtgacaggttctgttggtttagatgttgttgagcaagttgtacgtgaatatgtcgggcaattaaagccagcagaaactttcgtgatcacaactttaattagccgtattaaagaactggttagcgtggttgatgtacagatcacacctaataccaatcaaacacctacaaataccaacctaattactggttggcttcgaattggtaatttgacggtggattacgcatga

SEQ ID NO: 60187 - DNA, 363 bp, Acinetobacter baumannii
atgggaactattaatttagaaacgaaagattatgtactactcagccttgatcaggcttttaaagatgatgtggtgcaggctgtttgtcagcgtttaaacatacatcgtcgcaagtactggaaggatccgaatcttgggagccgttcttacacacttcgtcgttctaaagatgtgccacgtattgtgcaattagaacaacaatacgctgaagaagcattatctgacttagtgccagatcgactcgcttcagttgtagtaagtgctactcaaacaatgcagagccaagttgatctgcttatcgaagtaaccaagctcactggcgaaaagcagacaattccatattttgtggctgtaggtggttga

SEQ ID NO: 60188 - DNA, 480 bp, Acinetobacter baumannii
atgattcagatggtgcagcgccaaattaacaaggctttaggccaaatcagacagtcattccaaggcattgtggcgcgtggtggttcaaaagtacttcagttaacaggtttacctgacgaaacccttcaggaaatcgaattatttcagcaagtaggttttagctcttacatacctgaaggctcacgtgttgtggtgcttccgcttcagggaaaaacttcacgctcaattgtcattgcaactacaggtggcactgtagttatcaatgtttctgaaggtgaaacctgcatttacgatcaatttggtcattcaatctggctcaaaaaagacggcatcaaaatgaaaggaaatgtcgacgtagatggctatatcaaagccacagaagacatttcagataaaacaggatcaatgcaagaaatgcgtgaggtttataacgaccataaacatggcaacagcccaccaccaacagaacctatggagtag

SEQ ID NO: 60189 - DNA, 1056 bp, Acinetobacter baumannii
atgcaagataaccaaggcaatgaaatcaagctggtcattggtggatacgagattgcaggctggaataatgctgttgtagacaatcagatcgatactccagctgagaactggagcctgaatctttttcataaaaacggtcagccattacctgaaggtatttcaggtggtagtcctgttcagctttattttgcgaatcaattaattcttacatcaattgcagaccgagtgcaggaaggaattaaccgtgacggttacggccttgagatatctggccgtgatcttgtaggccaattaattgattgctctgtgcctatgtttaatggccgtcaaattactcttgaagagcttattggccgctttattttaaatggtgaccttggttcactcttccacgacgtttctattcaaaataattcttggctgaagaacaaagtatcaatagagccttccgagtcattgtgggatgcacttattaaagctgcacaggtcacaggtcaacatgtgtggttagagccagacggcaagctagtagttggtgatccattcgcaaatccgtattacgttaaaactccattaaagttaattaaacctttaaacaacgataacaacgttttaagtctgcaatacacaaatgacgtttcaaatgtttttagtgaaatcaaagtgcttagtcaggatggtaacggtcaacacattctttctgaaactacagcaaaaacccaatacagctttaatcgcctgaaaatagttactttgagtgatgctgaaacacaagctgaagctgatgcagcgcttgagaaaattaaaaaagataatgattttgaagcaaatacattgattgctgttgttccagactggcagatcgatggaaagctttggtctactggctggtatgtaaaccttgaaaccaatgctttaagccgagctaccgcgaaatgggctgtggtgggctgtacttttaatttatcgcgtcaagaaggcaaaaccaccaagctgctgctaaagcgccaaggcgactgggcaaatcctttaattttaaaggagaaaaacaaatga

SEQ ID NO: 60190 - DNA, 1173 bp, Acinetobacter baumannii
atgggctgggatactgatcttcaagacgcaagctttcgtggtgttcattttgaatgcacgtctgtagacgatggtatgtctaaaacgcttgcaatcaaacaagctccatattcaaacaaagcatcaattgaagatatgggtaacgaaccacttcgatattcaattaatgctatttattctggatctgactataagcaatcgatggatgcgttaattgccgcactcagctcgactggggctggcgaattaattcatcctattcacggcattatgaatgttcatgtgaactcgtaccgtattcagcatgatgccaataatgtcgatttctgttctattgccattgaatttgttgaggctgaaactaaagaaaaacctttatttattcctgtttctacccctacaactattgctccaagcaagattgttgatacaccgaccagcgcactagaaaaggctctagataatcttaaactctctgataacaacaaactgtttgaaacagtcaatcgcatccgcaatggcctagaaactgcccgtaaatacatgggtattgtcaaagaaggcgtagaggatattttgtcacccaaagattgggccgtgggattagttgatgacattaccaaactagtcacttttgacaccaatatttctgctatctctcagtggcgcgatgtcattaaccgtgtgaaccgttttgaaaaactttttcagaatgatgagtctccagagttacaacagacatggcgtgcaacctatatcgccagcaatattgctgttgctcaacaagttgtaagcactacacgtaaagaaatggctgaaaacaccacgataagcttcaatccgatggagcttgcagtggtccgtcaaagtgtccggaaagcattacaacgggctattaatgaagagcgtgaaggttcttcatttgaaaatattgctcagattcaggtttataaagaagccgctgaccaaatacaccttcagattcaggagttaatagaaacacgaccaccgattacgaaagtacgtgtaccagtaccatgcacattgcattggcttgctcactatttgtatcaagacatgagccgtgcagatgaaatcttgcgtctaaatcaggatttgattaatccagctgtccttcaggtaggtatggaggtcacagtttatgcaagataa

SEQ ID NO: 60191 - DNA, 2121 bp, Acinetobacter baumannii
atgagcggaagtaattcaactgtctcacttacattgcagattaaagggcagcaagcttttcaggaaatgaatcgcttcaataatcagcaaatccgtgcaaatactacaatcaatgcacagtggacacagataagttctactcaggctagatttgtgaacggtgtaaaagctggtacacaagccactataaatacggcccgtgtgagtgatcagttattgcgtaccaaccgtatgcttgagggggttttaagacagcaatctattcagactagaattcaaagccagctttataagcagcaagtcggctcaatgcagcaagtggcaaactgggcaagacaggttgaacaatcaagtaagcgtacacatcagtcaacgcaacaaactatgtcattgtggcagaaaggtactgctattgctggtggtgcaatggctggtggcatgtacttctctaatgctttacagaagccacgtgattacgatcaacaactaacatacatcgcagcaactgctacaggtggtcaaggtatgacaccagaggcacgtttggcagcgcgtggtcagttaaatgaatatattaaggcagcagttcgtagtggcggtggaacgcgtgaggatgctgctgaagctgcaaatgcattaattgcttcaggtaaatatgaacttaacaatgtagctccagcattaaatacagcagttaaaacggcctttgcaacaggtgcaacggccacagatgcagctgctctaacaacacgaatgcaagactttggcattaccgatttacaacgtggtcatgatattgcagtgcgtggtgggcagttgggtagttttgaatataaagaccaggcgaaatggttggcccaacaaatggctgctgcccgtgctgttggatatagtggtgaaaaaggttttgtagaacttgtagctatgaaccaagttgccatgaaaactgctggtactgctgacgaggctggcaataatgtagtcaacttgcttgcgaagttgtcaagccgtgaatttagtaaatcaattagtgatgcagttgttgcacaaactggtgatcctacaaaatcggatggcaagaaaaaacccaaacaagtcttcgattggaacacttactcaattcaacagcgtgagcaaggagtctatggcgtcgaagcttttgtgaaattgttggagagacagcttgctggtaatgcccaatatacaaagcttcagaaacaagcttcatcttctgattcagcagcacgtaaagctgctttggaagatatgagtaatattgctatgggttcagaaattggtgagattattgctgatcgacaggccttaatggcagcgttaagtgttgtttataacaaagacactttaagtgatttaagaaagcaactccctaatgctgctggtacagttgctgctgattattcaatggttagccagacagaatgggcaaaagatcaagcattaaatcaggaaaaactttttgcacagtctaaagcatatgatgctgtgtctggatcattgggcgatttcaaagaaacattaattaaaactgcttcagaaaacgaaaatttggctggtgttacctatggtgctgctgtagcagttggtggtcttgctttagcagctggtgcagcagctttgactctccgaggtatgggtggtggtaaagtttcagatctgcctacagggactagaggtggtttagcttccaaagctacaaacgcagcaaaaacagcaggtcttgttggtgctgcttacactggctttgagttatttaaacctattgatgatgctggatataagactgtcagcgacctgcttgcaaagatcggtattggctcaggtggtgagcgtccagactttgtgcagcaagccattgagcaaagtaaagcccaacaagcttcagctgaagaaaaaagcagtcaattaattgccgagcaacaaaagcaaaatcaattgagtcaagaaatgattaataggattaacgcattaatcaatgtcactggtcaaaataagcctatggtatttaatggcggtggttcacttcttgatgccatttcccacaatgcagcaactcaagaagcaagacatggtgctccgccattctatcttcagaaaagataa

SEQ ID NO: 60192 - DNA, 198 bp, Acinetobacter baumannii
atggctatgggtattccttatggagaggcaattaatttgcctctacatattgcattagcttttcttagcaatatgcggccttcatcccctcaagtattaaataaggagcctgaagtaccccctcaaacctcagcaaaaacgcatgcaaagacttatgtctcaacagtgcgtaaacattctaagaagtcacaggattaa

SEQ ID NO: 60193 - DNA, 312 bp, Acinetobacter baumannii
atggaaaaaatctttattgaagatgatttacctgttgcgattgtgttggatcgtaataagaaaaaaattaagtgcaccaagtttattatttccgatttgacagcacttgaatatgtggaagctcagtcgaaaatcactggactgcaatatgtatctatttctgatgtagttgcgatggttaagttaattgattcaaatggcaatcaatatgaacctacatatgatgaaatcgcacaaacatcacaatttaatttaacccatttcttcgataaaaaggctgaacttgaggcaaaggtgaaagccgcgaattaa

SEQ ID NO: 60194 - DNA, 378 bp, Acinetobacter baumannii
atgtctgaagatgcagttggctcaattgtaatgagctttaacgggctggattatgatgtttcacggcttggtacaagtattacgactgggaatcgtccaatcgctacgatgaatcgacaacaacgtgtgaaatataaatcccgtggtattacgacttatgaacttactgcaaccgtagtcattccagatggaaaagacacggtgcaatggctccaagtggatgatgcccgaatttcaatcgagtctccttcagggaattatcgtgaaactttcattgactgtaatgtcacgtctgtgggtgctacttatgacttaaatggcgaaacagtacgtgagcttcagttgttctgcttagactatattgacgaaacattgtag

SEQ ID NO: 60195 - DNA, 810 bp, Acinetobacter baumannii
atgactcttcaaaatacactcgatatcatcgctccacttggccacaccatcattgctgtatcagcacctccagctgctggaactgatacagttgcatggattgatcatttaacatctgtaagtgatgccatcaatcaaaaaccagcaattctggtggttccatttactgatattgttgccgctgaaacctttgcagaccaagctcctgtaaagacttgctaccgtgttgtggttgtttgctatcacggtgcaacaggtcaagaacctgaacttgcagcagcaatggccgcagctttggcagactcaaacgatccagctttaccattcaacggtgtaaacctagaaggtgttaaacctgtttcagatgagtacaagctaaagtttgaacgtattaatgctgccttaaacaaaggcgtttgcatgatcgaaactggcgctgatggtaagcctgaaattgttcgcgcaatttctacattccgcgttaatccagactcaggtgatgcagatgacatcatgctggacattaatggcgcgctggttattgattacacccgtaaagttattcgcacggctttgcgtaaagaacgtcgccgcaaaaatacagcagctgctcgacgtaatgttcgctcggttatgttggctgaacttctgaaacttgatcgggctgaaatccttgaaaacgttgaagcgactaaggatcaattaactgtagtgcaaaacgaaaataacaaaacttgggccgttggaaaaattcctgctcattgggtacgtggtatgcatgtggtagatgcacaacttgatgtctattaa

SEQ ID NO: 60196 - DNA, 2616 bp, Acinetobacter baumannii
atggctcaacaaatcgtaattgaagtgcctggcaccaaaatcagtgagcttgaaaaaacttctagtgtctcacgtggcgatgtaacgccagtagtccaaaatgaagaaacaaaacaagctgatattgggcaaatttcggatttcgttaagtctgagctaggcactgctgctttaaagaatgaatctgattttgctacaccagctgccgtcgctgaagcaagtcaagcaagtcaaatgcgagatgatgctcaaaacgagcgtatcgatggtgttgaatatggactaactgcaatggctaatggagcagataaatcatttgctacttatgctcaaatgattgcctatgttcctcctgaggcaaatgtctcggtacgcaataatgatcatgatcctgaattgagaggtacatatatatggaatggtgaatcatatattcccggctatgatcctcttgatgaagcaatggaattcgcaaataagaaaacgcaagaggcaattaattttaccaatagttctgtaagtaatttatttgtagaaggaaagcctagtgtacctattcaagcaaacctaaattatggatgggcaataaatacagataccccccaaagttcaattttttttccaacacaacataatctgcgtgcatatctaaaaatagatgttagagatgtgcaaagtttagttgtaagtaatgctacatcagcatggagtggatggcgttgggtatttcgcactgctgatgatacttttatttcaatgagttcgggcattggtaatggtacgtacaatgttccaactaatgcagtatgggcatatagaacatatcaagtaggcgatgcgggtgcttatgaaaacacaaatatagtcattcagaaaattcttaaaaagaatattcataatgaaattgaagaagcattaaaagagaataataatgcattcggttctgagctaagagaatatgcagatagtttaattgagggtgaattagaagttggtattagcttgaatgccattgcaggctattcagtcgatacaactcaaggtcacttgaatatattaagtccacagaataatgatattcgtaaatatattgagcttgatgtaagtaatttttcagtgctgaaagttagaaattctttgccagtagattcatggtattgggtatttgtaactaacacaggtgaaaaaatactgtccaattttaagttaaatggtgacttctcaattccagcaaatgcagttaaagcttatagaactgtatattatgaaaaagctcccactaaatatgacgatttgtctaatgggctaactataacggctataccacgaaaactgcctgtccagccccaaattacgtatttggcacaacaaatttctgaaatcttaaatagtggtggtgcaaatttagctgcgtatgttgctctatcatccattatcaaaaaaatggaagaaatgtttgagcaaaaaaactttatttctccaaatgactttgctggtttaactcagtttgagcgtgtaaaaagcgctattgaatttgttcgacttcaaggttatggcattgttgaacttggtattgacaaagatacgaatacaaatttatggatattccctgaagccttactactaccaagtaattgctggatatttattaataaatcaatagtaaaacgtggtgatggcgtttttgataatgtttttaggaatgatgggattattctagataatgacccatttaaagttgctaaagagttaaaacaaaacgtcaatattcgtatttttggcaatgataagaccgattcatttattgatggaaatttattgaacgcacgaacagctccaaatccaattacaggtggagcggctgagccgtggatttcagatttttttggatggcgtgcaatttcagtactttttgcgaatacaaaagcacatagtgtctacaatctaagtttcattaatgcacaaagttggaatatttcaaatgagcatgggtgtgaaagctttagctatcacgacttgtctttttcatcgactgtaaaaaatggtgatggaatcaatatccgtatgggttgtaaagattttgaaattttcaatattgaaggaaaaacatcagacgatactatcgcgtgtactgcaattaaaaattttcaaagtgtttggccaactggaaaatatgtttatccctcacaaatcggtggttatgctgatcgtggttttggctcggatatttcaaatggaaaaatttggaatattaaggcaagttcagcaggcgggattcgcttattgttctcaggcggttcgaaagtacatgatattagtattaataaattcactgaattagacgctaaatgttggtactacatgctcttaattcacacaggtggagcttatggtagtgctgggcaaatgggcgattgtttcaatataacagttaataatattgattcagaattaacggataaagttgtaaacctcgatggtccacttaaggattgttggattaacagtgttacacaaaatctggttacagaaactccagctattcttaaagaagcctcatatgttgaggaaaatgtaaaaatctcaaatatttatcaagctcagggatcaccataa

SEQ ID NO: 60197 - DNA, 348 bp, Acinetobacter baumannii
atgtctatttctgcaaatattaaagttccagacgtatacaccagcgtcaatatcaatactcagcgtacaggcttgcccctaaacgatcagcgagttttatttgtgacgctggatgttttgtcagaacaatttaaacctgttgatgtctatgacaaggctgatgctgatgccaagtttgggactaattctcaagctgggcgaatgattacagctgctgtaaaaactaaccgaaccgttaatgtgcaggctgtagcccttgctgaagagagtgtacaaacacaagcggctttattagctgaggatagtaaacctgtgcttggtgaagatggcgctttaattgaaccataa

SEQ ID NO: 60198 - DNA, 612 bp, Acinetobacter baumannii
atggtaaatcttgaccttggtattgttgtgcaaggcatgaaagatgttatggcaaaacagattgaaactaaagcatggccttggatacgtgaaatcaaaacctatggcggtgaattcgatgatgaaactttagcttttatcgatacatttcctgcaatctgggtgacttttaaaagttcaggttcacctcgcaaaattagtgagaacaaaactgtttatcccattaatttagttgttttagttggcgcaagatcagtacgtaatgaagaagctcaacgcttaggcggtggccgcgatatcggaacttttaagatgttgagcctcgttcataacttgctcattggaaatgatttatcaagtgtcaatgtgaaaggtttagcgccattagagctaggccataccagaacaatttttaatacaacaacacgcagacagtctgtcagcgtgctctctcaagaattcaatacccaatacaccatcacggcttctgacagagaccgtgaagaagctgagactgttgacgatctgctgggtgttcaagtcgattattactttcaaccgaacgacggcattgttgatgcctcggatcgtgttgagtttcaggaaaattaa

SEQ ID NO: 60199 - DNA, 744 bp, Acinetobacter baumannii
gtgcaaaattcgacaccgacaccgacaccgacaccacaaaatcaaacaccgcccaaaacacctatttataaaacgtgggtcttttgggtagttgttttatatttgtctttcattattttatacaccttaatattttgcttaagtgagggtgaaaacgttttactcccttcaaatgaattaggtgactttctagcaggtgcttttgcaccactagcttttttatttttaatcttgggatacaagcaaaacaatgaatcaatcaggattcaaagtgaagagttaagagcaagtactgaagcactgcaactacaagttgctgaaatgaaggagtcagttgatcaacagaaaataatggcgcaactacagcaagctgaacttgaagataggcataattctgttgcgcctgtgatcagttttcaaggttatgtcaatgtcacagctggcaagattgaatacaggttaatttttgataatcaaactgaacatcctgcaagaaatattattattgagtatctccctaaccaaacccaaagctttgaagttttcccgaaaggtcatcatcaagaatttaattcaccatttactcctgttgaagatgcgctttacagagaaaataaagatgtagaacgagaaattagaatcgaatttgaaaacgttttagggcgtaaatatgagcgcaaatacaaagtgcactcattttatgataatggaagaaggtactctaagactgaaagaatttcctaa

SEQ ID NO: 60200 - DNA, 345 bp, Acinetobacter baumannii
atgagccaatggaagcgaaattttcgacgtcagttagctaaacaaaatgctgtaaaaaatcagcttgtggctaatgaatcccaatccattcaaggtgtaccagtcaagctcaaaaagcgctggatagtagaaaattggcgcagtggttggttatggctgtccaactggttcgttgcattaattgcatacgttcaaatttacggtgttcctcctgagttgattcaattattaccaatggcaacccagcaacgcgtaacagcagcattggcagttttggcttttattggtcgatttatcgatcaaaaccgtccaaagcctttgccaccagttgacgaggacaattaa

SEQ ID NO: 60201 - DNA, 609 bp, Acinetobacter baumannii
atgttgaaattattggcagatggataccacctagtcgcgggactttctattaatatgaaaaatttaattactattgctggattcttattattggcaggctgctccactcaaaaacaaccgcagtcagaacctccttatgtgaaacaaaattatagtgagtctgatcctgctgcgaaattgagtgtttctcaatttactggtgtagttaaaagtatttatcctgcttatcaaatcaatcactcaaacgatggtggtgaagtaaaattcttaccaaatgatgtcaaagcagatactaaatttgtgccaaataataattggtacagtattaaaattatcaaagaaccaaatactgaaaattggaaaggtcttattgtagaagtttttaataaaggctcatttgaagaatcaaaagctgttgctgcaaaagactgtcaaaagatttttggaaatattgataaccgtgtacctgctgtactttatgaccttgaaaatcggttaaatcaaagtccaaatgcttcaatctctaaccgtcagtatggttatactttccacttagatgcaagtcactacaatcaaggttatccagtaacttgtatggtaagtaactag

SEQ ID NO: 60202 - DNA, 369 bp, Acinetobacter baumannii
atgaaaaatcttttcaaactttatcccactcagtcccatcttatcccacaaaatcccacaattatctcatcactcttatatatttatattattaggtatcaaattggcgtactcacccctattgcaagtggcaagcttagtggagagagtattttaaaatcctttattagttttaaatctttagtcgctattgcaattggtctgctcgtcgcgtggctaggtggtcgtggtgtaaaacttatgtcgagccaacctgatgttgtggcaggcttacttattggtacggttgcaggtgtagcgttactccgtggtgtacctgttggcccgctgattgcagcaggtctattatctttatttataggtaaataa

SEQ ID NO: 60203 - DNA, 1059 bp, Acinetobacter baumannii
atgaaagttttagtaacaggaggagctggttttattggttctgccgttattaggcacattatcaataatacccagaatcaagtattaaatattgataagcttacttatgctggaaatttagagtcattgacagaaatagaccagtcagatcgatatgaatttaaacaaatagatatatgtgatgaattggcactaacaaatgcttttgagcaatttcaaccagattttgtaatgcatttagccgctgagtcacatgttgatcgttcaattgatggacccgcagcatttattcagacaaatattgtaggaacttatgttctattggatgtggcgagaaaatattggaacagtttggcaccagcaaaaaaagatatatttcgcttccatcatatttctacagatgaagtatatggtgacttagacgggacagataatttatttactgaaaaaacgccttatgcaccaagttctccttactctgctagtaaggccagttcagatcatttagttcgggcttggcaaagaacttatggttttccagcgttaataactaattgttcgaataattatggaccttatcattttcctgaaaaattaattcctttaattatattaaatgctttagataaaaaaccattaccagtatatggagatgggagccaaattcgcgattggctttatgtagaggatcatgctcgggcgttatatactgttttaacgaaaggaaaagttggagaaacatataatattggtggtcataatgaaaagaaaaatattgaagtggtaaaaacaatttgttcgcttttagatgagttacagccgttagataatcaaaaaacttatgaatcactaattacgtttgtaaaagatcgcccagggcatgatttacggtatgcgattgatgcgacaaaaatcaaaaatgacttagggtggtcgccacaggaaacatttgaaactggtatccggaaaactgttttatggtatctgaataatctggactggtgtcgaagagtgcaagatggcagttaccaacgagaaagattgggggagaaagtataa

SEQ ID NO: 60204 - DNA, 858 bp, Acinetobacter baumannii
atgaaagaaccaatttatgtaactcaaccattattacctgatttaaaagattttactccttatcttgaacaaatctggaaaaataaagttttaacgaattgtggcccattacatcaacaacttgaacaagagctttgcgaatatttagatgttccctatatatctttatttaacaatggaactatagctttagttaccgctatacaggctttagggcttgataaaggagaagtaattactactccttattcatttattgctactgctcattcaattgtatggaataatttaacccctatattcgtagatattgatattaaaacctctaatattgatccttctgctgttgaagctgctataactgataagactgtcgcgatattacctgtacattgttatgggattccttgtaacgttgaagagttacaattaatagcagataaatataaacttaaattattatatgatgccgcccatgcttttggagttaaatataacggtacaagtttacttaactatggcgatctgagtgtattaagctttcatgcgactaaagtttttaatacttttgaaggaggggcgattgtttgtaaggacttagcaactaaacaaaaaattgatcgattaaagaattttggtatcgtggatgagagtaatgttgaagatatttcattaaatggtaaattaagtgaagttcattcggctttaggacttttacaacttaagactattgatgaaactttatataaaagaaagaaagttgatgaactttatcgtaacttgttaagggacgtgaaaggaataaaatgttttccacgaatccccgtagatatagatctgtctcttatacacatctga

SEQ ID NO: 60205 - DNA, 273 bp, Acinetobacter baumannii
atgtacttaaaacttattgatcaaactagtcactgtcttctttttttggaagaaaaccattttaaatattatttactgaggaaaagtcacttagatgaagatggttttttcaatgtttttacgaaaggtgaaaaatattatgtgactattggtatgaaagaggtaaatattttcttaaaagggcaatatgctatatctcgacctattgttaaatgctcttcggataagcagctcattgatgatttacttagtagtacttttggatttttttga

SEQ ID NO: 60206 - DNA, 222 bp, Acinetobacter baumannii
atgaattttaaatgctttaactctaggaatgttaggtgccgaaaatatgaatatagttttattgatgatgaatttttgatattgctttatgtcgatagaagttttgatgagattgatgccatgaattcagaaatatttagtaaatgctatgatgagggcttaattgatgaactgaataaactttcatattttattattccttatgaagtgggcgtggattga

SEQ ID NO: 60207 - DNA, 744 bp, Acinetobacter baumannii
atgatcgcattcaatcacgttgttccggtacttaatctgtcggtgttcaacgtcagacgggcaccggccttcgcgtttgagcagagcaagcgcgcgaccataggcgggcgctttatccgtgttgatgaatcgcgggatctgccacttcttcacgttgttgaggattttacccagaaaccggtatgcagctttgctgttacgacgggaggagagataaaaatcgacagtgcggccccggctgtcgacggcccggtacagatacgcccagcggccattgaccttcacgtaggtttcatccatgtgccacgggcaaagatcggaagggttacgccagtaccagcgcagccgtttttccatttcaggcgcataacgctgaacccagcggtaaatcgtggagtgatcgacattcactccgcgttcagccagcatctcctgcagctcacggtaactgatgccgtatttgcagtaccagcgtacggcccacagaatgatgtcacgctgaaaatgccggcctttgaatgggttcatgtgcagctccatcagcaaaaggggatgataagtttatcaccaccgactatttgcaacagtgcccgccaaggtacgtctgtacgggcgcatcggtcaggcgctgatcgacgccaagcaatcaggccgcgatgcgtttgccgccatcgaggccgtcatgtcctgggattcctttgccgagagcgtcaccgaggcgcagaagctcgcgcaacccgatga

SEQ ID NO: 60208 - DNA, 300 bp, Acinetobacter baumannii; identical to SEQ ID NO: 49175

SEQ ID NO: 60209 - DNA, 468 bp, Acinetobacter baumannii; identical to SEQ ID NO: 46236

SEQ ID NO: 60210 - DNA, 933 bp, Acinetobacter baumannii
gtgggtactcatgattcaggtaaagacgtaatcgttgcacaagcacaagatgaattaaataaaaaaggtggttcaattttaattgaccaatcaatttttaaagttgcggatccgcaacaagataaagaccattcaattcatcaattgatttctactattagtaatgaaaaatataatttgcttttaaatcatgaatttaaaaatgaaaatgttttaaatgatattactgaatcgcttaagagtaaaaattatacgattgaaatcagagcagtttcttcattcccccctaatgaaaactctttagataaaaatacacatcctgaaactttaagagcaatagaagaattagaaaattcaaaagctgtggatagttttaaagtttatgatcgtgttggtaaagaaatttactcaaacatgcgtaatgatgaaggggtatggaaccaaaaaaaagctggtttaaatatctataatcaagaaacgaataaaactttatctaaaacggaggctgattataatttgctgacgcaacaacaattaaaagaaattgaaaatgctcatctaacaattaatccacgtgaaaaccaaaataaaaatataaacgggaaatcagaaaagaacttagaaataaatttagacccaccaaagattattaaagatcctggtgcatttagagatgtagtacatggtatcgtgacggatgagtctgaaaaggattttacactcaaaatcaataacttggttggaataaaatacagtaaagatcaattaaaggatcaactcgaaaaagacaataacttttatcgtggacgagagttatttattaatcatgctggggatttaccgcaattaatgaatgaaaaggaaatacaagattttcatattactcaagaacaaagcttacaacatgatgttggcgtagaactagacagataa

SEQ ID NO: 60211 - DNA, 414 bp, Acinetobacter baumannii
atgagcacttcacgagtaaagctaactaagtcatttatcgatcaacttgaactcacaccggctatttatcgtgacagtgagattattggctttgctattcgtgtaaataactcttataaaacttacattgtggaaaagaaagtaaaagggaaatcaattcgttgtaaattaggggattacgaaaaaattactcttgaagacgcccgtatacttgcacagcagaagttaaaagagttaactgactcaaactctttaagcattaaaaataataaaatattaaaaaatagtttaaatgagaaaattgaccagccttatctcaaagaagctttccaagtatatataaatcaccacgagttaaaagaaaggacattagcttttcaattaagtattatcaaaataaaaattgtgaagtaa

SEQ ID NO: 60212 - DNA, 501 bp, Acinetobacter baumannii
gtgtctggccacaatgccgcaattacaacacatccatacccgaccaaagtagaggtgagtacaccccaaactggtacaccacgcttattttttctagctaaccaacttggagcttcattatttgaacttaatacatgcagtaaacgagatgcagtgtataaacctgcgttcagtacagataatacagcaacaagaattactactgtcagcattgtaccagcaccaggaataccaattttttcaagtgttgctacgaaaggtgatttccctggaattatattagtccaaggttgtgcaacaacaatgaacagtgtcgataaaacgaaaaagactaagatccgcgccattacagtatttacggcacgacgaatgttttgtgaaggattatcggattcagcagcagcgatagtagcaacttctactccactcattgagaaaattactgaaactacaccagagaatagcgctaatgtgccatggggcaagaaaccgccatgctga

SEQ ID NO: 60213 - DNA, 651 bp, Acinetobacter baumannii
gtgaaaaaggcagatatagttgttctattactagacccaaaagacttaaaggctatactggcgcccttaaaaaaatggttagctgataaaactattgtgtcgatgatggccggagttaatattaaacaattaatgagtattacgggttcaaaaaaaattatcagagtcatttctaatccccctgtattaacctatacaggtactcatgtgttaattggttcagactatttagagcctttagataaagaagtgatagaaacaatttactcagcaacagggcgaacctattgggcaaattcagaatcccaaagtgatgcgattattgctttatcgggttcaggaccagcttacttcttctatattctcgacagtatggtgaaaacaggggtgtctatggggctagataagcaatttgctttagatctaatacttcaagctgcatcaggcgctgtagaaatggttcgtaaaagtaatgttcagcctagtgagttatgtggcaaggtcacattagcgaatggtattacagagtctgcattacgaatgtttgaattaggcaacctctctgatgatattcggctggctttaaaagcagcttaccatcgtagtaaagaaataagcttagaaattaatgcagaaattacgagacactag

SEQ ID NO: 60214 - DNA, 297 bp, Acinetobacter baumannii; identical to SEQ ID NO: 52985

SEQ ID NO: 60215 - DNA, 219 bp, Acinetobacter baumannii
atgaatgcaaaatttcaactcattaaagacattaattataaacccaaagactcacaacttggagtcataattaaaaaggtaacatcagaacaaaatcatactggttttgtatttattgaagataataaattagtactagctcattttggctggcatgaaacctattttttcaaagacgtaatgactctgacggttatgctatgtactggtttgatttag

SEQ ID NO: 60216 - DNA, 372 bp, Acinetobacter baumannii
ttggctttcaatgacaaccagtctgcttttgagtattcaattaaatatatggacaattctattgttaaagataggcctgtattagctttgtcctctcaaaagatactcaaaccctcagaaccaataatgattaaagttgctggtgaccctcctttttttgcccacgcttcaactcaatttgtaggtgactatacaataaatgagggagatcttttagctgttatacctattcaaaaggtagagaacacaacaagttacatgaaaggtgatgaaagaaaagagtggcaatttttaattgtctcagtggtgagtcctaaatatcacaccattaaaaacatgtggtctataaaaaaagattttttaagacaataa

SEQ ID NO: 60217 - DNA, 246 bp, Acinetobacter baumannii; identical to SEQ ID NO: 46546

SEQ ID NO: 60218 - DNA, 456 bp, Acinetobacter baumannii; identical to SEQ ID NO: 57100

SEQ ID NO: 60219 - DNA, 285 bp, Acinetobacter baumannii; identical to SEQ ID NO: 57978

SEQ ID NO: 60220 - DNA, 324 bp, Acinetobacter baumannii
atgaaattttcatacaaagaagaagctttaaagttaaataagaacttagtttgtaaaaatattggtgctaataaatggcgagtatttgatggagataaagaagtctcttatgaagcatcatctcctcaagccgcttggaatcatgcatatggaactttaagctgccctttcagtattggtgaccgagtagagaatttagaaacgggagagatatttacagttcaaggttcttgctttggttacgtaaataacttatccaatgaaaataaaaagttccaaagtttaaagccttgggattatgaaaaatataaaatagttgggtga

SEQ ID NO: 60221 - DNA, 225 bp, Acinetobacter baumannii
atgaagactaagaaaaaatccccatacattgattatcttaattgtgaaatctttgaaggcgacataatacagcatccatcaggtgaaaaaggaattgttgtgtttgaggaaagaacggaaaacaattcggataattggcttatccaatatgaagatggaattaaatcacggctatgtcttcaagttggtgataaaggtcaagctgttgtggtaaatgcacattag

SEQ ID NO: 60222 - DNA, 270 bp, Acinetobacter baumannii
atgagaatattaggatttatagcctattgggccttagctattacacagtttctaggaatttatacatattttgggaatgtcctagattggaatggttttatatcagtaattattgcactaatacttggtggtatcccagtactaggaaccatctttggtgtgcttggcgcaacacaaggttggggttggggattaattccagcactatgtttatatttatggcctttcattatttttgggaccgtctatttattttcgtctcggaaataa

SEQ ID NO: 60223 - DNA, 840 bp, Acinetobacter baumannii
atgcgtgagttcacctttgaagacgctttacgtctgattactaaaatgcgtgggttttatggaaagaaattcactgatcaatgggcaggtgtagatcctaaagatatcgctgaatcaatggttgagtgctttcaaggattaacagcagaagatttcaaacgtggtgtaaccaagatgatgaaatcaacattctgcccgtcaattccagagtttcgctcatggtgtgagcctaaagcatcagattggttagatgctcatgaagcttgggcaatagttaaaaactcaatcgaatatggcactggtcgtgaaatgactgtggtgtggactgagcaagcagctaaagcattcgagaagtgtgctgacttggttgctactggcgacaagttccaattggcagaagctaagaaaatcttcgtgtctatctacgaacgcttagtgacagaagcaaaggaccaaggactaaagccagtctacaacgtgagcttaggtgtagatccagaccagcgcattactgcaatcaaacaagcagaggttgcaggctttctctctacacaagaaacacaacttcaacttgagcacaagcaaaccaaggaagagcagcaagcagatgcagagcgatacaaaacgattgcacagaaagcaattgcggagttgcgcgaaaaactaaagatccaagcgccagtaaacaaaatggctgaggaaattaagcaggttcaagaatgggaactaaaaccagactcagaatattgggcagacccatttgatcaaaaagaacagtacatcgaaagcttaagagcagaaggcaagccagtaccttttgcattacgaggtgcagcatga

SEQ ID NO: 60224 - DNA, 660 bp, Acinetobacter baumannii
atgatccatgaaaatatctacatgcatgatgtaatcgatatattcgatgtttatcaaaaagacgatctgcttaagaaatccaaactaggactcatgaaaaaatgggatactttctcaattatagccatatttttatccataattgctttaatcggtggttccctatggttagttggtttagttagtcatgaaaaatctaataatgttgatactgcatttatgatagcaattagcggacttgtatcgatcattattaattactatttaaataaaaaaataacagaaataattttaagaaaagttttttattcttcaaaagaaaaagaatttaaattatctagaccaatgtatattaacttagtattactttcagattacgaaagatgctctgcccttattgaaagagaaataaccgaagatatgtataaaaaggtaacatatctaaaagaaaaatataatctcccattaaaaaaaccgctcgaaaagatcatgatagaaagaggatttatatcatattttgactatgaatttttatttattgatcatttttacaaaagattcaaagacatggaattagaaacaataaaagaatcaaagatcttagaagcaagagaatgtgtcggtgcagcctataatatcgctaatgataataaggagtaa

SEQ ID NO: 60225 - DNA, 1014 bp, Acinetobacter baumannii
ttgtatagtgagactaacagtgcaattaaagaactaactgagtgggcaactaaagaaatcagaagaaataaagaggaaggatttaaggctttagtacaactgcaaacagaagtggcctcagtagatttttctagtaaatcaaatgaagaattaatcgaactgaaatcaactgtagaaaagcaatttcaaaacttatctgaaacagtctcaaatagtttgaaagatattcaaacacagataaatacaagcagggaacagacttcagaaaatacattatcttcatcaagattagtttcaattcttgaaactgaatatgaggtcttaaaagagcagcaagaagaaaatctagaaatgattcaacttggtatggcttttggtgtaattcatcatgaatttaaccataatattcttcgtgtacgtagaggaatcaaggacttaacaccttgggccaaagcgaatccaaagcttcaagaaatatatgacaatatacgtactggttttgatcatttagatggttacttgagaacgtttacaccactttcaagaaggcttacgcgtcgcaaatctatcataacaggtgaagcattaagtttgtttttaaaggaaattttctctgaaagattggaaaaagaaaatgtagaaatgctttttactacggaatttttgaactttaaaattcaagcatttagttcaaccttatatcctgcaatcgttaacttagtggataacgcaatttattgggcaaacaaaagttcgtcattgcaaaaaaaagtaaagctacatgctgataatgagaatttatttattgccgatactggtcctggtgttccattaattgatagagagaatatttttgaattcggcttctctcgaaaaattggtggtcgaggtatggggctttatatcgcaagacaaacgctagaacgagacgggtttaatttagaactagaagaatttgatccagaaatcggcgcagtttttaaaattagtcatattgaagttgagggggattaa

SEQ ID NO: 60226 - DNA, 873 bp, Acinetobacter baumannii
ttgtcacgcttctttctgcgaagtcgtggaaatcttaaacaaggaattttctttgctaaagagccacttactggtgacaataaatgtgttgagttttggtttgaatccactggtaactgggaaaatggttttgaaattgaagattcaacaaatcaaagggatgtaagtggacaacaccgtggatatttaatagcacaaaataacggtaggtcaaataagcccgatgcgaactatgatgcagttttcacaggaattggaaatgatatcactgcttatacggaatatggctacggaacatggcataaatccggtttaaaagcatctcgtattttttatcaaaatattagccatccacaatttagaaatgaagcaaataaatcaaatattgtatcatttgcagacagcgcactaggaagtcgtactactctgtatgaaattttcaatactattgaaatacaaaatgcaaccaaggttggtcaactactaataacgcaaataggagataggaaattttctattgattgcactggatcaacagctgatcaagagctaatcattggtgataagttaatcttaaaaaaaggcacaatggaatatcttcgtgcatataatttaggagcaaccttaaattttggtttagttcccgcaaattctagtgttgagcggccaattccaatcggagtttcattggcaaactcaagagtcaatgttagtgcaacaccatctagtcctttacccgatggtctcttatataattgctttgttaaaccagacgacttatcaaatgtaactgtaagggttagaaacgtaactagttcggcaattagttctggtggagatatcgcttggcaagcgctagttcatcttagatag

SEQ ID NO: 60227 - DNA, 948 bp, Acinetobacter baumannii
ttgggtcaagaagatgacaataagtcgaagcctacaacgacatcaacagtttcagggaatcctgaccctataaaactgtcattctcacgccgtttgctgcataaaacattacagcatgcgcaagacgccgtcgggtttgctagtgatactacacgtaatcttgctgaagttgctgatgcagccttagatgctttagatcaagtgacatctcatacaaagcgtggagtggtgggcatgactaatctggcagcagggactgtcagagatatggtgtctgaaacaagtgaaactgcaagacaggttgccttaatcatggcacgtacttttctaggtaaaagtaccttgaatttgtatttgcctgaaatgctattaaacagtcaaattcgtaaacgcatagatcgttcggaaattgatgatattaaagttcaatgtggcaatgatcggtttcaggttgaaatcgatgggcactatcaccgttttctatatcggcttagtttagattttcgagtattggaatgccgcattggacaagaaaagttcttacgcttacgtcaaatggatgaaagtctggatgtgcaaatacgtcatggtggaacattatcgaattgggcggttcgccgtattggtcgagtaggttttgaagtgattaatatgttgcctattccatcgctgattaatcatttgattcgtgatattccgggtattcagcgtgatggtcatcgcatgtggttcattgaccttgagcaagcaggttttattgatttcattaataaccgctcatggatggtagaaaaacttttaaatttaaccgactttagtattctaccgggacttaatattttaagagaaagtcgtgagcttgtgcagcaactggtagatcagttcgaaataaaagggctacgtgttcaatcaggccgtctggaaattcaagttggaatcgcaaattaa

SEQ ID NO: 60228 - DNA, 663 bp, Acinetobacter baumannii
atgagaggttataccgaaatatttgaaacaatgctgaactcattacgtgtttttgctgaaagcgaaaaacctttaaatgtgaaggagattcaatatgaatttggattgcacattagaacagctcaaagaatagcaaaagctttagaagatgcgggctggattaccagtaaaaaaacacgttttggcaaattctttactgcaacagataaagcaaaggctttgtttaaaaaagaggaagaaattactgcacaaaacaatgtagttgaatttttcaaagttcatggactgaaaaaggttaaacaaataattgatgaatcacctgattgggctaagtcttattacgaaccaacaggtcaataccaagaccaagaatggtcagaagcgatgtctgtgggaattgaagacctcaaacgtctggtggagtctttggatttggttaacaattgcggtggtttggctatcgcaaataaaatcacatttcaaaaaagactgagaaatgaaaaagcaactcatttcatacaacatcctgaaaatcaaaaattaatacagcttttggggcgaaatcagcgcaaacctaaagaagccattaaattcgatttatttgaacaagccatccgcgactacgaatcaatatacggaggcggtgaatctcatgccaactag

SEQ ID NO: 60229 - DNA, 210 bp, Acinetobacter baumannii
atgaaatttgatcaatactttttaattttccttgcctcatttgccttctatattgcggttagatttttctataaatggcttacaggaagattcaacaattttgcaattattgaatggatgaaccgaggtttttcattcggtttaggtcttatggcctcgtttgttgtgattgctgtcattgttcatctattgcgaggattttacctatga

SEQ ID NO: 60230 - DNA, 228 bp, Acinetobacter baumannii
atgaaccgtcgtattaaacagcgccaacgtcaaagccggagtattagagccatgcaacagaataatgaaaaaccgcaagttttagaaacactggaagatattgaattaagcccaaattgcgttaagacatgcgcccatgaatgggaattcaatgagcgtgaatcagatcacttgtatgacgtttatgactgcaaacattgcaatgaaattaagtgcattaaggaataa

SEQ ID NO: 60231 - DNA, 501 bp, Acinetobacter baumannii
atgaacgcaaagttagattacgcaaaacgcgattactcaatgtcttattcaaatgtttctttgaaatcaaagatgcgtgaagcattggctaccgaagtcgcagattgggaagctcaaggtaatgaaattaagccgtttgagaaaactgaaaaaaatcagattcgtattaaacatggtgcagatacagcttatagaaaactaggttgtcgatgtgaaaagtgcatagcttgggctcgttcaacaggtttgttattaacaaaaccaatgaaagaaaaagccaagaaagaaatcaaacaattgaactttgcaaaacttcagcaaaagatgttgcaagcatttgccgaagattacggccaatcatgggactttttagcagcgaaagctggttatgcaataacggcgtatcagttgcgccgtatttatgaaggccagtcagaggccaccgtattagattggaacattcttaaaacggctctgcatattctggaagtagaagtatga

SEQ ID NO: 60232 - DNA, 786 bp, Acinetobacter baumannii
atgaacgcaatgtcaaaatttaattatcaattcccgcaagcggaaagtttttgtgaaacgcacaatcagcaaaaagtccgtatgggaggtcatgaaatctgtcctgcttgcgcggctgaatatacaaagcaacagaatgaacaatatgaccgtgatgtaaagcgccgtgcatttcagacacatatgtctacaggtatgttgcctgaacgtcataaaaattcaggttttacaaactacaaatgtgagttgcctggtcaaaccgtagcttttaacaaatgcgtggaatacgccgacctaatcatgaaaaacaaggtcaggaatctcgttatggttggaaagacgggtactggtaaaacccatcttgcatgtgcaacagcacgcacactgctaaaaaacggtaaaaaagccagatacatcacaagcgaagaaattgctcaaagaatcatgcagtcgtgggataaagacactaaagatgtgtcagaaaagtccattatttatgatttttctcaatacgatctgctaatcgttgatgaatatgggttgcatgaccgcgataaacgaaaagagctagtacataaagttttatatgcacgctatgacgctggcaaaccaactatgttgatttcaaatatgtctctctatgacacaactgaccgtatgggcaaagtgattcatgggcttatttcagatttgggcgaccgtttatggtctcgattccagcacggcggcttgactcaagttgaatgtgtttgggcagatgcacgtactacaggtggtcaggcatga

SEQ ID NO: 60233 - DNA, 897 bp, Acinetobacter baumannii
atgcgtgattatgggaaagtctctccacatttttggaccggatcaacaggcaaaaagctacgcgaatgtcccgattcgattgtggtggctatgtacctaatgacctgtccccatgcaaacatgcttgggctatattacatgccccttttatatgtagctcatgaaactggattgggcttagaaggggctaaaaaggggcttaaatgggcgtgtgacgcaggtttttgcagctatgacgaagtgtcagaaatggtttgggtgcatgaaatggcccgcttccaagttgctgagtcccttaaacctacagataaccggtgcaaaggcattcaaaaagattatgactcattgccagcaaaccctttcttgtcaagcttttacgagaagtatgcaactgcgttttgtatgacaaacagacgtgaaggaaaaggtactttatcactatcaaatctagccccttcaaagccccttgtaagccaagaacaggaacaggagcaggaacaagataaatctctctctcaagcgccagcgcaaaattttaaagagccggatgattcttggaaaccaaacatcgaacacctgtgcactattttgcaaaaatcaaaatactcacagcgtgttcaagaaatcttattgatggatgattacgaattccatttgagcaattttaatgctcatcacgaaacgaatcgttatctgacagacaatcagaaacacagcaagttcgctcaatggttatttgaaaagtttgaaaaacaagaaactcaaaaagctaagcaaactaaaccagcaaatccaactcaatcacaaggtggcagcgtaaatcaggcatttgatcaacaacagcctgattacgatgaaaacgtgcaaccggtgaaattgggaggtaatttcgtatga

SEQ ID NO: 60234 - DNA, 1725 bp, Acinetobacter baumannii
atgaatcagtccttgaaatcaccttaccttgaatcatcaaaaccatttaaaacgcaatttgctcttaacttcagtgaaaagataattattgatttcttcgcaggtggtggtggagcaagtacagggttagaaattggattaaatgcaccagttttcgcagctgtaaaccataatccaaaagctttatctatgcatgaagcaaatcatcctcatgcaaaacattatgtgcaagatgttttcgccgttgatccggttgaaatctgtgaaggtcataaagttggatggtttcatgcaagccctgattgcacacatcattcacaagctgctggtgggcagccaagaaaaaaagaaatccgtgatttatcttgggtagttttaaaagtagcaggcaaggttcgtcctgatgtcattagtttggaaaatgttaagcaaattctaaattggtgcccactaattgcgaaacgcgataaagctactggccgtgtagttacattagatcgaattaatattaaaggtaaaaaaagttaccgtgttgcggaaccgggtgaggtcgttccacgcaataaccaatttttagtaccaaatcaaaaattgaaaggcaaaacatggcgtcactttgtcaaacagcttgaaaagcttgggtatgtagtcgaatggaaattattaagagctgctgattacggcgcaccgacaactagagagcgtcttttcttaattgctcgttgtgatgggcaacctattgtatggccggaaccaacgcatagaagtaaaacggaacgttcgagattaatcacacgtgctagaaagctaccattctggcgtactggagccgaaattattgattttactgatttgggtaaatcaattttcggtcgacctaagccattagcagatgcaactttaagacgcattgcacgcggtctacaaaagtttgttcttgatgaaaaagagcctttctttgttgaatctgctacgccttttattagtagagattttgggacctcgacaggccattcaatagatgaaccattagccacggttacctctacatttggtggacatagtgctttgatcagcccagtagtcgcacctttctttacagaatttgcgaatgcatcacagcaacgtaattggtcgatcaaagaacctttaacaactatttgcgctcaagttaaaggtggtcatcacggtttagtcgcagcttacatgatgcaggcaaatggcggtttctgcgagaccgttggaaggtcacttaatgaccctctatcaactattactaatacgggtagccagcagcaacttgtttcagcagttttaagtaaagaaaacttaaatgatgctttacgtgtcgccacattcctaatcaatttctatggcaatggggatgcaagagatattaagtcacctctcgacactttaactacaaaagaccgcttagcgttagtaactgtttggataaagggggagccatgggtaattgtcgatattcgtatgcgaatgttgaagccacgtgagttattcagagctcaaggctttcctgatagttacgttatcgaacatggtcatgatggcaagcctttgtctaaaactgaccaagttttcatgtgtggtaatagtgtttcacctttaccaatggcagcgatagcaagagctaataatccatttttaaatcaattcgatagtccctcaaaagccccttcaaaggagataaataccaatgcgtga

SEQ ID NO: 60235 - DNA, 705 bp, Acinetobacter baumannii
atgaaagaacgtccaattttatttaattctgaaatggtcaatgccattttagaaggccgtaaaactcagacacggcgtattctaaaaaagcagccgcctgagaatatgacaagacattgctggttttcatcttcaacctcaacatatggatttactaatcagcctataccttcttataagtggtggaagattaactgcccgtttggccgtgtaggtgaccgaatttgggttcgtgaaacatgggctccagtaaatttatacggtgaaatcgctttagcttataaggctgatagtaaagtaatccgagttgaagaaaatgaaagttttctggatgaagaaggatttataaattacgacgatcctcgtctagaaaaatattcatttgctgcatgggcatatgatcttcttgatggcaaagaaggggtttggtcaccttcaattcatatgccacgttgggcatgcagattagttcttgaaataacaggtattcgtgttgaacgtcttaatgatatttcagaaaacgatgcaattgcagaaggatgcgataactcaaaaagtgaagctgcaattcaaatggggtggtatgaacgtccagttcgcgcttttagccgtagatgggaatggatatacggtaaagattcatggaaacaaaatccgtgggtttgggtaatcgactttaatgttatccaaggtggtgagtcatga

SEQ ID NO: 60236 - DNA, 576 bp, Acinetobacter baumannii
atggaaatcctgactttcaataatctcggcaaacatcaaaatggttgggcaactgtctatattgaacctaacaatacctacagtaaatgcggtggccgtattactgtgatatttgaggattatataggtactgctttcttcagccactgcggaacaaatacctttaaagagtttattgctaaaactagctctggctatttgatgggtaaattattcaatcagaataatcaaattcctgagtcaattttcatagaagatggtgatgcaattcttgaacttatttaccgtgaaaagtacggagaaattaaggttgcacgggaatatggcaatagttctttatcaaaagatgctttaagaagtcttcataatgctttgtcgggcgaacaatttcatacagtaagtgagctgtatcgacacttagattctgataaacaagaaacaatggatagcttgtttggtgaagggtggggatttgacagcacgctaaataaagaaaatccaaaatatatttacgtcaaatcaatggtggattcaatcattgccgagtttaagaaattaagcgaggtggtgtcatga

SEQ ID NO: 60237 - DNA, 384 bp, Acinetobacter baumannii
atgaatacagaaagtaatctatcacaacatccttgtgaaaacaaatgtactaagttcaatggcgaacaatgtaagacctgcttaatacatgacatagaaaaacgggagtttgatttgggtttagcgcctgaatctgactatgttaagtgccagttttctgagggtgattttgttgtatttaaaaaccacagccccttgactggcatctatcagattgatgcttttcaaccaaatgaatattactggttgactacaggtgatcttgtacacaaaaacgatattcgtttggcaactgaaattgaaattcagacaaaagaacgtacccctattgatgttttaaagcacttcaaagtggctaaaaaagcacaaagggaggtttcttaa

SEQ ID NO: 60238 - DNA, 510 bp, Acinetobacter baumannii
atgagtgaaatttatttaagtcaggaagcccaaacggcactttacaagatgatccaccaatcaccaggagtaactccttcggcaattgcagacatgcttggtgactctcataaaactgttctcaactatgcaaatcccaatatggaaaaccatttgcctagtttaaagaaggtggaagctatccttaattacacgcaaaacccatcacttgtaaaagtatgggcacatcaattgggcttcgtcttagtaccggttgattgtgatggtcaaaaacataatgaattgtcaattctggaagcactactacaaagcaatgtcgctaatggtcttgcaaatcaaaaaattgctgaagttttggaagacaacatcgtaactcttcaagagtacgaggaaacgcattctatttttcaaaaaattattgagttagtaaccgcagctgataaagccctgcaaaaaatggctaaaagccgaattcctataaacctagatatagaaaagcaaaaagcctga

SEQ ID NO: 60239 - DNA, 249 bp, Acinetobacter baumannii
atgcagaaaccgtccttaaaacagtatttctcttctttgtctgaagaacagcaaaaggcttttgctgcagcctgcgaaacgacaactgggcaaataaagcaaatcatgtatgggtatcgcccatgtaatccgagtttagccatcaatattgatcgcgaaagtaagggtcaggttcgttgtgatgatctctgccctgatacggattttgattacttgcgccgtactccaaaacaaaagcgaactgcataa

SEQ ID NO: 60240 - DNA, 786 bp, Acinetobacter baumannii
atgttgactatggaaattaaagaaatccgacgaaaaaattttgtctatatggtcgacaaactgttggctgaaaatagctataagaaccaaaaagagatggctcaagcaatgggtttgaccaatggttcttatatttctcaacttaagagtggagaaagatttattgatgattcaaaggccagaagtcttgaagaattcttcaagttaaaaccatatgcttttgatgtaccgatgggcgaaccagtacttcaagacggagttatggaaaatggtattttaagaccaagtgctaaccatatcagcaatttaggtaatgaatatttagcagaatctattgatccgtctgactttgttctagttccccaatttgatgtaaaaggagcttgtggcttaggttatacaaacgaaaatgaattaattaaaggtggcttagtatttcgcgagtcatggttacgtagtaagggcatttcacctaaatttggttgttctgccgtgatgggtggagatggcgatagtatgtcccctaccattgaaagtaataatattcttttagccaatgttactgttaagacatatgagcaagttattactggcaatgtttatgcatttattgcaaacaatgaattacgtatcaaacgtctattcaagaacttgaaagacggcggattaagaattgtaagtgataatcctaataaagatttatatccagatgaattcttgactaaagaagaattgaataatattcagatagttgcgcaccttgcttggagaggtggtgacatatag

SEQ ID NO: 60241 - DNA, 213 bp, Acinetobacter baumannii
atgaaacaaaaaactattcagagtcaaacgactcctattctctaccgcccacctacacctgaggagcaaagagttcctcgcttggctcgtattaaagcaaatgcaatagcttttgcaaaaatgattggctttgcttttttaggtttttctttctggttcgtttgcggtgctgtggctgcaaaaatcgcggcaaagtacgctacaggagcttaa

SEQ ID NO: 60242 - DNA, 684 bp, Acinetobacter baumannii
atgcctaattacgttactaataaagttgaaattacttcgactaatgctgctgaagctttggcattcatcaaaggcgatgatagtgcatttgacttcaacaaaattattcctatgccagagtctctcgatattgaatctggttcacttactgattttgcccttgcctatgcattaacaaatggtgagaagaaaaactatagtaatgagcaaatagaaaaatactttgaagacggtttttttgatccgaaaagtgaaattgcccgtagagatttagaacgtgcgcatcaatatgttggtgattctcaagaatcgcgagaaaaacttttagaactcggtcaaaaagttatttctaacgtagacacctatggtcacaaaacttggtatagctggcgcacagaaaactggggaacgaagtggaatgcttatgaagttaccaccactgaaaattctattgaatttgatacagcatgggatagcccaacaccagttttagaaaaatggattgagcaattcaaacttacgtgcacagttaaagccttcgatgaaggttataacttttggtttatcaaagaatacaaagatggtgctcttcatagtgaacggtataaatcacctgaagaccgtgatgctttagcggtagagctaaaaggctactcatcggatgaagagagtgatgaagaatga

SEQ ID NO: 60243 - DNA, 228 bp, Acinetobacter baumannii
atgacaattgctcagcctctagaaaatgaagtttccagcttgccagttgaattttttaattcaaaccgtagcaatgcttatcaagttgctctcgataaatttgaaaagccattgctcaatgcagtgttaattcaaacacgcggtaatcaaacagaagctgctgaagttcttggtattaaccgtggaacattacgcaagaagcttaaacaccacaagatattgaaatag

SEQ ID NO: 60244 - DNA, 375 bp, Acinetobacter baumannii
atgacagctaaaaagacttcattttgccaaacgcttggcaacttgcaacacggcgacaccatagaccagcttgatgaccttctaactgaagcacttcaagcgtcaaatgatacgggaaaagtttcaaaagtaaccgttactttgacgattaagccaaatggtcgtggaacattcaaaattatggatgatgtgaaatccacattacctaagtttgataaagaacctacggttcttttcactgacggtgatcagcaattagtacgtgaagatccacgtcaacaaaaattgaaacttgaacaagtttcagagtctggtccagttgaattgaaatcaattcctgctgataaaaaacaatcttttaaaccccttaattaa

SEQ ID NO: 60245 - DNA, 894 bp, Acinetobacter baumannii
atgactgaacttaaccataatattgaaaccgcatataacttaggcatgcaaagcctaaaacaagcgccaaaagttctcgatgctatcccatttgttgtgatacctgaaggaggtaaagttcataagtttgatgaggttcttgatcgtcctctaaacttgcagcaatcagtaaatttacataccgctaaagatttaatttcttatgtaaatcgctttgcagataataactctgtaatttttgtggatgttatggccggtaaagtgaaggctattcttgattaccatgaagctgtttcagttggtggatataacagtaatgccttacaacgaaattgtgctcatgtagcatacttcactgtagataaaacaactgaatttaaaaaaattgaaaattcttcaggtcaaaaattcttacagcaagactttgctttgttccttgaagacatcatgccttatattgctgaacctgttgccactgaactatacgaaattgttcaaacattatcagcgaataccaaaattgattttaaatcaggtgttcgtacaaataacggcgaagttactttgacctataacgaaacgattgaagcaacagcaggtcgtgaaggtaaattaactattcctgaaaacattaaattcggtattcaaattcaccgtggtggcgaacattatgcccttccagcacgtttccgttatcgcattacaaacggcactatcactttctggtatgacttagatcaattagaaaaagctatcgaaaaatcaatggcagacaccatcgaatatcttcgcaacggtaaacaagaagttcaagttgtcgatgaccaagaagtaattactgaacttcctggtgttaatccggctgtcactattttggaaggaactgcttcttaa

SEQ ID NO: 60246 - DNA, 297 bp, Acinetobacter baumannii
atgaaattattatatttaattttcagtgtactgatcatcataggctgttctaaagaagctgaagcaaaaaactctacggcaggagttaaagcttcaacaacgcgttctttcaacggcatgaaaacaaacagtactcgttcatatagcaaaaaaagctatgtaactgagaaagctaaacaggcacgcaagtcaaagtctgtattaagtggaaccgaatatgtgtattacccgcttggcgcttgtaagcgatgggtcacatttaattttaatggttaccgctgtatagaccgagattaa

SEQ ID NO: 60247 - DNA, 351 bp, Acinetobacter baumannii
atgaatacagttaacaatgcatttgtagactacgtcacaagtggcgcgttcaatttgaacttgagccgccgtcaaatagattgcttgaaattttatgcttgccatgagcaatttattttcactccttcgcgcagcagtcaggtccttgtagaaaagggacttattgaacctgttcctcaagaagaagctcacgacaaaatttatggttgtatgcgtattaccgaggaaggaaaacttgtctgggaattaattaaacgtgctggtcttgcagttgaattaccaccatctgtgtttatctctgctcctacagttgattttaaagttcaattaaaggagccaattcatggataa

SEQ ID NO: 60248 - DNA, 1032 bp, Acinetobacter baumannii
atggataactacaaaatcaatatcaaaaatgggttagacatctctaaggttactgttgctcttaatgatcttggttatgtacttgggaatttgccaaaagatgacatccatgtgatctacgcaatggcagataaaaccgtaagatatgtgacatatgacgatggatatgactatcacggcattgaagcaaaagatttaactattgatcagcttcaagaacttgttgtgttgaaccgggatgacgtcaaggacgctaattacctcgacaatgacggtaaagcattattcataacaagtgataatgttatgtattactggggtggcgaggggtggcttaagtcagcttataacggaactagcgcttatgagaactaccttaaaaactgtgtcaaaccaatcaatgaacctatagtacgtgaattcctagaccccactcgtggctatttatacatagctttggctgagcatgaagttaaagaaaagatgcttggtcatgagaattggattgcaattccaaagggtgctgaagactatcgtagtaataacaaattctacaaagatagtggagttcaattttattcatatgcaggtgaatggcttttatcagaacaatcaggtcgtcatcaaattttatggcaacgcactacccaaacatctgctttactgggtagtttgcaggcttttaccgcatggttgaatggttatgaggttgagtttctttataacgatcaagccaccttaattgatgctgacacacctttggatatttttttaacctcacatggttttcgactaaagcaaaagaccaaaaaaattgagcttgaaataccaagaccatttaaaccccaaaaaggtgaaaaatattggtttatatctccatttcatggcactggctatgactatcacacatacgcagatgatctggtagataagttacatattcagtatggagcctatcgcaccgaagaagaaatgaagcaagtcgttgcagcttggcgtaacagtatcaaggagctaaacaatgcagaataa

SEQ ID NO: 60249 - DNA, 360 bp, Acinetobacter baumannii
atgcagaataaatccttaaatcaacaaagcaaaaacaaaggccaagcaaaacttaataatgagttaattggtaagtttgcaattgttcgctctaaatattcgaactgcattattgtgcctaaattactcaaaatcgatgaggtaaaaagaggcttttattcttgtaccgatgttgaaaatggcaattcaattttgattgcacctgaacgattaattggaaccattgattctgctgatcaattgaaacaattgaaaaacttaaataataaattccaacatttgcacaaactttctaaagctcagttattcgcaatcaaatctgaactaatagaaagtgtgaaatcgggggatgcagcatga

SEQ ID NO: 60250 - DNA, 441 bp, Acinetobacter baumannii
atgcttgtaaccttagaatctaaggaatttaatgcgcttgagtccgcttttgaagaaaccttgtcattggttgcgtttaaatcattacgtaaagacgtaattgaattaccttggcttgtaattgtgccttctgctgtcgaaactcggttggttaaggcatttaaagccgtagcatcagctttcttcgtaagttcgccattgattgacgtaacgctattattcaattgcgtaattgaattgccttggcttgtaatagtgccttcggcatttgttacacgggtatcgattttgctaatagcagaagcattggcgtcaagagcggatttaatagcacttaaatcagttggtcctgctgtccatgttgaagcaggtacatcgacaccaacgacctcttcaagcattaacatgtcaatgagaatgcgtgaaccagcgacgttataa

SEQ ID NO: 60251 - DNA, 267 bp, Acinetobacter baumannii
atgatattgttgatgcctttgcctgtactcaactctgattttagtgaggtaactgccgaagctgctgctgctgcattagtaacggcggtattggcagtttgttgtgcggtggcagctgcattaattgcttcagccgttttaccttcatttgtagttaaacgtgaatccagcgaagtaatttttgatgcattagcacttgtgtttgttgcgttagtattaatttgcgtttgcaaactagataaagtgccgttagtgctcgatttataa

SEQ ID NO: 60252 - DNA, 405 bp, Acinetobacter baumannii
atgtatttaatgacaagccctcacgcgaacatgcttggcttgtattacataccccttctatatattgctcatgaaactggcttgggctttgaaggggcttctaaggggcttcaaagagcctgtgaagcggggttttgtagctatgacgaagccacggagacagtctgggtgcacgagatggcacgttttcaagtagctgagtcattaaagccagccgataaccgctgtaagaacgtgcaaaaagagtatgactcattgccgtcaagcccttatttatcaagctttttcgataaatatgcacaagcattttgtatgactcaaaagcgtggcgaaaacgccaaaatagatagccccttacaagccccttcaaagccccttcgaacccccttcaaaggagataaataa

SEQ ID NO: 60253 - DNA, 495 bp, Acinetobacter baumannii
  misc_feature (398)..(407): n is a, c, g, or t
atgaaagttttagttaccggttctaatggttttattgcaaaaaactttattcagtttttatcagaaaaacctgaagttgagattttaaaagctcatcgtgaaacaacagatcaagagtttgagcaagtagttttagctgctgattggattgtacatttagcaggtgtgaatcgccctctaaatgaagaagaatttgctaaaggtaataccactttaacggaaaagatcagtcaaattttgcagcaagctaataagaaaacgcctgttattttatcgtcgtctattcaggtcgagcgtgataatccttatggtaaaagtaagctaggtggagagcaggcactggtcactcttcatcaagcacaaggtaacccagtttatatttgccgtttagccaacgnnnnnnnnnncgccctaattataactctgctgttgcaactttctgccataacgttgcaaatgacttacccttacaaattcatgatgaaaatgctgtga

SEQ ID NO: 60254 - DNA, 162 bp, Acinetobacter baumannii
atgtctgctgaaactgtgcctgtacctggcaatgaagtgttgcctgcagggtcagttgctgttgcagtcactgtatcgccatccaccaggttacccgggtttggtactgaccagctaccatctgtgcctgctaccactgttgcagtggtgccatcagggtaa

SEQ ID NO: 60255 - DNA, 273 bp, Acinetobacter baumannii
atgcaaaataatttatcagaacagccaaccgaactcaactcgcaagattttttagtaggcgatgtggttgtgcttacaccgcaaggctccaaagattacctgcttgaaatcattgactacaagtacacgaatgatttgttccgagtaaaggttatctcctctggtgcttgtggaccaatccataaaagccagattcgccacgcaacagttgctgaacttaacgccaaacgccggctaacaagcgctgagcaagcattagcggaggtgtcatga

SEQ ID NO: 60256 - DNA, 402 bp, Acinetobacter baumannii; identical to SEQ ID NO: 49709

SEQ ID NO: 60257 - DNA, 162 bp, Acinetobacter baumannii
atgtctgctgaaactgtgcctgtacctggcaatgaagtgttgcctgcagggtcagtcgctgttgcagtcactgtatcgccatccaccaggttacctgggtttggtactgaccagctaccatccggtcctgccaccactgttgcagtggtgccatcaggataa

SEQ ID NO: 60258 - DNA, 420 bp, Acinetobacter baumannii
atgcttattgaaattaagcccaagaaaaagcttgctgaggactgggataagttaaaaccaaaatttagagcagctcatcgttttgctgctgataaaggatggaagttcaaaattatcagtgaaacaagattatatgatcagtattgggaaaatattaatttcttaaaaaaatttagacgctctcatatagatgccgttgatcaacaattattactcgataccctacaaaagttaggtcaatcaacaattaatcaattacctgctcatctttttaaagataaaaccaatgttctaaaagggattcaccaagtttgggcactagtggcaaagcgaatgattgcttgtgacttgtattgccctttaacggctgaaactgtgatatgggttaaccaaaatgatgcgtttgtgaggaatatctaa

SEQ ID NO: 60259 - DNA, 219 bp, Acinetobacter baumannii
gtgcttgggcacctatttgaggtgaaaaagcaaaatttacgcaacaaggggtatgacgaaaataatgcggcggtaaccaaagttgaattttcagaggctatggctcgtcaatttcgcataacgcagtggttagcacaacagattgtaaccagcttaaccaaagcgtgtttggttgattcgtttggtggctatgttaagccaaaggatggtgaaaagtga

SEQ ID NO: 60260 - DNA, 420 bp, Acinetobacter baumannii
gtgattgcccatgcccaaaataggctgagcctttttgctgctcagagcgggctaaaagctgttgctgcacaaggtaaggtagaaatacaagcccagtcagatgctttagatgtacttgctaataaaggtatcaccatttcttcgacagaagactgtattgaaattagtagtcctaaagaaattgtaattactggtgcaagttcacaaattaccttaaatggttcgggaatctttccaaaaactggcgggaaatttcaggtcaatgctggacagcatgtgttccaaggcggcgcatcggcaagtgttcaatctagtttgccaccgccaccaaaacgtgtacaaggtgtacttgagttatttcatgaatatgcacatggtgagtttgtaaaaggtggctctgtacacgacaaaaatagataa

SEQ ID NO: 60261 - DNA, 423 bp, Acinetobacter baumannii; identical to SEQ ID NO: 46071

SEQ ID NO: 60262 - DNA, 318 bp, Acinetobacter baumannii
atgcaattaagcgatagtgaacggattgagacattatttactgatagatggattggctataagaaagccattaccatcatgaacacattgaccgatattttgaatcgccctaggaaattaagacctgaatgcttgttgattgttggtgactccaatatgggcaaaacaactatcattcatgagtttgctagacagtattatacaaaaaccgtaagtgatgctgacatggatttattgtccgtaactaagccagttttaccgatacttgctccagcaaaagccaatgttaaagaactctatattctctgtacacgataa

SEQ ID NO: 60263 - DNA, 240 bp, Acinetobacter baumannii
atgaagacagttgaacaattttcaaatgatgtattacagcattcattcctaataatttggagtgaagaaaaacaacagtggcaagtagagtgccctttactaaaaatcagatttgacgcggaaacttataaagaagcactcgcagaaattttcaaggctattttgaatagtgatatttcgagtgaattttatgaaactattgagaaacataaaacagattatctaacctcagacgattaa

SEQ ID NO: 60264 - DNA, 1095 bp, Acinetobacter baumannii
atgatgattattcgctacatcgaacctagggatgttaatgacctttacctgttggctcaaaaagcgggttttggtttgacatctttgcagccaaatatggaaaagttggctgcacgtattgaacgggcgtgtaagacagtcgcaggcgaactcccaaaagcagatcaggtttacttatttgttttagaagatactgaactcaacaaagttgtcggggtttgcggaattgaagtcgcacttggtttaaaagagccttggtacaatttccatgtaggaacccaagttcatgcttcagaacccttaagtgtttataacgctttacctactttgtatttgagtaatgatcatactaactgtagtgagctttgtactttatttttagatcctgactatcgcttaaataaaaatggcaaatttttatctaaagtccgtttcttgtttctctctgcctttcgccaatatttcgaagaaacgattgttgctgaaatgcgcggctattctgatgcaaatgggcaatcaccattttggaatgcggtagggcataagttttttaatattgaatttaccaaagccgattatttgagtggagtggggcaaaaggcttttattgctgagttgatgccgagacatcccctctatgtcgatatgctgcctgatgatgctaaagccgcgattggtattgttcatcccaatactcgaccagcctacaatctcttgcttgaagaaggactacgctacaaaggctatatagatatttttgatggtggtgcaacgctgcaagcagatattgaaaatttaagagcaattaaagaaagccagattttaactgtacaagttgtagagtctattcctcttagtttaggtgatgaaccctatattgtggccaacgataactatgaaaattatcgagcaattcttgtatttggcacaccttatcaggagtcattgcaaataacaaaagcacaagcaaaacaattaaaagttgaaaatggtggtttagtccgtgtgttaagcgtccatgttaaacaggactcgaacccacagatagtgaacaaaattaaagaaacagaacatttgcgaatggctgttaattaa

SEQ ID NO: 60265 - DNA, 285 bp, Acinetobacter baumannii
atgaccgatattgaaacggtaggttggactgtagataagaagtttttcatattaaaaataaatatggatgcattcttaactacagatgaatttgatgctttagctgtgctttatgcacgcaaatacagtggtgatttttctggttgtcagtttaagggaaagctcgccgttatgtgcggggataaggtttatataaatccttggtcacttgatcatgaattaagtgtagatgaaccaatcgaggaactactttttagtgagttccaaaagcatttgaataattaa

SEQ ID NO: 60266 - DNA, 4698 bp, Acinetobacter baumannii; identical to SEQ ID NO: 45899

SEQ ID NO: 60267 - DNA, 981 bp, Acinetobacter baumannii; identical to SEQ ID NO: 45898

SEQ ID NO: 60268 - DNA, 744 bp, Acinetobacter baumannii
atgaatttagaagtccgttgggtagaggatctcctcacattagaacgtgaacgttcaatctcaaaagcagcagagaaaagatttattagccagtctgcatttactcgaagaattcaacaaattgaagaaatgattggtgctgaagtcattattaggaacaacaaaaacaacatcgaatttacagacattggtcgaattttattagtgatgtctaaaaatattgaaaaacaggtagaggagaccgcaaaactcattaaaaatattaaaaatgaaactgaatcgaccattcgtttctgcgttgttcattctttagcttctggatttttaactacttttttaaagaaatttcctacacttattcgtgatttaaaaattgaaattgtcgcaacgaatagtggagaaggcctgtctttgttaaaagaaggtgcttgtgactttatgatttgctatgcagataaaagcaatattagaaaggttggggatgatattttaagtggtatcaaaattgctgaaacggttattgtaccggtttctgcaactgaacccgaccatagcccgaaacatacaatacaaagtaactttgctctgctagcgtatagtaaacacgcgtacttaagaaaattggtagatcaactgattgaaggtaagcttgtatataaaacgttatatgaaacagataatgccaccaatttaaaaagagctggttttacaaggtctaggggtggcttggattccaaaaattaa

SEQ ID NO: 60269 - DNA, 2319 bp, Acinetobacter baumannii
atgaaacctttggcagctttaccgttaatttttatagcaattcagcaagtgcaagctgaggagagaattgcaattttaaagcctcttgtttttaaggcaaatgcattaaaggaaaaaaattatgtggtggacaaagaaaaagtagaaagttccaatacaataggtgatgctcttaaaaatataacaggtatacaaagtacttcatttggacccaatgcaggtgcaccagttatacgtagtttgagtggaaatcgggttggagtaattgaaaatggagaatttattaatggaatgaatgcatttagtggaaatattaatataccattcgatccaatttttatagaaaaagtgatagtgaacaaaaatacagataatattcgttatggcggaaatgcaataggcgggagtgttcaaatagaatcgggtttaattcctaaaaaaattgaagaaaagccaaacaaattagatattgtctttcggaaaggatttaatgattttgatgtaaaggggttcaattttaacatcaatgatcaaaaaaactggtctacaaatataagatattcagaatatgaaatttcttcttataaaattccaggaaatagtaaagccaaattatgtgaagaccagattttttcaaattcaggtgggatcaatagtgcattagcagcttcctgtcaaaaagatagtagagtccaacatatttataacaagtcgtcacaaccatacatagataaatttatgactgagaatcctgattgggcagatggcgatttttctttttatacagataagcccacatctatatggggaggaaaaacatatataaatccaaaaaatccagagtacatacctaatactccgcaaaatacaataaaaaagatcaatacggatgttacaccaaattattttaaaaaattaggtaacagttatgctcagaatgagaatattgggtttggaacaacatacttttttgataaaggtttcattggattgagtgcagataagaaaaaaagtgaatatggtgtaccaggattttcattacaaaatcaatcttttgctgattcttatgaaacattaccggttggtgtgaaaatagatcaaaatcgttttgtattaaattccaattttatccaaccaatttcctctgcagaagagataagtttgaattttcaacagctttctaataaatctggagaatatgttggaactgcaaaagctaatgagtataaaattgataatcaattaattgaattaataatgaaacagtcatcctttaagggattagatgggatacttggttttagccttaaaaataggaatatcgaaggaagtggtactcagcgctatttacctaatgtaagtactattagtaaagctatattcttacaagaagaattaaatatcaaacaatttactttaaatacgggctatcgttttgaaagaattgaacatgagcttcaagataatgattttaaactagcaagaaatgctagtaattcaagaatagaaaatagaaaatataatttaaaccaatattttatcggaggagaatataaggttaataattttataaatttaaaagttgattatggtatttcagaaagagcacctgaagtgaatgagctctattcaagtaatgttcactattctgttatggcacaagaagaaggcgaccagaatctcaaaccagaaaaatctaaaagtttagagttaggtatgtttttgaattggaataattgggtcatgcaacttgttgggtatcaaatggattttgaaaattatatgtatttatctcattcaggtgttgctgtgcaaaatcgattacctttaaaatactggaaacagacagacactgacgtcaaagggtttgaaattgatttaatttatgattttaatctagctcatattgggaatattaaactaggtggtttagctgattttgttaaaaataaggctgttaatcctacagatataaggttagctaatgatggagtttacctaccaaatatgcctactaatcgttatggcatgtttcttgagtggagaaatgattcttggaaaggtaaaatttcaagtatttactacgatgagccaagatatctaggtaagaatgtaatacaggaagttcctttatctggttacaacttacttgaatttaagatagataaaaaattaaagattaaaaatgcttcatttgatatatttttaaatggtacaaatctgctgaacgaagaggctagaccacaaaactctcctctaaaatatattgcccctctaccagggcgagcatttcaactggggataactatgcatatttag

SEQ ID NO: 60270 - DNA, 789 bp, Acinetobacter baumannii
atggcccaaaatgttatgaaaaatcaaaatgagcttattaatcaattgaatgcaaaaatggaaaaggctttcgaaaccaatacggacatattggaattagcaaatttgggacaaatggtagatattattgctcatgaattggctcgtataacagagaatacatcaaatctcttaattcgattaaaaaatagcgaagacaataaagaagaaacatcaaatataatgaatgaattgcgtaaacaaataattgcaactgagaaaagaattagaagtattgatgtattaagcccagcagtaagacaaagaaaagaaagttatgatattacagcgcagtttaaaacaatacttgaaggatacgcacctaaacttcaaagacataatattaattataaaataactgttgatgactcctctgaactaaaaccagtacaggttacgatggttagaggattagtagcacaaattatggaaaacttactgaccaattcagtatattggcttgaccaagggttaaaaattggcgaaaaagaaaaattaattgaactcaatattgagagcgatactaaaattatatatatccgagataatggcccaggggttgacccagcttatcatctagatattttcaagccctattttacaaatagaagagggggtaaaggccttggattatatatagccgcagaaattgcaaaatatcacgaatcaaaattatatttgtctaatgaaattgaacaagatggaaagttaagaactttcatcattgaattaccgaagagttctatttga

SEQ ID NO: 60271 - DNA, 711 bp, Acinetobacter baumannii; identical to SEQ ID NO: 45638

SEQ ID NO: 60272 - DNA, 678 bp, Acinetobacter baumannii
atgccacatgatgcaccacattcggtagcaacaattgcacgcttaaacaatgaagctaaaacacatcgtgaagccaaagaagcagccgaaaaagcattaaaagcttttgatggaatcgaagacccagcggcagctaaaaaggcattacaaacaatccaaaatctcgacgataaaaagctggtggatgccggcgaagttgagaaagtgaaagctgaagctatcaaagcagttgaggaaaaatatgccccgattgttgcgcaacgtgatgctctagaagcctctttacataaagaacttatcggcggtggttttgctcgttctaagtacattcaagacaacattgcagtacctgtggacatggttcaggcaacctttggtcatcacttcaaaatcgaagaaggcaaggtggttgcatatgatccgaacggtgaaaagatttattcacgtgtccgcccgggtgaacttgcaaatgttgatgaagctttagagtcattggttggtggataccagcataaagacttaattcttaaaggtggtaaaggaactggtggcggttttcaaggtgggagcaaaggtggagcgcctgcaggaatgaaacgcagtgaaatgtctgtttctcagaaagcagattacatcaaagaacatggcaatgatgccttcctaaaactaccgaactaa

SEQ ID NO: 60273 - DNA, 420 bp, Acinetobacter baumannii
atgcttgaaggcggcagctttttccaccatggcgattcatttgccatgatgcgtggtggtcaccttgatattgcggtgcttggggcatttcaggtggcagccaatggtgacttggccaactggcacacgggtgcaccagatgcaattcctgctgttggtggtgcaatggatttggcagttggtgccaagaaagtatttatcactacagaccatgtgaccaaacaaggtgagccgaagattgtggctgagctgacttatccagttactggtaaacactgtgttgaccgtatttacactgacctgtgcgtgattgacgtgactaaagatggtttaaaggtgattgagaaagttgaaggtcttagctttgatgagttacaggctttaacaggtgcaactttgattgatgcgactcaagggtaa

SEQ ID NO: 60274 - DNA, 159 bp, Acinetobacter baumannii
atgtttgtgacgctattgttgagcgaaacaatattgttagatgcggaagttacacggccgtcaatgtttgtaactttggaatcaagcgtacttaatgcagacgaggttgcttgcaagtcggttgctaatttcttattacctgtaatgttacgtacttga

SEQ ID NO: 60275 - DNA, 159 bp, Acinetobacter baumannii; identical to SEQ ID NO: 52639

SEQ ID NO: 60276 - DNA, 177 bp, Acinetobacter baumannii
atgaaacgagcagcaatatactttaatgacaaatatattgaaattatttcatggaattatggtggaatgtctgtatttaatttagactttattcctttagttttgaaattcgatattgataattcgacttggctttgttgcacaaagctattcttgaaggcttcttcagtaatataa

SEQ ID NO: 60277 - DNA, 2382 bp, Acinetobacter baumannii
atgtcagtgccagttcaaacgccatcaaaagaatatattgcgaatggaacaacaactgcttttccattagagtttaattgtgataaagcagaatacttaatcgttactcttaatggtgaagacgcgcctgtaggttcatggacactggctaatgatactgtcacctttaatgtagctcctgtaaatggtgtggtggttaatcttcaaaggaatacaccatttcagcgtaccactaattaccaactatatgacaactcttttcgcccttctgctgtaaataaagactttgatttaatctggtggaagcttcaggagttaggtgtagcagactggattttaagtaatcgcattaatgatctgcgtgcttatgttgataagcaagataatgtcttgcaagacaatattgatagcttaaaaaattatgttgatgacaaggatgatgaacttcgaaattatcttttaaatgcaatccaggaacaaggcgttgcgcttgatcaattggaagaatattacagctatctaatgcagcaactcgcacaagtcgcaattgatcgcggttgggctgcttcatttatcgtatcggcggatggatcaacgcagcagcaagtcaacgatcgcatcggcaacacatggtatgccaagccattaggctatgaattaaatgcccgagtcatgctcacaaatggtgacattgttcgcagcactgttgctaacaacaccgtagatccaaatgtagatatgacggggtgggttttagataatgcgtcaagtcaaattattgatgcagatggaaatccaataactattaaaccaattccagatttttctagcactgaaacctatattgaaggcagcttggttattaaagatggtctgcttcaaaaattaacaggcggggtgtggcgacctaaggcggctacatattacgattttggtgctaagatcgatggtataactgatgatactgatgcatttattgcttatcataagaagttcaaaaaagccaatttagatggcagaatgcatttgcgtccaattgatattgatcaatttattagtaatcaaaatctaggattggatatttctggcgatggtaatacaaaatcgtgttttgtttttgatggtgagaaagggttttattcagcaagtaattcttttttccgaggcttaagtttaaagaatattgccttggagaaaaaggatccaacaaaaacagggattggtttatatattggtagtggtggtgctgagcaaattaatcttgaatttgttgggtatgatggatggggttttggcagagcgactcatcagtggaactcaagttttgttggtgaggtttttagagattgtaagcacccattagcagtgtatggtacatcatctaatcattcaaattgttatgccaaccgttgtacatccccttatctttttggctatgctgtatctagtgatggggttgtaacagttccttccatcccatttgcttattctgatttgtcagggattgctgctgacgactgtggcaatgacggaagtgtttataatatcggttattgctccggcattgatttaaattcgcttagttgtgagagagctcaaggtgaatatatcttcgacctgaccgatgtttcacaaagtgcaatatcaaaaacatatctaaataattttagtatgtatgttaatgaatataatccaaatttagttggaatattcaaatctccaacagggaaaagaccaaatttcattattgatgggattacaatatcatctgataaaaatattgtgcttttttctggcactggcgctggttgtgaaattaaaaactattcatttaacgataaagtattgagtagtctaacaaccgatgtatcagcactcactgtcaatgatgtacaaattggtgatggtgtggagtctattggtgagcaagggtatatcctagcagcaaataatgatgcttactcaagagtaaaaaccattaaaggtagatgctttattgatccagccacccaaaaacttacatttttcggcggtagtttatatgagcgactcgctgctggaattatggttgcatgcaaagtaacattgcacccattaaaccgaaacggtaacaattctggtgaaaagcatggtgaagtatttttttcatctgcaatggattataacgctacagatatgtcaggacatcttaatgtagtgagaacaggaacattgacaacactgacaacagtatcccgcaacctatcaactggctctattttatcattcgatttagttgttgaggtaacttccccaggaaccagattcttgattaattttgaatatacctacaatggtattcaaaatgtaaacgggaagtgctggactgttcaaaacaagtaa

SEQ ID NO: 60278 - DNA, 186 bp, Acinetobacter baumannii
atgtgtggggcactttcagcttcaagagaagcatttgagataagcgaacgttcatcaaggaaacggccgattcagaagcccaaagatgagccaaaaaaagaatcattcaaatcatcaggatatgatgctgtcgatgcgcaactaaaaactgctcaaagcatcatcatttactcatcactattttaa

SEQ ID NO: 60279 - DNA, 342 bp, Acinetobacter baumannii
atggctgctaaacgagaaattaaaacaccaggtgtaactgctgaacctattcaagaagaacaaaaggttgtagcacctgaaccagagcaagatacatcaactaaagatcaggctgaggctgctttaggtcatatcacaggtggggatgatcaaagtacgggtgaaactggtccatctcaagaagaactattgcgccaagagttagagcagatgcgcgctcaacttgctgaactaaagaagtctacgcaaccagaaatgaaaaacgcaagtggcgaagtacagcctaaaaaacgcattcctgttttgactgaaaagggctggtcaactaaggaggcggactaa

SEQ ID NO: 60280 - DNA, 195 bp, Acinetobacter baumannii
atgaatactttcttaatgattatgggtatttctgtttacatattagctttcattcttgtagtggcgaaacagattactacatcgactgctattaagtggacaaagtgggatgaggcaaagccagtaattttattatttgttgcaatcgtaatggttgttgcgccaatcacttattttatggagctaataccataa

SEQ ID NO: 60281 - DNA, 228 bp, Acinetobacter baumannii
atgagtgactacatgaacatgacacttgagcagcttcagcaagaacatgctgagttgcttgagtttaatgagactcttgataagaaatacaagcatcatgcagcacgagctgaaaagtacagacgcaagtgtgaatctatagcaagtttattcgtcgttcctagtgaaaatcaccaaatgacaattaaagcaatccaaacaattttggaaagggttggtgaccaatga

SEQ ID NO: 60282 - DNA, 300 bp, Acinetobacter baumannii
atgagcaagaaaaaggagccagtcatgagtgagtttaaagttggggattatgtagttcaccctaagttttctaacaaagggctgtacaaaatctatgagatgtcaggatcaataacaaaagttcagctcatgccaaatgggcgaaaaagttactcttttgagtcggatattcgccacgccaccccagaagaaatcgcagcaggtcaccgcattgataaaccctcgaattcgggggaattagaaaccctagacaaaccagaaaaccacatttcgccgaattgcaaagtggaggatgtttga

SEQ ID NO: 60283 - DNA, 411 bp, Acinetobacter baumannii
atgaatatgcgtgttgataatacagcttttacagacaaccctcgcgcacgcgcgcgttttctcgagactaagaaaaaagccaaagaattcttgcgccaacgccgaggctataaacgcccagacttcaaccgcatgattctagatttacgcaaccttggatggtcacacgaaaagatcgcctacgttcttgatgtgtcgggcggcagtacagtttcttcttggtctactggatccattccagagtacatccacggtgagcaattcatcatgttgtggcaagaacaaacaggtttacagcgcgtaccacgtgaaggcgaatggcaaacatatagatatgacattgggcagctcgatctacttgaaacgttagacgtattcgctgctcagttagatgaggaattacaacaatga

SEQ ID NO: 60284 - DNA, 243 bp, Acinetobacter baumannii
atgaaagcacagcaaaagcaatttgaaatctttgaacggtatttggatgttctcttgtatgcagccaatgctactagtccattcacagtaactcaaattgtagaacgagttgtaaatgggagtagagcttgcgcatacaaatgtttgtcagttttacacaaggaaggttacttgacgaaggtttcaacaattcaatttgaaggaacccaaaaaactagagaattattcggggctaaatcatga

SEQ ID NO: 60285 - DNA, 870 bp, Acinetobacter baumannii
atgaatttagcacataaacacgactctccacaaggtgaagtgatcgcgtttccaaaacaagagcgacaagctatgtcgaagaaagaagaaggctttactccattgccaaacttcgtatgcgatgaggggtatttagctgaactaagtggagaggcaattaaatgtctagttttacttaatagacatatcaaaggctttcatgaagaaaataaagctattggtgagtccttaatcttgaaattggcaggctttaaagacaaaagaactgtcagaaaagctatgtctgatttagcaaaatttaacttggtaaaaatcacgaaaactttggggaaagctaccagttatgaagtcacttttgagtcaagaatatctattgaactagtaacatcaaatgatactggtgcatctaatgtaaccacatcgaatgtacctagactagtaacatcaaatgatactggaactagtagcatcaaatgtcactctgtaaaagaaaaagatttaaaagaaaatattaaagaaaatttatgtgaggaaaattcagttgattcggttctaaaactatgggttccaaaacttgaaattttgaatgcttggttgcaacgagcaggcatcgcaaaaatgactcaagcggaagctgaaacttggttacttgaaatcaacgggtattactcatcaaaaattgaagctggtcttttgaacgacacccaaatgtacacaaacttcgtgaagtggatcaaacgcagttactcaactcgtaaaccagcaccacagcaaatggatcatcgaaacgtgaatgcagcttgggaaaacatcaatcctgattacagcaacgctggtgatcctgttgagttggaggattggatgctatga

SEQ ID NO: 60286 - DNA, 249 bp, Acinetobacter baumannii
atgccagccttacgaaatttaaaaactgcttcaaaatcaaagaagcatgtaaaaagtttgctttcttatatcaagtcaaaaagcaaagaggatttagaagttttcgcaaagtcttgcggaactaccgtaaacaacctttttcaaattgcttatggaggaagtgtttctgcaacactctcaaaaacaataaataaagaaagtgaaggaaaaatttcactatctgaccttcgtcctgacgttttttcttga

SEQ ID NO: 60287 - DNA, 690 bp, Acinetobacter baumannii
atgaatatttcagacatccgaagaaataatcttcttcaattaatcgaacaaaaagctaatggctcccaaaaggattttgcgaaccaagtaggcacagctgctgcttatttgagccaaattattaacggcactatagggaataatggaaagccagccgctgtaggaaacccattagcaagaaaaattgaaaaagcttatggattacccgatgggtttatggatagagagaattcaaatgatgcaagattagacaacaatgttgacttgaaagaaaaaattactacagaaggtcgcttagtgccagttatctcttgggtagctgctggatcattttcaccaattgaaacggttttacgtgatgcagtagttgacgaatttcttccgccaaataccaagtgtggtaaaaatggttatggtttaaaaattaccggaaattcaatgttgccacgctttgagccgggcgataggatttatgtcaatcctgatatacaaacatttgacttgcaaactaatgatttagttattgtggcttgtgctggagaaactgaagccacctttaaaaaacttatcattgaagggaataatcgatatttagagccattaaatccagattggcctgaaaaaattatcagattgacagaagattgccgattagtaggcaaagttgtaggtttatatagggatatataa

SEQ ID NO: 60288 - DNA, 339 bp, Acinetobacter baumannii
atgatatggttgccatttgcttattggttttttccttatcagcttgccaaccacgctttaagaggcactttaaagcaatatggaattgatttaagagttatacccaatgagctttctcaggaaatttcagcaaatattataagattgcaaaagcttaatcctagaaaatctggagtacttgctaatttagagcaactacatttattgattgatcatgatgcgattattatgaagagcattataagacatgaatataagtatgagtttgaatttacaccagaagttgaaagaattaagaatataatgctaaagcatgctgcaagaaaaattaaaaaataa

SEQ ID NO: 60289 - DNA, 189 bp, Acinetobacter baumannii
atgaaacaaaaccctattcctagtcaaaccacatcacgcctatatcaacaccctactgttgaagaacagcgcccttctcgtttcgccactattaaagcgaacgtcatcgacttccttatattcatcgccctttcatttgtactttgggtgattactgtagctgctgcatcttggatgatgggaggctaa

SEQ ID NO: 60290 - DNA, 426 bp, Acinetobacter baumannii
atggctgaatcacatatcgtatcaggattaactaaaaaacgtgcggaattgcttggtcaaattgaagcacatcaaaaagaaattcaacgtatctctgaaatgctactgcatgtagatcacactattaagttattttcacctgaatttgatctaagaagcgttaaatctaagcgtacaaatcaaagaaacccttattttggaagaggtgaactacagtcattagtcttaacttgcttgcgtgaagcaaaagagccaatgaactacaaagatttaatgatgaaagttttggacattaaaggcatagattcatctgtaggcaatgatatttcacctagcttcatcaaagtgctgaaccgattaagagataaaggtattattatagcccatagcaatcatcgtcctcatttgtggggcatagcggattag

SEQ ID NO: 60291 - DNA, 1038 bp, Acinetobacter baumannii
atgggtgattttatgaaaaaagaatctaagcaacatttcctactatcagcaaaggctcgtactttatctgtatatgaaattatgcaaatcacccatgaacaagctttcttattgttcaaagaaatgcggtggggaaaagaacaaccgatatgccctcattgcgatacccaagatcatcactatttcatacgtggacgcaagcaatggcgttgcaagtgctgtaatcatacgttcagcgtaacatcaggtacgatctttgcctttcacaaactaccactcaaaatctatttagctgctattgccatttactctaacgctgtaaaaggcttatctgctttgcagttaggtcgggatttaggtgttcagtataagactgcttttgtattggcacataaaatccgtgaaagccttatagatcagcgtgacgatgaattactatcaggtgatgttcacatggatggtgcgtatgtaaatggctatgtacgccctaaaaaccacaaggatgaccgtgtagatcggcgcaaggctgaatatcaaaatccaaataaacggtgcattgtggtactacgccaaaaagcaatgaacagtaatctacaaggtgctgataaaaccaaaacttatgtagtttatagtgaaaaccaaaaagacattaatcatcttgccaatcagcatatcaaacacggctcaacaatccatgcagatgaaagtaccgcatacgatacactaaatgctcgtttcacgactaagcgtgtcaatcatcaatatgaataccgttctaaagatggtgtgaccaataatcttgctgaaagctattttagtcggttcagacgtatgcagttagggcagatgcacaagtttggtgtgatgtaccttgccaactatgccaatgaagctgcttatcgtgaagatactcgtagatggtcgaatggtgaaatctttactgatattttaatgaaatgcgctcaaactcgaacacataaagattggtgtggctattggcagggcaataagcgtaaatcagagcgtttagtctgctaa

SEQ ID NO: 60292 - DNA, 219 bp, Acinetobacter baumannii
gtgagtgacgatgaatggaaagactatgccaaaggcttaattaaggcagaaattgcccgaaaaaatataagcctgattgatctatccaaaaagcttgaagcaatgggtatatcagaaacaccacaaaacattagcaacaagatcaatcgtggtacgtttggggcaatatttatgcttcaaatacttaaagcgattgattgtaaagaaattcgactataa

SEQ ID NO: 60293 - DNA, 360 bp, Acinetobacter baumannii
atgtctgataattcactgaaaaaaggcagatacacacgccatagcaataaaattgggctttactccacaagccatgatcgaattggttttttaaataataataacgatgtggttttaagcttcccttttaaagatactgtgcttgaagcaggtatgagtaaagaggattcagggcgtgaagaacgctttttacatcaagaaattgatggaaaagatattgatacgttatttgagccaaaagcattgactaattttcaatattattcgcacccttgcacagcacagcacagcacagcacagcacagcacagcacagcacagcacagcacagcacagcacagcacagcacagcacacagtag

SEQ ID NO: 60294 - DNA, 1218 bp, Acinetobacter baumannii
atgaaaaatcgccttgaaattgctagagagtttttaaaagaaaacggcattattttcatcactatttcagatgatggcgcacattacctaaaggtattagcagatgatatttttggacgggaaaattttattgcggatgtaatttggcaatcaagaaaatctatttctagtgatggtttattatctatttcaagcacacacgttcttacatacgctaaagacaaaacagcaatcaataaggctcattttaaattagccttggatatagagggttttgatcttgaggatgaactaggtaaatacaaaattgaaccatttgatgctcctaatgtccgtgaaaatttagaatataagattaccaatcctaataatggagatgtttatacgccacctaaaggtcgtcattggcgtacaacagaaaaagaatacctcagtttacttgaaagaaatcgcattcaatttggttcaaagggcttaactaaaccacaattaaaagtatatttagaagatgctattgaagcaggtaaaggaaaagctgcatcaacactttggtctgatgtaacacctgatacaattttatggacttctactgataccaccacaaacgcaacaaagcaccaacaagccatgtttggtgatgttgtatttgagaacccaaaacctgaaaatctaattcaacgtgcaatagaactatcaactgatgaaaatgacatcgttctagactaccatttaggttcaggaacaacatgtgctgtcgctcacaagatgggacgcagatggattggtattgagcaaatggactacatcgaagatataaccaaagctcgcttactgaaagtccttgagggtgaacaaggtggtatttctaaatcggtggattggcaaggtggtggttcatttgtttattttgagctaaaaaaatataaccaagattttttaaatcaaattatggcagcgaatagcaaaggcgaattggatgaagtctatgctgatatggctaaaaatgcctttctaaaattttggtttgataaaaatgagtttgaaaaggacgaaaacttccgttcccttgacttagatcaacgcaaggaattgttgattagcattttggatgaaaaccaattgtttcttaaccatgctgatatgcgtgacagtcgttaccatgtttcagaagaagaaatgaatttaaccgatttattctatggtgctaaaaatgactaa

SEQ ID NO: 60295 - DNA, 1029 bp, Acinetobacter baumannii
atgcagcctattgattttgtaatgatttgggtcgactcaactgatactaaatggcagcaagattataaatattataaatctaaagaagcaaatacacaggtgactgaggtcattgatgaatgccgttatcgtgattgggataatcttcaatattggtttagatctgttgaaaaattctgtccttgggtacgaaaaattcatctagtaacttgtggtcattttccagaatttttagtacaaaatcatccaaaattaaacttggtgacccatgatcaaataataaatccagactatttacatacttttaactctcatgctatcgaaattaatattcataaaatagaaggtcttgcagagcactttgtctattttaatgatgatacttttattaatagccccctagaaccggagtttttctttagaaatggtctaccttgcgatggagttagactacagcctttaatggtagtgggagaagagaactttttaggtgctgttgctttgaccgatgttgcgattattaataaatattttgataagagaaaattatttcgaaaaaatccttatgcactttttaatcatcgttattcaatcagtaataattggggtaactttttaagtttatataatcgaaaattctcaagcttttatagtaatcatttacctcaaccgtttttgaaatcgatatttgaagaggtttgggaaaaagaagaaaactacttaaaggaagtatcaagtcatcgatttagacagcctttagatgttaatcagtacttgttcagattgtggcagttatgttctgctcgtttttgccccgtaaatatatttgagcgtggtcaaaattttaatttaagaatccaaaatcttcctgaaattaatcatgttattaaaaatgagcaccttccacagatttgtttaaatgatgatgagcaagtggttgattttgaaaaactaaaaaaagaaattattcagatttttgaacaaaaatttaatacagtttcgagttttgaaaaagaaatatctcattaa

SEQ ID NO: 60296 - DNA, 216 bp, Acinetobacter baumannii
atggcaatgcgtcctgacgtccgtcgacatgctttagtcgtgattgtattctctctcgcgcaatggttcttcatgcgctatatcctttctcatgaattattcaatttaacaactaatcaacgtattctttatttctgtatcagtagcttagcaggtgcattacttatttttgttgccctgatttatatggtgcttaaaggaaatgcggataaataa

SEQ ID NO: 60297 - DNA, 960 bp, Acinetobacter baumannii
atgtggctattagcaatgactttacagcaagcgactctacctactccccgctttgaccaaattacattagataatttaaaacaagatattcaacaagcgattcaagcaggacaagagttcttaaatacccttacggctgcaccatccgagacagatcagcaacttgccgtgcttgaacaaattgatgcacttgaaaataacctcagtgaatcatggggagtgttgtcacatttaaatgctgtgatgagtaatgctgaaactagagaggtctaccagtcgctcttacctgctttaagtgaatattacactcagcttggccaacatacggcgctgtaccagacttatcaacacatacatgatggtcagagttattcaacgttaagccccgcaaaacaaagtgcgatccgccttgcattacgtgactttaaactttctggcgttgctttagaaggtgaagagaaaaaacgctacgcagaaatttctgcacgtctttcacagctttcttcggacttctcaaaccatgtacttgatgcgacacagacttattttaaaccactgacagaagatcaattaaaaggtcttccagaaagtaatgttgagttattaaaacagtacggcaaacagcgtgagcttgatcaagcagtagcaactttagatttcccagcttattttgccattatgacctatgccgatgaccgtactttgcgagaagagctttataaagcttatgtcactcgtgcatcagatcaatctgaacaaacagaatttgataacagcaagattatggaagaaatcttgagccttcgccaagagatggcaaaactacttggtttcaataactacgctgaatattctcttgctagcaaaatggctccagatgttaaaactgttcatgactttttagccgacttagctgagcatgcacgtacccctgctctccaagaagttgctgagctataa

SEQ ID NO: 60298 - DNA, 336 bp, Acinetobacter baumannii
atgaaatatcaaatacaaccaactaatgtgccagaagatttagatagctgttggttccatccggatatagagaagcacgacactattggtgaaaatgctgaattttatacgaaggaacaatgggcacaacttcaaaaaaacctaggtgtggaaatacttgttgagcgtttggaatattgggatattccagaaatccctgaagatgattgtgcagattggtctaagtggaaaccgcagccacccgaacaaggactctttttaattgcagcatttgattcagaagatggccctgtactttggtgggcaaatcccaaagcggaaagtaaggaggggtga

SEQ ID NO: 60299 - DNA, 723 bp, Acinetobacter baumannii
gtgattaaactggaaaggggcaaaaagcctgcatatttgacagctgaaaaagttgaagagcttactaataaatttaaggcaacgaaggctagtgtttggaagcatgtagaaataggagaagcattactggatagtagttcatttaaatgtgcctattgtgaatgctccttgcaaatagaagactcatatatgcaaattgagcattttaaagataaggacacttatccagacagtgttgttgattgggaaaaccttttaccatcttgccagagatgtaatagaaagaaatggacgttagatgtagttgtcgaaccgattgttaatccatatgttgattaccctaaaaatcatttctctttagaagaatttagactttatgcaaaagacttgaaaggggaaacaacgatttctaagctcgatcttaatgatgataaaaggctagttctgcctcgttttcttgctagtaatgaaatcgctagccagttagatagtatttttagaaatatcataaatttggatgaagcaagaaaaagtttgtctaaacttttgaacagttgtcaggctgatagtccttacgcagcatttttatctacttgtttacatggaaagaaagagtatcaaattttgaaggaactattaaaaagtgaggaaattaacctttgggatgatgaaatggaggagttggattttaggtcaaagcaattgacattagaccgcaggtaa

SEQ ID NO: 60300 - DNA, 885 bp, Acinetobacter baumannii
atgtcacaaaaatccattaatcatcattttgttccacaaggactcctgagaaattggtataccaaccatgaaaaaactaataataaaggttttcgaaaatatcaaaagaattttgaaggagaaatggttttaagcaaacatataggttcatcgaaatcaacttgttcggagaaaaaccttaataccacctacaataaattatttttgaaaggtgttgagcacgaagtcgattcagatactattgaaatcatactacgtgatttggatacaaggggacttcaggtacttcaaaaaattatttcagctaatagcgctaaagaattagagaaggaagaattggaaatattttcaaaattcgtgatttctatacatatgcgtcatccttctaccattcgatctgtaataacagaagttaaagaaaggggtgcgcaggcattaagtgtaatagaaaatcaattagaagatagtgaacatttttttcagcttgaacttttgcagagaaatatatctttaaaggctatgttgtctgttttggatgaacctgaaacatatttacatattataaatatgaactggtatctggtaaagcaagagggtcttgaattcttttctggagaaagacctcttgttgcgaatttccaagcaaatgaacgtgaattgaaaattggattcgggctttcattgtccccgaacttattgcttattggtgtacataaagatttatttaaatcggaagatgatgaaaggaaagtcgttaccaattttgcattagaatataacatctgtgtatgtcagcaatctgactatatagtaaccaccaaagaactttcacaagaacattttgagttctttgtgaataataatttagattctaagcttgaatag

SEQ ID NO: 60301 - DNA, 609 bp, Acinetobacter baumannii
atgcttaatcaatcaaaacaaacaaagttgtgcacttatctcggccttagtactttaattttaagcgcagcccttgttggatgtggtggtggcagtagtagcggaggttcatctagcactccgacaccgactgtgccaactcctgaagtcacgacagattttacacttaaaacccccgtcgaaatgcgcaatgtgcaactcaaagtctatgacaacaccgacaatagtattttgattgatacccaagttgacagtttaacaagttataatattaaactttcaagtaccaagttgaatcggctttatcgagtagaagtcacaactcaagcctcatctcaggtatttgatccaattaattctaaatatgagaacatttctggcgtctatcacgcttttattactccaagttcaataagcaataaaacgcagccgattagcccaagttcagaagcgatttatcagcgtgccgtaattcgttcaggccaacttccacaagaaacgatagacccgacccgtattgaacaatcacatgttgatttgatttggcttctcaagatgtttacaccgctcttattagtgcgtttaaagatgctgccattccaagcttaa

SEQ ID NO: 60302 - DNA, 837 bp, Acinetobacter baumannii
ttgaacgatcaaacaaaatggcttcaaagtaatgctactgacattttagatgaactgtcgttacaaatagatcaatcccatgatttttttgctttctttgttggaacagaagattctaaaatttcacttcaacgcttctatgaaacgctcaatatattggagactactaaagatcctaaaagtacagctcaacgtatgtgcttgccagaagaactcgtcaattattggtatgaaaatgctctaaatttagcaaacattaaatcaaaaaaagggaatccacgtttatttagtattgatagctcaacccacttaaaaccagcaatgcttgatagcactgaagagcttcatgcggtgacttatttttttgaacatctacagaaaatagctcgtaaaaatccaatacaaattgcatgcgtcctgaatatatttttgaatcgagtgaccgcatcacatacaggtatccattatcgctggaaggatatcgatcaactcgaacatttttactcccaagttaaggctttatttcctgccaaattttggcacttacttggacaagatttgcaaacaaagttagatgctaaacaacagcctcaacttttcaaattagcaaaagcatcaacagataaacatccaccaactcaagaggagtttcctcgtctacaactctactcagtcaaagatggtcatgctcttgctgcatttaaattttgcttacatctagcatgtattggtcgcccacgatctgttcagcttaatgagttagatgacatagcgcctgttaccctgcatagacctatcgctgcattacaccaaaaagaactttttaaaactgattaa

SEQ ID NO: 60303 - DNA, 720 bp, Acinetobacter baumannii
gtgaagattttgaaaataaataatttgattggaaatattattgctatttcctttgtatccttaattttcgtatttgctctaacatggataatttttgactttaatggttcttcaagtgccttaaaagatacttggtctatagttggatcaatttttggaggagtcactactttagctgctgcttacgtcgcatactctttgtatgatgattggataaagcctcataatttaagtatcgaaactgaacataaaaaagaaattttaaaagtgattcggaagattatacctatagagaataaatactattcattaattagcaatcacttcatatacagcgataatcctgagtggacgatgcctatagagttaaatcaaaatgaactgacagaatttaataataatataaatgaattacttggcttacttgatgagctttactttattacaaatgacaaaaatattgataatcttaaattacattatcttaattatgctcaattatataactttattttgagcagatcagagtttctttataaaaatggagataaaactgaacttgttgaatttttacgaacaagattaaagtttgactataaagatgttaatagtgaggagcggacaaattccactctatatgcttatgcattcaaaggactggaaagagtggagttaagaaaatatatcagtgaaaatttaaagttaaaggaaagtccataa

SEQ ID NO: 60304 - DNA, 681 bp, Acinetobacter baumannii
atgggattattcttatctttatctaccattattaacgcagctacaatccgtctttcaccagtaacagtggaaattttaagccatcagaaagcatcttcaattagtttatataatcagtcaaatgaaagtgctgatttacaggtacgtatatttgaatggactcaaaataatgggcaagatcaattaacgcctacagatgaaatcaatattagtccaccttttttaaagctaaagcctaatgagtcttataatttacgggtagttagaattaatccagagccgatttctggtgaaaaaacttatcgtattattattgatgaattacccaaacctgttgatagccgaaaagcttctcaaggtgtaaatgtaatgcttcgttcgtcattacctgtatttgttgtcaataaagatgcgattactcaactaaattggaaaattgatactcatcaaaaagaaccttccctaaatattaataatgttgggaatcgacatgcactgttaaatgatttaacgcttgtagataacacagagaataagagttatccgattaaggtaaatacagtgaatggctatattcttgcaaagcaagaaaaaagttattcaattagtaattttacatatcagccaaatcataaatatagtatttctctgacagtaaatggtaagaaaaccacactttaa

SEQ ID NO: 60305 - DNA, 840 bp, Acinetobacter baumannii
atgatggggttttttaattggtcttataaaatgttaattgataaaagctttgatcttaaagaaaatttgttattgaataaaactttaaaaccactaaatcaaaatgacttagaggaacttttaagaattcagagcttagatgtatcagaatttagtgaagcagacgtaagagaggaaataatcaacccgattattaaaatattgggatatagcaaaggagagttctcatctgttgatagagaaaaacatgtccgatttttaggtaaaacaagtaaatatttagactactcatgtacggtatttaaagagaacttttggattattgaggctaaaaaacctttaaaaaaagagcactttggttataaagagtttagccaagctttagaatattctattcatccagaaattaatgcttcaattatagttttatgtgatggattaataatagagttgtttgatagggatgaaaatgttgagtcacccttgctttcttttcaaataaatgatcttgtagaaaattttgaaaacttaagaaaaattttaagtcctataaatatttggtttttctataaaagaaaagttttaaaagcaattgataaagcatttgaaaaagaatttaatcaggctcgtttgaatgaattttttgatttagttaatagacgatttgatagtaagaggggacaaatactcaaaaatttccagtccactaaatttgaagataaaaattatgcagaaaaaattttagatgctaatttagatgaagtagtggatgtttacttttattttatgcataaccttaatgcctgtctcttatacacatctgacgctgccgacgaatag

SEQ ID NO: 60306 - DNA, 159 bp, Acinetobacter baumannii
atgcctaatttctcaaaagagaggggttgctcagcagcttcatcgttaggttcaattttatctgcaaatagttttacgatcggtgaagcagctttaataaagccgtttgaatcgattgctgtatttctactggttctgaaacttgcccagggcgtgtaa

SEQ ID NO: 60307 - DNA, 558 bp, Acinetobacter baumannii
atgatgggtaattacatgaaaaagattatttttttaagcttagttcttggtttggtagggataaatggttgctcaaaggtggaaaaagagtcaaaagaagctgtcttaagcaccttaaaagatcctgattcagcccaattccaaaatataaaaggatattgcggagaggtaaattctaagaatagttacggtggttatgttggttttaagagatatgtctctattgatggtggaatcttaatggaggattcagaaggtgttgaaccagagacatttgcgataatttgggaagcacactgcactccaaataaattatctttaaaagagcgcaatgagtgtgtaaaggatgcatacaatcagtcacttataatggatgcaaggcttaaaggggtttccaaggaaagcttaaggaatggaatactagcagacaaaaaagcaccaaaagcagaaattgaagaaggcttaagagatattgatcgtgcgtataacagtaatttcaaagataagggtctatacgcacaggatgttgttgctaaatgtgtaaagttgattgattag

SEQ ID NO: 60308 - DNA, 153 bp, Acinetobacter baumannii
atggatctactcgaacaaacaggctcagcgggctatttaattggctttgcagtattgtttaatgcactagttgtatcattcgtacctgcattagcttttacgcttactttgcttgtattagtagtgtgtttggtcattgtgaaatttgactaa

SEQ ID NO: 60309 - DNA, 231 bp, Acinetobacter baumannii
atgattgctattacaaaaaaaggggagcttttacagattgaaagcaactcatcaattactggacatcaatttataggggtaatcattactaacccaagtcaattaaatggtgattaccaaaacattgctaatcatttttattgcacagatccagaacaacttcaaaggctaaccctagacgctttacgtacaaatcagagtcgccaccatttgttgagtgagcaaccttaa

SEQ ID NO: 60310 - DNA, 570 bp, Acinetobacter baumannii
atgaaaaactacagtttagtacttacagtattattttcttcaatgctgacaggctgtgccgtcaatctgccttttaacaatcgtctgaactatacatctgtatctcaattatcagaaatacaaaaaacaaaggaagttattacgataaagtggaatccgaatacttttcctcaacgtattgatgtacaaggtgcagatggctttgtaggaggagggtcgcgaactcgtattcctactggtgtcgcattgtctagccgaattgaagaagcactttcacagtttgttcagttatcaccaaatggaaatcctttaacaatcacagttgagagtgctagatcaggatttgaatattctgctgggattttcaatgttactccagctatcgatgttgcgaatgtgactttcactgctacgtttgagtataaaggtgaaaaatggtcaaaaacattcacttctaagcttaaagatccaaaaataggaggatcatcgcaaactggcctattggattcagcatgggacgatattgcagtgcaagtagccaaagatgttgcattacatttgaataagtaa

SEQ ID NO: 60311 - DNA, 1140 bp, Acinetobacter baumannii
atgtcgatcacacctgaagaaagaaatattaaagctaaacaatatgttgaagatttatattcaaatataaatcatttgactatagatgatttttctagccatcctttatttgaacaggccgattcaattttacaaaatgttgtgcatgccaaaattactgcaaagggttttaggggaattgttctcactgctattgtgggaaaacacttaaacagtagttatgattttttaaacaagttttatgactgtagcccacgagcaatttttgaaaatggtatcttcttggcattaagagatttgaaaataccatctggaaaatcagatccattgaatgtggctaaaaataccaatgtattaaatgcggattgggcagaaggtaaaagacctcaacgcgctgctgaagctgtcgtgaattatttacatctgcttgataaccactttagtcaaaaagataattataattttttagttaatttctttatgtttagacttaaagaattagcagatctctatgcgagctctgtagtcactacaataactacagatacagaatctcagcaagaattagctatcaaattatggagttttgtttctcaagcggtagaaggtggaacgatacctcaattttttattggtacattgttagaaactatctatctttatgacccaaataccattgtgtctggaacaaaagagagcgtatcaggcacaaatactacatctcaaaaacctggagatatagtaatcactaaaaatgatgttatttctaatatttttgaagtaacgctgaaagtcgttgatactaaacgtcttagcgatagttatgatgtattagctgaacaaggatatttagatacacctattactttcctttgtaggattcctcaggatacatcattattaagtgaagtaacttattcacctaagatggttagcggatttacaaaagaacaagcccatcttttcaactttgttgatattgaaagtttcatctgtagtcagattgcggtattaaataaagcacagataacttacttattggcaaatctgaccgaattcatatcggaatatgatcgcccattaaaaactagagaaatttggaatgcccatttccctactgaagtaataaacaatcaataa

SEQ ID NO: 60312 - DNA, 252 bp, Acinetobacter baumannii
atgaaagtaaaaactatttataattctgattatattgagcttatccaaatcttatctagtgaaagaaaaagattaggaatctctcaaaaagaagtagctacattgttagatatttctcaggcagacatttctaaaattgaaagattagaaagacgtttagacatcttagagctaaaaagtttactgaaaatttatcgaatttcatctaatcagaaccttcagaacttagttctaaaattttttgagttttaa

SEQ ID NO: 60313 - DNA, 1086 bp, Acinetobacter baumannii
atgaaggctatttctttatttagtggagctggaggcatggatgtgggaatgattaccgcaggattctccgttcaaatagccaatgaaattgatccaactgcttgtaaaacttatgctttaaatcataaaagttgtttgttgattgagggtgatcttgatcaaaatttagaaaaatttaatggaatctcaaatattgatttaatctttggtggtccgccatgccaaggtttttctgtagctggaaaaatggatttgaaagatcctcgttcgaagctagtattttcatttttagaagtagttagacgagtttctcctaatgcatttgttatggaaaatgttaaagccttaggtgcattagaaaagtttagccacattaaacaagaaatcatctcccaagctaatgatatgggttatagagtttccgtaattcaactaaatgcaaaagattttggcgttcctcaatctcgtgaacgtgtctttttcattggcttaaaaaatgggaatcacattacattagatgattttgaacaatattgtgaggatgctcctagtattagagaagcaatttctcatttagggccagcaggatcagtaacgaatcctcatatcaccaatgcaaaaattacgattgccaagaatccagttttaagaaaatctgcctatgcaggaatgttatttaatgggcaaggtagacccttaaatcctgactcatggagtagtactctacctgcatcaatgggtgggaatagaacgcccattattgatgaaaatcacttatatgattacggtgaaagttgggttgagaaatatcattcagatttaatgagtggtaaggatattaatattctacaagtccctaaatccttaagaaggctaacgattgatgaagctaaaatcattcaaacttttccagaggattataaatttcatggaactcaatcaaaagtttttacgcaaataggaaatgctgttccatgtaaattagctgaagttgtagggctggttgtaaaaaacaaattagataataaagtcttaaaaacaactagaaatgaatatcaaagtgatctatttcctgaattgatgtaa

SEQ ID NO: 60314 - DNA, 969 bp, Acinetobacter baumannii
atgggagtaagagcaacaataaattcttatgatgaaatattttcacttgataattttatagaaaataaggaaatcaccttagaaaattttgaaaatattgtggttgattatgaaattaaagatacagagctaaagtgttgtttaaccgatgaaaaaggtaagtgtggtcagatccatcaaaaaggttatttagtcttattaaaggatgggacttacagtttgatggggggaacgtgtggcagaactaaatttaatgcagatagtacaatttccaaaaatattgcctatttcgaaaatgaacgtaaaagacaagaaaagctgggtaggctttatgattttataaataataaagaaaaatacgaaaatataattaatagcctgaaagaaatagttggtgaaataacagcattttatcgagagattcaaatactaggttttaaccttaaaatattgaatgatagatataaatcatctgatagagcagttctaataaaaacatataaatatgatgagaaaggtaattctagataccaagcgacagaaagaattgggtatttacaagagcttaatctgtttgatgaaaaagatactgggagctatggtctagacgttcatagactaataataggactaaaaaaagcttgtgagctagatgatcaaataaagcaaaagccgaaagctcgggttgataagcaagtcaatgatctggtaagagatttaagccattttgaaagtttgcaagatgaattattgatgagaaaatctagcatagagcggtttaaaaattcagacttatcactgctatgttatttaacaaatagttatcatattagagaagatgctgccaagtattttctacgaagtaaaggtagagatatttctaagacggaatcttatttagcaaacaaagatagctcctatttagatcaatatagttgtgatgaactaagtgttaaatcaaagcattaa

SEQ ID NO: 60315 - DNA, 231 bp, Acinetobacter baumannii
atgattcaaaatttggaaattttaaaacccggacaatttgtagaacctcaaaagggactctactttgaattaaatggatttcacttctcttttgatgctgaggaagctcgtaaatttaagtttttagcattcgaagatcattacaaagttgagtaccatgctgctcgtttttcattgagccgttctgatgctattgcattgcaagaaaaaattaaagaattagcaaattga

SEQ ID NO: 60316 - DNA, 894 bp, Acinetobacter baumannii
atgacgcttgaataccagttcaatcagctctgtaataagcacagagagggttcacacgcaacgcaagcgaatagacgctctatgcttcaattatttgctgagcagcttgccaaaaatggctataacattgaaatcatgtcacccagcgacctaaaaggtcgtcatgttaataagctgctcgagcagtggcgcaaagatggggttagtacgggcacaataaaaaaccgtatgactactattcgatggtgggcagaaaaggtcaacaatccgggtgctgtcaaaagtaacgatacttataaaatcgaaaaacgtgtatatgtcaccaatgaaaataaatctgtgtctttaagagacttagatttgtctaaagttaatgaaaacatagcacaaagcttacgtttacaagatgcttttggacttagacgcgaagaaagcatgaaatttcagcctgaatatgcacttgatggccaaacaattgaaaatgctaaatacatcagattaaaagattcatggacgaaagggggacgaccccggacgattcccctttcaaatgaaaagcaacgtcaagaactccgtcatgcatacgttttagcgcttaaaaatggcggttcaatgattcctaaggaaaagagctacaaagctcataaatcaagctttgaaacaattactcatgccttaggtgttggacaaacgcatggtttacgccatggttatgctcaaaccagataccgtgaattaatgggctttgattgtcctgctgtcggtggatctcgttcattgtcggtcgatgaattagttaaagataaagaaatcagaatgttaattagtgaagaactggggcatagccgtataaatattacgtctgtttatcttggtagttggagcaaaaaatag

SEQ ID NO: 60317 - DNA, 1743 bp, Acinetobacter baumannii
atgacatttaaaattttactgattttactcttttttgttgctgttggtcttttcgctgcggcatattttgtgacgaactttatcatttctgaaacgatcggaaagataaaacaagatcagttagacgatgttaaaaatacgactgctaagttttcactcttcccattattaattttttttgctggttttacatatttcttaagagtcaaattcactcttcaagactctgaatttattattatttctattattgcagctatattattttttcttgctttattttttggtgctcaatttattgatcaaaagaatattgagtacaagcgaaaagatattgaaaaaaagcagtccgctgaagggcttggaacgcttttaaatgaagttgaactaactgaggatgtgggaacacctttaatttcttatattttggatgatcagcttaaagaacctgtctggaaagcactaagagtcactaatgaagatcgtgggattgttgcaggtgtacccggtgcaggtaaaacagcttatttagtcctgcaactgattgattggatggagtcgggacaaagttttgttgcaacagatattaagcctgaaatctgggcaattttgaaatataacaatatttttgagcagtttggatataaagattgggtttttaatccaaccgatatcaatgcggatcactacaatttattttcagaagtacatgattcagcagaatttaatgaagttctcaatatcattattcctgatacggattcagcagatgccaaggtttttaatgataatgcaagacggcttttaaaagccgttctgatcgagttaggccctaaagcatcattaccgaatgcgcagcgttttatcaattcgatggatgataatgcagagttgttaaaaactttgagacagtctgataatgaaaccgtgtcgattattgcgaaggatattacccggacagccaaaagtgataatttacttgcttccatcatgaccgcagcttctaaagcatttgactttcttgatgatgagcgcattagaaaatcaatttcagacaatgcagaaggcttttatttaaaagacgttttgatgcaacctaagcaagcggttttcttgcagtttgatcaacagtataagagttcaaccgctaccctcttcggtgcaactgtggcgcatatcatgcgtattttgcaagcgaatcaagaccgtggcgcggtgtttctcgcacttgatgaaattatcaattgtgcacccattcccaagttcactgatttgctcaatacgatccgttctgcaaatatgcctacgttcctatatttgcaaagtttagaaggcttaaatcgcttgtatggtacgaatgccgagaggttattcttaggttcgagcaattacaaagttatgttcagaattgaagataattttactgctgaggaatttagcaaactgattgggaaaacagaaacgacctattacagctatgcaaagaataagggacaaggtgtaaataataatgacattcacacccaaagcacgtcatcaggcgattcagaaagtacaagacgtgaatacattattgaacctgatgagctgatccatttgcctaaatatactgcggttgtaatgtataacggtacgtttggcaccttagatattccaaagtattgggagttgtttgatatgccaatacgtattaaaaaagccagtccgagtgattacttgaattatgaaaaaacggctgtatag

SEQ ID NO: 60318 - DNA, 1113 bp, Acinetobacter baumannii
atgttgatgtcagctcagcaaataaaatctgtaaaagtaacaaatctaaattttgatcctgaaaatcctagattcgcagcggccaattggggaggcttagactcaaatgaaataattgaaacaatgttagatagagagcaagttattgatttaattaattctattggaactcaagggtattttgggggagaacctcttttagtcttcccagaagctggaactgataatttttttgttgcagaaggaaatagacgattagctgccttaaaattattatctggggaagtttcaatcccgaataaaagcttatctttattgattgaagaattatcaaataagccatcagacgttccttgtattattttccctgatagagaatcagtacttcattacttagggtatcgacatatcacaggaataaaagcctggggatctcttgaaaaggctatatatttagatcaattattcaaaaaaaatttacaggactctaatgatgaatctatagctttaaaaaaattatcacgagaaattggtagtaatgtacagactataaaaaagacattatgtgctttagctatctatcataaagattacaatgcgttgaaagatgagttttttggtttgcaacatgtaggtaaagaagatattcaatttagtctattgtatacagcaataggatatccagatattgcaaaatatctagggttggaaaatgcacagaactttcatcttaattctttaaatgtcgagcatgctagggatctattcaattggctgtttatgcaagatgagcatgggcgtaaagctgtttcagagtctcgaaaaatttctgtcttaaataatgttttatcgagtccagaagcaacagagttttttaaaagaacaagagatttggattcggcatataagttcacaaatggacctcaagatttttttaataattctttaactagtatggaaaaaacaattgaggaagtcacagctattattcgaaatgaaatatttgtacctacggatgtagatcttcacaatctggataagctttcagattcactagatgatttgatgagaaaggctcgaagagctgtaaaaaaatctcaagatttagaataa

SEQ ID NO: 60319 - DNA, 1005 bp, Acinetobacter baumannii
atgagcgaaactctatcttggattgattatcctaaattaagagagataccatctcgtcaaagtccatttagtgttagtgatgtagttgacttacttgaaatttggtgtgtatctagtattgataaaaaaatttcaacaagtcaattaattaacttttttgatgatgatttagcgattgttgaaaatgaacaagattatggtacagatataccaaaaagaataagaaaagaagagttttttacatttgtacatcagcggttaaagtatagacgagataaatgggggcagaaatggccatttagtattattactagtcaaggaaatatcaacattacctataagcctagttattttagtactacttatttagtcttcttattttgttctaatctacatattattaaaaagacggacagtcacttttttacctctgcatttgaaaacttagcatttaaacatttttcaagtattcacccctataaaaatggatggataactaaatcaatgggagcaaataatagcagtgttcatagctatataggttcaactcaaagagaaaaattagaagcgttagcaagagatttaaattgtggattagggcaattttacagatcaacatcttctggagatggagggatagatttagtttcttttttatcttggggagacttaagaccatcgtctagtattgcgttcggacagtgtgcttgtacaaatagtaagcgcaccatcttagataaaatttcagaaacatcatgggatagtattagagataagctagatattaattctatgcctttgaattatttatattcacctttagatttaaggtctgaggttagaccatctggttttgaattggatggtactagaaatgcagttattattgataggacaaggtttttattaagaaattttgattgttctgataccgttaattctaaattaaagtcatatatatatcggtttattcagttagaggaaaattattatgaggcaatatga

SEQ ID NO: 60320 - DNA, 216 bp, Acinetobacter baumannii
atgatgatgaaagagccgccagccaagcttgaaattactgtggtaatcaagccaactccccactctctcggagatctcggcatccgcatcatgagcactacagccgcaactgccatcacacagattgcgactacgatagtcatgccaaatgccttccaagcagcgaatccaccgatagtagttgatactggttcggtcatgattttctcgccttag

SEQ ID NO: 60321 - DNA, 762 bp, Acinetobacter baumannii; identical to SEQ ID NO: 52086

SEQ ID NO: 60322 - DNA, 294 bp, Acinetobacter baumannii
atgaacgatcagacaaatagtgtagttgaagcagctgcgagtacggctgccgcgactgcaacaaaattcacttatggctacgtggtaggggggagcttgatcgggttcattggaaaaattgactgggccgttgtcttctcgatttttatcggtatagcaaccttcctgacgaatctctatttcaaaaagcgtgatgaaaagcgtgctaacgagattcataaattgcgtgttgagcaatatgaacaaaccaaaaaacgtttagaaggagatatttatgacgagcgaacagactag

SEQ ID NO: 60323 - DNA, 171 bp, Acinetobacter baumannii
atgaatgtaatgggcttagttattacccaagcatcaaatcaaaaaacagtacctgttcgtattaatcttgatagaatgaaatcagctcttgcttcagaaacctttgttatgcctcaaggtttaagcagagaagagaaaagaagattaatattggaagcagggaaaaaataa

SEQ ID NO: 60324 - DNA, 393 bp, Acinetobacter baumannii
ttgtcatacacgtgggaatttggaaaacaatttgcagttgaatttggtcgttatcctgaaaaccaacaagataaaattctagatttcactgatgtctatgaagagtttggtttaagggacttttccaaataccaaggtaaaatctccccatcatggcgtggaatagataaaactgatccaatttataattacacatattcaaataatctttggcattaccatattggtattccagactatgttaaaagtaaatataacaactatttaacttcggacatgattcttcatttccagagaaagcagcaaatagatcatattcgcttagtagatattacttggcactataaagccaatggaatgttctggttaccaagtcctgaatatttagaataa

SEQ ID NO: 60325 - DNA, 168 bp, Acinetobacter baumannii
atgagtattccagaaattattttattaatcgaaagcattccagtctacggctgggcagtagtactgattctagccgtagcagtatgcgtcttagctgtgaacactaagatgaacatcatgatcaatattgaaaaatcggatactgaaattcctgccagaactaagtaa

SEQ ID NO: 60326 - DNA, 558 bp, Acinetobacter baumannii
atgtcagagcgtagaaaagtagccagatcaagaaagatagcgaagacttataaagagcgtcgtaaaaatctttggccggagttgactgactcagatttttggtcaaaagacagtaaggggtttgtgtgtgtaccaagaagtatgccgatcatcatgttaatcatggatcacttttcaccgaacaaacctatttctaagacgtacttttcactttggtgtcgctgcttcgatgaaatggtggttaaggcagataacaaaattgttctagctacagaagccggattttctggtgagcgtaaagtgaccacgtggaaatcacgtatagaaaaacttgaagaacttggctttatcaaacggcaagaaacctttgatggcgatctgattgttttaatcaatccattcaaagtgattttaaaactttttgaaactgaccattcaaatgctttagcagtgttgaaagatgcactggaaacacgcgttttagaagtcaattcaaaggacttggctaacttgcaacaagatgaaactgaagaagatgaggaggtaattgaagtatga

SEQ ID NO: 60327 - DNA, 447 bp, Acinetobacter baumannii
atgaaatttagcaccttgattgcatcccttttatttttatctcctatcacctatgcccagcatccaatggacaggttaaatgatttgatgaatagcccagtagctcaaaaaattaccactgaggatgaagttagaacatatgtaaagagagtgagggaatcacttgattttatggatcgctataaggcagctggaatatcttataaagataaaaatggttatacaaagcaagagcttaatgactttcaatgcaataaattatacatgatgactgatcttatagattttcaaaagatgtactcgcatttagcttatgtgccagagattaagtctattaatcaaaatacaattgagcttagagaagaagtacttaagaacgtcagaaaatacaatttcaagtgtacgaatgagctgataaatattcctttagatacctcaaaactctaa

SEQ ID NO: 60328 - DNA, 951 bp, Acinetobacter baumannii
atggatttagtcgttaaagataataatttgatcaatgctagttactctctgggtctagttgagcaacgtcttgtattgctagctatcattgaagctagagaatctagtaaggggatagattcagagacatttttagaaatacatgctcaacactatgcagatagatttgatgtaaatgtaaaaaatacgtatgccatgctttcagaggcggctcagactctttttaatcgtcaagtcacttacatgatgcttgatgaaaaaaggaataaacctgaaaagcgtgtaattcgctgggttagtggtatttcatatgtagaaggtgcaggagttcttaaactccgcttttctccagaaattgtccctctaataactaggctagagcaaaattttacgagttatgaactagaacaagttaaaagcttaaacgtgtatgcaactcgactatatgaattattagtttgttggcgtagtacaggtaaaacccccattattgaaatagaagatttccgttcaaaaataggggtgttacctactgaatataaattaatgagtgatttcaaaaagcgagttttcgagccagcaatacaacaaattaataagcacacagatttgacggttaattatgatcaacataaatcaggccgtacaattacagggttctcatttaaatttaagcaaaataaacctaaatcggaaaagatcgtagcagctaaacgagatcccaatacacctgacttttttgtacaaatgaccgattctcaacgtcatttattcgcaactaaactttctgaaatgcctgaaatgggcaaatattctcacggtactgaaagctaccagcagtttgctattcgtattgctgacatgcttttagaacctcaaaaacttagagaactttatccactcttagaaaaagctggatttaaggcaggatcagagaacaagtctatttaa

SEQ ID NO: 60329 - DNA, 243 bp, Acinetobacter baumannii
atggagttacttaatactctgaaagaacaaggctatcgtaataatagtttttttatagcttcaaatgctgctggacaattcattgtgattgatgcattaggagcagatttccaaataggtcatcaaatttcttatgaaggtaccaaaataataaatgaaactttaaatgatgagacagaagcaacagttcatctagagagtaatgaaaaagaggcttatgaatatttacgtgccatgaaataa

SEQ ID NO: 60330 - DNA, 219 bp, Acinetobacter baumannii
atgaaaagattaaaagtaattatcaaggaccagtttgataaagaatcaatcgctttggcaaaagttagaccaatgaatgaccatgcacttgaacttcataaaagtgttgaacatattgaaattaatgacgatatcattttaccaaacatggatttgttatatgagaatcctaaagacggcaaaatttatcaattaattggtccatgcagtgaggaataa

SEQ ID NO: 60331 - DNA, 723 bp, Acinetobacter baumannii
atggtctaccagaatattgaaaaaatcatgagtgagtacccatcacaccgatggatatttctcacgctcactgttaaaaatccgcatgtgactgacttgcgctcgactattcaagaaatgaatacggggtggaaaagactcacacagagcaagcgtttcagcaatgttgttgatggatttatcagaacaactgaggtgacaagacctcaaaaaaaggggcaggaaatggatgcccatccccacttccacgcgatgctccttgtgaagtccacgtatttcaaaggtacaaactacatcaagcaaagtgaatgggtcgaaatgtgggtgaaagctatgcgcctcgattacttcccgcaggtaaatgtacaggcagtaaaacccaataggcgcaagactccagaacaaaaccaagctgctttgcataatgcaattctggaaacgttcaaatattcagtgaagccaagtgacatgctcgcccatgatgatcaaggtgaatggctgcatgaaattacaaagcagactcaccgcctaagatttattagtgatgggggaatcctaaaaggtttgctaaaacctgaagatgaaatctcaaatgaggaaatgatttcgacatctgaagaacaggtcgaaaccgatgaaacccgaattggattttcatacttgccgacccatcggcgatatgtctataacccgaaatttaatgtctatcctgaaaccgcctaa

SEQ ID NO: 60332 - DNA, 606 bp, Acinetobacter baumannii
atgtcgaaaatgcagaccgattttgccaaagacctaaaaaaaatggggttagaacgtggggttgaggggtcgaaagcagagcatacaacgatcaagcagtattacagtgacctgattcacacggctaaagcggatactccagcttttcaggatcgacctgagctgcctaaaaaatccatgtttacagaatcggcttacgagtatggtaatcgtgtgatggatgttgtctatgaacatgtagatcaagacatcaagcaggtgaaaaaagaaaatttagagctgaagaagcaagtcaaagacctgaaggatgaggttggtcggctgcggtactttgaacgcaagaataagccttacagcgactacacacgcctatttcctgatgaggggcatagacttgatcaaaagttcaggcaagccacacagaacgagctagaacgcagggaacgcataaaactggagcaggaacaggacaagatacgcaaagaggcagagaaaaaagcggaacaggaacggatagcacaacaacgccaacagccgaaagtccgaaaaacttacagttatgacgatgaaccaccgaaaaagaaaaataacgattttgaaatgtag

SEQ ID NO: 60333 - DNA, 492 bp, Acinetobacter baumannii
atgtcgaatatcactatccgtgaatatgcatatttaagagtttcacaaaatcctcctcagcagaatcagaaaatggattttgcagaaatttcacagagtggttttgattacctatttcaactgaatcaggaactgctcagaaatgggcagcgaattttaaagttaggtagaacagcatcggaaattcaagtacagaattttgttggagttattgaaaccccatgcggcactgaaattgagatcttaccaaaacatgctgattcagtagaggataatggtaatgctagggctatcttgattaaaatcttgaaacaggttttacagttgccacagcgtgatacaggtcttgcctcgattgaaaaattcaaagtacctctaacagactggttctatgcacaatttttagatgctttgcagaaactttatcgtacagggatacgatttgattatcagcgagtagaggctgaagaaaacttcttacgaggacagtga

SEQ ID NO: 60334 - DNA, 1545 bp, Acinetobacter baumannii; identical to SEQ ID NO: 54995

SEQ ID NO: 60335 - DNA, 147 bp, Acinetobacter baumannii
atggcaaagattagaaatcccgaagttactagacaacaattacttgatgctcttgaacgattagaaaaaggacaacctgaacgtttaacaggtcgatttaaactaaatattaaaggcactgttgcaaatagggatctgagtcgatga

SEQ ID NO: 60336 - DNA, 489 bp, Acinetobacter baumannii
gtgcaacaaagcctagagcaagaaaaaattagacagcaagctaatttactttctaatatttcattgaaagcaaagcttggacataatttgggtggaggttatggcaaatttttgtaccaacaagattttaatgatagggatatgtcatctaaatactttgagaaagaaatcaaatcaggaagaaaacacatccatgctattgctccaggaatgtactgtatcaatcgtgcatgtagtatgagaattggtatagaatttcctgaatgtgtagattgtgattggtcaattattgaaagtacagcttatgctcaagctgtaagacaagaaagtataaacatattagaggttctaagcattgaaggacagttatccgatgacatttacgaatttcacaaaatacgcatccaagctgctgaaaaaataatgcagagtatgaacttaaactttgaaccttataaaattatgacagtcccaagagatcaactttaa

SEQ ID NO: 60337 - DNA, 966 bp, Acinetobacter baumannii
atggtgctgggcgagagcgacttccggcaccacatggaaagccacctcaggccgtttcgcgatgtgctgtcgggcctgttcttcgtgaccatcggcttgcagctggatgtcgcgcagatcgtggcagcaccgctggcggtactgggctggctgttggccttggtgcctctcaagatggggctgaactttctggctctgcgcgcaacccgcctgtcggcgctcgacgcctggcgcacaggcatcgtgctggggcatggcggcgagtttgcgctgctgctcctgggcatggtcatgcagcagcacttggttgccgccaacgtggtgcaaccgatgctgatcgcgttggtgctgagcatggggttggcgccgctcctgatccgacaccatgaccgttgggcgcgggcattcagccgctcgggcgcactcggtcagccaccgcaggccgaagaaggcgaagtcgccgagcgggcgcggtcgttgcgcgaccatgtgatcatctgtggggcggatgaagtcgggctgctgctgagtcgaacgctgcgtctggcaggcgtgccgcatttgctgctggaatcggaccgccaaagggtcgaagcgggtcgtgcgatgggggcgccggtgtcgtatggcgatgccagtcggctcgacaccctggccgccgccggattggcccatgcccgtctggtggtgctgacgcttgttcgtccgcagacggccgagcgcattgcgcgagcggtcctcgaacgccgcccgaccttgcccttggtggtggccactgaccgcgtaacggatgcccagcttttgcgtaatctgcccaatgtcaggctgtacccgttgtacctggctttgggactggggctggccgagcaggtgctgttgatgctgggcatcaatgccgactacgtcaaccgccggatcgaggaattacggcagacactcagtgagtcaggtggggatagaccatga

SEQ ID NO: 60338 - DNA, 1038 bp, Acinetobacter baumannii
  misc_feature (363)..(372): n is a, c, g, or t
atgtgtgaaacagttattaatcaacgcatcgttttagctaaacggccagtgggtgagccaaaacacagcgattttcgtattgagcaagttgaactcaatgaacttaaacaaggcgagatattgttaaaaaccatttacttgtcactcgatccttatatgcgtggtcgcatgagtgatgctccttcatatgcagcaccggttgaaattggcgaagtgatggtcggtggaacagtcagtcaagtgatggcctttaaaaacccaaaattcaaagaaggcgagtgggttctttccggaaatggctggcagggctacgcaatttctaatgggtctgcctgtcaaagcttaggtatgcaacctgaacannnnnnnnnngaacatccatcttgggcattgggtattttgggaatgccaggatttactgcttatatggggttgttggacattggtcagcctaaagccggtgaaactttagtcgttgcagctgcaatgggacctgtgggtgctacggttggacagattggcaaaattaaaggttgtcgcgtggttggcgtcgcaggtggggctgaaaaatgccgttatgcagtagaagaactcggcttcgatgcttgtatcaatcatcatgatgaaaattttgcagaacaattacaacaagcagttcccaccggtattgatatttattatgagaatgtagggggtaaagtgtttgatgcggtatggccattgcttaactctgcggcacgtgtaccggtgtgtggtgtggtttcccagtataacgctaccgagcaagcacaagggccagaccgtttaccgggctttatttccacccttttaaaaaagcgtattcgcatgcaaggctttattatttttgatgattatggcagtcagtatccggaattcaatcagcaaatgtctgactggttgaaagacggaaaaatcaaatataaagagcatatggtgcaaggtttagataacacgatcaatgctttcaatggtatgttaaaaggcgaaaactttggcaaagtggttgtaaaaatttga

SEQ ID NO: 60339 - DNA, 807 bp, Acinetobacter baumannii
atgaccctgaatagtgatttccagaaattatatgtagatggtcttattcatctatttgaactagatgccagcagcttaggtgctggcattttacgttttcacgggcatatttcttatcaagactgggagaaaatctactcttcaattggttccgaaggtttaattggtgccgactctggcagcattggaaagatttttgataccggtgatcagaaagtatggaaccgaaatattatctggcaaggtcaagtttttgagccgatggccatggaagtatctgggcttgaaatgcgttcagatggtaaagcttcagcgccaactttaagcatggccaacaatatcaacggcattcaaaatgctgtgtctgcttactgtttgcagtttaaagactttgctggtgcaaaacttaaagtcattaccacccttgctaaatacttagatgctgaaaactttacaaaaggcaatccaactgcttcgaatgaagctaaagaacaaatctggtacatcgagcaaaagacatctgaaaatgcacaacaagtgactttcgagctctccaatccaatcgattttgaagggttgaaaattcctgttcgccaaattacatcattatgccattggtgcatgatggggaagtatcggggcgaagaatgtggttacacaggtgttgcaatgttcactgataaaggtgagccaactgataatccagcacttgatcgatgcggtggacttctgcggtcttgccgcttgcggttcggtgagaataagccattgcctttcggtggttttccggcttcaagtttattatga

SEQ ID NO: 60340 - DNA, 807 bp, Acinetobacter baumannii
atgaccctgaatagtgatttccagaagctttatgtagatggattaatccatttgtatgaactagatgccagcagtttaggtgctggcattttacgttttcatggacatatatcatttcaggactgggaaaaaatttactcatccattggatctgaaggattgatcggtgccgattctggcagcattggaaagatattcgatgttggtgaccagaaggtatggaaccgcaatattatctggcaaggacaagtttttgagccgatggcacttgaagtatctggtcttgaaatgcgttcagatggtaaagcttcggcacccactttaagcatggccaacaacataaatggcatccagaatgcagtatctgcttattgtttgcaatttaaggactttgccggagctaagcttaaagtcattacaacacttgccaaatatattgacgctgagaactttacagaaggtaatcctactgcatcgaatcaatcaaaagagcaaatctggtacatcgaacagaaaacctctgaaaatgcccaacaggtaactttcgagctgtccaatccaatcgattttgaaggtttgaaaatcccagttcgccaaattacttcactttgtcattggtgcatggttggcaagtatcgtggtgaggaatgtggttacacaggtgtggcaatgttcacagataaagatgagccaactgataatccggcactcgatcgatgcggtggacgtttacgttcttgccgcttgcggttcggtgaaaataaacctttgcctttcggcggtttcccagcttcaagcttattgtga

SEQ ID NO: 60341 - DNA, 1209 bp, Acinetobacter baumannii; identical to SEQ ID NO: 45825

SEQ ID NO: 60342 - DNA, 219 bp, Acinetobacter baumannii
atgacaagaataaccctaaaactgcctcagtatgaattagcaagaaaaaaaattgcatcaaattatatgcaacagataggactgcctgaaacgattatcaatgcttttgtagaacttgatactgaaaataaaaattactggaagattttgactgatttagatacaccttttgatgtgatgtgtgctgaaaaaacaggaggttttaacttggtaaactaa

SEQ ID NO: 60343 - DNA, 690 bp, Acinetobacter baumannii
atgaataaatattttgctgaattcctaggtacgttttggctagtctttggtggttgtggtagcgcagtgttagccgcagctttccctgaacttggtattggctttgcaggtgtagcccttgcctttggtttaaccgtactcactggtgcttatgctctagggcatatctctggtggacattttaaccccgcggtcagtgtcggtctttgggtcggtggccgtttcgatgttaaagatttaattccatatattgttgcgcaagtggttggtgcgactgctgctgcatttgttctttatattatcgctcaaggtcaagctggctttactggtgtgggcgggtttgcaaccaatggttttggtgatttatcaccaaataaatttggtttaggttctgcttttattattgaagtggtacttactgcgttcttcttgattgttattttaggatcaacacatggtcgtgcgcctgctggttttgcacctattgcgattggtcttgcattaacgcttattcacttaatcagtattccggttacaaacacttctgtgaaccctgcacgtagtaaaggtgttgcattctttgctcaaactggtgctttaagtcagctgtggttgttctgggtagcgccgattttaggtgctgtgattggtgcaattatttataaggtagttgctggagacaaggattaa

SEQ ID NO: 60344 - DNA, 315 bp, Acinetobacter baumannii; identical to SEQ ID NO: 52100

SEQ ID NO: 60345 - DNA, 411 bp, Acinetobacter baumannii
  misc_feature (321)..(330): n is a, c, g, or t
atgcgtaaacttactgcgctaattggcgtaattggtatcgcttttcgatacgctgtgcgaacgatttcagggtcgacttcattggggtcacatccagcaggcaacgtggccaaccttgcctttatgccaaagctatttatctttaaacatgcatcgatcgcagacagaattgcggcaggctctccatcccacataattgtcacgcactccaatccctcatctttgagctttagtaattcagccatttgcgattcatcaccacctaccgaaagatgcttaccaaatgacgcgacaactccaacattgcaaaggaactcgtcnnnnnnnnnngaactcgtcttccttgaaggcttgatatatcgccatagcgtcaaaagcgccctctcccatgacgatttcaacgtaacctag

SEQ ID NO: 60346 - DNA, 189 bp, Acinetobacter baumannii
atgaagtctagcaatatttctaataccgtagacttgttatcttctgatcgattaaagagttataaattatattttaatttaaaaaataatgaggagtgcataggtgtatacctttggaatgatgcgctctcaactgctttttttaagttgttaagtatttttgaagttgcatttcgtaatatggtatga

SEQ ID NO: 60347 - DNA, 360 bp, Acinetobacter baumannii
atgagtggacgtggtggattatcattaggcaacacagcaacgtcagaagctaatgaaaaacctgtagaccttgataagcttgatgaactatcaggattaagcaaacctaaagagaaaaaggaccgtgaagcgccttggcgtcagggcattaatattgctcctgaagacttgaaattaattcaacgtccttttaacaacaatattagccaagaaatgtaccttcgtttgaactggcttaaatctatcagctccattggcatgggttctaacaagaccacttttacaaccatgctcaatgaagctttagaagaatatacggctcgtcgaatcaaaaaactcggcgacaattatgacgtctga

SEQ ID NO: 60348 - DNA, 237 bp, Acinetobacter baumannii
ttgaaatttaatgcatatgactatttgaagaaaaaaacactttgtttagttgtatttaatatcatgctaacagctgtttctgttcatttttggggcttaaatggtgcagtttttgccattttaactacagaaattatgtcattttctatatttaactatttttataaagatagaatcatactcgatgttcaaaagagaatttttttaccttccacttatagaaaagagtacaactaa

SEQ ID NO: 60349 - DNA, 522 bp, Acinetobacter baumannii
gtgaatgcaacacaagcaccctggtcacagcatttcaaaatgtatgattatattgtggaagagctgagaaatctgattgacctgaattttccgaccaatcaagtccaaagcattatggggcatagcatgggtggtcatggtgcattagtaattgggttaaaaaatcctgagctgtataaaagtatttctgcttttgcaccaattgttgcacctagccaagtaccttgggggaaaaaggcttttacacactacctaggtgaaaccgaaactttatggaaaagctatgatgcgattgaattaatcaaaaacgctgaagttcatttacctattttagtcgatcagggaacagctgatgattttcttgaagaacagttaaggcctaagcttcttagtaatatttgtttggaacaagaatatcctcttacacttaacctaagagaagggtatgaccatagctattacttcattgcgagctttatagagaaacatatagagtttcacagcaaattcctagctaaataa

SEQ ID NO: 60350 - DNA, 321 bp, Acinetobacter baumannii
atgtatgaagtttgtggacaagctcagcgttctatacgttggaaacatgcgggtctaaaacacttattcaaacatatcaacggtcgtaacaataaatggctatctgaaggttttagtagatttgtaaaaggtgagttagctgacttagaaaaatatagaaatatggcaaatacgatgccaattaaattagaggtaacaattgttcagcccggcttaagtaaatcagttattaccgaagagatatcaaagttattagcatgtactgaatcgtacataaagaaaacaacaagagctgacctaaaagtttggtgttcgacatga

SEQ ID NO: 60351 - DNA, 279 bp, Acinetobacter baumannii
atggttatgcatggtgcacttagccctgagatcacaccatttccccttaaagttgcattacgcaagagcttaaccatgcgaggttttttgttccttgaggttctccatgatcctgttctaagggagcaagccagacgatttattcttagcagtataggtgcaggatatcttcgtccagtgatcgactgttgctttaactttgaggacatgcatgacgctcagcgctatcttgaatcaaatcagcaaataggaaaaattgtagttactctaaatacatga

SEQ ID NO: 60352 - DNA, 192 bp, Acinetobacter baumannii
atgcgcccatccaacagtaaccagaattactcgttgtatttgccacgtatggttgaggactgctatcgaatcgataaaacggaagctgatgatttaaaacgtattgaagagcaattcaaaaacgctatcgaagctgccaagaagctggcagaaagtgaagcggtggtgattgacaatacagcgacagcataa

SEQ ID NO: 60353 - DNA, 825 bp, Acinetobacter baumannii
atgtgtgaaaatagcgaaaaattcaaagatttatgtgaaaaccaagcactttatactagctttgtaatggtaggtaatcattctatctatgattatacttctatcatgcttgaggaagttaattttgaatgtgatgtttgtaataaagttagaccttttcataacttaaataaagatttatatgtatttcgctttataggaaaagttaataatctaaatgtaatggctgaatttgaatgtgtttcatgcaagtcgcaaaaaaaaacattttctataggagttgattatgtagatggttcagatttagcaggagaaaaatgtgagtataaaattacaaaatttggtgaatttccacaaaaaaaactaactaaaaataaagatttggataaattttttaaaactgaaatgcagttgtatagaaaagcaattgtttgtcttgataatggttatggtatcggagcatttgtttattttagaaggcttattgaaaacagcattatttcacttttagagatgatcgaaaaagatgatggtgctgatataaatatgaaaaaagcaatcagtgagttaaaaaaagaaagcccaatgtctaataagattgatattgcaaaaaatgctttacctcttacactttatgtgcaggggaaaaatccattgggttcgctttataaaattctgagtgaaggtgtacatagctttacagatgaagaatgtttaataagagcaaaaacagttcaaaattgtttagagtatttaataggtggtttagcagaaaataaaagaagaaaagaattatttggtaaaaatttaaatctactaagctag

SEQ ID NO: 60354 - DNA, 489 bp, Acinetobacter baumannii
atgcctagaatagtttcagtaattccacccaaagatgactctgacattactaaagcacagggtacgaaaatattacttgataatggcgagtaccttcgacatgtccacaaaataactttagtggccgaacctgagtcgccgtggaaggcaattattgaagtgtatccatctaatcaagagcaaattaatgcattgcttgcagatgttgaggttattaaacgtgaccaagaatccaaccgcttggatgagattaaaaaggaaatccagcaactacaagatgagaagatgctcattgagcgtaaacatctttcagaattaacagggctttcaattgctggtgttgcgaatgtaccaatggaaggcacttacttacttccagaaggtgaaaagattttacctgttacaggaaaggttaaggatattcatggcgtcatccattccgttccagatctaaaaggtgagcatgatgattccgaagagcattattaa

SEQ ID NO: 60355 - DNA, 429 bp, Acinetobacter baumannii
atgacaattataaataaacttaatgaaagtctctttgcatatgaaaaattatatgatgagacaccagaattgctatttgtagacttgcaggtttatgaagagattttaaaatcttctcatatggtaaaactgtcacaaccaacccatgaaaatcctttaacgtttaatggatgtgagttgatacctgtagaacgcatgcagactgaatttaagtatttaagtcacaaggatttggcaagcgcaataaagcaattcaatattatgccaactgacttgattgtcattcgcaaagctgaaaatacaaatcgcaatgaagcagcaaatgcaagacgacttggcaatgaaatgatgtacaagcatttttatattgattcttcaattgtaaaagcttaccagcgacattacgaaaataaagatttagagttttaa

SEQ ID NO: 60356 - DNA, 399 bp, Acinetobacter baumannii
atgaatatcgaagtaaaaattaagccaacagtcagaatgatgcagaatgagcttgcccaatgggggaaatgggcgcgaaatgcctcttttaatcctagtgaattaatttataaatctccaagtttaggattaatgagactaaaagagggatttaaatctaaaggcattcaggttactttgaatgatgaagcactagttgcaattgaccatttagtcatgcagttaaagttatctcgaccagatttataccaatggattgagtttcattatttaaaagggtatccagttgcagttctggctacacatacaaaagttgatcgaagaaatattgataaatatttgttagcagcagaaacatggctagatagtagacttgaatctatttgtcaaaatctatga

SEQ ID NO: 60357 - DNA, 774 bp, Acinetobacter baumannii
atggcagatgaaataacagtaattcaagcaacaatagaagctgctcgaattcaaaagtggggaactatttggggggcagtgataggtggtattgcaattgcagtaggtgtgtatttctcgtggagaacatctttgcatttgcaaaaagaagcaagacttgcggagacaaggaaaaatgtatatctagagctagttgaaaattactcaaaaatgatcttaggttttcaattattattatcagaattagataaaaattgggaattgcaaaaaaatctagttcacacttttagtacttcacttgataaagcagcatttatttgtgaaacttcaacgaaggaacaaatatataaatttttagatgtttttatagaaaaatttcgtaatttacaggaaaaaattaatccattaattatttcgaacagcgaaattgaaaagttatactccagacattctagatctattaagctatttaataatgcttctgaagagtatgaaagaatcaagttatttggagagggaattgagagaattccattgatacaaaaatattttgatgaaaaacttaaagagtctgaaggttacttaaattcgatgaatgtgcttggtgaaaaaattaaaattgattctagagaaataagcccattaataactgatttaataaatgaatcaaatatgaatgctaataaagttgttcatctattaagaaaagaattaggggcaaagaccgatattgatttagatacgaaattacaaaatttaatgatcatcgagtag

SEQ ID NO: 60358 - DNA, 642 bp, Acinetobacter baumannii
atggatcagatcagaccatttcctccaactgattttattgaccaagctgaagaggaggaagcaatccgtttaataccggcaccagacctaaagaaatgggttgtggccaactacttaacgataggtgggcctctttataaccccgatcatgatcacatagctgagctgcttcacgataatgaagaatttttagcattcgcgtgggcctcttctgcatataaaagcaagcaagctatggtgttgggccagtgcgaaaaagtcatgttcaatgtcggtggctggcgtaaagctcgacaagagcaacagatgcgtgattggtttggttttgtacctacttatttaataactgtcgacgcttctttctgtgagcgtgcaaacgatacagagttctgttacttacttgaacatgagctttaccacattggagtgatgagagacgaggacggagaaattgtttatagcgatagttctggtcttcctaagcactatcttgcaggtcatgacgttgaagagtttattggcgtagttaaacgttatggaccaagcaaaaatgttaagcgacttattgaagtcgcaaaaaatccgccgtttgtttcgaatcttgatatttcaaaatgctgcggaaactgtgtaattacttga

SEQ ID NO: 60359 - DNA, 798 bp, Acinetobacter baumannii
atgactgctcaaatgaaaacaaatgcatcagcaaaaaaagctgtcaattcacctagccatatttacgatacctttattgtcggtgccggaatttccggtatcgccgcagcgattcgtctcgaccaagttggctataccaactataaaattattgaaaaagcaggacgtgtgggtggcacttggcgtgaaaacacctatccgggctgtggctgtgatgtaccgtcagctttgtattcttattcgtttgcgcctagtgcaaaatggagtcacttatttgcgcgtcaaccggaaatcttaagctatttagaagatgtaagtaacgagtttaatattacgtctaaaattgagtttaacaacgaactactcaatgctgcttgggatgaatcacaccatttgtgggtacttgatacaactactggtcaatatctatctcgaactgttatttttgctacaggcccaattaccgaagcccagattccacgtcttgaaggtttagatacctttacaggtgaaatgttccattcagcgaaatggaatcatgattatgaattaactggaaaacgcattgctgtaattggtacaggtgcatctgccatccagtttgtgccccaaattcaacctaaagccaaagaattgtttgtattccaacgtacagctccttgggtactgccaaaaccggatacagacttaggtgagtttagtaaatcaattattgcaaaatatccagcgattcaggcaagttggcgggcactgttgcaaatagtcggtggtgataaacttatcatccccttttgctga

SEQ ID NO: 60360 - DNA, 948 bp, Acinetobacter baumannii
atggctaaaattttaacaattactttaaaccctgcaattgatgtaaccattcaactggatgagttactagtaggagaagtgaatcgacaagagtcggtagaaattcatgcggctggcaaaggccttaatgttgctcaagtattaaaagacttaggtcatgatgtaatcgtaaccggctttttaggtgagcataatcgacaaattttcgatacacattttgcacaagctcaatttcaacctgagtttatttatattgatggtgaaacacgtcaaaatataaaaattgctgagcattctgggcggatgacagatttaaatggcaaaggtttttttgtttctgaaacagacaaacaaaggctatttaataagattgaagctctgttaccacaagtcgaggttgttgcaatagctggtagcctcccgcaaggttttagtattgatgagttacaacaacttattcaactgatcaaaaaaaataataagaaagttgccctagataccagtggtaaagcattggttgctgcaattgaatgtcaaccttggatgatcaaaccgaataccgatgagttggttgaaagttatcaacgtccagcaacaagctatgctgaacaaagagaactttttgatagcttaaccaatattgagcatgtggttatctcaatgggtgaagatggcgtaaattggttacacgccactcaccccttacatgctcaagcaccaaaagttatcgtaaaaagtacagtaggcgctggtgattcactcttagccggcatgatccatgggcttgttaaccaactgcctcctgaagagaccttaaaaactgcgacagccattgcaagccatgctgtaacacaaattggttttcgaatccctacttctgaggttctaaaccaattaaaagcacaaactattatcaattcattgagtgaatctgatgcaaactgctaa

SEQ ID NO: 60361 - DNA, 651 bp, Acinetobacter baumannii; identical to SEQ ID NO: 59726

SEQ ID NO: 60362 - DNA, 216 bp, Acinetobacter baumannii; identical to SEQ ID NO: 48566

SEQ ID NO: 60363 - DNA, 243 bp, Acinetobacter baumannii
atgagtccaggcgaagaaatgtttgaatggcgcaagcagatggttgagaaactactgcttcaggaaagtaatattgatcaactagaagaaaaagttgatcgtgctgaaaagattctttttggtgattgcacagccgctttcaaaatagagtgcacgcttcggaacgcgtatgcgctgaaagctattcttgatgactttgccaccaagaataactgcaaggtaagtatagtagagtgtgagtaa

SEQ ID NO: 60364 - DNA, 348 bp, Acinetobacter baumannii; identical to SEQ ID NO: 6026

SEQ ID NO: 60365 - DNA, 306 bp, Acinetobacter baumannii
atgtcagaaaaccaaaaaaaattattagagaaacaaggatatgatttctcaggaaaacttgaagaaggaaagtggagcttagttagttttgcgtgtattaaaaataatcaagattcttttcttttattaaatcaagctacctctaacaatataaatatgatggatcatagtaaaggatcattgtgggataatccagtattattagatcttaaaggtaatataattaaaaatggaaataaagaaatattaaaaaatagtaaaaaaggaaaagcaatttcagctaatgcagtttatgggaatgagtga

SEQ ID NO: 60366 - DNA, 1947 bp, Acinetobacter baumannii; identical to SEQ ID NO: 49284

SEQ ID NO: 60367 - DNA, 672 bp, Acinetobacter baumannii
atgatcgcattcaatcacgttgttccggtacttaatctgtcggtgttcaacgtcagacgggcaccggccttcgcgtttgagcagagcaagcgcgcgaccataggcgggcgctttatccgtgttgatgaatcgcgggatctgccacttcttcacgttgttgaggattttacccagaaaccggtatgcagctttgctgttacgacgggaggagagataaaaatcgacagtgcggccccggctgtcgacggcccggtacagatacgcccagcggccattgaccttcacgtaggtttcatccatgtgccacgggcaaagatcggaagggttacgccagtaccagcgcagccgtttttccatttcaggcgcataacgctgaacccagcggtaaatcgtggagtgatcgacattcactccgcgttcagccagcatctcctgcagctcacggtaactgatgccgtatttgcagtaccagcgtacggcccacagaatgatgtcacgctgaaaatgccggcctttgaatgggttcatgtgcagctccatcagcaaaaggggatgataagtttatcaccaccgactatttgcaacagtgccgtcagaaagtcaacgggcatatcggcctccctgcctgacgggcatttagtaacatttttgcaaccgtccgaaatgttataa

SEQ ID NO: 60368 - DNA, 612 bp, Acinetobacter baumannii
atgatcgcattcaatcacgttgttccggtacttaatctgtcggtgttcaacgtcagacgggcaccggccttcgcgtttgagcagagcaagcgcgcgaccataggcgggcgctttatccgtgttgatgaatcgcgggatctgccacttcttcacgttgttgaggattttacccagaaaccggtatgcagctttgctgttacgacgggaggagagataaaaatcgacagtgcggccccggctgtcgacggcccggtacagatacgcccagcggccattgaccttcacgtaggtttcatccatgtgccacgggcaaagatcggaagggttacgccagtaccagcgcagccgtttttccatttcaggcgcataacgctgaacccagcggtaaatcgtggagtgatcgacattcactccgcgttcagccagcatctcctgcagctcacggtaactgatgccgtatttgcagtaccagcgtacggcccacagaatgatgtcacgctgaaaatgccggcctttgaatgggttcatgtgcagctccatcagcaaaaggggatgataagtttatcaccaccgactatttgcaacagtgccgataaaaatatatcatcatga

SEQ ID NO: 60369 - DNA, 522 bp, Acinetobacter baumannii; identical to SEQ ID NO: 46238

SEQ ID NO: 60370 - DNA, 654 bp, Acinetobacter baumannii
atgagctaccagaaactcagccgtgaccagattgcgcaacttgtggcacaagatattcccgatggagcctatgtgaacttgggcattggcttaccgaccaagattgccagctacttacctgctgacaaagatgtcttcctacattctgaaaatggcctgttggcttttggcccaccaccagctgcaggtgaagaagaccctgaactgattaatgcgggtaaagagtttgtgaccatgcttgaaggcggcagctttttccaccatggagactcctttgccatgatgcgtggtggtcaccttgatattgcggtgcttggggcatttcaggtggcagccaatggtgacttggcgaactggcacacgggtgcaccggatgcgattcctgcggtaggtggtgcaatggatttggcagttggtgccaagaaagtatttatcactacagaccacatcaccaagcaaggtgagccgaagattgtcgctgagctcacttatccggtaacgggtaaacactgtgttgaccgtatttacactgacctgtgtgtgattgatgtgaccaaagacggtttaaaggtgattgagaaagtggaaggtcttagctttgatgagttacaggctttaaccggtgcaactttgattgatgcgactcaagggtaa

SEQ ID NO: 60371 - DNA, 744 bp, Acinetobacter baumannii
atgtgtataagagacagcagtcctactatagaaacgcaagagattgatttattatttatttcttctatagagaaaaaaattaatgatgaggatttttcatatatagagctttctataaaccacactaatcagtcatgggccttggatattttaagtgcatttaaggataaaattaatgagattgctataaaaccttcaatattaaaagaaaaatataataaaataacagataacttattttttgcaactatagtgcctatgttttttattgtgttaggtttaggtttaactatccctgttgcacagaatgaaacgcaaagacttagacaagatttagttcaatataatttgaaacagaactataaagatgatttatcaaaagttgttgggcttttaaatattacaactcttgaaagatctgaattaaaagaattaggtactaaaaataaggaaatagaaaagataattgaaaaaaatcaaaaaaatgttgcattacacttaactcttatagttttactttttataattccttttgttgttcgtaaatatattaaatatagtattaattattttaatcataaaagctttattttagtaaataattattctcaaagaaaattgcagaaatataaagatgataaaagtaagataacctatataggatttactgtctttgtaacttcaataacattttctatattggcatccgtaatttttaaggtattagatgctcttgttttttaa

SEQ ID NO: 60372 - DNA, 162 bp, Acinetobacter baumannii; identical to SEQ ID NO: 51478

SEQ ID NO: 60373 - DNA, 2400 bp, Acinetobacter baumannii
atgtcagtgccagagcaaataccatatgtcggatatgtcgcgaatgggcagacgactgaatttccaattacttttgatctacatgatccagagtacttgattgtaacagtgaataaagaaattcctgttgttgggacatatacagttgatatgaatgctctaaaagtagtgtttgcaactgcaccaacagatggaacacaagtagagttgtatcgagaaacggaactaaaccgagatacaaattaccaaaaatatgacaactcattccgccctgaagcggtgaattacgacttcgataagatttggcatgtcttacaagaacaagacatgatcgatgctgaattattagcgcgtcttaaaacggaaattgaatggaggcgcacgcatgacgctaactttgatgaattagcaaaaatgcgagatgcacaaatattctcaggtctaaagcaatatattgatacctttattgcagcgtctaaccctaatatttttgagggtatcacagctgggattgtcttcgctttagataaaaagagtgttcaaacacacttggaaaatatttatctagagcttgcgagttctcgccaaagcatcattgatgagacggaaagggcagaagcagaagaggtcaaacttgatcagaaaataacattagaaaaaaatagagctatagcagcagaaaaaatacttgatgataaaattaatgcaaacgggatagggaatagagcatacaaaacttatgcagaaatggatgctgacaaagccaatatccctgaaaattcaaaagtaactgtgacgaatgaccctgacagcaataaaaacggggattatcaatgggatggtgcaatattcacaaagtcggcatacgatattttaactcaagcaaaagcggatgctacagaaaaagccaatgctgctgaagaaaacgccaagaccactactaaacagcttattagtaaacatattgaaacagatacctcaaacaatcttttggttttggatgattcagatgggcgtgtatatgctttttttaatgcttattcagagttatttttaactggttctgatatctcagtccaagaaatgggaagaattgccactagttttgctaatatattaaacacaaatatttcaagtaatatctgggaaatcaaagactcagttggcaacctttgtgtatttgttaattcagaaaatgaattgttcttaactggacttggtgtttcagtccaacaagcactcaaaaatataaatgttaaaaccagacacttgaataccccagttactcggcaaagctcagccgatttaccggctattgaagtcatggcctcaattaacttcttgaaaaatacaggcgtccaagtttgtgatctacctaaaaacctttaccctcaacaatttagtatcgggaattcttttcttaatactgtaagtgcccctgctaaaaatccaactgattatataaaaatcgatgtttggaatgaccgaggtgataacacatcttggaagatagattcgggtgttgtgcatccaaatgttattgatttcggtgttggcaagatgctaaacggataccgttattggatgggccttaacccatacacaaacacagatgaaaatttcgagctgccatatatttttggttcaaatgatttaaataactgggagttaatgacaaatatcccttgtccatttgatgttgacccgaaaacaaattctgatgatccagcagttgaatcaacatctggtcacttatcagactcattttttacttatgacacttcgaccggagaactatttttctgttggcgaagaaatttatatttcgaaaatggtcgtgatcgaacaaaagctaaggtgtcattatgggctagatctacaaaagacggtgtgaactggtcagataagtttgaaatatatccagaatacacaaacataactgggcatattcttgcgtctccagcaatcatttttaatcctgaagacaaccttttttatctgtatcacgtaagtgattcaataagcggctatgtgcgagtacaaacttctcctagtcttcatagcccaaaatggtcggaaatggttgctgttgagggtcttgagtcaattgttccatatcatttggaagcaaaatatgtcggtgatcaagttgtcttacttattcactcggaagtgactgatcaattgtatttcgctgtaagtgatgactttaggaatttcaaagtaagtaaaaaaatcttagaaaccgacactgatatatataagggttcatttctaccgattttcaatgatcaaaatcaaatcgcatttcacgtgttttatacaagtgatcagaaagcccagctgccttggcgcctatatcacactcaaacaaattttaattctttaggagctgaataa

SEQ ID NO: 60374 - DNA, 2871 bp, Acinetobacter baumannii
atgacttggtatgacacatttgcagatgatgagcagaagtcagtagaagaactccaaagaaaagggattactggcaagccaactgttcaaaaggaagtaggtattttcgatggcgctatctcttcaccttttcggggtatggcaattggtcttaacaaagttggtgatgcaatttcggcaccgattgatgccgttgtagaccgtgttagctatagtctgaaagacgtttcaacaaacgaatttattgaaccgtatgaagagttcaaggctaagcgtgaaaaagcccgcgacaatctggtttatggaactattgctgacctagaagacaaagacaatacaggcattgtcgggaatatcggtgtaggtcttggtgattatctctggcgtggtgcgctaggtgtagcaacaagtggcactttaggcgctgccactttaacaggtggttcaactggtaattacgtctataccgatttaacccgtaaaggcgtagatgaaaacactgctttaaaggttgctggtgtaaatgctgttggtgatgcgattggtactgctttacctattggttatggctttaaaggttcaggtggtttagttgctgatgctgcattgtcagttggtggtgccactggcttgaacactggtatgcaatatgcaagtgagcagcttctaaaatctaaaggctatgataagcaggctaagcaatatgaagttacaggcgaatctgtggcaactgatttgcttattaactcattaatgtttggcggtgcacgttacttaggttcaagacaaaatcaactagaccaagacgttgacgctgaaattaaccagcttcattcagatgattttgaaaccagtaatgatgtgttaaatgatgctctggtcaaaaatagctttgagtttgaagacacaactttgcctgttcaaactacagatccagttcagcaaaacaagcactatcaaaacctagatgctgctacggaacaaatcttaaaaggccagccagttagtgtgcctaatacagtgcaaggagagccgcgtagaaacacgattgattatgcaactagctcactacctacaaatgctaaacaaatcgcactacgcgcgaaacaagacggtatagaccctagtgttgctttgacgattagccatatcgaaacaggcggcaaatttaatcatacagcgcaaaacccaacatcaagcgcttacggccttttccaagtcttagatgacacttggaagaacttaggcggtaaagaccgcaacaatgttgatgagcaaatacgtatcggcttaaagcacattaagcaggccaataactacatacgtaaaaacttaggccgtgatccagttgcacatgagcaatatcttgggcacttacttggaccagggggagccgttaaagttcttaaagctgatcctagccgcccattaattgatgtagtgcgttcgtacgatgctaaaaatgccgatgctatcgttaaaaataacggtatgtccggcatgacagtaggcgaagctattaacaaatggcgcagcaaatggaaccagttaagctcacgctatggtggtgaaacaagcatagcccatgggatggatggctcaagctatgatttcgcttatgaagtgaaagattgggctgatttagtagcgtctaacgaccagttatacggtgtaaatccgctttacccaagtgaactacagccacgtgaccgaacccgtgaagcatcacgccagcaaattgaacgtatggctgatgacttaaagcctgaattattgggcgagtcttataagctatcagacggtgcacctatcattggtcccgataatgttgtcgaatcaggtaatgggcggacattagcaattggccgcgcttatgataatggacgagcagatgcttatcgtgaatttgttcagaattgggcgaatagtagaggcatggatatatcaggcttaaatcagcctgttttagtacgtacacgtcttagtgatgtagaccgtgtagctttctcccgtttagccaatgaaagtgatgtggcgcaattcagcgcaactgagcgcgctatgagtgatgttgatcgtctaccagactcaacactactaaaaatcaataatgatggttcaatcaatattgatggctctatggattatgtccgtagttttgtagaccaattgccacagtctgagcgcggatcagttatcacaagtgatggtcgcttatcccaagaaggtaaacgccgaattgaatcggcaatcgtacagcgtgcctatggagattctaaccttgtaactcggctatctgaaaacttggatgatgacagtaaaaacgttctaaacgccttactccgtgcggcaccgcaactttcgcagcttaatgatttagtgaagcaaggtggacgctttgagaacactatttctcaagacttggcgcaagctgcacaaaagcttacagacttaaaagcaaatggcttacaggttcgtgactatttaaatcaaggccaacttattgatgatggattaagtgatggagcaagaagatttcttgaggtgtttgataataaccgcaagagcgcaaaggcgattagtgaggccattaactctgagattcagaccattgaaaacatgggcgacccgcgacaaggctcgttgtttggcgaaacaccagaagaaaaagccgcgcttgatgtgattttttcaaatccagatcaaccaattgcagtaagtcgtattaattcaatgggtgaaccagaagaattcaccatgactttacgtgattatcacgctgagcttgaagcagaaattaagcaatctgagcaagatattttagcagcacaaaccgccttgaactgtgctttacaatttggagcagcataa

SEQ ID NO: 60375 - DNA, 198 bp, Acinetobacter baumannii
atgtgtggggcactttcagcttcaagagaagcatttgagatgagcgaacgttcatcaaggaaacgaacgattcagaagtcaaatgaccaacctagagaagagccaaaaaaagaatcattcaaatcatcaggatatgatgctgtcgatgcgcaaataaaaactgctcaaagcatcatcatttattcatcattattttaa

SEQ ID NO: 60376 - DNA, 348 bp, Acinetobacter baumannii
atgaaaccagaacagtttattcgtgagtacgggttggataaggcgagagaggttgttgagagcataccaagcaaatacatggagtgttactactcaacattgtgttactgcactaaggctaaaaagtattcagatcgatttaacccaagaattgaacttgtaaacatggcagacctcaagcttctggtggagtcggttgaaatcattcagttctggcacggcattgagtggtgtaaaggacttgttgaggattacaaagaagagtcaattcataaggaatcgtacggacacagaattattcaagcaattgctgattacgaatcaatatacggaggcggtcatgtttga

SEQ ID NO: 60377 - DNA, 237 bp, Acinetobacter baumannii
atgaacctaaagtttcatatcgatagggccggtggtgtttatacggtcgctgcatggatcaacttaagtccaagatctatatacaaatggattaagaaggatgagttgccaaacacagaatactctggacgtacaaagtattcagaaatcattgagataaacaccaaaggtaaggttaagaaagttgatcttttagatgcaggaaaaccaaaaccatgtttggaggtgcttccatga

SEQ ID NO: 60378 - DNA, 774 bp, Acinetobacter baumannii
atgaactttaagttcactggtattttttttatgactgaccatcaatttgaattttcaaaaagattaaatcttgcacttgaaaataaaggactccaagaaaggggcagagcgacagaacttgctaaggtttttggtgtcactccaaaagctgctggtaagtggctaaatgctgactcaattcctgacaccaaaagaatcatagacttagctttatggttagaagttagtgttgaatggcttttgactggaaatgggaaaggtccatcaagaggacatgatggacaaccaattgaccaagttaaaacccaaggtattgaattctgggatagcaataccccattagatgaagatgaatttgagatcccatactataaagacattgagttcactggtgggcatggatcatacgagcagtacgatgatgggcgcagaaaacttaagtacagaaaaacggctgctcgaaaaagcggagcctcgcaaagtcaaagcatttgcatgactttggtaggtgacagtatggaggataaaattgcggcaggatcaactatagctgttgatagaagtaaaaaagaaatcagagaagggaaaatatatgcattccgtcatggtcagttattccgagttaaatacctaattccacgacccgatggcggtttgattatccgtagtcataatcctgcctatgaagatgaagttatttcagcactcgaagctgcaaatgatattgaaattattggttgggtttggaattggtcagttttagaaagatggtag

SEQ ID NO: 60379 - DNA, 540 bp, Acinetobacter baumannii
atgaaaaaatatattatctcccttttgctaactttttctggcattgtgcatgcagaagacagttatgcattcggctatgaaattgataattttgataaattaactgagtttttgtttgactcagatagatctaattgggtctctttatatagaactgaatcagatgcagaaagcaaagctatggatggagcaaagtatttgtattgcgcctcaattgcagattacttagcggaaattgatgatgcaccaaagttttatgatattggtatgcaccttttagatgattacgccactgagcatgcaaaacgtgacatagaattcaatgaaagcattgataatcattcatctatttataatgggatttactataaacagtcatggttaattaatgataaaaatgtactcaaaggcataatttttaacacaatttatgaagttgttgataaggagttttacaaagacaatttaattggtaacaaagataaaaaagtaaactttaaaaacatctatagcaataaatgtaaaccactatctcactaa

SEQ ID NO: 60380 - DNA, 228 bp, Acinetobacter baumannii
atgagcaagaaccctatcaaaattatgtcttcaatgctgactggccgtatttacgcaggtcgtgtcagccctaaaactcaaatgtttattggtgaaaaggaagatgtaacagaaacagcagttggcgctgtggcgcagcaccttctaaaagaagaggtttgtttgcagtttgagtttaatgggaaagcataccgactagaggttcgagaggagccctctcatggataa

SEQ ID NO: 60381 - DNA, 516 bp, Acinetobacter baumannii
atggataactacaaaatcaaagttaaagatgaagctagcgcagacaacaatgttttaaagccaatacataaaccccaagacccagccttgattagcggtgcggatgccgaacttgttgagcaggctaagaagttcatcacatcagaccatttaaatcgctttgaggcagcggaggcgcatttagaaggtcatcctgtgcagtttatgttggctaacggtgattttatcgatattacctcagataccactttgggaatctttgaaaaggatggcggctattcatttcgcctcaaaccccaaaccatcaaggttgagcttgagctgccgaagccttttgagccgaaagagggtgaagagtacttctacatcaatagtggtagagaatcaggctttgcaaagaaattgcatgatgggaaaaagctggactatatggcaactcaattcggagcatggcgcaccgaagaagagatcaagcaagtcgtagagcaactcagaaagatacgaggtgcctcatga

SEQ ID NO: 60382 - DNA, 213 bp, Acinetobacter baumannii
atggagtggattagttgtgaggcagaaaagccgaagcgaaataaaaatgttttgttgaattgcattctacgtaaaaacggccgccctcttacttgcatcggtttttggtcaattgaaccagatgaagaaccggtatttgttcttgatgacaatttcacagaactaaaaggcgtaacccactggatgccactaccagaaccaccaaagaattag

SEQ ID NO: 60383 - DNA, 258 bp, Acinetobacter baumannii
atgaacgactggcaaatattacgaagtcggtatggcagcaaccgaagttataaaaatcgtctagccctcctgccatcgaagtttgaggatttctcgaactggctagtagatcaaggtgctgatgttttcagtagaacagaacaaaacgaacttttgagatttagattaaacggccaattaggtatttggtatgagtcaggctcagggaacctactaatgcatgatttggcagataagtatatggagacggcagcatga

SEQ ID NO: 60384 - DNA, 450 bp, Acinetobacter baumannii
atgacagatttgaataagttaagaagtgagtttgaaattgcgatgaaatctaagcacatcttagacttagattttgtgcagtttcacgaactgtcaaataaatatctaatccagaatggattaagtggcgaggattttagaacagcgctcgatgctagccatgtcgtgaatgttgcatggttgatgtttcaagaaaaagccaaagctcaggcggtgccagaacacatcatcactcttcaaagaaatggagaagtgttcaagtttgatttgttggatttactacgcagatcactaaaaagttcaaaggtattgaagacacgtgagaactggtcacatgtttcaaagatggtgggaatcggctctacaacagcaactcttttatgcaaagaaatgaatgtagatccagatggaatagtgtttgtagcaaacgaatcgggagctgagggatga

SEQ ID NO: 60385 - DNA, 483 bp, Acinetobacter baumannii
atgaatgcacaaattttagatccatgctgcggttcaaagatgatgtggtttgatcgaaacaacccaaatgtagtgtatggagatattcgaaaagaagaacatacattatgtgatggtcgtaccttagtgattgaaccagatgtattaatggactttcgcaaaatgccttttaacgatgagcaattttctttagtcgtttttgaccctccccatcttgtgcaagctggaaagaaaagttggttagctgccaaatatggaaaattgtcacaggattggcgtgaggatatacaaaaaggtttttcggaatgcttccgtgttttagtgaaaggtggagttttaattttcaaatggaatgaaacacagatcaaagttagtgaaatcttagagctaacagatcaaaagccattgtttggccacattagtggaaagcgcagcaatacacattggattacttttatgaaagcggaaagtaaggaggggtga

SEQ ID NO: 60386 - DNA, 477 bp, Acinetobacter baumannii
atgattattatgactgcctctggtatttatgtcgttgagaataaagcgcaaccggaagcttttagctctattcctaaagcaatgtggtgggcggttgtgactttaactacagtcggatatggcgatgtcacaccagtaactagtctaggaaaattattgggagccttaattacaattctaggggtagggattgctgctttaccggctggtattttagcttctggtttggccaatgaacttaaccagcgtaatcagcgccttgaacaagagttccgtgagttacttcaagtgcgtggtattgatatcatgcatgatgaagttgaaatagaacgtattcgacaaaaagtagggctaccaaaagaacaagcgcataatctgattattcaaattatgcgcgaaaaagtattagaagagaaagaagctgttagagagaagaaatgttattgcccgcactgtggtgaaaagttaacagattag

SEQ ID NO: 60387 - DNA, 375 bp, Acinetobacter baumannii
atggggtgggaaattccaatctttcatttcagagttaatggtgaaccacgggttcttgcttatttaaaaccccacgcttcagaggcctatacgaaagaacttagttatgtatatgatttagttaatgatgcattgaatgaatattttaacgatgatgagttcacgtataactctaatgagttaaggcttttctacttacaacgacctgcggaagcatttattctttggcatccagaacaggttcataaccaagaacaaattcagtttgtttatggtgtagggatacctaatgcaaatagattaactacaattgatattccagaaatcccagaaagctttccacatattttctgggataagactgaagatcaataa

SEQ ID NO: 60388 - DNA, 894 bp, Acinetobacter baumannii
atgaatacaaataaagcgttcactgaagttgaatttggtcaacagaaagttaaagttccaaaaggtggttattatgaccgctttagaatgaatcctgatttagatgaagttgcaaaagatcctgcagctggaaatattgattttttccgtagcattcctaaaaagttagttgaatcaagagttggacctgtctgggctcccaacttttattatcgtagcggcaatgtgcaagttttgatgcttgcacccgttaagctgttaaagaaaaaattaccttcgcctctggtacctttggaagctttcccaggttatggactagttgctctcacctttttcacttatacagtttgtgataatgatccatacgatgaagcgtctgtcgctattgtcgtgcgtaaacctaaagctcatggtccgcatgctttagagctgattaactcgattcgtaaacgtcacttttatgcgcacgtattagctttacctgtcgacactgaaatagcacgtgtacgtggtgtatatggttatcaacttccaaaatggctggctgaaattgatgtaaaaattgataagaaaaaagttgaagcaacactttcaacttacaacaaattagatatcagcctgacaaccgcaactccgtcattaaaaagggttaagtctgaatcccgcatgggtaaaaccacaatgttgcactcagtcgatggtgaatggcatcaaactctagtgcaaaccaatgttctctcgtttggcgaaaaactttttccacgcaaggtaaaagtgacacgccatggaggccatgtgagccagcttctagatcagttgggtgcatctactattcttcgtcttgatgtgattgaagatgctcaggtcgtattaaatctaccgactaaactttaa

SEQ ID NO: 60389 - DNA, 861 bp, Acinetobacter baumannii
gtggcacaaagtaagaatagaaaaatatcagttaatgaaatcagcatcaccgtatcaacggtaaataatgatgattatatcaaccttacagatatggttaagggttttgatggtggtgaccagttaatctataactggatgcgtaatcgaaatactatagagtttttaggtatttgggagcaaatcaataactctgattttaaaggtatcgaattcgaaacctttaaatctcaggctgggttaaatagctttagtctcacgcctaaaaagtggattgatgcaacaaatgctatcggcttagtttctagggcaggacgttacaacggtggcacatacgcccataaagacatagctttcgagtttggttcatggctaagtcctgaatttaaactgtacctgattaaagagtttcaacgtcttaaagaacaggaagcccagcagaattcgattgaatggcaagttaaaagagaattggcaaaggtcaattatcatgttcataccgatgccgtgcagatgaacctattaaccaatgtaccagcatcacagcatggttttatttatgcgagtgaagctgatttatttaatgtggtgatgtttgggaaaacacataaggaatggcagcaacagaaccccagtttaaaaggaaatcagagagaccatgccacagtattggataacgccattattgccaacttggagctacagaactctttgttgatcaatcaaggctacccacagagtgaacgcctgaccatgttaaaagaattagagaaaactttaagagaaagtatgagtaaatccccagccatgaagcgtttagagcaacaagcagagtcgccacagattgagaaaaagccctaa

SEQ ID NO: 60390 - DNA, 210 bp, Acinetobacter baumannii
atgaaccatcaaaccgccgtactaaatcacctcaagcaaggcaaaacgcttagccaagccgaagccatagagttatgcgactgttaccgcctttcggctgtaattgaccgattaagaaagcaaggttatgacatcatgacccatcacgaaccaaacctgaaccatagaggcacacatgcacgttatgaattaaaagaggtggcagcatga

SEQ ID NO: 60391 - DNA, 510 bp, Acinetobacter baumannii
atgaacgccataacccatttcgattttaaatccagttccgttcgtattgttttagatgacaacggcgaacctttgttttgtttccctgatgtgtgcaaagcattagatattaaaaatacccatacaagccgattcagcctaaatgaaaagggtatacatttcatgtacacccctaccaatggcggtatgcaaaaactcacttttatcagtgaagaaaacctttaccgcattgtattcagatcaaccaaacccgaagccctcaatttccaaaactgggtatttgcagaggtattgccgtcactcagaaagacaggcacatattcagcaagacagaccgcttatgaagaactgaaccgcctttgcatggaagaaaaagtatcaaaggataaaggcacgtttcacagcttaggtatgcaccgccgtaaacgtgaaaagcacttaaatgctatgcgtatccagacatgcaaaacaaacttgcagcttacttttgaaggggtaagtcatgaataa

SEQ ID NO: 60392 - DNA, 402 bp, Acinetobacter baumannii
atgcaaatgattaagttgatgtcagaaaaaccttgtattacccctatacagattccaataaagtcttggggtaatcttgtggcattgtcatgtttagtaacgttttcaccgtcaccccttgcactacgaaactttcgtagttatagttcccttgctttgagcaaaatctcaaagttagctttggtcggctatattctaaatggcgcatacggtccgcttcgggctttttttatgcgtaatatctctatgcgttcgcatgttatggcgaagctggagagggacactttcgagtgtgcaggtaaccatttaggcctgtcgaccaacccttttcagctttgccaccctcacttggtcgtgaatggtaaagctcctcaactaaatggagcgcattctcatgcctaa

SEQ ID NO: 60393 - DNA, 462 bp, Acinetobacter baumannii
atgcatgatgtaattgtgattggtggtgggaatgccgcactgtgtgccgcactcacagcaaaagaaagcggcgcttctgtgcttgtcatagaagcagcacccaaagagtggcgtggtggtaactcacaacacactcgtaaccttcgctgcaagcatgatgctcctcaagatgtattggtcgatgcctatcccgaagaagaatattggcaagacctacttaaagtcactgcgggcaaaaccaatgaacacttagcccgtctggttattcgtagcacggcgacttgccgcgactggatgcgtaaacatggtgtgaattttcagccgccgctctcaggtgccttacatgttgcacgtaccaatgcttttttatgggtggcggtaaagccctcattaatgcgtattaccgaagtgctcaagagcttggcatcgaaattttatacaacacaaaaattaaagatctaa

SEQ ID NO: 60394 - DNA, 570 bp, Acinetobacter baumannii
atgaaaaaaattattttattagttgtcgcagtcgctttttctgcctttgtttgtgcttcatctgaattagaagataaacaaaatgctcttaatatggtaaagcaatattctgcgcttgtttcttgtatgaattcttttgaaaaagatccagaaaatggaagaccgactacactaaacgatgttcatacagtggagtatgataaggaagataactcgtatgtcttttatgttttatggagcggagacaaaggttgtgcaggaggatcgggaacgatgtctaactttgttacggaggttgcaagatatgggggagcttggaagccctatacagttcaaacagattatgcttttggtgaggatgttggtgtaaactacggctacattgagtctattaaaaaaatcaactcgcataagtttgagctaataggctgggatcatgctgattcaaagtatggtggtgtggatggagggagtaactttcctgcaaataagtttaaatatacgctagagcgagagcagtttgagccatggaaagtcactcaccaagcattactagagcaaagaaagtag

SEQ ID NO: 60395 - DNA, 519 bp, Acinetobacter baumannii
atgaagaaaattatagttgttagcttaatgagtttgggtcttgttggttgtatgaccccaatgacaccaacacagcaggcaatgccagagatagctcaagtaattgaagttcccaataagtctaaagatcaaatttttgaagattcaaagatatggatagcacagtcatttaaatcagcaaacaatgtcatccaatatgctgataaaagtactgggtcaataattgggaaaggaaatattcagtatccttgtgatagctttattgattgtggggcttttggcaacgataaggtcaattttacgattaagattgataccaaggaaaataaggcaagggtaacaattaatgatgtcactagaacaaacttaacttatgtacaaggaggtattaataacatagggaaagaagttccaattacaattgttcagcatcaacaaaaaatcgctgcaaaacttaatgacgtaattgagcagtacaagaaatctatcactaccaatcaaagtaataacaattggtaa

SEQ ID NO: 60396 - DNA, 1701 bp, Acinetobacter baumannii
atgtcagcaatgcttccagaatggacaaccgcttgcccagactgggcagatcgcatcgttaaaggtcaatcattaatgccatgtaagccactttttcaagatgtggctgatgttgctttaagaacatttaattcattaaaagttgtagatgttctggattctccagaaatgggggaaattgttcgggagtgggtaaccgagtttgttgctgcaattttcggagcatatgacaaaaagtcaaaacgccgtttgattaacgaattttttcttttaattcctaagaaaaatacaaaatcaacaattgctgcattcattatgctcacggcttttattttgaatagccggttatctgcagaactcatcattttggcaccaacaaaagaagttgccgacaactcttttaatcctatccgggatgcgattaaagcggatcctgtattagatgaaatgatgaccatttctgagcacaccaaaacaattacacatcaaggaacgcaagcaactcttaaagttgttgctgctgatgacaagtcaacaggtggtaaaaaagcttcatggattttggttgacgagctgcatttatttcaaaccatgtccaatgctggttcgatgtttcgtgaagcaactggtggtttggcatctcgtcacgagggttgtttgatttggttgtcaacacaatcaaaagagccgccttgtggagtatttaaaagcaagcttgattatgcccgcgatgttcgtgacgggaagataattaataaaaaattcctccctctgatttatgaatttccagatgaaatgatcgaatcagaagaatataaggacccagcaaatttccatatacctaatccaaattttgggacaagtgttgaccctgagcagctattagatgatttcgaaaaggcaaaatatgcaggcgaagacgacctaaaagacttctatgctaagcgccttaatgtacagatcggcatgaatttacgtgctaaccgctgggcaggtgcagacttttgggagaaaaaagaggttgtttttgaccttgattatctaattgaacaatcagaatgcatcactgtgggttttgatggtggtggccttgatgacctgttttcaatgtatgccattgggcgagacaaaaaatatcacactttatggcgtggatggtccatgtcttggctacatccgattgctttagagcgaagaaaagaaaacaagcaaagaatggatgactttattgctgctggtgaactggtcattgttgaaaatattggtgatgacgtttcacaagctgggctgatcgccaagcgaatttttgacactggcaagatgcctaaacagggttttggtctggaccgtctagggatgccgtcacttgtagatggcttgttagagtcgggaatccctgagactgcattaatcgccgtcaaacaaggttttgagttgtcgggttatgggatgactttagagcgcaagcttgctgcaggaacctttattccagctaaacaagagctagttaagtgggcggttagtaacgcaaaaggaaaaatttcaggcaatgcactaatgattacaaagcaagaatctggcaagggaaaaattgaccccgtgattgcaatgtttaacgccgctgctttgatgtcaagcaatcctgagcctgccaatcgcgttgatattgacgaatacttagaggatgtcgtgatagcatga

SEQ ID NO: 60397 - DNA, 264 bp, Acinetobacter baumannii
atgggtgatgttatgaatttcgaaatagagcaaatcaaaccagaaacgaaatatctaatcgctaaatatgattcaagaagttttgtttcatcacatcaacaagaatgttttcacaaagaattaaaggctatagcaaagcaaacaggtttaagcattgctgctatagataaatcagtaacccttgagcagcttagtgatgaggacttggcaaatcttggtttgaggcggataggtgagcaagatgattcagaagagcattattaa

SEQ ID NO: 60398 - DNA, 273 bp, Acinetobacter baumannii
atggataatttacaagttgacttggtcgacctatttgatgcggtttgcttagcaaaaaatgatcttgattggactttatacacccttcacgaaatcaaggaaaaagtaaaagccttaaagcaagaagctgctaagcatggtatgcatgaggcttactttcacagcttagagcaattcactggaattcttgagtacacaatgacacttcgatctgactactgggaagatggggaaatgcgtattcaaaaacaattagatggtaatggggaataa

SEQ ID NO: 60399 - DNA, 1020 bp, Acinetobacter baumannii; identical to SEQ ID NO: 49059

SEQ ID NO: 60400 - DNA, 132 bp, Acinetobacter baumannii
atgctaaacgcaaaacaacatgctattcaaaaaactaaaatcgcaattattggtgctggattcggtggtcttgccatggctattcgtctgttacaaagccaacaatcagattttttttttagaaaaatctaa

SEQ ID NO: 60401 - DNA, 234 bp, Acinetobacter baumannii
atgacagcagattgtttgccatctactttaattataattttactgcctggatgtctaataataacaggtaataatccttgctcatctgactcagcacttacaataaacttagattgtttaaacttaccactatattcagattcaatagttacttttttattttttgctatttgtcctatttggttttttaatattatatatatttttctactacaacagctttctaagtcataa

SEQ ID NO: 60402 - DNA, 525 bp, Acinetobacter baumannii; identical to SEQ ID NO: 16553

SEQ ID NO: 60403 - DNA, 777 bp, Acinetobacter baumannii
ttgaaaaaatatcttattagcattgaagcagataatagtccaaggttacaaaattttttttctcaaagtaattttcagccatataaggatgactttaaaaaaataggcatcaagggtaaagagcttacagtaaaagaatattttgacttggccgtcgctacacaaaagcaaccattaagcccaggagagttaggttgtactttatcccatatgcaggcacttcgagattttattacaagtaatgaaaaatatgcattagtattagaagatgatgctattcaaattatggatattgatttaaatcaatttaagtcagaagtagtaaatttgaatttacagagttgcttctttatgagtttgggtggtattcaacttaaagtaaatgatcgtatttatggaaaaattcagcccaaaaaaatttataataaaaatattttaaaattgcatccctatagtattgctgatttatcttacacttatgcttatgtggtagataaagaaatggctaaagttctattagattatcatcataaaccacatgtatgcgatcattgggatgagttgtatcagttctatcccaaaattaatttttatgcgacattcttatttgatcatcctgaaatcatatttcatactcattccactagcagtatagagttagaacggaaactgctttcagaaaaaagtaaagtagaaagaaacatcttcgaaaagttcaatcgatcctttaaaaaaaggtggttaaaattattttatgagcaatatcgtgaattttaa

SEQ ID NO: 60404 - DNA, 1686 bp, Acinetobacter baumannii
atgaaactcaaaagagtaagccagcttacattgggacttttttttgccagccaattgttttacacagcgcaagcagcatctccaaaaaatcaacaaccaccgaatatcatgattattttggccgatgatcttggattttcagacattagtgcctatggcagtgagattaaaacacctcatattgacagcctgttaaagcaaggaaaaatgcttttcaattttcatgcttcatcaatgtgttcacctactcgtgcacagcttatgacaggtgcagataatcacttggtcggtttaggtgccatgtatgaaacttcaaaacgacaagaaaaattggttggcaccgatagtccgcgtgcactgctcaaaattgatggatattcaggtcacttaacgcaaaatgcttatacactcgcagaaattttaaagactaaagattattacaccttcatggtcggtaaatggcacttaggctatgctcccgaacaaaaccctaaagcccgtggttttgatcaatcttttgccctgctcgatggcttcgatttacattttaaagaccaacctaaaaactatccgcgcaacacccaatacacggaaaatggtcaaaaggtcacactgcctgaccactactactcaaccgacttttttacacaaaaagcgtttgagtacttagacaaaaataaagcgcaaaaaccattttttgcctacctcgcctatactgctccccactggccaatacaggcaccagctcattatagagacttatataaaggtaaatacgatcaaggctacgatgcgattcgcaaacaacgctttgagaaacaaaagcaattaggattaattcctacaaatgcagaatacccagtcgaacgtggtaaccaagctttaggcaccaaaagctggaatgaactcaccccacaagagcgcaaatatgaagcgcgtaaaatggaagtttatgcgggcatgattacccagttagacgaccgcgtgggtgatgtcattcaatatcttaaaaagcatcatttatatgacaacactttgattgtgtttatgtcagataacggcgctgaaggtggtgatcataatttcccaatgggtgatgccgataatcgctatgaaaatataggcaatgccagctcatatgtttatatgggaccacgatgggccgaagtcagcagtacaccattcacctattggaaatcagctgcttcggaaggtggagtacgtgttccatttattgttaaatcacctgtgcaaatttctaaacaacgtggaatcaacaataactttgcgacagccagagatatattcccgactgttatggaactcgcgggtattcaaaataatcaaatctatccaacttcaagcactaaaattaaaccgtctggttttagcctaattcctgcttttaaggataatactgcccgtattcgccctgttaattattatgactttaaagaattgcatggcagccgctacgccaaaactgacgaatggaaacttgttgaaaactcgccttctaaatttaaaagccacggttgggaactctacaatttaaaaacagattttaatgagcaacataatgtttatgcagaacatcctgagatcgtcaaagtcttaaatgataaatatttaagatatgccgatgaaaatggtgttgtggattttgagcaatacaataaaaagtag

SEQ ID NO: 60405 - DNA, 1338 bp, Acinetobacter baumannii
atgaatctgctaatcatatccattctaacttttattttattaggaattaatattgttatttctaatgagatgccaatagggcgtatctatattgattatatatcaataattattctagttttttggtttattattgctgttaaaagatttaaagttcctttcttatctaatatttatttttccttaactgttttaaccactgtttgtatttctataattttagagcatgggatttttttgactgaaattcaagaagttacttacaaaactggtttgccaactcgagcttcgatgcaagtatttctgttatttagcgggctcttttatggctattcttatctagataaatatattaaaaaagttagtttttttaagtttgatccttattctaattttctgatagaacgatcattcatagctatagtttttataagctttttaatattgttaggtatttttttgatttatggctttcctttttcaatgagtttacacaggcagaattattgggcttcttatgcacctagttggggagctacaatagtgaatgctataatacaatttaatcttggattaggttatttattttataagaataaatcaaaattttatttgaatttaatgcttttttctatttttgtacttttttgcgcaggggtacggtttactgggataataacaacattatttttattctttactcctctaattgttcttaataaggattctgttaaacttcttaataaaaaagttatagttggtttgggttttatttttaccttcgttgtagtgggaatatttctaggtttccaaagtttagatgatatttcaacttctgagcgcttttttacaagggttagtttacagccacaaatgtggtggattattgacataaattcatctgttttcccacgtgacatatacacaaccttagtccattacttcggttttggggctgattctaagtccgtaggtccatatttcttcatgtatcagtttgcacctacatatattgctgaaagtttgtttgaaacagggagtacttttacatcgattggaatttttaatcatgtatatttttttgggtatttttttggtggattattaaactttatatatgggtttgttttagctatttttacttggctatttgttagttctattaaatctaataatctaattgttgtcctgcttctttttagattaatgtatactatgcaaattattattgtatccgctactaactatcaattatttacttttaaatatcttttatttctactcataatactattcttaatagtcctatctatgcgggaaaaacatcataaggggtga

SEQ ID NO: 60406 - DNA, 258 bp, Acinetobacter baumannii
atggtttttctacgtcaacaactgttatttatctttattgcctttttatccacctgcgtaggtgtatacgttgcatgggatatgaacctgacatgggttaagttttatagctatttaatttcagaaaaagctattttttcaattctctttaactatgctgtcattcaactattttttattgtagttggtcgtaagtataccgctctttttttaagtcaattattcgttatttttttaaattttattagggtttgttga

SEQ ID NO: 60407 - DNA, 144 bp, Acinetobacter baumannii
atggatcttggaaaagtccaaaagtattgcctagttaagactcgatttattgccaccatttatggcggttttttttattgcctaaatttgtatgtgagttatatacaagtccagcaaatgttaaattttattgacaacttttaa

SEQ ID NO: 60408 - DNA, 513 bp, Acinetobacter baumannii
atgaataatttatccattgatgcacaagaatttttaaagttcattgaacgtagaaacactcaacttgagaacgctccttttgttaattccgcttactcaaatccagaagagtgggggactgaattgcagaagctatatattagaaaattagatattgttgattatgatgggagagattcatcctatcaatattatctaatcacagatgaaaatttccctaaaaaggtagaggaatacactcaagttataaaaaatatgaatgatgatgatttaagtaagtatatggattgggagaaaggtcatgaaaactttaatcatagttctattcaagaaaatttaatgggtatgaaggaaccttatcgtttagctcgtcgtattgctgctcttgaatatagagctttaattgaggcgattagaataaatggacgttcaaaggaacttgaatctgatgcactatcttattgtcaccgcaacttagcaagctcatttaatcaaaattaccatgaaatttaa

SEQ ID NO: 60409 - DNA, 195 bp, Acinetobacter baumannii
atggctaaagtctataaagttcgagacgaagaagttgaagctattaaagaagctttgatgaagtttgtgattgataaaaaagtcttaatgaaagaatcagatgtggtccatgcgttgattaaatatcaccttaagaacttaaaatctgatgaggtcgttcgctatcgcgaagaggttttaggtaaagatgactag

SEQ ID NO: 60410 - DNA, 183 bp, Acinetobacter baumannii
atgcacgtctgcaaaactttatcaccgcaatatgaatcaggtttgcaaacgtgcttggagtggcaggattttaaaatcttgccagatttaacggtacaagaagccaatgaactgttggtagcaattgtaggctgctttgccgttgttttcatcgtcaagcaagtaattagcttgcttaaataa

SEQ ID NO: 60411 - DNA, 225 bp, Acinetobacter baumannii
atggaaactcaagttaaagaaaaaaacaaggctttacctgttgctttaggtacaacacttatgctcgctgctggttctgtatttgcagaaggtgaggatttggcaactggcgcaactactgcaatcagtggtggttctgggactcttcaaactgtaggtattgcgattattggtgtagttgctggtgtttgggtaatcaaacgtgtaattgctctaattcgttaa

SEQ ID NO: 60412 - DNA, 1206 bp, Acinetobacter baumannii
atggatttatttagccgttatgtttatttgtttcgctgcattactattacgttagttttttcactttctatagtgccttcttttgctcatgcaaattcagcatcatattcaatgagccactcactgccacaaaaaatcaataattactttttaagagcttcatatacttttactaataaaattacaggtgtctcaactgttatagctaaacagctttcaaagccacaagtcgctaaattattaacttttgttatttcaagaagatttgctgctttcgctgcactaggaactattgctgctgaagcaggcatgtcgacaattgatgtagatggaaaaactctaattgttcaaaaacttccagaaacagatattgttaatgttctaactactggaaatgatgagtatgtaccattatcagggaatgtactaagtttaaattactgtgtatcagcattagctcaattgaatcatctatatccagctatgcaatacattcctgcaaaatctgtcaactggtgtgaattagttaatatttcttcaacttataaagagttaagtctgacagtatcaactgttgaagatcctgtatcaaccacaaaagtcactgttgcacctacacagattgataaacaagtaattcctcaaccaattccaaactatgcagttgttagtcctgaagtattgggcgaaactgtttttaataaagctaagcctgctgatttatctcctttatttgactataacgaagtctatcaatctccatcggcaatcgaagcaataaatgagtataacaatacgaaaggagaggcatttccagcatatcctgatgttacaacacctgcattagataaacctgttacaactccaaataaccctaatttagaattgcctacattttgcaattgggcaacaccgatctgctcgtttgtagattggtttaaagatgattccgtagttcctgatgctgaaaaatacgacttaaaagaatttgattattcaaaacttcctagcaatccagatttttcattttctcaatcttgtccagtacctttatcaattcctcttgattttggaattgtttcatcatcgattgaaattagttatgaaccattctgtcagttctttgcaaaggcaagaccattcattattgctgctgcctatttgcacggtgcttttattatcagtggctttagaaaggaaacttag

SEQ ID NO: 60413 - DNA, 282 bp, Acinetobacter baumannii
atggctggtttgttagtaagggttcttacttggtttgcatccggtttaatttttagagccttgtccgctttaggtgtaggcattttttccatgtatttcattaacgatattttaagtcaatttattaactcaatgaataatgctgtttcaagtctaccagcagatgttatttccatattaggaattgctggatttgataaatatctttcgattgttttaggtgcattagtcacagtgacttatttacgttctatgcgcttcatgcttactagacagctttaa

SEQ ID NO: 60414 - DNA, 1173 bp, Acinetobacter baumannii
atgctaacgcttattagtgcaacgcctggttctggaaaaacacttaaagctgttgaattgatttatgaatgtttgaacaatggttatgttgtttattcaaatatattaggtttaaaagtcccaggggttattcagatttccagccaagaagactggcgtgatctagatcattttagacgtcaaaatattgaaatgctgaaaacacccattgctgttttttatgatgaagcacatgaacatccagcatttgcggaaaaagacttgttaaagaattaccaaatagatcgatctgattatgatttggatattgatatcgtcaatttagatgactcactgacagcaacacaaaaaaagcaaagaattgatgagatcaatagaaaatataagacggcacttgatattaaaaaggaacaaattagagaaattggtactgccttatcaatgcacaggcattttggttttgatatttttttgataacacaaagcccaaaaaagcttgcagcccatattcttgctgatgtgggtacgcacttacatttacgacgagtttttaagatgaaaagggcaacgatctatgagtttccagaagcccatacaacggtttcaaaagctgtcagggatgatgcgattaacaagacaatttggaaatttccaaaacatttatatggtacttacacatcaacagaggttgatacccataaacaaaaaattcctttgaaatatattattattcttgtattagtttttattggtattccatcttatgttgcaagatcgctttggtatgatccgttatttggacataaggaaaagccagtgatggttcaaaaatcgcaagaaattgaagaaacaaagcaaccacaaacgactattcaagaaatgcataaaccaattctaaataacaaaaatgatgatttacaacttgagaatcaacgtatagccataattgttgaatcatcaacggattgttatgctaaaaactcgtatggtgattttattgatatctcagttgatgagtgtaagaaattatctagtaaaaacaatagaatgtctttttcaaagttgaagaaggagcaatatttacaggataatatgtcagtaaataacaatgacaatgacaatgacaatgttggttatacgcaacctgtatatccttcagaaactacgttatag

SEQ ID NO: 60415 - DNA, 135 bp, Acinetobacter baumannii
atggttagtgttaaactaaaattgggcaaacttcactatgcaacacaaatgaggtttcataaattcctgtttatttctttatttttgtatttatcattcgcacttggcatttgtactttcttagacattatttaa

SEQ ID NO: 60416 - DNA, 240 bp, Acinetobacter baumannii
atgaaaaaaataattgtcacaactttatttagtttctttgtattcagtccaattgctttagctagttcattcaaaaaaggtggtgtctgttgggcaggtaatgataagaagtttaattgtagttgtatcgaggaagaaggtctatctattgatcaaatctatgccaaaggtttcaagattgtagcagtgcatcctgaaagcactcgagtatctacaacaatttatattgaacaacaataa

SEQ ID NO: 60417 - DNA, 207 bp, Acinetobacter baumannii
atgcgatataagcgctcaataggtgcaatgcgtaaagaggattggcagcaacttattcaaatgttagatgaatatttgatttatgttcaacaagataatagttcaactaacgataaaattaataatgtgaagatactggttcataaactacaacagcacatggatgagccagcacagcaaagttatagctttaatcgttggtcataa

SEQ ID NO: 60418 - DNA, 708 bp, Acinetobacter baumannii
atgaagaagattaaaaaaatttattttttgagcgggcttttacttgccggattagcaggctgcgctacacctgtaaaatataattatactcaacagaactatgcatcaaaggacctaagctatcctgaaattggagagattgtaactacgacagttggagaggtaatgttacaacaaggtaaagttgttgaaaaagaagttttagtcatacctaataattttcaaattgataaacatttagttctaacagctggtaagtacgaaaaaattgggtttaataataatgtccaaatctttttaggaaataattcatttcttcccgaaggtggtgcagtcctgagaagaaatactatagatccattgtatagtgtaggtttaaaagaaggtaataaactttgtgcattaccacctttcggagctgatcactgtaattataatgaaaatgcatacatcacaaaagtgaaaatccatgcaaaggattccttccaacaaagcttaatttacaatggtagggtcggaaataaaattaatattggctatagagagttttcaaatgattatgctagacccgccttcaataataatgttgaatatgatttgaatgatacaaagcaaatcggatataagggtgcaatactagaagtaatagatgccaataatcagcaaattaaatataaaattttgaagaactttaataaggcaaaataa

SEQ ID NO: 60419 - DNA, 264 bp, Acinetobacter baumannii
atgagtgcaccacaatataaaccaatgagagaaagtgaagtttgtaatactatcgggtgggtgttaatagctctcggctttatcgcaggttttttatttattcttgcatttggtcgaattgaagtagcttcttactatggtaaagaaacggtttggtctggagttatgatagcaacaggaatcggaattatatttaatggattccttgcaggctacttatttcaaaaagtagctagtattcttcgttaccatgagaataaataa

SEQ ID NO: 60420 - DNA, 1710 bp, Acinetobacter baumannii
atgaagttttttaaatatttagttttcatattcatatcgattttttcaggttcaattttttctgctactgtttactatacagatacgaacccaaatattgttccagcttctaaaaggtttgattcgactagcgctctttgttcttatgctcaaagtgccacgaagtcttttttttctaataattcttctttttcttatacgattgaactatctgattctctttgtaagattggcgatgcagcttatttttttatcaaatcagtacctgatcaatgtcctgaaggtcaagtttatcaaaatggtcagtgcgttaatttgcaatgtccagatgtcggctatccaatgtatgtttattttgattcgggcacttctataccacaacaacgctgtcaacctttagccgataaattttgtgtctttaaagcaaagcctgattctattgttttgaatcatgctaacaatcgtcaaagtacagtgttatataatgtttctaaaacacctgtatcttcatgtactccacttgatgcaggtcagtgtgataaaaatgacccttatggtgattgttatcaaccgcctaacgatggttgtactcgtctagctgatggctctattacttgtcctgatggtgctgctcctccaagtcctacgggcacttgtggtggtgctacttactgtaatagaccacctacaggctgtggcactggttacgtttctggctcattcaatggtcaggcgttatgtgttaaatcttctaattcaggtactggttcaggtactggtacaggttctggtgatggtggttcaggtactggtacaggttctggtgatggtggttctggcactggtacaggttctggtgatggtggcggttctggttcaggtacaccaattgatactggtactggtagtactaatattaataactctggttctggttcaggttcttctacaggtggttctggtggtggaactacttcaacaagctttactattgatttatcacctgttgttagggctatttctgctttatccgataaattgacttgggttaagtctgaattggttaatgctgtttctcgtgttgaagataaacttacccagactaatagcaagttagatacaactaattctaaacttgattctgttaagtcttcagttgatcaaacaactgctgctgttaatgctaacgctactactgtaaaaacggctgtagaagcgaatacggctgctacaaacaatgttaaatcggctgtcgatgctaataccaactctacagctaataagcttaatgaagtcgttaatgcaattaataataagcctgttggcggtggtggtggcggaactaccgatgttaagcctgttgttgatgctattgagaaacagactactgattttaaagatatgatgaagactgattcatcagactttgatacatcacagtatgagaaaattggagatgcttcagacgatccacgctatttaaatgcccagtcagaagctaccaatgcacttcagaatttatctaataaattaactttttctaatactgcatgcgtacaggattttacggttgattttccttattttggttcttttgtagttccaatttctcgttggtgtgaactcttagcactaataaaaattttgatacatctcagtacattaattcttgcttttagaatgcttgattcaacagtgagggctatctaa

SEQ ID NO: 60421 - DNA, 477 bp, Acinetobacter baumannii
atggaaattaattgggaacttacaatagcagcaatttcagctatttttgcaggactatcaataagtttttcgatgtatagcttcttttcttttaagagactgaataaaaaggttctggagcagcagcttgaaatcaaccgccttttaattacaaaagagcaggaatattctaatgaacaaaatagggcagatattagagcatatagaacaggttcaaaaggaaattatcagttgatactaactaatgttggtaaagctactgctgaaaatgtctacttagagattctaattgatagtatgtatcgagggcatttttgggatattgatgaaattttccctatgaatattgtttctggacattcaggaaaactttcatactcaagaggaatggattttccaagtaagtttactgttaggattagttgggatgaccaatttaaaaaacagaactcaaaagatatcgaaatagttagttaa

SEQ ID NO: 60422 - DNA, 162 bp, Acinetobacter baumannii
atgaaacttaatattccagatcagcaaattactttatcttgtccaagttgtgattgtactcttttttcgatcgatgaaaatgaaatagccacttgtggtacttgtggtttaaaacttcataaagatgagttaattgaacaaaaggcactgttgcaaagttag

SEQ ID NO: 60423 - DNA, 276 bp, Acinetobacter baumannii; identical to SEQ ID NO: 48683

SEQ ID NO: 60424 - DNA, 516 bp, Acinetobacter baumannii
atggctgcacttaaagaacaggtaaaaatatttattgttcaagcgcttgcctgcatggatacccctcaacaggtagctaatgctgtcaagcaagaatttaacattgagattgatcgaaaacaggtacaactttatgacccgacaaaagcggcaggaaagaatttaagtaagaaatataaagacctttttcataaaacccgagaggactttaaaaagaatgtttatgacatccctttagctaataaagcttaccgacttaaagagcttcagaagatttatgaagactggaagaacaacaggcttatgaagcagggggttattaaacaggttagggaagaaatgcagggttatgacctgatgttattaaatcttgagttaaaacagcttgaggttgaaaagttgagagagggtgaaggtgatgaagatccaacaccagtcaaggtaactattcaagttgtggatgcgagtaaaaaagatgccgaacatcaatccgacactgaatgtacctcaggctaa

SEQ ID NO: 60425 - DNA, 1317 bp, Acinetobacter baumannii
atgctaaaagcacaaaaacttacattagcagttctcatttctgcggcaataatttcctcagctcaggcaagcgagcaaagtgaggcaaaaggatttgttgaagatgcgaacggttctattctcttccgtacaggttatctaactcgtgacaaaaaacagggcgcgaaagataccagctcagttgctcaatcagcaattgtaagtatcgaatctggctttacccctggtatcgttggtttcggtgtaggcgttgttggtgatggatcatttaaaattggcgaaaacaaaaacgctggaaaccaaatgattccaaaacacaacgatggttcagcttacgaccactgggctcgtggtggtggcagcgttaaggcacgtttctcgaatacaacagtacgttacggtactcaagtactcgacttaccagtccttgcaagtaatacaggacgtatggttcctgaatacttcacaggtactttattaactagccatgaaatcaagaaccttgaggttgttgctggtaaatttactaaagaccaaatgtctgaccaaatcaataccgatgcggatgcttctggcagaggtcttgaccgtgcaattgtttggggtgctaaatataagtttaatgataacttaaatgcatcttattatggcttagacagcaaaaatgctcttgaacgccattatgctaatgttaactttaaacaacctttagcaaatgacagttcattaacttatgattttagtggataccatactaagtttgatgcaaatgcacacacttattcagcaactggaactgtagcaccaaattatgctgcggatggtatagctggcgaagaaaagaccaataatatttgggctatttcaggtacttatgcgactggtccacatagtgtgatgttagcatatcaacaaaacactggtaatgttggttacgactatggccaaaatgctgatggtttccaaagtatttatttgccaaactcttatatgtctgatttcatcggtaaccacgagaaatctgctcaaattcaatacaatgttgattttggcaagttaggcgtattacctggtttaaactggaccactgcatttgtatatggttgggacatcaaggttagaaatgtaactgatgatgctcaagaacgcgaattctttaaccaagtgaaatacacagttcaaagtggttttgctaaagatgcaagccttcgtattcgtaactcttactaccgtgcaagtgatgcttaccaaggcgcttacatcggtgataccaatgaatggcgtattttcttagatattcctgtgaaattattctaa

SEQ ID NO: 60426 - DNA, 819 bp, Acinetobacter baumannii
atgtgcaaaatctttgatatcaaaccatcaagctactatgactggatcaagcgtgatatcagtgctcagcaaatacatcgtaatcactgtgaactgcttgtaaaggctgcacacagtgaaaccaaggagcgatatggctatgagcgtctgcatgcttatttaaaccaacaagggcatgaaattagcaggtatatggtacgtagtattaaagaagaacatgacatcaaatgtagatgtcataagcgctttaaagtgacaacggactcagaccataacaagctagtttatccaaacgtgctggatcaaaagtttgaagccagtcgacctaatcaatcttgggtcagtgatattacttatatctggacaaacgagggctggctgtacttggctggtgttaaagacttgtataccaaagaactggtcggctatgccatcaacaaacgtatgactgcggatctagtatgccgtgcactcaatatggccattaagaacaaacgacccagcaaagggctaatagttcactctgatagaggtagccagtactgcagctatgcgtatcacaagatcattaagcagcagcaatttacaggctcaatgagtggcaaaggtaattgctatgacaacgctccaatagagagcttctggggcgtattaaagaatgagctgatatatcaccaagactacaaaacaagatttgcagcgatcagtgatatcattggctatattgagctgtattacaaccaaacgaggattcaaaagagtttaggctataaatcgccaagacaggtgtggtttaattattatcgtcaagctgcgtag

SEQ ID NO: 60427 - DNA, 300 bp, Acinetobacter baumannii
atgacaaagaaagctaaaagatacagtgaggaatttaaagcagaagcggtcaaaacaatagagaataatggtggcaatgtcagtgctacagcaaggcaattaggcctgccaatgcagaccctaactaattggcaacggaaagccaatcaaggcaaactcaaaggcactaagcaatacgatccagagctcgtttcagcccttgaagaaattaagcgtttaaagcgtgaactaaaaatagcacaagaagaacgagagatattaaaaaaggccacggcgtactttgcaaggaacggtcagtaa

SEQ ID NO: 60428 - DNA, 408 bp, Acinetobacter baumannii
atggtattaggccagtgcgaaaaagtcatgttcaatgttggtggctggcgcaaagctagacaagagcaacagatgcgagactggttcggctttgtgccaacttacttgatcaccgttgatgctacattttgcgacaaagcaaatgatcgtgagttttgtgctttgcttgaacatgagctttaccatataggcgtagagcgtgatgaagacggcgagatgatctttagtagttcaacaggtttacctaagcattatttagctgggcacgatgttgaagagtttattggtgtaaccaaacggtggggggctagtcaaagcgttaaacgtattgttgaagctgcaaagaatccgccgtttgtttcgaatcttgatatttcaaaatgctgcggaaactgcgtaatcaactga

SEQ ID NO: 60429 - DNA, 516 bp, Acinetobacter baumannii; identical to SEQ ID NO: 60424

SEQ ID NO: 60430 - DNA, 483 bp, Acinetobacter baumannii
atggctgtctggagccttcctggtgaatctcagtgtggttatctcgaaatttcaggtagcggcattgaactcaccaaaaaggaaatggatgcacaaaaaaatgctgctcttgaagccggtgccaaggtagtcgataccaatacacaggaatcaggggaagcgcgccgtgcacgtcaagatgatcagcaagcaagcttacatagcattgtgacgtgtgctgctgcggctattgagcaggcaatcaaatatgctgcccaatggttaaagttggatccgtcaaaatatacattcacagtcgaaccagaatttattgtccagcaatacgacatcaatcttgctaagcaactatatgaaggtgctatagctggaaagaattcgttccagacgtattgggaatatatcgctactggtaagttgccagctcatgattttcaggaagagttgaagcgtgttgaaagtgagcgagatagtatgccgctttag

SEQ ID NO: 60431 - DNA, 162 bp, Acinetobacter baumannii; identical to SEQ ID NO: 49124

SEQ ID NO: 60432 - DNA, 162 bp, Acinetobacter baumannii
atgtctgctgaaactgtgcctgtacctggcaatgaagtgttgcctgcagggtcagtcgctgttgcagtcactgtatcgccatccaccaggttacctgggtttggtactgaccagctaccatctgtgcctgccaccactgttgcagtggtgccatcaggataa

SEQ ID NO: 60433 - DNA, 369 bp, Acinetobacter baumannii
atgggcttacgtgaagaaattcaggcagatattgctgaagcatttaatgatgatttagcggacgccgttcattcatttacttgtgaccggatctcaagaaaagattgggatcctaaaactgaaacttatgtcgaagttaaagaaaactattctggtcgtggcgttctgtttggctcatacagtcaatatgagattcagacgcttggagtactggccacagataaaaaggctacagtgctgcagaatgaagttaccaaagagccaaagattgatgatgagtggttaacagccttaggctcattccgggtaattcatattcaacaggatccagcttctactatttggaaatgtcagcttcgaaaagtgtag

SEQ ID NO: 60434 - DNA, 354 bp, Acinetobacter baumannii
atgagcaattttgtttttaagcgtggtgacacattcaacttaaacctccagctggttgatatggatgaaactctgcagtacccaccagatgatgttcgccgtgcaattgatttaactggttataccttcacttcacaggttaaagctttggctgatggtgctgctgtggctaccttaacttgcgcagcactaaaccagagcacacagaagggatggcttaacgttaaatcaggtgcaagcactgcaacttggcccttaggtctgtgtcagatggatattaaggccgttgttagtggtactacacagcacactgaaactttaactttccaagtgattgacggagtaacagcataa

SEQ ID NO: 60435 - DNA, 408 bp, Acinetobacter baumannii
atgcttgaagaatctgagcataaagatattgcctatgatgtatatcaattactcaatggtagctacccactacgagcttctggcttcttcttagctttctttactatttggggtttaatcccagcaactaccttgtttattccggttttaagaaaaccacaggaaatgttgactagaaaattctggaaagacgcgcgccgtggtgtagggcttatttttggtccaaaagatggtgtattcggtagcaccattggccagatttttgattacttacgtcctgacttccacccaaatgatcatgacacgaccgaatatttagagtactacaaagacaaattactcaaagaaggtggcgcgattgcaccttactttgtgaaggaatttaccccacctgtacgcttgtcataa

SEQ ID NO: 60436 - DNA, 363 bp, Acinetobacter baumannii
atgaaaagtcacgatcatttgctcgataggcaatatgacgaggatcactacaactgtgttcactttgttcatgaagctgcaatggacctatacggcatagatcgggcggaagcgcttgaactctttatgcagcctaagggcaaaattacttttttatcttcacggttaaaacttttaaatccgctgcccatgcccaaggaaggctgcatagtcgccttccatcctagacaaagaaataagcccccgcatgtggggctttttcgtgggcaaaagattcttcacctcatggaaagcggagtcacttatttgcctgaagaggttgtgatgggaatgggatttaatcgggtcagttattatgattaa

SEQ ID NO: 60437 - DNA, 195 bp, Acinetobacter baumannii
atgtcgcacttcaagttttactctgccaagaattaccaattggaattgtttacgcagtatggtctggtatgggtatcatcttggcaagcttttattggctattttttgtttaagcaaagcctaaatatttcaagcctaactagtatcacttttatcattacaggtgtagttattgttaatttttattcgacataa

SEQ ID NO: 60438 - DNA, 447 bp, Acinetobacter baumannii
ttgctaagaagtttaaaagcttacggttttactaaatatcatcaaaagttatttaagaatacagattaccaatttttaagtgaagatcggaacataaaaaacatacagaaattttgggaggtaatcaaaaaaaggaatcttgcaattacattagatgaaaaatatagaaatagcatcaatatctttatttgggggcattctctagatatttctgatgaagtgtatattaatgaaattttttcattaaataatgaagaccatattaatgtaataatttattattttgataactattcaaaatttaatttacttacaaatcttttacatattttaggcaaagaaaaagttgaaagatggatgaaaaaaaagtggttaagatttgaaccaaatcctaatattgtaaaaattaataatattgaacctgttgatttatctaagttggaataa

SEQ ID NO: 60439 - DNA, 270 bp, Acinetobacter baumannii
gtgaatcccggtattaaagatcgtatcactgcagttaatgcacaaatcctaaatgctgagggtgaacgacacttaaaagtgaatacaaacaagtgccctaactttacggctactttagaacagcaagtctatgatgattttggaatgccagataaaagcgctggtttggaccacgttggagatgccggaggctatccaatagccaagagattcccgatcatcattcagaaagtatttaaacggcgcacaatcgctggtttttcccgttaa

SEQ ID NO: 60440 - DNA, 249 bp, Acinetobacter baumannii; identical to SEQ ID NO: 51085

SEQ ID NO: 60441 - DNA, 1146 bp, Acinetobacter baumannii
atgaaaaatagtttaatcaatgaaattcgactgccttcaggttgggaattaaaaaatttaaaagatatgacttgttcttttaaaagtggtttttctattacttcagaaaatatttccgaagatacaaccttattccctgtttatggtggtaatggattacgtggttatacctcaacctttacacatgattctgcttatacattaattggtagacaaggcgccttatgtggaaacttaaattatgttgaaggtaaaagttttatttctgagcatgcaattgcagtgaaagcaaataatgagaatgaaactaaatttctatattataacttctcaaggcttaacttaaataaactctcagaagcctcagcacaaccaggtttatcagttgagaaacttttaaaacttgagactcttgtaccaccactagccgaacaacaaaaaattgctcaagccttaactgatgcagataactatatttctgcattagaaaagctcatcgaaaagaaaaagcaattaaaagaggcatctttaatctcaatttttgattttaataatgctgaatgggaagtgaacccactttctgatctatgtacatacttaaatgatggaacacattatacgcctaaatatacacaagaaggaattcctttctatagtgttgaaaatgtcacaaacaatgagttctctgatgttaaatacatctcaaaagaggaacatgaaactctgataagaagatgtaaacctgaaaatggtgatattttaatgacaagaattggtagcgtcggagttactaaacttatcgattgggacattaatgcgagtatttatgtaagtttggcacttcttaaattcaaaaatagagaattttcaaaatacttttatgcttatagtaaaactccgaaattcttacaagatactttgagccgttctttaatcaatgcaacacctcaaaaaattaatatgaatgaaattggagatatacctgtttattttcctaaatgtcaaaatgaacaagtaagaattgctaacattattttaaaccttgaaaaagaaattgaggtcttaaatattaaattaagcaaagcaaaattcttaaaacaaggcatgatgcaaaaactactcactggcgaaattcgtttggcctag

SEQ ID NO: 60442 - DNA, 3081 bp, Acinetobacter baumannii
atgactttagacacaattaatatggactataccgtaaacaatgaagtacatacccaacaacaagtcattgctgtattacaaaccctaggatttagctatttaggtaactggcagtaccgtgaaaacaatagcaatattgaacctgaatatctaaccgaattcttaaaatctcaaggtcattcagaccatgaaatcagtaaggtttatgacgagttaaataaagttctgtcaaataaatacgatggcttatacgaagtcaataaagccttctatggcaaattgcgtatgggcgtcggcgttaaaatgagcgccgaagaaaatgaaaaaactatttttctcatcgactggaaaaaccgagccaataaccgcttttatgtggctgaagaagtcacgcttaaaggcgttgaagcagaacgtcgtcctgacctcgtgttatacgttaatggtattgccattggtgtgatagagctaaaacgtggcagtgtgtcactcggtgaaggtattgctcaactggtctccaatcaacaagctgagtttaacccttggttctttaataccacacaacttttaattgcagggaacacttcacaaggcttgcaatacggaacgaccctcaccccatctaaattttatttaaattggaaagaagatacagacgtcgaagaagataatattctgtttaaatatttacgtcgcttatgtaaccaagaccgcctattagaaatcatctacgactgcattattttcgatgctggcgtcaaaaaactgcctcgctcacatcagtattttggtcttaaagctgcacagcaatacgtcaataaaaaacaaggcgggattatttggcatacccaaggtgcaggtaaaagtatcctgatggtgatgctagccaaatggattttacaaaataaaccccatgcccgtgttgtcgtcatcactgatcgtgacgaactcgataaacaaattgaaaaagtatttacccaatcaggtcgcaaagtcacccgagcaagtaatggcgcaaacttaatgagtgcgctacaaaaccctgaagaacgcttactctgcaccctgattcataagtttggacaacgtgatgtcgaagatatcgatgccttcattgctaatcttgccaaacaaaaatcgaaagtctttggtgaagtcatcgtctttattgatgaatgtcaccgtacccaaagtggtgatttacaccgctatatgaaagctatcattccacaagccgtgatgattggttttacaggaacaccacttctgaaaaaagatgcgaaaaacagtttagaagtatttggtggttatattcacacttacttatttaaagaagcggtagaagatggtgttattctagacttggcatacgaagcacgtgatgtcgatcaatatatctcagatcaagatgccattgatgattggtttaaagaaaccgtgcgcaaccgtaatttaaacgaatggcaacaagtcgagctgaaaaaagaatggggtacacgccagaaactgaatagttctgagcaacgcatgcgtaaaatcatgctcgatttcaataatgactttatgcgaagaattccgagacttaaagaacgtggtaccgccatcttagtcgcatcaagcatttatgaagcatgtaagtactacaatttaattcaagatagtaactccccgattctacgaaagcgttgtgcgctaattacctcttatgaacctagtcctgctaaagtcagtaaatctattgttgatagccataccgaaacggaagaccaatacatttatgcaacttatgaaaaaattttgcaaaatgtaaaatctgaacctcaaaaaaccaaagcagaaacctataccgataacgcaaagaaaaaatttgtcgatcatccaacagaaatgaaattgctgattgttgtggataagcttttgacaggttttgatgcaccctcttgttcagtcttgtacttagataaatcgatgcaagatcatgggcttttccaagccatttgtcgtactaaccgcttagacactgccgacaaagaatacggtttaattattgactataaaaacctatttcagaaaatggcaaaagccattgccgtttataactctgaattagacacttcagcatctgaagaagcacaaattgagattaaaaatcgcaagattatggcaaaagagcatttagacaatgcgatggagcaactcaatttgctgatgcaaatggtgcagccaaatagctgtgaagaagatcgcttaaagttcttctgtggcaagtcagaaaaccctgatgatcttaaagccacttatcaaagacgtattacattgtataagtctgttgcaagcttcttccgtgcctttgcaaatgccaaagacgaattggcagaaattggttatacagccgaagaaattaaagagattaaagccaaagaagtcttttatttagatttaagagaaaaagttcgattacgtgcgggtgaatatctcgacctcaaaacctttgaagcagatatgcgctatctaatcgataattatatcgatgcaaaaaattcggtaaaagtcagctcatttgaagataagaccctgattcaattgattgtggaaacaggtattgcagaaacaatcactaaaaagttaaacaatatgaaggatcgaaactcagtcgcagaaacgattgaaaataacatccgtagtaccttaattaaagaccatctcgctgaccctgctttccatgccaaaatgtcaggattgttagaagaagtgattaaaatccgtaaggacagtgcagaccgttatgcggaatacttaaagaaaattgaacaactcgccaagcaagtacattcaggtacagtagttaaaaccagtgctagaatcgataccacgggtaaaaaggctctcttcaatttatttaatcatgaagaacaagctctcgaactacatgaatttgtgctaaacaataaacctgcaggttggcaaacacatccacttaaaacctcaaaattacggaatatgattaagaaacaaatccaagatgaaaatttattagataaactcatggatatcttcacaggacacgacgagtttagatga

SEQ ID NO: 60443 - DNA, 228 bp, Acinetobacter baumannii
atgaactacgcagaaatgtatgttgaaggtgcattgccaaagattgaagcagatattgcgcaacgtggagaatgcattctttattcaaagatgactttaaatgaagaaacaaccactgctatttcgggactacttttagaaaagggctttgatactgaagtaacgacagaggaagatccggactttattggtactagactaaaattgtcaattactaaagtagagtaa

SEQ ID NO: 60444 - DNA, 2286 bp, Acinetobacter baumannii
atgactattcaagttaccgaccggctaagtcaactttatgttggtaacggggttaatacgcggtttgattttacatttagagtttttgatcaagaagatgctacaggtgtggctgtacatctttttgacggtgttgattttgaaaagatggatgaactactttatcaagttttcattaatgcagataaattaggcggatatgtggtttttaattctgctccaaatgcccaaacatctttttatatcgggggagaaactcccgtagaccagcaacttgatataacaaattacgataatttctaccccgattcacttgaaagatcattagataaattaacaggtattttacaagagtggagccatctattaggctttgaaaaacaagcacgtatactatctggaatcaagtatgatgaagatgcgcagagccgagaaattcaaataaaaaatgaactccaaaataatattgattttttagaacaaaatacaaatgctatgcttgaagaggcgatagcaaatggtgcagttagtgctcttgcggtaactgttgttgagtgtcttgatgatttgactacagttagaaaatggcatggtcgaaccgtaaatgtacgttctgtcattaggaataaacatctaggtggcgggacatttgtatttaatcagaatagcaccagaaccccagacgggtatatcgttgttgctgatgttggagggaattgggaaaaaatcacagttgcttttccaaccgttgatgatttcggtggacttggtgatgacccgaactatgatgatgctgatgcctttattaaatgtgcgttaagcccatacacaggttcaaatatttatcttgctaacagacaagttgaataccgtatcaataaacaagttgattgcaagggtaaaggtattgttggtggtggatttagcagacaaaatgctactgcgtatgcaatgaactctctaaaggtaagaccgggtgattattcaaattcaaacactcttcttaataatgtggcatttattaacgttggcgccgaagtaagagacttacaattagtaagtgagggtgtttcagagaatatctcgggtttaaaagtcgacggttacaacttcacactttcaaacgccaatatttcaggtttttacaatcaagtatatttatcaaacgcaacagtttcattccgcgttcaaaatttgatgtcgattagtgcggcaaatgcagggttctttatcgcagatgtggaatctaaacaaagtacaactgcatattttgataactgttcttggcaatggggtaaataccctgtgctgtttgctaaagaagcgtatcagtgcgtctttaataatattattcttgaatatatgcagtacggtttaactgctggtatctggtcgaattgttcatttaatgcaatttgggcagagcaaacgcgtgatggtgtagctcgtgactggctcgtaaatacttcatatcaacaaaccttcaattgcacagttaataatctctacattagatcaccgtggttaaaccgtgctgacactacagcccttggtgtgtccgataatattggtggtgttgttatcgataagagtcgtattactttaagcggtgcaacaggggcaaaaatacaactttccccatcggggttggcaacactttttgcaaattggtatgggggcactaatcgaagattattaattactactcaaccgactgcagccgattcaggttataaaactccgattcacatcaatgcgccaaataatgaattgtattttggaaatcaggatgaagcatccacgtctagtgttgtctttaagcgtgtcattggtgcaacagcagctaacacaccgtttatagcatcagatgcttggaccaagactgtcagaaagtggaacacatacaatcatgaagtatcaaaaatagggcgctttatggctccgatgatgctgacttacgatgtcaactttgctactcaacaaaataatgcaggatggtctatctcaaaagagtctgtgggcgtctatagactgcaaagagatacgggtgtcataactgagttaactaacccccatattgaagtgtctggaattttcactggtacgggtttaggaagtggagcagctctactacctccaactttacaagcaattgaggcatacagtggtagttggacaacttataaagtagctgctggggtcaaattattttttagagacttaacaggcgctttagttgatccgatgcgtttcaccgtctcattcacactagaatcaggaatttaa

SEQ ID NO: 60445 - DNA, 294 bp, Acinetobacter baumannii
atgaataaaattaatttaatttcaaaactatacgatgaatttaaaaatagtgaagattttgaaaaattagatgaattagaaaatgatcgtaaaattgaaatatttttaagtgaaaaaattcactcaaatgtgctgccttttaggttttcgcaattaaatacaaggtacagggtggatgattattttttaattattgatcctaaaatagcaccaccatttgaagaaaagcagaactttatagattggttgtatagctccattactgaaaagcacctgttgacagttcaggactag

SEQ ID NO: 60446 - DNA, 240 bp, Acinetobacter baumannii
atgagttatttagtcattaaagatttgggtcataacttttatttaggtaaaagagggcctagacaggcaggtaaagaatttctagttttcaaaagtgaaaaggagatactagtaggggctgaatcatacacatatgatgagtcaagcaataaattgctttgggaaggtattgaaaatttagggcaggtggtcgtaggttttgcggatactgaagaggaagctatagattcatcattttaa

SEQ ID NO: 60447 - DNA, 258 bp, Acinetobacter baumannii
atggaatataagcaagttcgagcgaatcaaaaaggattctataacgatcgcttaattcaagaaggcgaggttttttctgtacctgaagatcaaacagcactttggtttgatgatgttgagtctaaacagcctgaatctaaaaatcctttttcatcaatgaataaggaagcactaattcaagctgccgttgaacaaggcattcagttaacaggggctgaaaccaaagcgcaaattattgagcttttaacagctgagtaa

SEQ ID NO: 60448 - DNA, 312 bp, Acinetobacter baumannii
atgaaagacggttttaacaaattaagaaagttatcggaaaatgctaaaaaacttaatggtgaacaacaagtttctttaggtactttatttaatgatgggtttcttcaaactaatactgatttcgaaaatattgatgaactatttgagaaggcggggtttaaagtagaaacagaagaagattttgcggctatcccgcaggaagacattgatacttttgttcgagaaaacactaagtttgatagtttcacagatatgcagcaacatgcagcaactgagtatatgcgtaagcaattattcaaaggattaaaataa

SEQ ID NO: 60449 - DNA, 405 bp, Acinetobacter baumannii
atggaaaccatacatgatttttatcgccgcttttctttaaccagagatagcaattactcggttccatcaacttcgtttggacattttaacgtattccaacgcgatgcctgctcgtttctcacgccttatagccgccgcgattattataaaatttcactagttttaggcacaggtgaacttcactatgctaaccgctggatacgagttgaccgccctgctttactgttttccaacccgatggtgccctacgcatgggaaattaattcgcccgaacaggcaggctggttttgtctatttaccgaagaatttgtaaaccaagaatcgcgacaaagctttttaaaagactcaccactgtttaaagtcgacggcgacccgctgtattttttaaacgaccaacaagtttaa

SEQ ID NO: 60450 - DNA, 519 bp, Acinetobacter baumannii
atggcggtgaatattttcggtcctgctggtgtacgcgctcacattctcgataccgtcactccattcctgaatagccgcacatccgaatacttgggcgcattgtctgacggcaacattcatgcaacttggtcaacgctatctgctacggccaaaggtgagctgaaggagaaattcagcatcacggttgcaaatgattcaggcggttcttcattcaagaaattatcaggcggagaaaaacgtaaggttcgtctggctacagctcttgcccttcaagatttagtgatgagccgtgcaaccaagccaatcaatctatggattgccgatgaaattgattatgcgctcgatgaaagtggattagaacgacttatggtcgtgctggacagaaaggctcgtgagcgcggaacagtgctgatcatttctcatcagagcgggttaaaggactgggtagatttggtcatcgaagtgaccaagaaagaaggtacttcaacggtttcaggagacaacctcaaggcagcataa

SEQ ID NO: 60451 - DNA, 882 bp, Acinetobacter baumannii
atgcaattagctttagtaaataatgaaagagtagaagcgtttgaaggtgggagaggaatttgtccgatttgtggggctgtgacaattgctaagtgtggtcctaaaatcataaatcattgggcacatttcagattaaaagattgtgatccctggtgggagaatgaaacacagtggcatagagattggaagaataattttccattggaatgccgggaagttagtcatattgctccagatggcgaaatacatagagctgatgtaaaaacacctacaggcataatagttgaattacagcattcccctatgtcagataaagaaagaatatcaagggaagagttttataagaatttagtgtgggtaattgatggccgcgaatttcaaaaaaattttgatatataccatgctttaccgaatccagaatctgagttggctaaagaattaatatggttcgaggccaagaggcattttcatgggtcaaacagaggtatttttttgaagttaaaagaggttcaagctgacaaaccagagataactaaagctaaccttaatggaagaagagttgggggatggatgcattttatgcatgaaattgaggatgaggtaaataaaaattataatggatatcatcagtttgattgggttaaacctagaagtacttggcttgaggctaagtgtccagtgtatatcgattttggaggggcacacctcgtcaaattagaaacttacgatgaaactggattgaaatgcattagatatatttccaagagtaaatttatgtatgatgtaatgcatgaagataaagtagaaaatattggaaaaaagtggtttaacataaaagaatgggtggatgcccagaattttaattttgataaatatggataa

SEQ ID NO: 60452 - DNA, 354 bp, Acinetobacter baumannii
atgattgttcctgttgaacgagttgcttatttattggcacttatgttgaaaagaagtaataaaacaaaaggacgtataagtgaaaaaacgttaagaataatatctggaaggcagcgtcttagaggagcttttcacatttccctttatgagaatctggcaagtttaggcttggaaataattgaactggatagaggtggttttgctcttttttatagatcaatcttggagggagttcctgttttaagagctaaggatctgatacctagagaagagagagcgtcattatcattagaggacattattaaggagtttgatgatgaggctgatgatgttaatgttgatgtagaagagtga

SEQ ID NO: 60453 - DNA, 750 bp, Acinetobacter baumannii
atggcgggtcattctaaatgggccaatattaagcatcgtaaagcgaaacaagatgccagtcgcggtaaagtttttactaaatatattcgtgaaattgtcactgctgcaaaacttggtggtgcagatcctgccagtaaccctcgccttcgtgctgttgtcgaaaaagcgctttctgtaaacatgacacgagataccattaaccgtgcaattcaacgcggtgtgggtggtgaagataatgatgatttaaaagaagtaacctacgaaggttacggtgtaggtggtgttgctgttcttgttgaaacaatgacagacaacctgaaccgtacagttccagatgttcgccattgtttcagcaaaactaatggtaacttaggtaccgcaggttctgttgcttacctatttaccaaacgtggtgagattacttttgacgatgtttctttagaagataagatcatggacgttgctttagaagctggtgcagaagatattgaagtttcagaagatgaaattttagtaatcacttctccagagacttttggtgaggttcaagatgctcttgcagctgctggtttaaaatcagacaatgctgaagtagtgatgagcccttctactaaagcagaaatcactgatattgatcaagctaaacaagtgatgaaactcattgatatgcttgaagatctagacgatgtacaaaacgtttatacaaacgttgagtttagtgatgaagttttagcgcaacttgatgcctaa

SEQ ID NO: 60454 - DNA, 546 bp, Acinetobacter baumannii
atgacagcgatcgtagagaaaacaacaggacgccttattaaaacaataagtgctcctgatgatgttataaaactcaacacacctgacaattgctacgcgactgacgatcctcccgataggggaatgatgtacttagacggagaatgggtttacatacctccctcaccgggacaagggtataagttcgactacagtgttagacagtggattgatactagaagcctagaagaagttaaagctcagcagtgggaagtaataaaagctgaacgtaatcagtatgagtttggcggttttgagtttgaaaataagctttatgattcagatcctaattctcaattaagaattgctactgctgctttgctcggcgtatcagttgagtggactttaaaagacaattcagttgttaatcttagtcctgatcaattgattgacttaaaaacagcacttgcagtgcacattaataacattcacgaaagagggcgtattgcacgacagaaaattgaaactgctttgacatatgaagaaattgaagcagtaaatttttaa

SEQ ID NO: 60455 - DNA, 1692 bp, Acinetobacter baumannii
atgtcttcaatgtcacccatctggacaacagctcgcccagactgggaggagcgtattgttgcaaaaaagtcgctcatgccatgtgctcctttgtttccgcaagttgcagacgttgccgagcgtatatttaaagaacttatccttgttgatgtgatggatagcccaaaaatgggcgatgtcacacttgaatgggttattgagtttgtacgagcaatctttggagcttatgacccaaaagcaaagcgcagattaattcgtgaattctttcttttgatttcgaagaagaatactaaatctacgattgccgccggcattatgcttactgcattaattcttaatgatcgacaatctgccgaactaattattcttgcgcctactaaagaagttgctgataactcatttaatccaatccgagatttcattcgcgccgatgaggaactaagtgaacgattcaatgtgtctgagcacacaaagacggttacgcatctaggtaccggagcaacacttaaagttattgcagcagaatctaacgccgcggctggtaagaaagcttcaattattttgattgatgaagtctggctctttggtaagcgtgcaaatgctgaatcaatgtttcgtgaggcaaagggtggtttagcatcacgtccagaaggctgtgtaatttatctgtctaccatgtcggatgaagtgccatgtggtgtatttaaacagcttttagattatgcccgagatgtacgtgacggaattaaagttgataaaagttttctgccacttatttatgaattccctaagcatcttgtagaagcaggcgaacatttaaaacctgaaaatttctacatcacaaacccaaacttgggtgcttcggttgatcttgaatatctgatttcggaatttaacaaagttaaagatgctggtgatgaatcgcttagagatttcttggccaagcatttaaacatcgaaattggcatgaatttacgtgctaaccgttgggcgggtgcagagttctggaatcaacaaaaacatgttttcggcttagaccaactaattgaacagtcagatgtcattacgattggtatcgatggcggtgggttagatgatttgcttggatccgcggttttagggcgtcttaaaaaagatccccgcgtctggtggctttggaatcatgcatgggcaaataaagttgctttggagcgccgaaaagaaaacatcccaaagtaccaagactttgaaaaagaggggagtctgactgtagtagacaaagttggcgaagatatcgaccaattggcagtgattgcaaagcaagtttatgacagtggcaagctcgacaaaattggtctggatccgcaaggtcttggaggtcttttggatggcttattgggtgtaggtattccacaagaacaacttgttggtgtaccacaaggtcataggttgatgggatacatcatgactgctgaacggaaactggcggagggcaacctttggcatgctgggcagcaacttatgacttggtgtgctggcaatgcgcgagttgtgatgattggtaatgggatgcgaatcaccaagcaagaatcaggggttgggaaaattgaccctttgattgcaacatttaatgccgtggctctaatgactatgaacccgattgccaagaatttagacattgacgaatatttagaggatgtcgtgatagcatga

SEQ ID NO: 60456 - DNA, 1374 bp, Acinetobacter baumannii
atgatcgagctatattcaatcccagtagagcaatatgttctttctgcattcatgtcattcaatcagggtatggatgattttattgagcagcttgaagcagaagatttttatgcatcacaacaccaagtcatttttaaacacattcgtgctcaatatttaattggtgaagcttttgacgagatcactatttggcaacaaatccgtgccaatgctaatgaatcaagagtgattgatgaatccttcatagtcaatttgatgagccgtgttcctcaagtatcaatcttaggcacacacgtaaaaacacttaaggacttatcagcacgtagaaagctaaatgaaataggaaaggccattactacgctgtcaattgatatggttgggcatagttctgattctgccatcaataaggcacagtcactgttacaaaacatgagccatagtgctagtgatgactacttaaaacatgctcatgaattcacaaaagaagctataggcgagttcttggcacgacacgaggcgcttcatagccaagttccatttgatggtggaattagaacaggctttaccgcccttgatcataagttaggggaagttgggaaaggggatttggttatcattggtgcacgcccttcaatgggtaagacaacgtttgctcagaacttggctgccgatatgtttattaatcaaggtttgcctgtcctatttgtttctatcgaaatgaaagggaagcaaattatgcaaagaatgattagtggtatcggcggggttgaattaaaaaaagtcctaactggaaatattaccccaaacagtgatgatcttttgatgatcaacacagcggccaatactattgaaaaagcacctttcatgcttgataccaacaataggtctaccacttcaacaatcagaaggtcagcaagaaagttacaagctaaatatgggaaagttggtgccatttttgttgattacattcaaagggtcataccacttaataaaaataactttggtagatctgacaaagagctaggggagatttcaggcgaactgaaaaggattgcaggtgatttcgattgtccagtttttgctttagcacagctcaaccgaagcttggaaaaccgcaaggataagcgccctattaatgcagatttaaaggactcaggggatattgagcaagacgcagacatcatcatgtttatttaccgtgatgaagtatacaaccctggttcaaaagatgctggtacagcggaaatcatcattggtaaggctcgtaatggctcaattggtacagttcgattagcaacagatttagcaagagcaacctttaccgacttaagccctgaatattaccaatctcaaatgttaggggaccatatatga

SEQ ID NO: 60457 - DNA, 813 bp, Acinetobacter baumannii
atgagtaatataattgcgccgaattatacacaggtgcctaatgttgttgttgatgagcttgcatctcagctaagcgattctgctttcaaattgtatgtggttcttatccgcaaaactaaaggatgggatcaatcacgtgatgctatttcaattagtcagtttgaaaaaattactggcaaaagccgtccaacggttgtgaaagcaattgaagagttggtgaaattgcgtttagttcgcaaaactggatgcacaaaatttggcaatgaatatgaattaaatttgagtttttcaattgatggaatactactaaatttcccaagtaaaaaatctttactagttaaaaaatttaaccaaactagtaaaaaatctttactgctactagttaaaaaatttaacacacaaaagaaactatcaaaagaaactatcaaaagaatagattcgggtagcaaaaaagactctaaaaaattctcagaaaattttgagaagttctggtctacatatccatcatgtaaacgaaaatcagacaagtctggcactgccaaaacttttgaaaagtacgaaaaggcatttgaacttgacacagtgatttcaattttagaactgcaaaaaattgatgaacaatggacaaaacaagatggtgaatttattccatcgcctacttcatggttaaacaaaaagcattgggaaaatgattattggatttcaaagatccaagctcaaccagcaacacaagtaaacaatggtccgattattgagcaacaacctactcaattcaaaggggtaagaagacagttcaaaggggttaatgcatga

SEQ ID NO: 60458 - DNA, 174 bp, Acinetobacter baumannii
atgaatcagacagctctgcaattcatcaagcagtatgaggatgggttttatgagggtgctaaatacacgcgtgaatacggcgatcttagaaagctttatgacgaatctactgatgaattttacatcgaagaaatcaatgaagcctatgcagaattcaaaagggggagttcatga

SEQ ID NO: 60459 - DNA, 126 bp, Acinetobacter baumannii
atgaatgaacaaatcttagcacaaaattcagactgtgcaatatccccaatgtgcgtatttatcgcctatccagaggagcatattccctatgaatcagacagctctgcaattcatcaagcagtatga

SEQ ID NO: 60460 - DNA, 417 bp, Acinetobacter baumannii
atgcgtactagttcacaactttttccagaaaacaaaatcgtgactgtggatgaccttattgcagctcgtagtgaagctaagaatgatatgggtgatatcaatgccctactctcagcaattgagctaagtctttttgaaaaacttaaggaccataacttaagtaagtttgcttttgataaaacctttcgcttgattgatattgccaaaacacacgcagatctatctcaggattatcacaacggtgagcttgctcaattaactggtggccagtatcaacttgatgagttgaaaaataatattacacaccttgaggttgtcccagagacgcaagtaatcaacacaaatcatttagctccagcgaatgcagccatctctaaaacacttgcagaaggttttaaaaatgacggacggcgttaa

SEQ ID NO: 60461 - DNA, 762 bp, Acinetobacter baumannii
atgaacaatgtatctgtttttaacttcaatcaaaacgaagtccgcaccatcgtaaaagaggatggtgaaatttggtttgttctttctgatgtttgtagtgttttagagattggcaatccaagtgatgcagcacgtagattagataatgatgaagttaccctcgatattatcgagggtaaccacagaccaactaatttagttaatgaatctggtctttattctttagttctaacaagccgtaaacccgaagctaagcaatttaagaaatgggttacttctgatgtattgccaagtattcgtaaaaatggtggttatatttcaggtcaggaaaatgatgatcctgaaatcataatggctaaggcattgcaggtcgctaataatgtgattcttcgcaagactcaagaattacagcaagctcgggctgaacgcgaccatgctattacaaccaaagcggaaattggtagtcgccgagaggctacagctatggcaaccgcatctaaattcaagcgtgaaaatgaagaccttaagcagaaattaggtgaatccatttctttcgctgcggtggcctcaatcaacacaaaactcaaaactaactttggaaataaagaaggtcgcctactctctaaatatagtcgtgagcaccatttagaaattaaaaaagcgactgtacagggtcaacgcttctccgaagtaaattcatatcaccgagatgcttggcttgcaatttttaacattgatttaacctcagtttttggagcgtaa

SEQ ID NO: 60462 - DNA, 288 bp, Acinetobacter baumannii
atgaaacagccatctaaacttatgtgtcaactaggttcattatctcgtggactggataaagaaaattcagagttcgagccaaaatcacgcgataagctcgctttgaaactgagaaaggttgtaaatagcgcccaaaaactcgaagcacaggagtttgatttgttctgtcgtattaatggggcaagggatattgttttggatcttatggatggcttaggtcttaagaaaggcgctgagattgaaaagcaattaattcttattcttgaggcattggatggtgtggaatga

SEQ ID NO: 60463 - DNA, 252 bp, Acinetobacter baumannii
atgacagaagttaaatttgtttctatgcctgcatccgaattggctcaggtcatcgaaaaggcgtgtgagaatgcagtaactaaagttttagcagcccaaggcgatgagctgctaaccatatcagaacttcaaaaaaggatacccggcttatcttggcatatatttgacaagcttcggaagaaacataaattaaaagatataagaggcaaatactctcttacggctgtgaaagccttgctgcaatctgactag

SEQ ID NO: 60464 - DNA, 960 bp, Acinetobacter baumannii
atggcaacctttcaaaaacgtaacggacgaataacagcaactgtaagaattaaaccacatccggctaaaagcaaaacattcaatactaaaaaagaagcgaaagcgtgggcggatgagactgaattacaactgaaaaatgaaaaagaaaaaatttttactcacataactttgagacaagcaatcgaagagtatagagataccgtcagtatccataagaaagggggcgttaaagaagtaactcgattaaatcagttcattaaaataatgaatgttgatgtttctttatcggaagttaataaagagtttcttgtaaatttcagagaatatcgacttgaatcggtagtgcctgctaccgttaggcgtgaacttcttatgctttcagggatgtttagttggtgtattgataaaaaactttggttatcttcgtctcctatggatggcgtaaagttgccgaaagcaagtaaccatcgggagaaagtcatttctgattttgaaatagaaaccctattacctttcttaaatgatgagttgaaaagcatatttctaatcgcactcgaaacaggaatgagattaagtgaaatctgtttattagaatgggaacggatatttttagataaacaatacttagtattgaaaacgactaaaaacggcagaccaagagaagtgcctttaaacgttatcgctgtggatatttttataggtattggggttaaaaaatcaggtcgagtattcagctatgaacctaaatatgctagtgcagattttatgaaggcgcgaataaaagccggactctacgattttacatttcacgatacccgccatactgctgcaactcgcattgcgccaaagttgcctttgcttgatctatgtaaaatgtttggttggacggaccctaagcgcgccatggtttactacaatccaacgtctagtcagattgcagcaaggctttcacagccgtaa

SEQ ID NO: 60465 - DNA, 360 bp, Acinetobacter baumannii
atgttttatggaaatacggtcggctttggtacatggtttcagggtgaagttgcgggaaactatgctggaccattcaataaaaatgcaaatattcatcaagtttcttacatgatgaacttgaaagaaaattttatgttgggtgctttagcctataagttcaaaacagtaaataagtctttaactaatgtagatggacatgagctggatgtcttttcggtctggtcagttaataaaaaattcaacgtgattcctttagttgggctctataaaccgaaacacgatatccatagtggcggtactcaaaactacgatgacaaaaccaatgtctatgcgcagttaattttgcaatacatctattaa

SEQ ID NO: 60466 - DNA, 558 bp, Acinetobacter baumannii
ttgggtattcaatcaaactctataacagatgaagaaggcaattttttagtaattaattcactatttgctaagagtgaattcctttttgatttatctagagataaagaaataatgaatgtctctgagaaattattaagtaaatctgtaattcctatacattgtgaatatttctgtaaacctaaattaggtgcatatcctacccctccacatcaagatcaaattttttatcaaagccattttgatgatgaaatggccataacatattggtgtccattaactgatattaatttaggcgatggagcactagaatatgcaaaaacagataatttaatggaattattacctcatatagaatctaatgcacgtgattttggaatggagcttaaagattcttcagaatatacctttgagccggtaattctaagaaaaggagactgcatagtacatcatgcttatgctattcaccgtagtggacaaaagactacgctcccagctcgtgaagcctttgcatttaactatcgctcatctagctttagagaaaacatgaagggaaaatga

SEQ ID NO: 60467 - DNA, 684 bp, Acinetobacter baumannii
atgcctgaaatattatgggcatttgattgcctagaatcaaaagaaatgggggcctatccacccagtaaaattagacttgcatatgcaaatagattacaaaaaaaagaagatgatttaccacgtgcagttgaccttggtagagaagttcatccttatgattgtattcctatagcaatcatagctaattatggttttagtgtccgctgccctggaaccgttattttagagagaaatgaaacacctttaaaagaaagaacattttatgaaaaaaaatctgcttttggaaaagcttgtattcaaggagatgtgtggccaaatagtgattcaggtcttatagctagttggatatccggttctgaatacgtaaaaatacaaacaggtattatagttttttttccttcagactattatctttaccaaggaccaattccaaatgcatgtcttacaaataatcagtttgaagtaatggctggtattgaacacggtaatcaaaccagacaaacttacatagacaatcatttatacaattatgcacatcttaatatcatagttaggctcccgcccattaatacaaaaattaccatagaaaaaggtgaagaaattgcatggtttttccctgtattaaaaagtacaaaattgacacttaacaaactagacataacaaaaataaaaaaggacttttaa

SEQ ID NO: 60468 - DNA, 1239 bp, Acinetobacter baumannii
ttgtttaaaaaattcagttctaattctgcatggaccctcaaggcatttagaattatttggtcctctcaatctattgctatgataggcattgctattcacaatatagcacttcctatcatagcaattcatttattacatgcgtctgcaatagaggtcagtttaatatctactgcacgctacttacctaatttgctatttagtatcagtataggatcttttgttgaccgctcagatagaaaatttatagcaatatatgctgaattaactagattcattttagttttatcaatacctattttatataccttttatttcataaacattccatttcttatcttaatagcttttttaattggaatcgctaggatattttttgaattatctctttcttcattatttccaatagttattcctcccgataaacgcctttccgccaacgccaatctacaggtcatttcctctgtaggtgaaattagtggtccaggagtagcaggctttattattaatattataggcgcaacatcctcattattaattaatgcagcaacttttttcctatcagctatatttatagccaagttacctatagaagctaaagataggaaaagtaatatttccaatcaaaaagaatctttttttgatggctttcatgaacttttatcaaggcctgttttaatgggcataatacttgttggtgcgatatcaaattttgcatttatggctgtacaatctgtctatttcataataactttaaaattatttggatttaatactttaattgcttcctctttattaatttttagtggcattggatcattagttggaaatatttcagctagatggcttcataatttttttagtgtaaagtttctaatgcttttctcaattatacttatgataattggatctataattatgttatttgcaagaggtcctatttggataacatctacattaatttcaattggatattttctatggggactttgtcttggtttatttaatatatattctgcaacttatcgccaaaaaatagtaccacccgaagtcatgggtaagttagtaggtgctgctagaacattaatttacggagtaatgccattaggcgcattatcaggaggattaatagtagatttttttggatcaagatatgtatttttatttaattgcttaattaatttaatttcattagtaattttatactttagtttacgaaaagtagataaaatcttactttaa

SEQ ID NO: 60469 - DNA, 1089 bp, Acinetobacter baumannii
atgcaagaccaagctttgccatcattccctcaagatttaaatgaggatcaaagtattacacgtccaccaatttcacactcaggtattcatcattttaaatttcacggtaatgcctcagaatattttggaatttggatcgttaatattcttttaactattattactttaagcttatatgcgccttgggctaaagttcgtcgtttacgttatttctatggaaatacagagttttttgaacgtcgttttgattttactggtattccaaccaagattttgattgggcgtttaattgcattaggaatttacgtagcattttcaatttcatcacagtattcaatgattgcaactgtagttggaatagttgtgttatatatggctgtgccttggctaattcgcgctactttacgttttactgcaagaaatagtaagtatggtaacgcacgcttttattttggtggcactataaaagaatcttataaaattttccttttaagtatattggtatatatctttacattaggaatttttacgcctgtagctatttggctatataaaaaatattatcttaatcacctatatgctggacaattaaattttaaattaaacgcgaactggactgcatatatggctgcagtttatgtacccatttttattgctcttggcatcattgctatcttttcaattatttattttagtattttaggaacactttccgggttctcatcgaattctgtaatctttgggatatttatgatgtatgccattattggattatttatttatccattaattgctgcgcgtcttttcattactacatggaacaatactacagttggaaacagtcaatttaaaacagactgtaatcaatggcgttttgcatggattgtagcatcaaactgggtggtaaaaatcttaaccctaggtttaatgtctgcttgggccgctgttcgcattcacaaatatcaggttgaatcaatgagcttaatcttactagatgatccagataaaatgatgaatctagctcagcaagaacaaagtgctttagctgaagaaatcagtgatatttttgatattgatatctccctataa

SEQ ID NO: 60470 - DNA, 1170 bp, Acinetobacter baumannii
atgcggttagggggcatttttacactgccgctaacaacacccgttatccccagttccataccacccttgccgatgccattgcctttacctacatcacccgattcaacatcggaaacctcgcaacggccaagcagaacacgacaacagcattatcctaaaacccagcaaggacaaagacaaagccgagtcggaacactgtgtcccaaacgtttggcagaaaccaaacatatgagccaagctgaatggttaagcctccgacgccaaggctttggcagtagtgactgtgctgccgcttgtgggctgaatccctatatgtcgatgctggaactgtggatgatcaagacagggcggattcaacaaagcattgaagatgagagtgaaggacatgcaccgttgtactggggcaaacgccttgaacccttggtcgctgaatactacagcatgcacaccaattataaagtccgtagagtcaatgctgtgctacaacatcccgaagctgataaacactttatgttagccaacttggattattcggtagcaggtgatgcagatgtacaaattctagaatgcaaaaccgcaggggaatatggcgccaaattgtggcgagacggtgtgcctttatacgtgctgtgtcaggtacaacatcaattggcagtgacaggtaaaaaagcagcacatatttgtgtattgatttgtgggcatgaaacccgaatttataaagtcacacgtagtgaaacagtgattaaacacatcattgaagcagagcgttacttttggcaatgtgtggaaaaagacataccaccggatgtggatgccagtgaatcctcagccaaagccatccagcaactttatccacaacatgtgccattgacggtagaagacctcagccacaacgatcaagctaatcaattgtttagccaattgttgaaagaaagacatcatatcgagattcaccaaaacctttttgatgaaaccaaacatcaaattcaaatgctgatgaaggatgcagaaagggccacttttgctcacggttcagtaacttggaagaaatccaaagactccactgttttagatggcaaagctgtactcaaattacatccagaaatgcttcaacaatttccacagcacaaagcaggaacacgacgttttcaaatttataccgatgattga

SEQ ID NO: 60471 - DNA, 1407 bp, Acinetobacter baumannii
atggcaaagtatcaggcttatgcggagtataaggactcaggggttgagtggttgggggtagtgccttctcattggatcattactactttaaaaagatattgttatgttaaaggtggttttgcattttcaagtgatgcatttatcgatactggatatcctgtaattagaattggtgatattaaaactgatggttcgattaacttggaaaactgtaaatacattccagagtcgttggcagttaatagtcgtgattatttagttgaaaaaaatcaattattgatggcaatgactggagcaacaatcgggaaagctggtttatatactagcaatcagccagcatttttaaatcaacgagtaggtaaatttgagcttctagcacagaatatgaactatagatatttatggtacatattgaaaactgatggttatcaggaatatatcaagctcacagcttttggtggtgcgcaaccaaatatcagtgatactgctatggttgattatccagcaaccattccttcatttgatgaacaaacccaaatcgctaacttcctcgaccacgaaaccagcaaaatcgatcacctgattgaaaaacaacaaaaactgattgaactgctcaaagaaaaacgtcaggcggtgattagccatgccgtgaccaaaggacttgaccccaatgtcccgatgaaagattcgggtgtggcatggttaggggaagtgccggagcattgggatattacacctattagaaacttaatcaggtcgggcaatctgattttacaagatggtaatcatggtgagctacatccaactgcaaatgattatgtagaaacgggtattccctttttaatggcaaataatattcgtaatggtaatctttttatggaggacgtgaagagaattcctaaacatttagccgatacattaaggattggttttgctaaagcaggagatatgctgttaacgcataaaggaacagttggagaagttgctttagtcccacaagatataaaagaggattattggatgcttactcctcaagttacctattatcgttggcagggtaaaaagtttcttaataaatatttttattatcaatttcaatcttcttcaattcagactcaacttgaaattattggtgcaaagcaatcaacacgagcatatgtaggtttaattgctcaaggtgatttgattgttgcaattccaccatcacatgagcaactagaaatatcatcatatattttagaaaaagatcaaagttatcaattgatgattgccaaagcacaaaccgcaattcagctcatgcaagaacgccgaaccgctctcatctcagccgcagttaccggcaagattgatgttcgccactggcatgcgccaacggttgctgaggcacagacggagttaagcgcatga

SEQ ID NO: 60472 - DNA, 435 bp, Acinetobacter baumannii
atgcaaattaattttgagaatctgaccattggcgtttttgccaaggcggccggggtcaatgtggagaccatccggttctaccagcgcaagggcctgctgccggagccagacaagccctatggcagcattcgccgctatggggaggcggacgtggttcgggtgaaattcgtgaaatcggcacagcggctggggttcagtctggacgagattgccgagctgttgcggctcgacgatggcacccactgcgaggaggccagcagcctggccgaacacaagctcaaggacgtgcgcgagaagatggccgacttggcgcgcatggaaaccgtgctgtctgaactcgtgtgcgcctgccatgcacgaatggggaatgtttcctgcccgttgatcgcgtcactacagggcgaagcaggcctggcaaggtcagctatgccttag

SEQ ID NO: 60473 - DNA, 897 bp, Acinetobacter baumannii
atgattaaaggtctagccattacaccgcctattttagggcgaatcagtatcggcaaagttgtcgaaaagaacgggaaacgcatccctgagaaagacgatcagttcactattacaagtcaaatacaggggaaggacggttggattaaacaccccttggatgagcaattgcgtagtcaagcaccgaatcaaaagttacgtagcatccctgtacgtatgatcttcaatgatcctgaattgaacttacgtgccgagtacagcttgtttgaccgacagacaggtcgcccgatttgtgtggggaatggtcaaacctgccaacgtatgacatcacaaggtgtagagcaacatccttgtccatcccccgatttatgcccacttggacaaggcgggcactgtaagccttatggacgcctgcatgtcaatttaggcgaagccgatgagtttgggacttttattttcagaaccactggttttaacagcattcgcactttggcagcacgtttgaattactaccatgcagcatcaggtggtttgttgtcgtgtttaccattgcaactcacgttaaggggaaaaagtaccacccaaagctatcgtcagcccgtgtattacgtagatttaacgttacgggaaggcgtggatttgcaaacagcaattcagacggctaaggagattgaccaacagggaaaacaggcagggtttgatcaggcggcattagatcagattgcacggcagggttttgccaatgccaagtttgaggtgcatgcagaggaggggatggaattgctggaggaattttatccacacagtgacagtgctgtagatacagagcattcagcgcaattgagctatgtgcaggagattcagcaggggttgcagcagagtgttagagctgtgaattga

SEQ ID NO: 60474 - DNA, 1041 bp, Acinetobacter baumannii
atggcacatttagtagaaacaatggcatttgttggcgataccccatggcatggattaggcaatccactcagtccaaatcagccgatagaagtatgggcacaacaggcaggcatggactggcgtattgaatcatctaatgtcagttatatggcaaagaatgaacgcgggcaaaatatccttatgccttatgaggaacagcgtgtgttatatcgctcagatacacatgcaccgttatccgtcgtaagtcaacgttttcaagaagtacagcctaaagagattctagagttttatcgtgacctgactgagcaatcgggctttgagctggaaacggcgggcgtactcaaaggtggacgtaaattttgggcattggctcgtacagggcaatcggcagcactgaaaggcaaggatgtgagtaatggctatattttgttggcaacggcatgtgacggcacactcgcaacaacggcgcaatttacctctatacgtgtggtgtgtaacaacactttggcgattgctttgaaagggcagaactctaatgcaggagtcgtgaaagttccacacagtaccaagtttgatgcagaaaagatcaagcaacaacttggtatttcagtgcgtgcatgggatgaacacatgtatgaaatgaagcaactcagtcaacgtaaagttacccagaatgaagctgctgcttactttgatgcggtgtttaataacacagcgatgagtattgccgaacaggatgacaatatcattcagttttaccgtgatgttgctacccaagctcaagccaatagcaaagaaaaacctgaaccgaatgctaaatccatgagtaaagctatggagatgtttaatggacaagggcgtggagcaagcctctcttcagttaaagatactgcctatggattactctgttcgatcaccgagtttgtcgaccatgaacgtcgtgcgatgagtactgatcaccgccttgactctgcttggtttggtgcaggggcagcattaaagcaacgtggattagagcaagcattatatcttgcagcctaa

SEQ ID NO: 60475 - DNA, 258 bp, Acinetobacter baumannii
atgaagactgcatcatgcctttttatcatcagcattaccgtacttggcctgactgcctgtgccagcaaagctgaacgtgaattcgtgaatggctgtaaaacagggggactcgaacatagcacctgtgaatgtatctatgacaagttagaaaataaatatggtgaagatggttttaaaaataatctctataccttaagccaatccgaaagctttcagcatgacatggttcaggcaagcttccaatgtgcacgggagtaa

SEQ ID NO: 60476 - DNA, 225 bp, Acinetobacter baumannii
atggataagaacctcaaacagatcaccattgttgtttatttggtcattggtttcttttatgccatctatcaacatttctggggactctatagctataaaggttttgcctttaacttaggtcaagggctggcctggccttttatcatgtttccaaccctgggaaagattgtaggcggtattctgatcttgctgttcattatttttattgtattaaaacccaaataa

SEQ ID NO: 60477 - DNA, 444 bp, Acinetobacter baumannii
atgaaaatgataaacctatcaaaaatattactgatcacttcattgatgggattttcattccatctgtcagcaagcccggtacctgtgtacaaaggtgttcctaaaaccgacagccagtttccgcagtttcttaagaaaaaccataatcagattgttcagcttgatctcacgattcgaaatccggctgagtttgacgatatcacctatggctatcggggtgtaagcccaaccttttacgtggcaccactgggtaaacttaattatgaagtttatatcgattgcgacaaaatcaaacatccaaatgcaaccaccaccattggtcaatgtgcaccctatgtcaaatggaatcctcaaacaggccatttaacaggaaagtttaaagtagttagccaaggtaaaaatgggatggggagtatgctgtataacctgattgccactccataa

SEQ ID NO: 60478 - DNA, 300 bp, Acinetobacter baumannii
atgaaaaaaacaatcattgccttagttacattccttaccttatttacaacaatgtttgccgaagcaaaaactgacccagacctaaaactggtcaagcaaaaagctggtcagatcgtgtcagcaaatcgccaacctgacaatggaaatgccttcaatattggagtcaataaagatgaacatccacatgaatataccattgcatatgatctaggtatctcaggcgatatcatcagttgtgaaattcgggttaaggttgagaataaaatggttattcaaaccacaggtgttatctgtagttaa

SEQ ID NO: 60479 - DNA, 267 bp, Acinetobacter baumannii
atgaacattacttgcccaaactgccattcagaacatgttattcgggtggtgaaccatcattcccaaacaggaagccagagcctggcatcgtcagcatcatttgccacgatgggtgcagcattatcaaagagtttgccaatttcacctatagtgggtgggattgcaggagccgtagtcggtggtattttcaatagtttgtttgatcgtgcgcctgtcaccccaagttgcagctttcaatgccaaagctgtggtcaattgttttattga

SEQ ID NO: 60480 - DNA, 879 bp, Acinetobacter baumannii
atgaacgttagcctaaaccaaaatgaaatcaacgaagcatccctactgatggcaattgaaagatttgtcctaactagtctcgatgctacaagacagccaagatcattttatgaaaccttcacagaccttctcttagccttcgatcaaatctataaccctgactttagctatacctgtttaatcgatctcttttgtagtttgctccatgactacgacctgcaatatgaaacttcatcatcactttgcaatcgcttgaaacgaacaacctttaaagactggcaagcttatttcaatcaagctagagccgatcacctgaatgaattacgccaacatcgttatagcgaaacattaaatgctgccaagcttgataatcgccttgaagaaatattgaaaagctattctgctgtgctggtggtaagggttgatttagcctatgtggttagtccagatattgaacaggtggataatgatttagaaacgcttcggagaaagatcaagcgatccgaatatggaaaggatatattgctactggtatgggcattagagcagggagaaaagaaaggctatcattgccatattgcattgatctttaatgagcgtaagcgcacgagtgcatggaagattgctaaggttgtaggggagttatgggaagatgttactgatgatgaaggaagtcactttaattgccatgatcgtaggtacttaaagcaatacgaggatcaagatactttaggggttggcattatctatagcggagttgattatcaggtgcgaagaatgtgttcaacgctatcctatttagcacgacctgaaaaagaacaatatctccgagtaaaaacaacgaggaagatgcgtacctttggcatgtcacagcgttaa

SEQ ID NO: 60481 - DNA, 933 bp, Acinetobacter baumannii
atgtatcaaagctctgcacataaagaattaaaacagactctcaaacaattttctgatgaggatatgatttgggttttgcatgtcatgaataaagatcatgaggaacattatcttggaagaaacattgatgatatggactctgctttagtccggttagatattaaaaccttaaataccatgactaatatggatgaaattagaagcaaggttataaacagttatgaggaaattagggaagaatttattaaccaattcatcgatactttaaaagactttcaaagcacgttaaaaatacgaggaagagacttatccacatacaagagcaacaagcgtctattatattttgtactcaaccagattaaccacaaggaggatcaatataatactttccgtgatatacagaatgaatattttaggttcctctatacgatattcatgctacccaactattacgacacaaaccgcacccttgatgatctggaagccagttttagtaaaatcataagcaagaaaccattacactttaaaagctttgacagtgatgagttctacccatgggctaaaacttatatggatcaagatagagaaaatgctagggtactcaatagtacaagctataagcctctaaatgccaaagagtgtagtattgtcgttaatgcaatctttgacaatttgttagctatagatagcaacatatatagagcgctaaaagataggttatcgaatgctgcgtaccaaaaaaactaccgcaagaaaaacaaagggcgtaagcatcattactatctaactgataaagccctttattgcttaaaaatattggcagagaagcacaatgtgaccgaagaaaagatgatcgaaaaccttatcaatgagcactacgccacggagtgcatggacgcaaacggtaatcatctttattcgcctacgggctaa

SEQ ID NO: 60482 - DNA, 1482 bp, Acinetobacter baumannii
atgcttcttgttttaaatatgatggatgaggtcaaaaagcgtggtatttcgatagatattaataagctatcagaattgttgggtatccctgttattgaggctgttgccgttaaaactaaaggcgtgcaagaactactaaatcaattagatcaaaaaaatctatttgtcactccttatcattctgatctgaatcattttgatcagattaaaaatattactaaacaggtaattttaaaaaatgataacggtgatgcaagaacagctttcttggataaaattttcttacatcctgtacttggtttagtcaccctaacgcttaccatgtttgtcatgttccaagccgtttttatctgggcacaaccttttatctcattaattgaaaatgcaattgcttggttaggagatacaattggcccgcttattactcatccattacttagaagtcttattgttgatggggtaatcgctggatcgggtagtgttttggcttatatgccgcagatccttatcttattcttctttattttaattttagaagaatcaggttatttgccacgagcagcattccttttggataaattaatgtccaaagctggtttaagtggacgttcctttattccactattatctagttttgcctgtgctattcctggtgtcatggcaacacgaagcattagttcggaaagagatcgtttagcaaccattatgattgcgccattaatgacttgttctgcaagattacctgtttatgctttgctaattgcggcattcattccaaacaaattagtttatggttggttgagcctacaaggtttagttctttttggactatatatggctggaattgtttcagcattatgtgtttctttatttttgaaactagttagaaaagataaaacagaaagtatttttatctttgagttgcctacttatcgattgccagatattcgaaacgttgcattaggactttatgatcgagctacgatctttctaaaaagagttggtggtattatcgtagcattatctatattgctttgggtgttggttacgttccctcaaccacctgagcatgccacgatgcctgctatcaactatagtttagctggacaacttggacacattattcagcctatatttgcacctattggctttacttgggaaatctgtatcgcattaattcctgctatggctgcaagggaagttgtcattgctgctttaggtgtaatttatgctatgtctggagatgaagatactgtaactcaaacattgttgagtcaaatctctggtcctgatggttgggggctagctacagggatgtcattattagtttggtacattttcgcaccacattgtcttgcaacattagcgaccattcgtcgtgaaactagtagctggaaacagcctgttattatggcgacttacttatttgggcttgcgtatttctttgccttcattacatatcagcttattagtagactttaa

SEQ ID NO: 60483 - DNA, 414 bp, Acinetobacter baumannii
atgcatttaaaatatctcagtttatgtttatttagtttgggcttgacggcatgtgcacaacacggcgtgcgtccacaggtggcatctgcgagtttagagcaaaaagccattcaaagtgttaatgcgatgtatgaatacccaagttatgattatcgcggaaactttaaaattaccgttgatccttcacaaataaagcaaaatgtaaaagctgagaatactgctaagctagatgctgaattacaaaagaaagttgatcaatatttacgtgaacaaaaagttgccttaagtaaagcacagaaacaaaccttatatacggcgattgcaaacgaacaaggtgatttgggactgacttcctcagcacgttctgaaaaaattaataccgtattagggtttgttgacatttactgttcataa

SEQ ID NO: 60484 - DNA, 198 bp, Acinetobacter baumannii
atgaatacattggataaccaagtcttaatttttgaatctcgcattaaggaatatcttctttacaaacagcaacatacattaataaatattgaattaaaaatattttctaataagtacattcaagatgaaaacattattaaaaaaacatccatactagaatcaacaaagtctattggcagaattattattttaaaataa

SEQ ID NO: 60485 - DNA, 282 bp, Acinetobacter baumannii
atgtcactacatgttaacccacttacaagcgaaggaaaaattcgagtagaaaatattcttcagcaagcagcaaaagatattaaatttcgtgaactattaactgagaatccaaaggaggcattaaaagactcaggattaaccgaggaagaaattagtgttatttcaactatgcgacgtgtagcactagaagaatggggtattgatgtacgtccattccgcggttttctaagagataatggattcaaaatatctgaatttttgaaattagaagaaattgcataa

SEQ ID NO: 60486 - DNA, 744 bp, Acinetobacter baumannii
ttggctacaaatatatatctattaggatcagggattttaggttctcttcatcttacagaagaaacaaagcaggctcttcaaatatcaaaacatatatttgttttgaatcctgacacatccttaattgaggactttaaacaaacctattcctctgctcaagtacatgatatggcttatctttataaaaatgaattatatcgccaagatgtatacaaaaaaatttctgaagttattatagcaactgctaaagataatgggcctgtatcatttatagtacatggacatcctctgtttttagttagcgcatctgagtacacccttgatttagcagaagaaaacaatctatctgtaaaaattttaccaggtataagttcctttgacacattaatgtgtgatcttaaaattgattatgggtatgctttacaattttttgatagtacgacattaataaatcacaattggagtttgaatactgaagtaccacttctaatatttcaattaagcaccaccaacaataaagaaataatgcttggagaaattaatggttctgcattaactcctttgaaagaacatttaattaaattttatcctgaagaacatgaagtttatattatacattctgcaacacaaattttagaaatatcagacataaggaaaattaagattcaagatattactagtaaagaaattttactaaacaatagacctactctctatatcccaccattagataaagggttataa

SEQ ID NO: 60487 - DNA, 648 bp, Acinetobacter baumannii
ttgtactttaattctctagcagaagttaaagagaagatagaaagtctaaataaacaacttagttatctgaatatagcctatcatgatataaacaatttaattataactatacgaaaaaaaatcaggttatatagacaaaaattaataacagaaattgaaatacctttttatatttattctggaaaaatattacaaactcatcaagcaggtttagggtatggtgtatttattaaggatccagcaattaaagatccgactagtgaggatgaactcaaaaatatacgtctagtttcaaactggcaaagtgatcatgatatattgaatacaatgagttccggacaaatatcagctgtagtaatttctttaactttagccttacatcgagtttactctacaaaattttctacaattctcatcgatgatccagtacaaacaatggatgatgtaaacatgtcctcactagttgaagttttacgtaatgatttctctaagaagcaaattattctatctactcatgaaaataaagtagcaagatacttttcttataaatttttaaaatataataaaagcgtgaaatcagtaaacctaatggaaagagctgaatacattttaaataataattatgtatatgaagctaaaaaattataa

SEQ ID NO: 60488 - DNA, 480 bp, Acinetobacter baumannii
atggctaaagactggatgtttaaaggtttgtctggtgatgttacccctgaggaagaaataaatacttgtataaatcaaggcaaatttatggtcgatattgcagaaaaaataaaaaataatgagttgttaactgagcgggaaagggattgggctgtaggtattgtggcggctagaggtaaagatcaaataataaatccaaccaaatatatctctaaggaagaaaatggagctcccgcagattctaggagatatgaagcggttcttagatattattactatctaaaaattctaaaggttcaaagacgagccattgaattagtttgttatgcttacgaaggtattacaccagataacttaaaaagttggataaagcaagaacgaaaagctggacatccaattaaaaggcaagcagacgatatgattattaataatccagaaagcataattgttagttatgagaaaattaaagggaaaaagtaa

SEQ ID NO: 60489 - DNA, 141 bp, Acinetobacter baumannii
atgccaaataaaattaatcaagccagaaaagtaacttcagattcaataaagtcacaccataaaactttattagacgcactaaatttagttttgaatattattcgtcttttgcttgatctcatcaatattttatttttatag

SEQ ID NO: 60490 - DNA, 963 bp, Acinetobacter baumannii
atgaatactctactaacagcatctgaagcatttgcagctcttcaaaaaggtaaaactgttctatgtcgtccaattggagacatgttggacttttctgacttagatcaattccccgcttctgtttttggtaaaccgggttttgaattttgcatcaaaatcgaaactattgaactggctggcattacattcacaaagccattaactattgatgagtatgaagaaggtcaaaatgtttttgtaatcaacacatatttaccttccatttataacgttggatttaaaactcctgcactcattgaagctattaatagtggttttgttcagcgtgatgctgaaaatgccaagcttcaattaaaagcattttcaaaagcactcggtattgaaatcaacaatgatttaagtgttattcgtcttggtgaggaacctaaaaaacagagaggcaaaaaatcaaaagcagaaaagccaagtgacgttatttctgcagaaactcaaccaacgattgttattaccaaacaaacaaatgtcaccacatctgaggatctgttagttccagaaactaacgagcctaaagtagatcctgaatatcagaaggcattagatgctcttcttcagcgtgtaaaagaatcaaaaacacctgaagaggtaaatgctgtttatcgatatacccgtacgtggaatgacaaacaaatggaacctctcctccttgccactcacaagcgacttgaagagctcgaaaaatctaaggcacctgcaaatgaaccaccttcactaatggtccagatccaaaacgcgcccgacatcacaacattagatgctttggaaatagatgtggccgcacgagatccacagattcaatcacgactcatggattttattaagaaacgccgctttgaattagagaaccatacatctacgccacttcaagagggtgagcctgattatttattaggagactgtttctaa

SEQ ID NO: 60491 - DNA, 945 bp, Acinetobacter baumannii
atgcaagttactgaaactctagacgcaaatgaagtaatagtggaaacggaatttacagtttattattctactaaaaatattgtgcctattcctaaaattattgatgccttaaaatcaattgagagcatactaaataagactcctaaatttgtagaagcggcttaccctggtatcaaggtttatgactcacaagtatttatcaatcacttagaaagtggtagtttagatattaaggttgttcttcgtcaggtattgggtgatgcaaaatacgaacgtggtgaaaagttaatagatgatgccaagcagcttattaaagatgtggtttcggatagcaaaactatgaataatattgttatttttagtatgggcgccattgtagcaacaggttttaattatgcaattgctaccaaaaatacttcgcaacctacaccagcgcctgtaacaattgttaataacggtattatgaatggctctggaacaatgattttatctcctgaagaaacgcaaaaggttctggaaaagttgccccaaaaacaagttgcaaaggatgctgttaattttgctaagccaacaaaagatgatcctaactctagtattgagcttcaagatgatagccacataaaacaagtttcatttgattcaaaatatgttagtcaagtaccagagcactacgagccaccagaacaagagcaaaaagaagaactattaaaaaatcaagatgtatacatctatgctagcgacagggataaaaccaactcaggatgggcaggaatagtgccagatctctttgaatcccgtgttaactttgatttagcagactcaattaatcctgataaattacatggaaaaagaaaaattaaagctaatattattgtgcatagtaaatttaataaaacaaaacgtagttatattccttccaaagttacaattttagaaattgtatga

SEQ ID NO: 60492 - DNA, 294 bp, Acinetobacter baumannii
gtgggcaaaaaatatataccgccagaacttcatgaatataggaacctaacaagcactgaacaaatggcaattcatcagatgcttatttcttatgttcgtgaagaaaattgtcgctttaacatcatcatgactggtacagcagagccctacaatctggtaaagctaaccagtattaattttgagaaagaagcatctgcaatttgggttcattttgaaacaatcacaggagagcaaatagctctaccaattgactatatttcaagaattgaatattcgggacaacaagaaatttaa

SEQ ID NO: 60493 - DNA, 390 bp, Acinetobacter baumannii
atggaaccagtttccactagcggttttacagcacttttaaaattatatgggattgcaatcatggtgactttagcagtcggtttggttgcagcagttgtattgatgacacgtatgccacgatcacctcaagaatgggctgtaggacttatttgtacggttgtatcaagtttggctggaggctcattcattattgtgaagtggggacttcatgaatgggttactgatgtatgggggatgattgctctaggtggcttcttctttgtttgtggtttgcctggttgggctttagtccgctggatctttaacttcattaacaaacaggaaggtaagactattattgaagtacttaaagaagttaaaaaagccaaaaacgattttacaaacagttaa

SEQ ID NO: 60494 - DNA, 648 bp, Acinetobacter baumannii
atgaataagagagttgtgatatttagttgcagtgtcgctgcaatcatctttacttttctactatttagtataataggtattttgtttttctattggggtgatcatgctgccgtaaaagatagcttggccacagtagctggtatatttggtggtatcacaactattgctgcatcggtaattgcagcatacctttttaatgattggaaagagcaacataatttacaaatacttgctaaagaagcaaaggatgcctttcacttatttcatcttcaaagagatataattcataaccttaaatatcaaataagtggaataattagcggagaaaataaagtaaatatatctgaaaaaactatagcagtcgtatttcaagaaaaacttattaaagcttataacttggataaggataaaatgagtgcattttgttttctttcagaaggacaaaatctctatgacattacaatggagtattataaagcgatacatgaaattggtgataaattagtagaaaaggcaaaccagccgtttagcgatactcggttcttagataaacattcatcaatagaatttttagcatttatcgaatccttagaggcaaaaaatacaaatattttaaaagaattgaaatcctatatattttttcattaa

SEQ ID NO: 60495 - DNA, 225 bp, Acinetobacter baumannii
atgttatcgattcagttgaagaaaagtatgattctggatgggtgttgtggtttcaatagtgcctttatgattatgaaaatggcaaaaaagataaggaaaacaccagaagggaagctgcaagcggcccgaggtcaagcacgtatacaagacataaaagcaattcatactttaactaaaaaacaaaaaaactgggtggcttataaaggtgatgaaaaaacaatttaa

SEQ ID NO: 60496 - DNA, 330 bp, Acinetobacter baumannii
atgaataaggtttataaggttgtatggaatacctttttaggcgtatgggtggcggtttctgaaattgccaaagggaaaacaaaaaatagtggaagtgttgggcaaactctttctttagaacaaaaagaaccacagagttttggtaatcttttttttaattacaaagctttaactcttgctattttcgcagcatttactgctgattttgcccatgcaggttatgaagctggagggggtactactcggaccaactgtacgagaacttcaaatgggactggaggtgaaactgccgcaattgccattgcaaaggcactgttgcaaataggctga

SEQ ID NO: 60497 - DNA, 204 bp, Acinetobacter baumannii
atgacttcaggttctggctttttaagtgcgccgtctgtaatcatctttcttgagccgatttggtcaccttggctaaaaccagccaaatcagcagctccttcttcagaaggttggaaaacaaaaacaacagtgcccgcgagtctattcttgttttctgcaagtatttttgctgcacctaatagcatagccgtatgtgcgtcatga

SEQ ID NO: 60498 - DNA, 249 bp, Acinetobacter baumannii
atggcttcaaaagatgatttaaattatgctgcgtaccacattatcgaagttctggaagaacagggcttggataaaccatatattgacgaaaaaatagaacgtcttttgaaatttggcgaaaatagagcctccacattgctttgggccgcaaatgaactcgatagcggaaattttaagttactcttggataaacttgatttaaaagcagatcagatacgtatattttgcttggtgatgaacaagctgtaa

SEQ ID NO: 60499 - DNA, 522 bp, Acinetobacter baumannii
atgaaagttacagcacatcgcattgctaaattctcaactgacgcaattgttataggatttgaaaaaccgtgtgttatatctctatacaagtcgcatgtagcgcgtttaatgacagcaggtcttgcgattgcagaaattttagaaagtgtctatgcaagcgaacgagacagcacagaagcggtcgtttatcgctatgcatcacacagcgaagcagatgaattaaacaaaaacctgcatcctcgtgattacaactatcaagacggtcatacttacaatgatttctatgtgtattacagcacattggatttgtcttatctaacacgtgaccaacacaaggcgctatatcgtgctattgcagaaattaacgatggtacttgcgattacaactctgatgaagaagagaacatttacaactatgacaatacagaccgcctctcagttgacctagaagcttgtacagtgcagtacgtcaacggtaaagaagtggattatgactttaaagaggttttgacaagtaaatag

SEQ ID NO: 60500 - DNA, 471 bp, Acinetobacter baumannii
atgcaaaacctaattacagcgcattgcgagctaaccatcaaacatgatgaaaaacagcaaaaaaatgtcgggcctgttgttgtgacgtttggggcgatctttactgctgagtcggtgaatgaactgttttgcgctatatgccaagacggaatcagatttaaagcaatctataaccccgacaatatgtattttttacgccatgagctaagcccaattgctgatttgtcagttaagacagaccaagacggcaacattattgtcagtgtgattgcatccactagcccatattttgagatcaaagtactaaaaaatggttttaccaactcagacaccttaaatagttctgcgattcgcacgttggttcgcaaccatcaaagcccattccaagagcaaatttctgactactttgaaacagaccaaatttttaaaaccatgcaagcaatttttgcacacacgtatttaagccgataa

SEQ ID NO: 60501 - DNA, 408 bp, Acinetobacter baumannii
atgtcaaatttaaacgctcaatcagtacagttacaaggcactttatacatcggtttccctaaaacttttagcggtgctcacatggaaacattgtttgatgaaatctcagattacatcgacaacaactgtgatttaacccttgcggatcttcaagcggatagtgactatgctcaacttcaatttcaacagcacatgccgacattggctgataaaacaaatttcttcttcatggacgttgaaatctacgttgcaacattaaaagaaaactttggtcatacatcagtactcgaccaagttacctcagtaaatatctttggcaaaaaccttgaagacatttgcacgttaatggctcaaaacggctacgcatacgaccgtatagaagattgttggtcacgcgaactttcttaa

SEQ ID NO: 60502 - DNA, 306 bp, Acinetobacter baumannii
atgggttcaatgaacgctattcctcaaactttcgagttttggcaagatcggcgaatgccttatgtggaaacccgaaggtcatgttttggcagaacatgttataagtctcatagccatccaacattttcaattggtgctatagatgaggggaatagtgtttttcaaagttcttttggcacggcacaaaagatctcagcgggtacattagtcattgtgcccgcacatgttgagcattcatgtaatcctatgccaaatcaggcatggagttaccagatgcttcatttagatctagcatggttaaattaa

SEQ ID NO: 60503 - DNA, 795 bp, Acinetobacter baumannii
atgctactgacccttacctttagccattcacagtcagaatcgcttaaatcgctcttagaacgccaaagaaaggcatataaaatttttttggaaacaaccaaggtaaaggaaatattcaaacactttggtgtcaaatacaaaattcgcagtctggaagccacttatggccagaatggttggcatccgcattttcatgtacttctcttaggctattttcaaattgatgatttgacctatcgagatcttctcgccgaattatggattaagtcctgtattcgagctggtctcaatgctccaagtatgactcacggtttagatttacgggatggcacttatgcagatcagtatgtttctaagtggggtattgaatctgagttgaccaaagggcatgtaaagaaaggtcgtaacggaggttttaccccgttcgacctgctccagttatctttgtataacgaaacaatttttgaaaaagattgcggaaaattattccaagaatttgccattgccatgaaaggttcacgtcaattggtatggtctcgaggtcttaaagcacttttagaattagatgaaaaaacagatgaagaattagctgaagaaaccgaaaaagacgctattactttacgaaccattgatgactttatttttagtctgatttgtcattatcaaaagaggtgggatttccttagatgcctagaaagggactatgaaaacggctgttttggtactggagaaacagagcaattactcatagatattttggaaaaagaacacattagattaggtatagcgagttag

SEQ ID NO: 60504 - DNA, 234 bp, Acinetobacter baumannii
atgatagtgattactgtaggtaaaaatgctcttttaggtattaaagataaagataaatatttagaagattttagagcagcttttaaagctgaatatcattacccgattatgtataccaatgataattcctttgagggaataaaaattggtttccgttttaaagatagaggtattcctctaaatcaagtcgataaagttcttaatcgaattaaatcggcatttcacgtgcaataa

SEQ ID NO: 60505 - DNA, 207 bp, Acinetobacter baumannii
atgactgagtcacatactaaacttttagacttgttaggcaaggacatttctttttctgttgttcgatcagaggaaattatgcagtttttccctaatgggatttttgaatctggaactgttgaagctgttttaattcacgtatccggtaaccatgaaattttagtgggtgattttttctattccctcaatgaaattgagatgaaatag

SEQ ID NO: 60506 - DNA, 246 bp, Acinetobacter baumannii
atggaacaagaaattttaaaaaaacatatcgagtatttgcatagctgctattttctttggcttgaacgtccaactgatccattagatttgtcaccacctaaaagttatggtgaagatattgttattggtcatcatataaaaactgtcaaaagattacgcagatggtttaaaaaaaatgaactacctgaaccattatttgactcatgtactgtctatgaaacgattggaaaattgcgtcttcagtga

SEQ ID NO: 60507 - DNA, 351 bp, Acinetobacter baumannii
atgattagtttagttactttttttatgttactttatcaaaaaatagttacttggttaactttcatggctcaaaaaaagcgtatagctctaacagttcctgaagatatggatgctgttttagaaagattatctgaccttactggggctcctaaaactcgtctgattttggaaatgcttcaagaatatcttccgattcttgaacgtacagttggggcattggagcagattgttgctgataaagagaatgctgtagatattgcaaaaaaatttgctagtgaaatgttacttgatgggaatgaaaaattaggaattgttgcttctgaagttagaaatttaggcaatttaaaataa

SEQ ID NO: 60508 - DNA, 219 bp, Acinetobacter baumannii
atgaaaacatacactgtaaaactatatgaaggcgttagtcgggagaaagttaatgaaactttgaaatactaccctgattattttggtaaaatatcaataattacaaatgtaattaataataaattgcaattaacactaaaagcatttgaaggaatcgacgttataactgccaatgatctaatgattaaaatcgttgaacgtttaaaagcgagcctgtaa

SEQ ID NO: 60509 - DNA, 402 bp, Acinetobacter baumannii
atgtttgaacaaatattaaaacgccgccctaaaggtgcgacacattggcaggctggatattactacaacagtgatgaatgtgggatttggtctatttgggaaaacgggaagtggcatggagattttaaatttccagatggtgttatgactaagttgccagaggaaaaggagccagtcatgagtgagtttgagggtaaatctggaaagtgggcttgggagattcaaaaagaacaacaagcgaaagtagaggaactgcaaaagcgtttagatagggcattaaaagagactcaatatgctttgcagtatgttgaagaagacatgcgcggcaatcatgaatttctacaaatggcaatgattcgaacctttaaagctatagagcaagtgctcaaaggtggtgcttga

SEQ ID NO: 60510 - DNA, 288 bp, Acinetobacter baumannii
ttgtttagtaaacaattagatgaatgtaaagtaaaaatagatgtgagtttgattcctcctcataattcagaaggtgagtatattttatggttagctggatttatcgaaaaaattacagaaggtggacctaaaccacctccgcctataaagaaatttattccagagtatatgagcttcaaatctgaattagattttttaccttcaaatgaggaaaaaattcaaaccgaaggtaaagaaattacggattactttaattcaaagctttataaggcaacttttaagaagtaa

SEQ ID NO: 60511 - DNA, 429 bp, Acinetobacter baumannii
atggattctacagaatacttttggcttactcggaaaaaagaacctaaaaccaagcctaaatccagaccgctacctaaagctaaagaaaaatatctcaaggccgaagaaactttatttcaagagctagaagagcatcgaattggttatagaagaaaatttcaatttgaatcaaccaaaaattggcggttcgatttttatattgtgaagttgaatcttcttatagaaattgctggcagtccgtgggcagttggccgaggtggcacaaagatagcaaattcatttaataagtatgatctagcactagaccgaggttatgtatttgagcgtcttgagcctcaccaaattgaatcaggctatgcaattaattggattaaaagcgaattagcgagaattgaagatgaatcagatcagaccatttcctccaactga

SEQ ID NO: 60512 - DNA, 174 bp, Acinetobacter baumannii; identical to SEQ ID NO: 49248

SEQ ID NO: 60513 - DNA, 927 bp, Acinetobacter baumannii
atgtgtataagagacagaaatgatgctttatctagaatttctgcatatgaatatgaggataaaaatttattttgtgatattaatacaattaatgaaaagattaaaaaacagctatctttagccttaaaacaaagaggtatacctacaactgaaaaccaattagataaagcttttttgcactttttaggcatgatggataaatatattatttatcgccatgaacataaaaaaagcctaacaaaggctccaatagaatttactgagataattaatatccttaatatagatcatgagaatgtaagcaaagaatatatagcttataaatttaaagaacgttttttcttttatattgatcactatatggaagatcctgatgaagattatcagtcaccagaaccaggattccattgtaatttacaagagatccgcaaaatactattaagtcttacaccttacgagctttgggaacattaccgtcatttttccccacaaattaatctacagaataataatattgatgatgcatttgagactaattctgatggaattcgttacatgcttatacgcattttccatgaaattgatttcaatttagcaattcacaaaccccaaaaatataaattactttatcgcaacactactccaccctatcaatattatttaccaacaactattactaactcttttcgccgaattacacaaattgagagacaaattagtttaaatccaagcattattgaaattttgtatgaagttgagaatcttatttaccatgggaatatcatacatcctatttcagcaatagcatcaaggcatactgaagctccagtttctcaagatttagatcttagatctaagcgaaatgaacccttaaatattatccatcttattcctttaaccaatgccaaggataaattagttaaatga

SEQ ID NO: 60514 - DNA, 207 bp, Acinetobacter baumannii
atgattaaaattattaataatattctattaaacaatggatatgagttagtcgatatacaattacccgatgataaacataatatttttcttttttgtcctagaacagaacatgcaaaagaagaatatttcgttaccattcaactaaataacgaatcagatgctgtctcttatacacatctgacgctgccgacgatatgcagtgtgtag

SEQ ID NO: 60515 - DNA, 309 bp, Acinetobacter baumannii
atgaatatttggtggaatattgatattaaagatggagttgttagtcatgactccatttcttggattgatgataattttgaaataaatgaagatataatttttgacttgtctgaagatttattacaaatttcttttaataacaataaaatattggatgtcgggtggtatccagacctagaggtaggtggtttttttaaaattgtagtgataaaagatatgaattgggagtcacctataattgaaaaagagtgtagggatataagcagtttaaaggaaaatatattaattattatatctaataatatttag

SEQ ID NO: 60516 - DNA, 150 bp, Acinetobacter baumannii
atgatttatttcttttgtgttctcctctttgttgcacttgtttatggaaaggctgacggcataggagcttttgccttagcaattgttgacttggcattaattgcagccatcttatttttatggtgtgcagataaaaaggttttcctatga

SEQ ID NO: 60517 - DNA, 483 bp, Acinetobacter baumannii
atggaaccacgattcgtcatcaaaaaccattctgacatcaactatgtaattagctatctcaataataatcatgcaaaggcagcgagtgaagggaagcctttagtggttttaattgcaccacaagagaaagaccggacaaaagctcaaaaccgtttgtactggatgtggcttaatcaatgggctaaacgtcaaggtacagataaagattatgagcatctgttctttaagaagaacttcttatccaaaatctatgaccgtgatgatgttgggcaatacaagaaaacattcaaggctgttagagaattgaaggattgtaagcatccagcctatcaacaagtagctgatggactttgtgagttaatgagcactacagacgcaagtacagctcaattcacagaatacctaaacgacattcacgcattctgcaataaaaacgggtgttatttggaaacgcctgatgaccttaagtatgtgttggaatag

SEQ ID NO: 60518 - DNA, 279 bp, Acinetobacter baumannii
atgaaatatctattaagcacaaaacagcttgaagaaattgcaggcactgatgttttaaacttcctccgaatgcagcctacttatagagatttgattagcagtgatgcagaacagtgctcacttaaaatcccaaatattctcgacaagaaaaaagatattgatgagcttgctaataaccttaaattctttatgaataacttgggtaaagattttcaaatagaactgagtgttgaagatgcaaacactttgaatatgctgatctcagcaagaatagtataa

SEQ ID NO: 60519 - DNA, 207 bp, Acinetobacter baumannii
atggacacaatcgaagcgaagaagaacctagttgcaatatgtgcagaaatagaaaagcttcaaaacctttcacgtggcttgatgactgcgaaagaaatggttgaagtggatgcaaagattaagcggcacaaagaacaagtgaagaacattcgtaaaaatctatttggtactgaaaatgaaatatctattaagcacaaaacagcttga

SEQ ID NO: 60520 - DNA, 153 bp, Acinetobacter baumannii
atgagcatcgatatcaagcaagagaaatacttcaagttagaagttgaagtagaagaaagcacagtaattatttatcaaaaagattcagacattgttattagcaaagaagcagccaaagagttgcttgaaatattaaaaggctttgttgagtag

SEQ ID NO: 60521 - DNA, 480 bp, Acinetobacter baumannii
atgaatgcggcagtaaatcacattatgcaaacagtgaattggaaagaacgtacattggaaggatggttacgagcatttggtgcatggtgtgatgcttgcccaaataaccgcttaaccattattaaaacaacacctgataagaagcttactcaagatcaacgtgagtggctattgaatgtctacatgaatgatggtgaatatattgggcgtatgccaactccaaagaaatcagggcgtttgattaatgacaatgaggctcgtgcttttcagcgcttatggttggatatcaaagacaatgcaagtgaagtccttcaagagtggttggacctagtttggtcacattatgttagtggatattcattgagggaaattgcacttagacgcggaataagcaaagcttcagtagatcaagatattcgttgtggcattgcttacatgcgcgggcaggcttcattcattaaaagtgagagagcaggataa

SEQ ID NO: 60522 - DNA, 288 bp, Acinetobacter baumannii
gtgaaacatcctctagataatcaaacagtcgattggtgtgaaagctcagttaataaaactatgagtgcaatgttcgattcattggtgactttcacgattgttgtcacaaaagagacaggccgtaagtcaagccaagactatgagcgcattacaggtgtgtctaagcgctgcgcacaacgtcaactcaatgcattggttaagtctgggtacttgatatcagacggttctattccacgtggctacatagctactgacaaggcaaaacaaatattcgggagcgctacatga

SEQ ID NO: 60523 - DNA, 252 bp, Acinetobacter baumannii
atgtcacatttcaaacctggtcaattagctgttctcgcaaatgatgatcaaaaatcaaatattgggaaagttgtttctttagttagatggcatgaatcaaaacaagacacatcaggcaacacacaccatgacgtatgggatgttgattgcaatgatggcttagaaacctctacaggcaactactcatatacaaatgtttttgtttatgcaaaggacttgcagcctttagctaaggagccctctcatggataa

SEQ ID NO: 60524 - DNA, 207 bp, Acinetobacter baumannii
atggagtggattagtgttgatgaacgtatgcctgagttggatgttttggttttaattttcaatccattcactcatgaaactatgcatacagcaaagttagtagaaattgaaggtgaagaatggtggttctttgaaagtgatgatgactacctagatccacaatatacatcccactggatgccactaccagaaccaccaaagaattag

SEQ ID NO: 60525 - DNA, 1482 bp, Acinetobacter baumannii; identical to SEQ ID NO: 60482

SEQ ID NO: 60526 - DNA, 519 bp, Acinetobacter baumannii; identical to SEQ ID NO: 60450

SEQ ID NO: 60527 - DNA, 1092 bp, Acinetobacter baumannii
atgtcccaagcagtagatatcattttctatgatggcatagtgtctaaaccataccgtgctcagatttcagctcaatctgaaactgaagttctgattcgatatggtgagcaattagaacaacagcgtcattatcaatacactgatatgaaattgattggtgctctgggacagttacatccagtaattgaattagacgatgatgcacgaattgaatttcatggtgcattacctgaatggtttaattattcaactaaaaagattcaacattcgatttggaaatttgaacgttctccaagtcttattttttttagtttaatttttgtgattactttcggaatcagtttagtaaaatggggagttcccgccacttcccattatgttgcttttaaattaccagagaatagtttaaagaaactaggagatgaagccgagaattatgtactaaataattggactgcacccagccaattagctcaaactcaaaaagaccaaattactaaacaatatttgaatactgttgctgaaaacaaaccagccaaattagtgttccgtaaaggtaatcgattaggggcaaatgctgtaacactacccaataatacaattatcattacagatgaactgattcaaatagcccataataatcaagaaatattgggagtattagcccatgaacaaggacatttagtttatcgccatagtttacaacaaggattaactagtttaggactaagtgtattatacattgcaatgacaggtgataattcagatttatttacgtcattacctgctgctatgcttggtgcaaattactcacgtaaatttgagtccgaagccgatctatatgcattacagctgatggataggaaaaatatagaagtctcacactttgcaaatttcttacaacgtttaaacgataaaacagaagaagatctaaataaagcaagtcagtccacctcaccaacctctcaaaaagaatcttcagataataagctatctatagctgttgttgatgctttatcttctcatcctgcaactgaagaacgtattcgaatggttcatgattttgagaaaaaacaacacgctaaatattaa

SEQ ID NO: 60528 - DNA, 231 bp, Acinetobacter baumannii
atgtcttttcctcatatttttattgtagcgttagcaggcattgccttacttggtaccattagccataacattgcactagcgtttggtccagttgaagaccgcgaagcggcattatttacctttttatgtagtgcgtcaggtatccaatttttcggtgttggttcagctttctggggactggttgtcggtattgttgtatttatagtccttaaatttaaagctaaaaaataa

SEQ ID NO: 60529 - DNA, 360 bp, Acinetobacter baumannii; identical to SEQ ID NO: 60465

SEQ ID NO: 60530 - DNA, 333 bp, Acinetobacter baumannii
atgaagatacctctaatcataattgtggttttatgcactttatattttttaaatctttcattgaaatcaaatatgaaagacattcacaaaaacgagatcagcgataaagcgtattttcgtttgagtagtgaatataactacatcaaggaaagtcctgctggtgatgaaatgagagctaagatcatcaatggcttagtggatgggatgatagatggtaacgaatataaatctattattggagaagagcctgactatgatcttagtactgatgctgaaaaagcaacatacaaagaggcaaaacaaaaatttattgatgaatttaaaccttcataa

SEQ ID NO: 60531 - DNA, 447 bp, Acinetobacter baumannii
atgatagaaaactcacctatcccactaattgataaattagtaaaagaaaaaaattttgttcttctaacttgggatgctcgctattccagtggggcatgggcatgttgtttgccttatcttaatcaatgtgaagttgtttatgaggcttctgaagatggtgatactctgatgatccctaaaatggaatatttacttaatactaattggcttcccattatggatggctcaagcgctatggatgccttagaaaagttagagactcgtttagcaacattgccaactgattttcttgctgacaatgattggattaatgcaactgatgaagccataaattatttaagtagaatttcaaaaaagtatgaagatgatgatggtggaatggatggaaaactaaaacctctacctattgactacagagagattaagtttcctcaaggcttgtcctaa

SEQ ID NO: 60532 - DNA, 366 bp, Acinetobacter baumannii
atgtttaaaagtgaacatgtggtgaaagagcaagatttagataagctaattaaagaaaatccctatactcaaaaaatagtccagcatttgaaagattttgaaaacattgaaatagggattgtcttatttatgggtttaccagttgctgaccacgattccataaataagctacatcttaagttgcatggatatattgaatgtttattggaaaatgagatgtgtacgcaatcacagtgcgatctattgaaagcgtcattagatgaaattcattttaacaaggtaaagccacgttcatcttcaacacattcaaacgacgtgtatattacggatgaagatgtgcgccgttcaggtgaacttggtttttaa

SEQ ID NO: 60533 - DNA, 231 bp, Acinetobacter baumannii
atgaacaatgataatgataaccttgataaatacattagaaaggtatttcgtatatctttaattctacttttttcaatagccatacttataaatttggctatattctctcccttagtcagaagtgtaaatgcgtctattattgttatatctacatttgctggtggtcttttcagcggaatggttattctcagttattgtgtgcttgacgtaataagaactaaaaaaccttaa

SEQ ID NO: 60534 - DNA, 1494 bp, Acinetobacter baumannii
atgaactcagtcgcagaaatttttgagaaaataacccaaactgtcaccagcaccgctgcagacgtagcaaccacggttacggataaagtcaagtctaatgagcagtttcaaacgggcaagcagtttttgcatggtcaagtgacccgttttgtcccattgcacacgcaggttcgcggcattcagtggatgcaaaaagccaaattccgtgtgtttaacgtgcaagaatttcctgcatttatcgagcaaccgattccagaagttgcaacactggcacttgctgagattgatgttagcaacccatttttatacaagcaaaaaaaatggcagtcttactttaagcggctgcgtgatgaagcaccggtacattatcaagccaacagtccgtttggggcattttggtcggtcacgcgttacgatgatattgtctatgtcgataaaaatcatgagattttttcagctgaacctgtgatcgcgattggcaacacccctcctgggttagatgctgaaatgtttattgcaatggacccacccaagcacgatgtgcagcggcaggccgtacaggatgtagtcgcaccaaaaaatctcaaagagctagagggtttgattcggctacgcgtgcaagaggttttggatcagttgccaacggatcagccgtttgattgggtgcagaatgtttcgattgagctgacagcccgtatgttggcaacattatttgatttcccatacgaaaagcggcacaaattggttgaatggtcagacttgatggctggcactgcggaggccacaggtgggacagtgacaaatttggatgagatttttgatgcagcagtcgatgcagcaaagcattttgcggagttatggcatagaaaagccgcacaaaaatctgcaggcgctgaaatgggctatgatttgatcagcttgatgcagtcaaacgaagcgactaaagacctgatttatcggccgatggagtttatgggcaatttggtcttgctaattgtcggcggcaacgataccacacgcaactcgatgacgggtggggtatacgcacttaacctgtttccaaatgagttcgtcaaactcaaaaacaatccgagcttgatcccgaacatggtatccgaaattattcgctggcaaaccccgctggcctatatgcgtcggattgccaagcaagatgtagagcttaacggtcagaccatcaaaaaaggcgacaaggtggtgatgtggtacgtttctggcaaccgcgatgagcgagtgattgagcgacctgatgaattgatcattgatcgtaaaggtgcgcgtaatcatctgtcatttggttttggtgtgcatcgctgtatgggtaatcgcttggccgagatgcagttgcgaatcttatgggaagagctgcttcagcgttttgaaaatattgaggttttgggtgagccagaaattgtgcaatctaactttgtgcgcggctatgccaagatgatggtcaaactgactgccaaagcgtag

SEQ ID NO: 60535 - DNA, 321 bp, Acinetobacter baumannii
atgagccaaattacatttattgcccacgatggtgcacaaaccagcgttgcaatcgaagcgggtaagtcactaatgcagttggcggttgaaaacggtgttgccggaattgatggggattgcggtggcgaatgcgcctgtggtacctgccacgtgattgtcagtgctgagtggtcggatgttgcgggtacggcacaagcgaatgagcagcagatgttggaaatgaccccagagcgtgctgccacctcacgtttggcgtgttgtatccaagtgaccgatgcaatggatggcatgacggtacatctgcctgagtttcagatgtaa

SEQ ID NO: 60536 - DNA, 702 bp, Acinetobacter baumannii
gtggtaaaaagaaatagcaaaaaaattattatatctttatccatcttaggcgtagcgataattttaattaatactattatatcaatatatgagaatacaagatactcagaaaatattgttactgaaggccctttaccagctgaacaagctgatgagacagtaaatactttatatgcctctacttctgaatctgtcagtacaccagaattagttaatactaccaatgaagagcctaaagtaattccatatcgaccagatctaatgaataaagctgtcctaagtgttattaatattcaagaagagagtggcatcataggtgtgatcaaagaaattcatgactgctacgtagataaaaaagaagagaggctttattgtctatttttagatttaactgctagaatgcttgatttaggtgcttctcagacaatgggtattattcgtgatgattacttaatggatgaacgagtattaactaggataaataataattactatataccaaatggtattgactctagtacagcaactgaacacgtgcaaagaatgaatattgaactagcagaaatatttaaagaaaaatatcaagaaaagataaaaaatatgcattcttctgacaatcttaataaatctgttgaagaggagttatcagatataaataatgatgaagtgaaaacagatcaaccatctagtaatttaatctaa

SEQ ID NO: 60537 - DNA, 444 bp, Acinetobacter baumannii
atgagtaattttgtaccaaattcctttcaagtgcctaatgcatttgttgacgaagttttgaataaaatctctgatgctgcatgcaaaatttacttggttatttgccgtaaaactcgcggttggaataaggagatggattccatctctttatctcaatttgaagagattacagggaagagtagaccgactgttgttaagtgccttaatgaattaattaaggtaggcttagtcgtggaacaaccgagcacaattcacggaaatacattcaaattaggtaacgatacgagtgttggtttggttattaaatttcctagtaaaaattttttactacctgaaatttatggacaaactagtaaaaattctttaccactgctagttaaaaattttaactacactagtaaaaattttttaccgctactagtaaaaattttttaccgctactag

SEQ ID NO: 60538 - DNA, 279 bp, Acinetobacter baumannii
atgcgtatcagcatcaaaaaaccactttctgaaaatgcagtaaagctaatccttaaaaaacttatctcgtttggccctttggctaaccaatcacttgagaactcaattatcggaaattaccaaggtgtgtttgaaccacgacaaaaccagattcaggaaaactcacattctcacaacgttcctgaagaaccgggttatttcactcaaatgtacgctgaaagcaaccgttcaaacgtgattgacgttacaccagtgtcacatgattttggaggctattaa

SEQ ID NO: 60539 - DNA, 936 bp, Acinetobacter baumannii
atgttaataaatagcttttttggaaattccttaagtaagtctgtttttgaaaaatataatttacttgagaatgaaacagaacattcaaagcttacaagtcatattcctcgacacaacatcaatacttttctcgctctcagtggtttagctgaacaccttcaagcaatgttaatggggcgtgtagacattaagcaaaaccaatattatcaacacttagtattaaaacaacgtaaagtcacagctagtttgttagaaaaacatgaattggcactttacgaaaatgataaacaagaactaaagccagactatccaattgattctattaaacatgatggattaatgtacttttcagaaaaattggatttagaaaataatttaaagatgaatttacaaacctttgactcgaaaaatgaagtagcgagttatgtaaaggaatctttctttgatgaatattttcaggatatcgcagagtcatttaatgaattggcaaaaaaagataattcattagcagactccctagtccaacgccatgcttgtttacaccccttaccttttggtggatgtatgcgtgaagtcgctgtgcacgattgtcctaaacgtttagcctgccaatcaggtgatcaatgtggaaactttgctttaactggccgtaaaggtgaattagaagccctacaacatactttgaatgaattactagagaagttttcacatatagagcaaatcgtagcccatgatttatcttatagagaaatgcttgaggatttacgtcaaaaaatactttatttaagtgatttaaaaacaaaagcacttgatagacaaaatagtttaactcctattccagtttttccttatggagttgcgattgctacattaccaacaaccttaagtgaactgtttgccatagaacagcaaaaaatcgaatctaaggaagcctga

SEQ ID NO: 60540 - DNA, 438 bp, Acinetobacter baumannii
atgttacgtggtaaacaattagatgaagtcatcgaacaagaattgcaaatgatgttagttgaaggttttgaaaaatcccctatttcgcacaaatctctccatagccgtctaacatctaagggctatatatcaggtgggctaagtactttgagttctgctgaacggaagaagctaatatctctgtatgtatctgagcaaatttctccactgcatctaaaaactaaagagcagcaactttatgtgaataaaaagacaagacaggctcttacggataccaataaaaacctacgcacacaaattgatgagttagagtcacagcttcatcagaatacagaaacacttataaatatcattgaggaagtaaagcttagaagtaacttgaaagtggatcatttattagctcctcatcttctcaaaaaatatttatcacaggagtaa

SEQ ID NO: 60541 - DNA, 186 bp, Acinetobacter baumannii
atgaacatcatttttgaccctattgtgtctgaatttgatagttccgagcacgaagcagaatataatgcatggtttagagctaaaatagaaaaggcatctactgacccacggccagccataccacacgaccaagtcgttgcacgcctaaaaaatcgtcgtgatgaacgagaagcaaaagactattag

SEQ ID NO: 60542 - DNA, 777 bp, Acinetobacter baumannii
atgttaacttacacaagtttgttacaaaaagagtttaatcaagaggaacttactcttatgaaaagacttgatttgagcaatattcctattactatgcctgaaaatcttgctcaaattctgatttggacatctgaacttgcacagtatcatcatgcattattcattcaatcgagccaaaaattagagcttatttcggaaaatgacaaaaataaaaaacaagaactcaacgatttaattaaattatacagaaaaactgcatttgtagaaaatcagaccaaggatttctatttaaacaagctgttaaatcaaggggaagttgttgttcaaggctacatccaacatccttcaaaagtacagacaaaatatgcaatcattccctatcatggatatgattttataaccctcgccactcctaaaattgttgcaaaatttcctttacattttattgaaattaaaaaagaaagtatacctcaagcattgacagatatacatatggatgaagaggaacttttatctacagtgaaagattttgtgagatcattcagaaagctatataaagaatgcgcgagtaagaatgaattaatcaaagagcataataccactgtacataaaatttatgtcaaaattaagaatggagaagctaaactgattaagcaagatattccaattgctattcccaaagttgtgaaaacagcaactactcatccaattaatagcaataaaaagccatttaaagtgattaaaaagcgtaaattcaccttacttaaatataaataa

SEQ ID NO: 60543 - DNA, 1437 bp, Acinetobacter baumannii
atgactttaggacttactgctctagaattagcaagaattcaatttgcatttaccgtttcgtttcatatcatttttccagccatttcaattggtctagcaagttttttagctgttttagaatggcgttggctaagaaccaaaaatcctatttatcaagatttatttaaattttggatcaaaattttcgctgttgcctttggcatgggggtggtctctggggtagtcatgagctaccaattcggcacaaactggagtgaattttcgagaatagcaggaggcgtcacaggccccttattagcatatgaagttttaagcgcctttttcttagaagccggctttttgggtattatgctttttggttggggacgagttggtcctcgagctcatttctttgcaaccttaatggtagcgatcggaacatgtatttcgatgttctggattttagcatccaatagttggatgcataccccccaaggttttagtatcgaaaatggaataattgttccccaaaactggtttgaaattgtatttaacccatcatttccttatcgttttacacatatggctattgctgcatttttggttgctgcgttgttagtgtgtgcaacagcagcatggcatttacttaaaggtcgtagagatgctttagtcaaaacatcattttcaatggctctttggctgattatggttcttgcacctttgcaaattttagtgggcgataatcatggtttaaatactttacatcatcaacctgccaaattagctgcaattgaaggccattgggaaacaaataaaaatgaagctatgcctttatatttatttggtattcctgatatggaagaagaacgtactaaatatggagtatcaattccttatttaggtagtctgatcatgacacattcattaaatggtgaagtcaaaggcttaaaagaatttgctcctgaagatcggccgaattctttgatcatcttttggagtttccgtgtcatggttggtatgggaatgttaatgctgctattagccgtcttaggcttatggctgcgtcgttctgaccgtttatatgaaagtaaatggtttcaacgttttgcattatatatgggtccgtcaggttttatcgctcttctagctggttggtttacaacagaggtcggtcgtcaaccttgggttgtttacaatgtacttcgtactaaagatgcgttgtcacccgtatccgcatcgcaagttggaataactctaattatttttgttctggtttattttgtagttttcggtattggcatttattacatgttaaagctaatgcataaaggcccgcaattcttaagtgtacattcaggcgaacatgctgatgttggtcaaacaccgatgcgaccaatgagtgcggttgaaggaagcttagataaactagaatcaatacgggagaatcgccatgattga

SEQ ID NO: 60544 - DNA, 276 bp, Acinetobacter baumannii
atgccatatagcgatattgataaaaaacagtcacttatacggatcaagcgtgttaagaaacaagtagcaatacttgaaaagacacttaatgaaggtaacagtggtgatgagttattgaaacagttgacagccgttcgtggaacgataaatggtttgatggcaatggttcttaacagttatttaagagaggagtttccagaaaatgaagctctaactgagtctcaaaagaaatcaattgaagagacaattgctgttattaagtcataccttcgttaa

SEQ ID NO: 60545 - DNA, 1977 bp, Acinetobacter baumannii
atgccacacggtaaatttattttgcattcaaattatatccccgctggggatcaacccgaagctatcgcaagattgatctcaggtattgataatggtgcaactcatcaaaccttaaaagggattactggctctggtaagacatttaccatggcaaatgttattcaccgcttgaaacgacctactattattttagcgccgaacaaaacattgacggctcagctatacgatgaaatgaagcgtttctttccagaaaatgcggttgaatactttgtttcttactatgattattttcagccagaagtgtatatccctggtagtgatcgttttatccaaaaagattctgcaattaatgaccatctagagagactacgcttatccacgactaaatccctcatagagcgtcgggatgtaattgttgttgcctctgtatcatcaatttatggtttaggtgatccaagtagttataaaaccttgcaaattccactagctccaggtgcccaatttgaacaaaaagagcttatccatcggttagcattattacagtatgaacgaagtgaaaaaactttaaagcgtgcaatgtttagggttagaggagacatcattgatatttttcctgctgattcagaacatcatgcaattcgcgtcgaactctttgatggacaagttgagtctcttacgtggatagatcctgtcacgggaaaaaagttaaatgaaatagatcattacttggtttctcctaaaacgctttttgcgaccccaaaaaatcagatcgagactgcaataccaaaaatactttctgacatggaggagcgagtagagtatttgaataaagaaaaccgttttacagaagcgaatcgtttgtatgaaagaattacaaatgacatagaaatgatgcagcaattaggctattgctcgggaatggaaaattattcttgttattttagtggacgtgatgcgaagttaccgccaactaccttactcgactatttagctgaagatggattgttatttatagatgaatcgcacgtcatgattcctcagatttcagcaatgtatcgtggagatcagagtcgtaaagtaacgttaattgaatatggattccgtttgccatcctccaaaaataatcgtccattaaattttcaggaattcgaaaggattaagccacaaactatatttgtttctgcgacaccaggagattatgaattacgtgtatctcagcctagaatcattgaacaaatgattaggccaacgggattgcttgaccctaaagtcgaggtaagaaaatctgaagggtacattgatgatctgctcattgaaatagaaaagtgcgttaacaatcacaatagagttctagtgacaactctaacgaaggtaggagctgaaaagcttcatgattttatatcagataaaggttttcaagttcgatatatgcattcggatataaaaactgaagaccggattaaaattattgaaggtttacgcgttggagaatttgacatattaattggtgtaagtcttttacgggaaggtttggatattccagaagcatctttaatcgctatacttgatgctgatagagctggttttctacgttcgagccaggcactgcttcagatgataggtcgagttgctcgtaacgagaatggtaaagctatcctatatgcagataatgtaactgctgcaatgaggaaggctattgatgaaacagctcatcgaagagaacgacaaattttatttaatcaagaaaatggaatttcaccagtttcatcaaaacgtaaattagcttctgataaaaatgaagaagcggtacttccaatacattcagcagctttctgtgagaatctatcaatactttgtcaacaaattacaagcaaagaacaggaactacttacgtttgaagataatggaaatgaaggagaagttgaaaaaattcgtcatcaattagataatttatatcggcaatttatttatatttga

SEQ ID NO: 60546 - DNA, 462 bp, Acinetobacter baumannii; identical to SEQ ID NO: 49741

SEQ ID NO: 60547 - DNA, 876 bp, Acinetobacter baumannii
atgacgaccgctactgctaccgctgaaaagaccgtgttcaaacgtgaaacgttggagctgaagaacatccatgtttacacccaaaacgaccgcattaaccaaaagagtcgcgttggcgaccgtgcatacgacaatggattagtgaaagacatcctgttcagccctatgctttgggctacccctgaattttcatctagctatgttactcagattcaaattaaaggcacacgcatttatgattcactttgcagttatactggcgttcgcacctatttttataagttgtcagacagtgagtttgggtgcatgtatcaaaaacgtccgtacccacaaaacgactttctcttaatttttgcaaacttaacgcaaatgtttaacgatgcagtttgttactttggaaacaacagtaataaaaacgcttttaaaagtctagattttgacatcgaatgcggtgtttcacggttcaatttacagcaacgcttattagagttttataagaagtctaaacgccaattgaccatcagtgaaacaacaagcgggatgcttggtgactcgaatcttcgctataacatctttgttcgcaaccaaccaaaattggacaaacacggcaagccgttaaaatgcaccaaaaaactcattaagctgtacaaagagcgtggcacagttgcgatctatggcggtgactgcatttcaccactcaagctcgttaaacaccaacaaatcaagctagagagcgaaaatggcaagttttcatatacgactgacttcatcacgttgtactcagtagaacaagacatgtacaccttatatattccccactctattgtaaacaagacatttttatcttttatattcaatggcttattttcctgctaa

SEQ ID NO: 60548 - DNA, 3195 bp, Acinetobacter baumannii
atgaatcaaaacaacctggctctaactcatacagaagttttaagcgtgttaaagcctatttatctctttgaaacaaaaactaaaattggaacgctatcccaactagctatcggtcctggtgaatggggcttcgatgttacgtacagcaaagaacgctttttaaatctttcccatccaacaggtataagttttcaagctgatttaaaagctggaatcggtaaaagtaagaactcttacgaaatcatcaaaggaactatttcaagaactactaatgctaggagctctttttttgatggggtaaccttaaatggacaaggtgagaatggctggaaattacgtttagcgcaattgggagcaacctattctctactctcacattggtcattatctaatgacgttgcaacagttgttttaccaacaggaacaggtaaaactgaaacaatgctcattacaactttgtccgataaagccaacagaacattagtcatagttccaacaattgatcttaaacgtcaaatatcagataaatttgcttcttggggaatattgagagaattgggtgtaataccccaagatgctccaaaccccaaggttttagttttgaataaaatattaactagcgaagaacaattagagattttaaaagaagctgagatagttgtttccactcctgcattttttgcaagagctaaaagtggtgtagcaaatgctgcaaaggatttattcacccacgtatatttcgatgaagctcatcatatgggcgcggcagagtggcaagaactcaaaaaattattttcaaacagcaaaattgtccaattcacagctaccccttatcgaaatgatcggcaaccaattgaaggaaaagtagtatataactattcattatcacaagctttgagggattcttgcttttcccctatctctcttgtatcagttgacgagaaacaccctaagaagaaagataaagctattgcagatgcagctatggaaagattaaaaagcgatagagctaatggctttgatgcacatagaattatggtacgagccgagaatcgaacaaaagcagaagaattatttgaagattaccaacagtggtatccagatgaaagaattgtgctagtacactctggtatcactggcagaaaaaagatcatagaagacattagagatcataaatatgacatcgtagtatgcgtcgacatgcttaaagaggggttcgactatcctaactttaaaattgctgcagttcatagtgtgcacaaatctttgtctgtactacttcaatttattggtcggtttacacgcactcaagaaaaattaggacctgcatcatttgttgttaattacgcagaagaaaaaatgtcccaagagcttgagaatctttttcaggaaggttcaggctgggaaactgttattagcgaaatagctgatgcaaaaaaaactgaagctgagtcactactaacctttcttcaaggctgtcagcctttttcaggctttgactcaccagatatagaattaaatcccaaactagtctatccagccttaagttgtgtttgctacaagtgtgagacggtaaattggattaattttaaaaatgcttttaatttaaaacaatacgcactctctcaaccatattttaatcaacaagaaaatgttttttattttacaactcagaaacgtgacaaagtaaagtgggcgaaaacggacaaaattcgtgatcagaaatgggacttaatcattctccatttcgataaaactaataaaaacctctatattgggtattcagaaaaactgctggatgtcaaagagttagttgaagcacttactggaaacacagcaactccactcaacggtgattgtgtatttcggtcatttgattctattaaacgactgagtatagttcatgctggaatatttaagccagctaatcatcttcatcgttattcacggctaagcggtgctgatgttacaacagaattgacaaagtggaagaatggaagcagatgccaaaaatctgactttgtcggtataggctttaggaacggctttccagtgagtgttggtgcttctgtaaaaggaaaaatatggagtccagctcgtgttagcgatattaaagaatggaaatcatggtgtttatctataggaaacttgataacagatgattctataaactcaaatctattacttgaaaattcagcttcaaaaactcagcttgaaacttatcctatcaatatgattgtcttggcaactgactggtctgaagaactttatgaccgaatgcataaaattacgatagaactggctgacatgaaaccatatttgctttcagagtgtgatttacattttgatcaatacgttgataataaggcagatttcacacttaaaattcttgagactgaattaaacttctcgattatcttaggtggtgaaaagggacactccatagttggtttagataactgtaccctcaaacttgatggtttaaaaaacactaaaatttcaattaaacagttcttcgaagaaaatcctcccaccctatttcttagcgatggatgcacaattgctggttgtattcatacaaactatggtgaccttcctctatcacaaataccagtagatcgtattgaaacatttgattgggctggtgtggactttactattgagtcgatgtacaaaagctcagctaaacgtgagcattccattcaagaatacatgatgcaatatcttgtaaacaaaggagctaccattgtttttaatgatgataattctggagagtcagcagatatcatagctatctttgctaaagataatttgattcactttgaacttattcattgtaaatactcaaaacaagactctggcgctaggctttctgatttatatgaagtgtgcgggcaggccattgtttcactccgctacaaatggaggccagaagaactgctgaaacatcttgaaagacgaaatggtacgggtgtattacaaggtaagcgcttctatcatggtaattcaggtgatattgataccattaaaaaagcattgaaatatacagatgtgagttttgagtttgcaatcgcacagccaggtgtaaaagcatcatccataacactggatatgcataacttccttggttcagtttactctacggtcgtagagatgactgaaacaaagctccattgttatttcaatcagaattaa

SEQ ID NO: 60549 - DNA, 228 bp, Acinetobacter baumannii
atggatttaaagaagttaccattatcccaagaaaatctcgatattttattaaaaaacaaagattatttagaatttaaagacaataagtctatacgcgaacttttaaataaggctaaaagtgataattttatttcaatttacgaaggtcttgaaattaaagatgcgttatatactgagcgcttaaaatttgaggacaataattacaaaaaaaatatcaaatctttataa

SEQ ID NO: 60550 - DNA, 777 bp, Acinetobacter baumannii
atgaatgatgagatgattaaaggattgtatttaattatctcaccaagcaattctaataaatacaataccttaaacccatttaagtcaaaaaacgtacaactcagaaactttctgatcatacatctcatgcttaattatggtcttagaattggtgagcttatgctactaacaaccaattctattaaaaaatcaattcagaatcataactttagtctaattattacaaatacagatgatgagttcgatgatcgatcaaaaaaaccaagaatcaagaatgaatactcgtatcgggtaattaaactacaggagcgagactatagaattcttcaaatttatataaatgaaatacgaaaagaaattcctgcacaaatcttatttacttccttaaagcctccctactctgctttaagttatgccagtgttaaaaagatatttgatcaagtagatttgtcattaaaagcgttgctacctgaatgttttgatacttcagcttatgactcaatagaacgtctaactccacacgtatgtagacattcttgggcttatatgatgttaagcttttcttttgagaagtataagaaagaaaatgttaattactctgatctcaaacaaagtgtaaatgatgctctgctaaaagcacaggatgatctaagagccttaggtggttggtcacctacaagtacaatgcctatatattatggtaaacgctttattgtagaacgtgctaattttatgaacttggctcgcattatagattccagtataaattatgattga

SEQ ID NO: 60551 - DNA, 1596 bp, Acinetobacter baumannii
atgattgataaaaatatgccccaacatagtctagattttgaaaaaaatgataatagtcttagtgaatttattattttccatgatgctgaccttaggctcatagagtctttacacttaccaacaatcattcgatttcatagagctgataaatttgatagcaagttcgttcaaacatctaacgatgtttggaatttttcttattcggggagaaaacttcacttaaacttttctaacttcagtacgtcagagaaaaaattggctaaattttttctagctaattacattcaaattaatacgccatctggacttgaagcaaaattacaggcttacactttcgtaatcaggtcgctaaaaactagaagcctaaagcttgattatcataattcgaaatctttattggttgatttagcaaaagccgacaattctacatactattaccattttaagttcttagtgaaactactatttctcgagaactttttatgctttgatcttgatcaagaatatgagttagaatttcttgaacgtcctaaagcatttaattcaagattatattaccagcaatacgtagatgcgattgattaccctcttatttcaatgattcaacaaggctttatcaagttaaaccaagctatcaaagatgattttcagggtatcgataaacaaacactactttactcatcaatacttggtttggtgtatgtaactggtcttagacctgtacaattagcaaagctatctgctgaagacataaaaatagataccacacgtactactgatcattttcatcgctatagcatactaattccctatgcaaaacaagcacgttatgtacatgaaaagatcgcagtgaaattaccagaagaagttgctgaaatcattattgcttatatcgaaagatttaacttaagtccaaaagataagttatttgatttaggagaaaattctgcacgtttttgctcaaaagccattaatacacaattatttgattttgcacctaaaacctacaaagaagctgttcttgcagatgaaatgataaagcaaaagtactcattttctgattttaggcatcatgttggctatagtttggcaatggcaggttcttcagctgaggaaattgcatatattttaggtcattcttctgttgtaacagccagacattatattttttctaccccagaactagctcaaattagagcgcaagcacttggtaaaaattctctgtatagacaaatgatcgccatgctcctgactggaaggctagtttataagcaagattggcatcagaaaaaagtgttgggcaatattggttacaaaatttattacgatattggtggctgttcttatgaggacaaatgtttatttcaacctgttcgtaactgttatggttgtatgtactttcatccttttattgatgctaaccataatcaggttttagaaagtatacaaagtgaaatcaatgatcttattaagctatcagatggaattggagtatctaaaaatccattgattcgtgtgcatgagtcaactaaattcgaaattgaatctgtaatagctcgttgtgcattacagaaggatgatattcatgaacattga

SEQ ID NO: 60552 - DNA, 1731 bp, Acinetobacter baumannii
gtgcttcaaattggttcaggtaaactctttacgagagatgtcgaatatcacaataagttaaaaggtgtcatctactcaaatttacaccttatggctgaagatcgtattgaaactgatactggatcaattgagggaacgtcaacctttcataattcgaacgttctaattttcacatacacggagcttatcgaagcccttcctgatagcgatggaccaggttttatggcttcccatggtattgcatcttttataagtgatttctcagctatactctccttcgctttaaattgcatagcttcaccaagttattcactgattgaaagattactcagtgatgaaatgggcacaagcactcatactgttcctaataaagtagtaaatcaaaccttcgataaagtcatctactgtcaggaaagccacaaacaacacttaatcaattttacccagcaattgcatggtttgaaccgcaaaacattcttaacagtaatgaatgctatccgaacttatgtgactgggatacatcgtatagcagataactttgaactggcgtatacccttctagttgcctcaatcgaatctcttgctcaagaatttgatgggcatcaagcaacgtggaatgactatgaggaaagaaaaagaagaattatagatgaggctttaactggtgctgaagaagaacttgctgaacgtgtacgtaatgcaattttaggaattgaacatgtatcgttaggcaaacgttttcaagcttttgccatcaaccacatcaaaccttcattctttagagaagaatctgacgctgtaactcatccgataactcgttttgatttgcctacagcattgtccaatgcatatcttgctagatccaaatacatacatacgtcacaaaaactaccaaaacccttagatcgagattctggctattccgacacttgtagaatcgataataaaacatggttaacgattcaaggcttagcacggcttgcaagacatatcattactgaattcattatgcgtcagcaaactattacaagtgaaccttataattataaccttgaacgtagtaatataatgaccgtctctctagcacctcaatattggatacaaatagtcgattttagtagaggttctggggtcaagcgatttgaaggttttctaagtcagctggcaatcctatgggaaaatgacccaaataaacctttatcagatttatctcaattgttgacagaattgcaaaccaactttgacagaatcaacattgcagataagcttgctttcatctgtctattcatcatttataatcgtcttgtaggtgaaagagaccgcattgaaaattgcctagaatttattggaagatatgaaaatcttttaatccagccaagctctgctgtattggttactcgaaatatactagagatggaaattgaatggagtattgaagatcatcacacctgtttaatgaagtacttcaaagaacgtgaccataaatttagtttccgttgccctcaacttcttgaatctggaatgttgctccaattagcggaaaggtatcgtgctaataacgatcttgataaagctaaggaattagttagtttggctgtggaaagctatcctgaacatcaagcactaagaaagttcgaaagcgaatttatttccatacatcaacctattaattgctattctatcttgttgccaccattgaatgaaactcctactgagccaacttctgaatag

SEQ ID NO: 60553 - DNA, 291 bp, Acinetobacter baumannii
atggaagttgcaactatacacagcattaaaggtgaaacccacgctgcaactttggtagttgaaacaacatttggaagatcacatgatatttcaaatgtattcacttaccttgtacatcaacaacctcaagaaccaaaaccacaaacaattaagtttatgaaacaaatctatgtcgctatgactcgccctaggcattttgtttgcttagccgtgcataaaaacaacattaaccagcatctttctttggctgaacaaaaaggttggaaaataattgatcttactgtgacttaa

SEQ ID NO: 60554 - DNA, 174 bp, Acinetobacter baumannii; identical to SEQ ID NO: 49248

SEQ ID NO: 60555 - DNA, 225 bp, Acinetobacter baumannii
atgagcttaactagaaaggttttaaaattgaaatttgatattaaaaaagcctttactttaaagccttttgacgaaagtgaagatgagagtagagatgaatttactggaattaaaataagaacgttcttaatttattttgctttctgttgcagtattgcagggttttctgctgtgctgctttttcctatgagtgatactccaattattttattttcatattgttga

SEQ ID NO: 60556 - DNA, 264 bp, Acinetobacter baumannii
atggcaaatctaactagctacagtaaagaacaattgtatcaagattaccaaaacgcatctcgaagtttggcatattctatgtggactttaggagccgtaacagttatatatcatttattaaaatacaaagagttagtagaaacagtgggtatcacgcctgagaaaattggatatgctatttatttggtaatatgcgtaggttttatcttatataaatatttaaaagtccaaaaatacagtaagctgatagatgagcttaactag

SEQ ID NO: 60557 - DNA, 492 bp, Acinetobacter baumannii; identical to SEQ ID NO: 56760

SEQ ID NO: 60558 - DNA, 738 bp, Acinetobacter baumannii
gtgaaagaaattaagctgaaagagatacgtgatcaatgtatagctttacaaaaagcgatggatgcttcaagaaaatcgaaggtagatgatgtctggttgcattcaagttttaaaacttttatgcgtaaatataatgagatattagcgaaagctcaggaagtaattaatattagagctcccgtagacgtgtataatttagaaaaagttccttcagcttttgataccgtcacgattgaacaaagaatttattttgatgaagtctatactaatcttttaattttaaaagcatttgttgaaactacgggtggtttggatgaagttgaagcagataatattcttaattttttaaaagcaaatcttcgaaaagctatttacgatactccacaaaatgaaaaaactatccaaaatggtatcgaaagcttattaattggtaagggaaagcaaaaagggattgattatgatcgagagactgggcgagttaaagtggcgggaaaagaatctataccagattttgttttcaaaaaccaaagtatggttttagaggttaaaatctgtaatcgatcaggaaaattagcagaaataattgatgagatgaatgccgatatagttgcttatagcagtggatatgaatttatttattttctaatttatgaccttggttatataagggatgaagatgaaattataaaaggattagaaatatcagataatattaaatgttttattgtgaaacattaa

SEQ ID NO: 60559 - DNA, 255 bp, Acinetobacter baumannii
gtgcctgatttggcacctacagatgaaattttaaagccttataaaaagggcgatatgccttgggatagttataaagatctttttttaaaccttatggctcggcgaaatatagaaaaacatataagtctgcaacaatttgaaaatgagtgtttactgtgtagtgaggatttaccacatcaatgtcatcgtcgtttggttatagaatatttacagaaatatgctgagcaaaatcatgtgattaaagatattttctag

SEQ ID NO: 60560 - DNA, 138 bp, Acinetobacter baumannii; identical to SEQ ID NO: 56920

SEQ ID NO: 60561 - DNA, 297 bp, Acinetobacter baumannii
atgaatgaacaaatcttagcacaaaattcagactgtgcaagcccatatgatgaggaggatcaagtccttactcaatggcaaattgatcatgatgcttatgttgaaacgattgatgcttatagaaaagcacataaggatcttgaaaaagctttaggaattgagaaggactttgacaaaacttctcatagcgcaaaggaaatcattgaagacttgcgaaagaacgggcacttgtacgcactaattaaccgctttgaagatgccgtaatcaaccgtctaagagcaaaggataagttgtaa

SEQ ID NO: 60562 - DNA, 207 bp, Acinetobacter baumannii
atgaccttaagtggtgttatcaaaatgagcaatgattcaaatttgcaagatgtggtgcttaagctgatagagcaaaacaataagctgattgaacagaatagcttgatcgtccaaatcaatgctgagcagtccgcacaacttaatgagttgttagcaatctttgaagaaggcgagccagtacagaaagctaaatctttggatgggtga

SEQ ID NO: 60563 - DNA, 294 bp, Acinetobacter baumannii
atgattccgaagagcattattaataatcgtttgagttttcatgaattgggccgtgagtctgataagcccttcatagcaattgagctggaaggtccagcagttctacggaagcagatggaactcaatttagttaagttgatccaagagtatcaacgtaaaggcttagacatgaaatacatcaacattgatttacttaatggtgttgatgcgcgagtaaccttaaatgaaactccaaacattcaagaacaagttgcagacgctacaggcacccgcacaaagccagaagaactctaa

SEQ ID NO: 60564 - DNA, 1092 bp, Acinetobacter baumannii
atgtttaacacttttaacggcttagagctaaaattgcttcggttattcaatgggttatctcttgaagacgttgcgattaaagttgaaaaatctaaacaatatatacataagcttgaaactggtcttagttatccaactgatgatctattaaaaagcttatgtaacttatttaatgtcaaagaagaattcttctatcaagttcactcacctttgcaagaagatcagattcatttccgaagtctaaaaacctcaagacaatttgcaaaacaaattgtgatagctcgagctgaacaattaaaccgtctaattaggtttattgaaacaaatgttaacttgcctgagtatgcaattagtgcagaggaaattgaccacaccctactaacaggagatcaaattgaaaagattgctgataattttagacagaacttcaacttaggtttagctccaattcccaacttaactgaattctgtgaagatataggaataattattacggattttgattcggtctctgctgaagttgatgcgctatctttagtttgccaaagacccattattgtcagaaatactagtaaagagagtgtatgccgccaacgctttgatatagctcatgaagttggtcatatggttcttcataatggtgttactactggagatacgttgactgagtcccaagctcatagatttgccagttcacttctattaccacaatctatgcttagaacaaatttccatattctatttagaggtgggagatttgattggaaaaaaatgagcgagttcaaaaaaatttggggaattagtaaagctgcaattctatatagagccaaacagcttaatctaattaatgaaaatcaatataagacaggcattattcatctacgagtttctggtgaagctaaacaagaaattgaagatccagatatgactctagagactccctctttactacaagatgctatcaatatcatgttagatgatggcatttcaacagaagaaattgctgataaattaaaaatatcaacacaattattagaaaagttaactggtatgaaacttcccaaaataaaacataacttaagagttttataa

SEQ ID NO: 60565 - DNA, 468 bp, Acinetobacter baumannii
atgttttttaagcgaacacataattgttttattcgcgagttcaatgatgaacaatgcccttttgatataaaagttttaaatagaaccaataaattcattttccaaattggacaaactccttgcagattttttgaagaaaaagattatttccatccaacaaaaaaaggggcttttgtatccactatacagcctcaacttagtttatttaatgaagaaataggtatacccgtattttcaaatttttacttaatgtattctctcgatgaagatgaaattccacttgtaacagttgtttttgttagctatgacgctaataaaaatatagtttcattttgggaatataattcttctagtttcgtccctgcaatttattctgatgatttatacactcctgatggtaataacaataaacgatctagaaaattatcaagtaaacaccgcaaagagagtggatcaaatgagatctaa

SEQ ID NO: 60566 - DNA, 390 bp, Acinetobacter baumannii
atgaaaactactatttgtttattaggatctattttccttacttcagcagctttcgcacatgaatatcctgaccatatggggaagtgttttgtggtggatgggaagaatattactaaaggatgtattatttcatctggtggcggtgcgggagggatgtatacacttctaacaattggtgaggaagaatacttaattgaagagtcaacaatgaatcctgctagtgaagaacgatctattgctatgggtagtgattcagatgatttactagaagcgatagaatattctcgtgattttaaaactaaaaaagtaattaaaaatttcaaaatgaattcatggtcttgttttaagcaaattaagggcaagctagatgtttgctatagaacgcgttaa

SEQ ID NO: 60567 - DNA, 252 bp, Acinetobacter baumannii
ttgaatcaagaagttaaaacattaaaaactcaactgaatgcaatttacaaaaaggcatatgaagcaacctctgcaaaagaagagttagatagcgcccaaaaacaatggttagcttttaaagaaaaacaatgtggtgattttgttgttgcggagacacaaggtagcccagcaacagttgaatatgacttaacttgccaatcgatcttatataaacaacgcattgtattccttaaagaaatgtttaagttataa

SEQ ID NO: 60568 - DNA, 330 bp, Acinetobacter baumannii
  misc_feature (292)..(301): n is a, c, g, or t
atgttactaaaaggaaataatgctgaaaaaattgcgactaccttaatatttttcataattttgctagtaacttatatattagttaacttagcctttagatcaatcacgcacaccacactagaaaatatggtgaaagatggaatgagcttctcagctacagctatagctcccatcatagctattttgttatttagtgattggcgggtacaacatttagctatcaaaatggagaccgcagctgaaaaaattgtaaaaaatttactcgatattaattttgaaatagatattttcnnnnnnnnnnctcattccatctttcaccatattttctag

SEQ ID NO: 60569 - DNA, 363 bp, Acinetobacter baumannii
atgacttggattctcttaaataagcgcttgaccgcaatcattattttagtggtagtggttgttattcagacagctatcacaaatcgttatgcaggccagttaaagcaagctgaactgcaatgtcagtcacaaatacaagatattgagcgtaagcaagtaaaagcgcttgctgaagctcaaaacgaatttaatcaagtgagcgcagactatgaacaacttaagtcagaacagcgtacaaaagtcgagtatgttgagcgtgaagtgcaaaagatcattgagcatcctgtttatttcaatcgctgtattgattctgacgggttgcaccagatcaacagtcttattgaagccaaacgtaccagctaa

SEQ ID NO: 60570 - DNA, 513 bp, Acinetobacter baumannii
atgtcaaagaagactaaaattgcggtggtatttatagcagcttcggctgctttttttgtgcccttaaaaatgaaagaagggtatacatccaatccagtaattcccgtggctggcgatgttcctacacaaggtcacggcacaacggttaagcctaacggccaaaaagtcaaaatgactgacccgccaattaatcgggataccgctgataaatggctgcgttatcacgtaagtaaagatgaggcatttttaaagaaatctctgccaaatgtgaagcttactcagactgaatatgaggtctatttggactttatttatcagtacgggcaatcggcttggtcgggttcatctatgcgaaggctgcttttgcagaataaaccccgacaagcgtgtgatgcactgcttaagtggaaatatgttgcaaagcgagattgcagcattcgtaaaaataattgttatggcgtgtggactcggcagcttgagcgtcatcaaaagtgtgtaggtgaaaactcatga

SEQ ID NO: 60571 - DNA, 234 bp, Acinetobacter baumannii
atgcgaatttcatataaactttatggcggtccatcttcgggtggactaatagaattagttgaaaatacatatcgcactgacgatgggtatgtgcgcattagagattatctacatattggtaaagcaaagtacatgacagagtattttgtctacgagtctgatttaagcaattcaagattattggcggaaacagagtttaggaattattttaattctgttttcattaaggtttaa

SEQ ID NO: 60572 - DNA, 2235 bp, Acinetobacter baumannii
atggcgattatcactgaagaaaagatgaggaatcttgatcgcgatattattgatattggggaggctaataatgaagataagattattaatcctcgttatggatcgccttttaaatccctcccaatgctttctagactttttgaagcaatgatttcggctggttatatctcaattgatgcattacaagaagcaataaatattgctgctgctgctggggctggggcagaaggatggactgctttacttgtgcaagatggtgatgaaaatcagcatcaaatcaatctacgcttaaagacaatgtttgtcttccctgagcatttcaatgacgacattgttgctgcagcagaatttgcagcatttaataatgctacgcttgttacaaaaaataagacttacaaactatctcaagagtttgttttgcctgaaaatcttaactggttaagttgttttacaacaatcgagcaaatcggtgatgctttagcaagtaaaacagcatctggacttgcaccgagaccaaacgtcaaattaactggagatttaacgattgatatgggggttccaactacaaatccatggggtgaaaaatgccacgtccgtttagatagttttaataatattacccctcaagtccgtggattttattttgaaacattaaggtttaaaggcgggcataaaaacattacaggtttttgtatggccggcggtgcaagtttggtccgaggaaagcgaatagtatgtgatgacactgatgctatcgcgcgcgtatttatggctcattggggcaactttactcagcattactatgattctgcttcaggcaaatataagcatgttgaaaactacagtccaacgactcatccacatgactgtattattgatgaaatcgtgactggtgatttaacttgtgatacgaacgatgtaagtgcgattgtttgcatatctgctggttatgatatcgaaattaaaaaagtgaatgggaatcttcttgatagctctcaagttgacaaagggcttattgttattaccccgggtgatctaggttttgcatatgcttctagtgaagaaaaagcacataaaatgcgaagacttaaaattggaacagttgaggggaaaacatttgcatatggagtggacctaatcccatgggcgctatacggtgcaaatgacgatactacaaatgttccagtaccgcctacatatgacgactatcttgctcggattgaattagatattgattacatggacgttactggtgattacacaaggaatgtttcatctaatctagctattggcggaagaacaggaaaggggcgcttgagcattggtattgcaaaagccacaaaattctattcaggtttatctgctaaaaatcttggtcacgatatcactattgatgaattgattgttactgattcaaagttaaatcctcttgttattgaaggctctggtacaacagcatcagttttgccaaaaaatgtcctgattaaaaaattagttttacgacgttttggcataacttcaacaaacaatgcttatagaactggagtcacaaataaactatcgatcaactgtagagtagataagattgttgttgaggagcacggcaatgcatactgtattattgatactgcaaatggcacgttaggacgagattttagtattggtgaagttcacgtaaacgaccctctttatacgcaaacattcttagtcagcaactcaaacagtgtaaatgatcccatttcattagacagttatagcgtggcctctggatcggtttcatctgcgatacaaggtggggtcacaaagaaaaccaatggaatgtttagagagttttattcaactccagcagcagtggttggtcttaatgttaaagcgaatgattacatcaatcttgcaggtgtgggtgcaggtgcgactaatcgttttagagttgtgacagcgggtgtttacggaagtacggcagttcttgaaagaattgaatctcggcctacaagcttaatcctgaattcagtaacaatacctgcaaatacacaacttaaagttatagaaaatggtacgatttctggtttgctgacttcagataaattagaggctaccgctgacgtgcctctgcttgggtgtaaaattaatgctgaagttacggcagctgatacctttgatgtatggatatttaatccatcaggtgaaagtaaaaccatcaccccaagtggacatgtttacttaaaaattgtttaa

SEQ ID NO: 60573 - DNA, 369 bp, Acinetobacter baumannii
atgaacattatcgagttgttttactgcaaatatgatcccgaaaaatttcattgtgttcatttcgttattaaagcagcaaaacatatttatggcctagattattccccgtgttttgttggtttggcacggcctttaagtgaggcaattaagacatcaagagaaacggtccaccgaaataaggcgataaaaaagccgaaagaaggctgcatagtcctaatgacatatatgaatgaaagctcccatgtggggcttttttttgaccatacaattttccatttaagtgagagcggtgttcaacgaataactgttgagcaagccaaaatttggtttaaacggattcgatactatgagccgaatttacatcattaa

SEQ ID NO: 60574 - DNA, 2934 bp, Acinetobacter baumannii
atggcgactacttcaattgggcgtttaacggtagatttggttgctcaaattggtcagttcgttggtccaatgactcaagcagaacggaaagccaaagaatctacagccaaaatgggtaaagctttctctgatttcaaagatcaaatgaatgcttcattaggtggaactcagataggctcagcaattgaaggtattactggaaagcttggggcattacgtggtggtgttttaacagcaacagcatcattagctgggatggctgtcggtggtttagttgtagctggtggtgcattgagtcaaatgtcacttgatttagcaaaagcagatgcagagcttaaccagttgtcgagacgagctgtaacttctgctgaaaactttcaaattgttgctggtgctgctagtgcatttggagttgagcaagataagttaagtgatattttggccgacacttctgagaagttgggcgaatacacatccacaaaaggtggtggagcaaaagacttttttgagatgttggctaacaacacaaaaatgacttcaaaagaaattgatgattttgctaagaaattatcaacaatggataccactgatgcattaggtctaattaccaccaaattagatgatatgggtgcaacagcagcagaaaaacgttttgttctagagtctctagctagtgatttaggtgatttggctccacttttcgcaaacaactctgagttaattaaagaatatggtgatcaattacgtgaagctggagtagttcggacccaagaaagtattgataagtcgttattacttaacgcacagactcaagctttaggcacacagtttcaaggctttaaaaatcagttagctagtcaaatgactccagtgttgagcaatttaattcaatactttgtggatggcgctgttaaaagcggaagttttggaacagttttaagttccgttggtactgttgcgaaaatcgttggtgttgcaattgtgggggtagctagtgctgtttcagttgtaattcaatctatcagtggttttgctaatttaattaatcatattggtgtagtagctgctaggcttgatgctgcaactacaataagtgatcagattaatgtcttaaaaactggatttagcgaaggcaaagatatttggaatgatacagcggctgggatagataaaactatcagaagcgcgatggcttttgtgagtaatactcaaactagcacaatgccaactttaactggtctttcagcagcacagttaaaagttaaccaggctaacttggcaaattctaaaagtaccattactgatacagaaacagctaaggaaaatgccaaagctaaagaagagcaggcgaaggcagcagctaaagcagccaaggctcagcaagaccttaataaaatggttggtgcttctgcgctaaatggtttacgtattaagggggcagaatcaattgcaggcggacaagtcagagcttataccgcaaattttgctcaacttgttcaatctgctttgggcaaagacttaaatcgattcacagcttttaatgatacataccataaaggcacaaacagtaagcacgctacaggaaatgcttttgattttactcttggtgatgtcaagaaatctgatgaagcagttactcaacttgagcaaatggcaaagcgttatggttttgttatcaaggttcttgatgaatatcgtaacccctcaagtcgtgcaactgggggccatattcatgtgtcagttttgggttatagaggtacggccgatgcattaaaagatgcaaatgctgaacttgatatagttcaaaaggcaaatgatgaagctcttaaaattcaggaagagcgtgagaaaaaacagctagctattgctgttaagtatgcaacaccagagcagaaattagcattagataatgctgaggctattaagcaaattaagctggctcatgctggtgatcaagtcgctctcgataaatatttggatcttcaagaaaaggcatatcaaaaagatttagatgcttttagagcaacccaatatgaaaaaatcataagtgcaaccgaagatgcagcaagagctgctgcaaattggaatcaaacttatgctgatatttcgggaaattctggaatttttggccttcaacaaaatcgtgatagtcgatatgaggagtcctttgcagtttttgatagccaatcggcaatgcttgataagcaagctgaagatccaaacgctgatttacaagctttggctgaacagcgcgaagcaatttggcaagagcatagccagagaatgctattgattgatcaggtttataaccgggataaagcatcaatggggttgcaggcagctaatgaaacacttagcggtatgactgatttaatggggtcaatgctaggtgaacaatccgctgcatataaggcaatgtttgcgatgtctaaagcatttgctatagcacaagcattgatcaatgcaccacaaactttttccaatgtatatacctctgtttctgcgattcctttaattggaccttatattgctccagcaatggcagcagcagcagttggtttacaagttgctcaagcttcacaaattaaatctgtgggcttaactggtatggcccatgatggtattgcaaacgtacctaaagagggaacttggttactagatggtggagaacgtgttttaaaccctcagcaaaataaagacttcacaaactttattagtaagcaaaatcctcagcgagggggtggtgttaatgtaaatattaatgttcctcctggttatacggctagagagcgtcgggcatcaaatggagatgtgacaattgatattgttcgtcaagaagttgaacaagcttttacgcggcttggaactcaagcaaatagtcatgaatcacagatgatgcaacaaggttttatggtagaacggaatagggggtaa

SEQ ID NO: 60575 - DNA, 468 bp, Acinetobacter baumannii
atgaaaaatttattagttataggtttattgggatcagttttagctggttgtgctgttacttatacaccacctgaaccgattcaaactaatgttttgctaaagaaaccgattgatgcaaaaaaagatgctttaataaaagcagctcaaaaaacattagctttaaatggtgagcaaatccaaaatattgatactaatagtggaattataaccaccgttccgagaacactccgtttaaatccagatttggcagattgtggcaaaacaatgggtttagattatttaaaagataatcgcacaaattcaaaattttcatacaacattatcatcgaggataattctttgactattaaaggaaatcctactgctgaatatagagttggtgcatctgatcaggatatgaatttaacctgtgtatccaagggtgtgcttgagaatcagctctttgaaagtattaaaaataatctttga

SEQ ID NO: 60576 - DNA, 474 bp, Acinetobacter baumannii
atgaataaattaagtattgaagatattttatctggtgcgttggttggcaaaccggaattaattgaagttgatatagttgtaaatggcaagccctgcacctttgaaacacatatcaaaattatggactatgaaacagctaaagctcagatgaatgcaaatactgaaggccgtgaaggtttagcttcgattttggctgattgtattgttactgaagatggtcaaaaaatatttacagaagatcaagtgagacaaaaatttaataagcacttgattgatgcactttgggcaaaaatccttgaaaaaaacttcttgggaaagtcgactacgtcgaagaagagttccaagaacttgagttctgggcggaactcgtccagaacgggatcgggggcaaaacaatcgctgaagcaagaaaaagccttagctatagagagtacatcttctggcaacaatacagacagcgtcgaggcaccttaa

SEQ ID NO: 60577 - DNA, 369 bp, Acinetobacter baumannii
atgttgattatcccactatatgaaatttgtgaaaatgatgctgaattagcagggcttttgactgatgaggctggtttaaaagtcagtgaatttgatgccaataatacaaatggtgctccatatgtttgctggcagattattgatgctaatcctgagcaatatttatctgcaccttcagatatggattcaatttatgtacaaattgatatctatgcagacactaaaggttcggcacgacaaattgcaagactgttaaagaaaaacattgaagagtcttgctatatcgaagattacaccggagtcaatcgagaccccgaaacaaacttataccgcattcggattgatagccgatggtatgaagaaccttaa

SEQ ID NO: 60578 - DNA, 1521 bp, Acinetobacter baumannii
atgaaagcactttcaaaacaaacagtagctttggctatggcggcaatcaattcacaacaatctaaacctatgtcacctttcttgggtttaaatccgcgtgatacaaaaacggctcaggattttgaacaagcctgtgctgatttagcaactcgtaaaaagcagcttgatgacttgattacacgttatcaagatggcattaaaaagttagacaatttaccagacaatattaaagaagatttggaaatccgttccaatgacatcaaaaagctttcaggtgaaattgaagacctacaacaaaaattagtcgatggtgtaaataaccgtggggctaatcctgactctgttgcaagtattttgattcgcaataaaaatattgtcgatcaagcccaagcaattacccgcgcaaaaggtaaattccaatttgatgaccttaatgcacgaaatatcgtaactttggctggtttaggtgataacgcacaatttgctcaatcttctattcctactccagagcgtgcattaactttattagatttgattgcatttactccagttcaaaatgagctagtgccgctattccgtgaatctgctttcgatattatggccgaagaagtagcggaaggggctgaaaaaccagaatcaaatttagaatttggtgttgttgatttaaaaactggaaccattgcccattggattaaagtttcaattcagcttatttcagatatgccagcacttgctgcatatattgaaggccgtatggcatatggtgtgcgtctaaaacttgaagcaaaaattgtgcgtggcgatggccgtacctctggtgcacgttcatttattggtttaatcgaagatggcactcatttaaccgttacagttaaagatacagatactgcaattgatgttttaaaccgtagtaaatataaagcgggtgctgctggtattttacctgaatatattttattgaatcctgaatcatggggagcaattgaacgtattaaaggtacagatggtcattatgtttttggtgcaccaggagcagccgttcaaccagttttatggaacttgcctgtaattttaactgctgcaatgcctgttggtggttattggacgggtaacattacattaggtgtttcagcttatatccgtgaagatgttgcggttgagttatcaacagaggacggtgacaatttccgtaaaaacctttgtacagtacgtgctgaaatgcgtgcagcttctggcgtgtctattcctgatgcttgtgtggcaggggacttgccagccattgaagagattgatgcaccagttgtagttactaatacaacagcggagctagacggtactgctgagcctggcagcgtgattattttacgtgctggtaatgtggcagtagcttctactgtggccgattctactggagcatggagttttgcgccgaatccattagacccttctgaagcaggcaagcttattgcggtgcttggtgctgctgtttcagaagctgttgacgtggttggaccagcttaa

SEQ ID NO: 60579 - DNA, 738 bp, Acinetobacter baumannii
atgaaccaaaacctgatggtgcgtaacaaagcactgccaaacttgccgcaagttcaatgtcggcgaatgcctataactgttgataactgtcgttttatcaaaaaagatgaaaagactggagtcgtaagaatcagcggttatgcagttaagtgggattcagtcaattattacggtgaaaagtttatccgtggtgcattcgctgaagtttgtgctgcttttgctgctggcactaagaaagtccattgttattacaatcatggttggcgtatgtattacgttgattcacgaatgggcatgcgtgtcggcaaaataacagtactaaaagaagatgatcaaggtttgtatcttgaaatcgaattaacccctggtctatctattgctcaagatgttgctgcaatgattcttcatggcacgattgatggcttctcagtcgcattctacccgccaaattcattggatatggaagataaaggaacgcatgttgagattaaacgagctgatatttatgaaatcagtattgttgatgaaccagcagacagttcagcacgaattcttagtgatgaaacgattgattcaattcagtctgaagaggatgtagaagagcttcttcgttctgctggttttgttggtgattatgccacaaagttaatggcccgtatttctggactaaaaaaacctgaagttattgaacccagaacagctcctaaagcagatccattggcctggttagatagttaa

SEQ ID NO: 60580 - DNA, 1269 bp, Acinetobacter baumannii
atgagtaaaaagcgcgataaagttaagagtcgtgataaaaaaaatcgcgatgatctgaaagcccggggcacgggaccaattcaagatagaacggggacgaccattatagatcgtccccgttctggttttaaaactgctaaggcggtgacttttgatagtgcaatgaccctaagtgctgtttttgcttgtgtgaaaattcttacagagtcagtggcaacgttacccctacagatgtacaagctaaattcaaatggaacccgtgtacaagtcaaggatcatgatgtcatacggcttttgtataacaagcctaatcgttatcaaacccgggttgagttctttgagcagttaatgcttaaccttgttgctggtaatgcttacatcaaaaaagattattcaggcaagaagttagtgagcttacaggtcattaactctggttcagttgatccaagcattcgggatgatggcacacctctgtacaaatgtaagcttggttccaaaactgttgaatatacagataaagagatttggcatatcaaacttttcggtactggttttgtcggtatgtcgcctattgcatatggtgctcaatcgattggtattggtttggctgggagtgataaaacatcacgcttaatgtcaaatggtgcaaaaccgacaggagcaatattaactcctaagtggctcaaaaaagatcagcgtgacgaaattcgggacgaaatggatattttagtcaacggtgatgatggtgatatgccagtacttgaagggggaatgacgtttgagcaaatcagtttaacacctgaagaccttgaattaattgaaattcgtaaattagcagtcgaagaagcatgtcgctattttggggtcaatccgattctgatttttagtaccgattcaagtacgacttggggaagcggcattgagcaattggtcgatggtttccataaatttgggttacgtccttatttagaacgaatcgaagaaagtgcccgaattcatttattaccccgacatgaatgggacgattacgaatttgagtttaaaaccaaagatttattaagagcgtcttatttagaacgagtcaagtctaataaagaccggattctttcgggtcaagcaagcccttatcaagttcagatggaagaaggggaaacaccagaccctaactcaaactttattttagtgccagtcaatatgactactgccgaacgtatgaagaaaggcaactatggagcgaaagcatatgaaccaaaacctgatggtgcgtaa

SEQ ID NO: 60581 - DNA, 396 bp, Acinetobacter baumannii
atgggggggcggtcttttctgagagagccttttcgacttttgaccccctatccccttttcctgaaaatttgttgccgtctttccgagctgtcatcaatttcctgcggatttaaaatggttcaggtaattgagaaattccccatctgctactccccaacatctcaccttcaaggacttgcgtttgctgtctttccaagctgtcacctgttacgtttgcccatagcggcttttatggttcattcaacagaaaatcgatcgaccaatatcgtgctatgccgtctagccatatgcacacatcaagctagtagtcctccccgcaggggtgtgctgtcccatgacctatggtttcgcttgaatttcacaagctcatcagatgggttcgctagactttcctag

SEQ ID NO: 60582 - DNA, 216 bp, Acinetobacter baumannii
atgagcgaacgcgaagttattttagttggtgatcatgttgtttatcgagatgacatcaagggctttgatgatgttggtgttgtggttcaagcgaactcaagtttgtatgtgctttggaacaatggaaccacaccatgcattgaaatctatgaacgattacgaggcgctcgacttgatgaggtcgatgcaaatcaacgagtgattaaagataaataa

SEQ ID NO: 60583 - DNA, 591 bp, Acinetobacter baumannii
atgaccaaccgtccaccacaaagagctaagcgcccatgtcttgtgggcagttgtaaagatttcgcatcgaacaaaggttactgtgaccagcatcaagaccggatcaaaaagaaggatcgggagcggggcacagcacaccagcgcggctatgatgcccgttgggaaaaagacagaacaaaattcttagatgagaatccgctatgtgctgatcatcgcaagcgcggaatgattgaagcggcaacagttgttgaccacatcattccgcataaaggtgatcaagttttgttttgggataagaaaaattggcaaccgctttgcaagtcatgccatgaccgcaagacagcaaccgaagatcgtgggagctggtcgccagtacaatcaccgagcaaagctaatcgagatagcaagaatgaattcaatactggtgattttgtttgtgcagctactggttatgcaattgattcacttgattgtaagttcactgaccaattcatggttacggcagtagctgcaaatatggttgaagttagtgatgccgatggctttgttcatcgcttgcatcattcacatttcaaggcggtgacagtatga

SEQ ID NO: 60584 - DNA, 468 bp, Acinetobacter baumannii
atggaaaaatatttacgtttactaaatcctaaaactaccaactatgaagctattccatcgggctgtcatggagctttaactacagcagatatttgtatttcaattagttatgcaaaattatctgaagttcagaatatattattggaagtgtacgctttaaaaaaatgtacagttgagtatttaaatgtgattagtaaagatattcatcaaaaactaatttcttgtgggcaatctgaaaataccgatgagcacgggatctcgatatatatcgctttagttgagttgtgtttggtatcagcagattacaaacctactgttagaaatcgtgggttgataggcggtgtatcatatttaaaggttcatcgtcgtctaggggtgttaattgatacctatcttgaaatttttaaagaggagttaaatacagtagctgcaaagatttcaaagcaaattggtaataaaaataactaa

SEQ ID NO: 60585 - DNA, 390 bp, Acinetobacter baumannii
atgaatttagtgctaaagtacacggagatgtcccaaatgtcatacaacacgcacaataatatcgacatcgcccagtacggtcattctgacatgttaagggtgttaagggctatgttaagggtatttatcctcacccttaacaccatcaaaaccaatcataccaatgcttgcagccttaatgttaagggtgttaagggtttcgcgtgcgcgcgcgtacacgtgataaatatttgcatgaataaattagttattaaattaattaataaaaattcacccgtgcgtgagaaaaacacccttaacactcttaacacccttcacaagccttgccaactaagagttttatacttttatacccttaacaatactcttaacacccttaacattgtgtaa

SEQ ID NO: 60586 - DNA, 501 bp, Acinetobacter baumannii
atggttttatctttatctgagcgacgcgaaaaaacggttatgtctctagagatggctttaaaagcagcggtttatcgaccaaatgatgattctctaatggctgaaattgctgaagagaatgcattcaatattaatacttttcgtagttctttaaatccaactacaccgacacataaagcaaatatttaccatcttgaagcagttttgcagaaaacaaaagattcacgaatcatggatagtatttgttcaattcatggcaatgctgcttggtttgagttgcctaaaactgaaaatttaaatactgctgattttgttatgaaaattggcaaattagcacaagaacagggtgatttatcgcaatcagttgctaaggcaataggcgatggccgtattagtgaagacgagttagcagttattcgtaaagatgcttttgaattaatacgggtcgtttcaacaattttagcaatggctgaagagcaacatagaggtgagcatggctag

SEQ ID NO: 60587 - DNA, 585 bp, Acinetobacter baumannii
atgaaggaaacttttataaagcaatattggaaagcatatggaggatgggtagctttattccgttctccttatatgtggatagcttttattgtaagtttgatgaattatcaattcagccaaaatgaaaattggattgatacccctttagctattctacctaatttattaggattcaccttaggtggctattctatttggctagctttagggaatacatctttaaatgagatattagcagaaaaagagagagatgaggatataccttctgaatttatggttgtgaatgcttcttttgttcactttatatttttacaggttctatgcttatttttattaatttttataaaaactacagtattaaaagaaacaattatcttttctatttggggttgttattctcctgtagtcagtagcgtacttgggcttgctaatttctttaattggtttactttctttttatttctttattcaattctctcgatgttgggagctttattcgcattacttaatattgcctctgtattagatattttatatagacacagtgctgaaaaaaaacaccaagaaaaaaaagataacgaataa

SEQ ID NO: 60588 - DNA, 957 bp, Acinetobacter baumannii
atgaccattgctatagataatgctattaagacccatatttattcaggtgtaaatatacgtttacatccacatactggtcctgaattatatattaaactatttaattttattaaaaagcaacgtttcgcggtaccaactggatataaaaataattttatatcattacagcaagtttcttatattccattggatggtaagtctttagaaaatggatttatgggggcatttatacgctataccgatctatttcaagctaaatgggtaaatgaaaatactggtgaatatacagatagagaagagcttaaggggctaattaaaattcccgctaatctaaaagctgatggtgtaattttcgaatttgttttttacccaatgagtcatacattgattgttcagattgataataaaaattcaactactacaccaaataccatattaaaattttttgagagtgtatttaaatctcctgaattcattaaaaattttaaatctggtgaagtacatactttaaaagagccgaagggcgttgtaagtattataaataataagcgacttaaatcaattgagtttgatattgctaggccgaaccctgatgacttgaatgctatattgcaaagaaaggtactaaagtcattagatgatcaaaatgctaaaaacttaaaagtttcaatggatgctcaacaaggcaaatacttaaaattagataagaaaagtcaagctttagcttgggttgcagcagaaaatggatctattttagctgtcgagagtgatcagaatgatagaacgcatgtaattagcacagctaatatttcattagaacagaaaatccctttacctaaatcattatctttaagtcagaagtggataaaagttacacaaataataaaggaaaaaatagcttctgctaaaaaagagttagaaaatagtaaaaaagaaactaaagaattagatacatga

SEQ ID NO: 60589 - DNA, 387 bp, Acinetobacter baumannii
atgaataagagagttgttttgaaaactgaatttattattagatgtatttatgcactttgccttatcggtgcagggttcaaccatttacaaacagttttgatgcatggtttgttttgggactataacaatgcgcctttatttacttgtatttattggacatctttaacgtttattgatccacttgcagcaattcttctattttatagacctcgtatcggcttaattctaacttttcttattatatttagtgatgtcattcacaacacttggattacattaaaagtagggcgagacttgctcaactatatgtatatttcgcaatttttatttctggtttttgttttgtgcacaattaagtttccttggaaagcacataaaacaagttaa

SEQ ID NO: 60590 - DNA, 4857 bp, Acinetobacter baumannii
atgcaaaacatacttacttttattaaaaatggtcaaaaatttactttagatgcaagcaatattaaaagtgtaagagatacgggaaatggttttgaaatcactcttaaaagtggtgagataattcaagctgattcctatagtattactcctaatactcagccagtggagcaagtttctagtcagcaagtagaaaataattctgaagctgatgaggaatttgaaaaagaagaagttttaaaagaaaagagtttattggattcacaaacaatgttatggggtggtgctgcgatcgcacttggtggtattgcgatagcagcatcaggtagtggtggtagtgatggttcagcaccttctgatcaaactcctccagcaagtttaactaaaatactgtctaaagatggtaaagctgtaagtggtttaacagaagctggagcaactgttatagttgaaaattcggctggaaaagtaatcggttctgccaaagcaggagcagatgggacatatttaattaatttagataaagcctatattaatggtgaaatactaaaagtttctgctcaagatactgccggtaatagtacagttaaacaagagcttatcgcttctgatattacagctcctactttaacacatgctatttcttctaacggtaaaactattacaggtttgacagaggctaattcaactgtcaccgttaaagattcatctggaaaaatcattggaactgcaaagtctgataatgatggaaaatatacagtcatactggataaagcttatttaaatggtgaaaatcttactatttctgccgaagatttagctggtaataaatcaacaattcaaacaattttggctgacgataaaactgcgccaataggtttaacagttgcaattgatacagcgggtaaagtagttacaggtgtaactgaagccaatgctgttgtgacagttaagaatgctgcaggaattgtagtcggtacagctactgctgataccgcaggtaaatactcgattacactagataaagtatatttaaatggtgaaagcttaagcgctactgcatcagatcaatctggtaatgctacagcaccaaaaaccattatcgcaccggataccacggcaccatcaagtttaactgcaagtattggtactgcgggtaaagtagttacaggtgtaactgaagccaatgctgttgtgacagttaagaatgctgcaggaattgtagttggtacagctactgctgataccgcaggtaaatactcgattacactagataaagtatatttaaatggtgaaagcttaagcgctactgcatcagatcaatctggtaatgctacagcaccaaaaaccattatcgcaccggataccacggcaccatcaagtctgactgcaacgattgatgccgcaggtaaagcaattacaggtgtgactgaggccaatgcaacagtaacagttaaggacgtggtaggaaccatagtgggtaccggtacagctgatgccacaggtaaatattcagttaccctagataaaatttatctaaatggcgaaagcttaagtgcaatagcggcagataaagcgggtaatgctacagcaccaaaaaccattatcgcaccggataccacggcaccatcaagtttaactgcaagtattggtactgcgggtaaagtagttacaggtgtaactgaagccaatgctgttgtgacagttaagaatgctgcaggaattgtagttggtacagctactgctgataccgcaggtaaatactcgattacactagataaagtatatttaaatggtgaaagcttaaatgtaacggttgcggataaagcgggtaatgctaccgtaccaaaaacaattgttgcaccggataacacagcaccatcaagtctgactgcaacgattgatgccgcaggtaaagcaattacaggtgtgactgaggccaatgcaacagtaacagttaagaacgtggtaggaaccatagtgggtacaggtacagctgatgccacaggtaaatattcagttaccctagataaaatttatctaaatggcgaaagcttaagtgcaatagcggcagataaagcgggtaatgctaccgtaccaaaaataatagttgcaccagacattacagcaccatcaagtctgactgcaacgattgatgctgcaggtaaagcaattacaggtgtgactgaggccaatgcaacagtaacagttaaggacgtggtaggaaccatagtgggtacaggtacagccgatgtcacaggtaaatattcagttaccctagataaagcttacttgaatggtgaaagcttaaatgtaacggttgcggataaagcgggtaatgctaccgtaccaaaaacaattgttgcaccggataccacagcaccatcaagtctaactgcaacgattgatgccgcaggtaaagtggttgcaggtgtaacggaagcagatgcaagagtaacagtagaacaagtaaatgctgtttataaagaagtaacggttttagaaacccaatttattctgagtgagtcagtacagacaaattatttatcgaagacatattcttttgaagttacaggtacaaatgcacatgtttctttaaatttgagttcctcgactaattcactttctggtagttatagttcaattctttctggagcgagtttaaatacaagactaactggtaatgtttcccaagctggagacggcaattacagtattgatttagcacaaggttcggtattaccgcctggaacctatactttgacagtaaattattctagttcaatggcccccgttataaacgtaaatgtaacgcaagaagtgccaacaaccattttagaagtagaccattacgaaacaaaagttgtaggtacagctaatgcagatgaggcaggaaattattctattactctagataaagcttacttaaatggcgaaaatttaatcgtaacagcaacagatcaatcgggtaataaaactgaggcaaaagaagttattgttccagatattacaccaccgattttacatcaaccaactattcaaggtggatggactgaggggcaagtcgtacaaggtacaacagaagcaaacgtcactgtaactattaaaaacgctgcaggtgatgtgatcggttcagctatagctgatgcatcagggcattactccgtaattttgaatactgtttatgagaatggtgagttattaaaagtaatagctacagataataaagggaatgaaaattttcttcaattaaatgcacctgatactacagcacctatactagctaatttatttagttatgatttgagtacagataaaattatttttaatgcgccaagtgatagttactttgttgaacaaaaaattgatggtgcttgggtccacgtaaatattgaggaaaaattcgattggttaaatgtagaatatagggtaactgctacagatcaagcttggaatagttctcaaccactaactactataattaatactgcatcgggaacttacaagccaacagaccctatatttactcaaattattaaaggatctacaggaaatgattatctatatggtggcaatggagatgacacgttaatttgtaatggaggttctgatagtttatacggtggatccgggaacgatacattgatttatggtggtaattccccgaatgtatatacaggattaattggcgaagcagggaatgacacctatattgtagataaagcattattagggtcgttgagttatgttcatatcttagataatacaaatgaacaaaatacactttatttaaaatcagtttcagctgatgaaattattttaaaacaggctagtgcagatagaattattacgtttaatgattcaactgctaccattcattttggtgaggggcaattatcctcaattgtatttgatgatggaacagtttggaataaagcacaaattgaagccaatattatcggtagattattaggtacagatggagatgatcatttacaggcagatgctaattattccgtaatttatggtctagatggtaatgacacgatacaaggtggtgtacagaatgattatctatatggtggcaatggagatgacacgttaatttctaatggaggttctgatagtttatacggtggatctgggaacgatacactgatttatggtggtaattccccgaatctatatacaggattaattggcgaagcagggaatgacacctatattgtagataaagcattattagggtcgttgagttatgttcatatcttagataatacaaatgaacaaaatacactttatttaaaatcagtttcagctgatgaaattattttaaaacagactagtgcggatagagttattacgtttaatgattcaactgctaccattcattttggtgagggacaattatcatctattgtatttgatgatggaacgacttgggataaagcgcaaatagaacaacatattgctaaaacagtagtgggtacgtttgataatgatgtagttgagacagctacagccaaccagacatattcatatactttagatacaggtgcagatactttaattttcaaagttcttgatgacattgataatttaggtggtaatagtaatggagagtggacagattttaatctttcagagaatgataaacttgatttgtcacaattgcttataaataacaagggaaaccttcaagaatttataacggtaaaagatacacaggctggagtagttatgtctgtagatagagatggctctaatcaatccacttatcattcacaagaattaattctacttactggtaagcactatacgttagaggatttaatggcttcaaatgcatttattcattaa

SEQ ID NO: 60591 - DNA, 975 bp, Acinetobacter baumannii
ttgtcgtgtacagagttaaaagttatatttttaccttcttccattgttaaaactgacgatgcacgggtagatgtcgagtactcaaccattgctcccaaagtgtcaggtaatattgaagaaatttatattaaagatcaccagaccgtaaaaaaaggccagcttttggcacggattgatgcacgtgattatcaggcggctttagctgaagctgaatctaattatgccaaagcacaagctgacttaaatgaagcaatgatggcagtagaaagacaacccactgttatacgagaaacagaggcccagcttagaaaagtagaagccggcattaaactcactaaagataataccgcacgctatgagcaattacaggcacttggtgctgaatctagattgattacacaacaatcaaaaaccacattgaccgagcaatatgccgacttggacagcagtaaagaaaaagtcattgatgcgcagtatcagctccaccaatataagattcaggttcaagctaaacaagcggctttgaaacaagcccaagctgcgcttgataaagcaaaactgaatctgagctatacagaaattcgagcgcctattgatggcatgattgggcaaaaatctgcaaatgtgggcaactttgttggcgcaggtaatccactcatggtggttgtgcctttagatcaagtgtatgtagaagcaaacttccgtgaaattgagctaaaacaaattaaaatcggccagcctgtcactgtttatgtcgacgcttacaatgttgagttaaaaggtgtggtagatagtttttcaccatcgactggtgcattcttctcgccaatttcagcaacaaatgcgacgggtaactttactaaaattgttcagcgtttacctttacgcatcaaactccttgagaaccaacctgatattaaattgttgcgtcctggtctatctgttgtggtttctgtggataccactaaaaaataa

SEQ ID NO: 60592 - DNA, 1587 bp, Acinetobacter baumannii
atgaaatctaatcaatggttgactctcggctcgcatcttattttaaaaaaatggtgtgatgcatctgaccgtaatttccaaaaacagtttaatgccttagagactacgcaacgtcaaattttgcattcgattttacagacctctactttggccaaagataaacaggttcaaaactatgagcagtttgtaaaagcttttcctgcaactcgctatagcgcttggcgagaagacattcagcgctaccgtgaacaaaagctttcactctctagcagtaaactggttcgtttccagccgaccagtggttcgagtgaacaaatcaagtttattccatataccaagttgtttttagatgaacttgaccatgcgattgcaccgtggatggcaagtttataccgtaagtgtccagagcttagctctggtacacactactggtcggtgtcgtggttgcctgaaagtcagcgtgaagttttaaaagataaaaatttaaatgatgacagtgcgctacttggtataggtaagcgcattttgtctaagtttacccaagcggttccaagtaacgttgcatttgcggccaatgctgacgatgcactgtttgccaccatttgttatttggtcgcaaaccgtagcttagccatgatttcggtatggagtccaacgtttgcattgcaattacttgaacgtttagaggcattgcaaaaagacgtgattgaggttttacaaagtggtaaatggggcagtcgtcacgcttccttaaaagaagtcactgcaccgcatagctctgaaagtgctcaagccttaattgcaagttcaaacggcgtacagatcgactttaaaaaactttggccaaagttaagtctggtttcgagttgggacaccgcaggttcaaaagcgtgggccgaaaaattaaaagagaaattgcccagtgttcagtttgaaggtaaaggcttatgggcgacggaaggtgtagtgactattccctataacgaccaatacccattggcttaccaaagtcacttctatgaatttgaatatttagagggtgagaaacaaggtcaaatcgttccttcatggcagcttaaacaaggtgatgtggtcagcccactgattacttcgggtaatggcttactgcgttactgtctggatgattgcttaaaagtgactggctttttagagcaaattccgtgttttgagtttcaaggccgtcgttttggggtagatctggtcggtgaaaaactagcacctgaaaccgctcaacagttgttgtctcagttaaacgaaaccgagtcaaaagcgatttctttactggcgattgatacccaacaacaagtaaaaccattttattgtgtgctttttgaaggtgaaattcatcacagcattaacaatgaatatatcgacagtatcttacgtcaaaacttccactatgaacttgcacgaaacttggggcagctcgatcagcctcaaattcgccaagccaataatggttggaatgcgtacaagaaactagtcatgtttgatggcattatcgaaggcaatatcaagcctgagccactcaaaaaagtcaccctgaatagtttggaacaactatga

SEQ ID NO: 60593 - DNA, 735 bp, Acinetobacter baumannii
atggagtggtttaaaataatagtagaagctttagtagggcttggctttttaggcacagttattaaatggttttttttaccaagatttcgtattgacttgaggaagaaaaatttcgaaaaagataagatagagttagataattatttagatttatgtaaaaaattcagccaaaagctattgcaacctatacagttccaatatgcgactaatcattttttaggaactactaggtatcactatagcttgttcaatgagcgaattaataatttatggaacttcaataaggttttttcaaatttaaatcatggctatttttttctaaaacaagtagtagaaaataatcaagcacatttagagtatatctttaaagaaaaaacgatcaagaaaatcagatcaatctcaataactattcttatttgtgctgcatttatttatttggggttaataatatttgaagtatttttccttaaagaattaatttcaagtaaaagtataaataaggacacctatgcattttataaaattctttcaggcgtaatatatgtcgttctggtcttaggagcatcatactttggtggtaaagcaagtacagccttatcattgaaagatatttttgatattagggataaaaataccaaaattgaaaaatccaagattaacactaagcttatatttttaattaaattatttaattttagatatttcattagattatttcagaaacttaataaataa

SEQ ID NO: 60594 - DNA, 204 bp, Acinetobacter baumannii
atggctaaaacttttagatttacagatgaagaagaaaatgcattgaatgaaacagcattaaaagtaaacagagaccttgttaaagcaggtaaaaagccattaagagatacagaaatcttccatgagattattaaacaaactttgctcgaaggctttgtagaagtaactagagatggaacattaaaagtagaaacaaaaaaataa

SEQ ID NO: 60595 - DNA, 267 bp, Acinetobacter baumannii
gtgatttctgtattattactggaatgtgatttctatatttgtgattttatggaaaaggaactagcttttgagattgtggccaagatcatttttgatcgggcagtgcagttaattattgggggcaatccggcttacgagtctgagcttgttcttttccatattgaaatgacgatggtggagtggggctataagtctgccaaagtagcggagtactacgacatgttgaaagctgagaatgataatttccgttcaatggggatttgctaa

SEQ ID NO: 60596 - DNA, 1476 bp, Acinetobacter baumannii
atggctattaatgatgatttatattggtataaaaatgttttaagaagaacaatttcaacaacaatccgcttttacttatctctctcaattatcctttcaccaataattctaatgactgaagctaacgccaccgatgatggtgattggtggcttcaacgtgaaatcaagctgcagcaaaaccgtgaagattatgcaagacgtgtttatggtcgatctgcaagatcatttactgaaactgatccagtaactgcgaaaacaagaacagttactagaattgctattgcagaagcatcgcctacagcttcaaaagtgggtagctccatgtttaaacgtgtggctttctatgcaaagaatccaggcgtacaaatggttggtgtatatgctgcaacacaattaattgaagcaattggttgggtaatgacagatggtgcttacgtaaagaaaaaaccagtagaaccaactgatcctgctgacccaagattgcaatattactatcagagcagttcttttggggttactaaaaagtttggtacgaatagtcaggcagctacagatatttgtacccgtaatgcacaaggcaatggctggatacttgtttctgttactccttacaattggggagctactgaggtaggtgaaagagacgcaaaatgtattattaagcgctctccaacagatgcaaatgagatttttaactggggttatcaacgtcaactaaacccgatttataaccctaattcaccaccaccaccagatcaaattattccgcttacccctgagttgttaggggctgcaatgatgggcgaaggttatcatgatccagttgattcaacagttgatagtaaagttaatacgggtttaatggaccaatctgtagctgatgcatatagccatgcaggtaatggtgttggagatgaattagctaatgatatggactatcaaattaaaaatgctccattgactccagacggtcagcctgcaccttttggcgatcctagatataaaacaccaccattatcagataagccctttatgaatgaccgttcttggcgcacagatggtggtactgctgatggtaaatctgagcctatcaaagatgtggatggcaatccgactggtggacagtctatttctatcgaatttccagtattttgtgaatgggcttttacggtctgtaaatggtatgacgactggaaaaaaacagatgaatggatgaaagaagatcctgaacagaaagaccctgaaaaagttgaatttgatgaagatgtatcggcaggtactgtaacccttacaggttcggatgcttgtccaaaagactctgttcaatttactttaatgggtcagacttatactatcgaattaccttatcaacctgtttgtgatgctcttactttctttaagcctgctgtgttggctgttggtgctattacttcagcttttatcgttgcgggtattaatgttaagggagaggattaa

SEQ ID NO: 60597 - DNA, 141 bp, Acinetobacter baumannii
atgacaaaacatgatgcacatgtacttaagtttaaaatgcaattttttcctattaaggtttttatttttattgcgatgtttttcttcattacagggatgttatttgcttctttcctctctgtatttaaatgcactttttag

SEQ ID NO: 60598 - DNA, 915 bp, Acinetobacter baumannii
atggaagagcgcaaaaatctggataccagagcttcggctttaatggtgcttttatgtatggtcttagggctgcaacaggtggttctgaaaatagcagcaccagatatttcgccgattatgcaaatcgctttacgttccggcttatctgctgttctagttttacctttattgtggcgagatcattcgattcatctattttcttatagacaatgcaaagctggcgctcttgttgctttatttttttcattagaattttatttcgtcacccaagccttaaagtttacctctacctctcatacagtagttttactgtataccgctccaatttttgttgcattagggcttcattggaaatttcctactgaacgtctgaatcgagtgcaatggggtggcattactctggcttttatggggatcattcttacattttacccaacaaccacagctacaaatgcgccagctctagcacaagttttgttaggcgatttatatgcacttatggctgggcttgcatgggcactcagtacaattattgttcgtttatctcctttagctcaagcgccggcaactcaaacattgttttatcaactatttggctgttttgttctactcttactaatcgcttttttaacaaatcaaacaacaattcatttcaccactttaacgatcctaagcttaagctttcaaactttaatcgtatcttttgcaagtttactattatggttttggttattaagaaattatcttgcatcacgattagggatattttcttttttaaccccattatttggtgtgttatttagtattttgttattagaggaaaaactagaaattaaatttatttttggaagtattttagtgctgtcaggaatagtcatcatgagcctaaagcagggcaaagctaacagcagctaa

SEQ ID NO: 60599 - DNA, 324 bp, Acinetobacter baumannii
atgactcatttcaaaaaacaccctgacggctacatgtcatttttaggccgtgatgataagggcctctactctgttcgtattggctggcaagtgtacgcatctaatgctaatggctcagttctttacaaagttaaagacggatttaagacgcctttaaatgtgttcaggttccaaactgactatccaaaagtttggaatgaactcacacaagaaattgatttccaacgcagaaagcagctcgcaataaaactgcgtgaaacaaacatccctacttatgaccgcaaggcttataaaactaagcgcggcttcactggctcaagataa

SEQ ID NO: 60600 - DNA, 1338 bp, Acinetobacter baumannii
atgaataaaaatttataccgttttattacactctcaggaatattaatggctgcatgtaagacacatgcagatattgaactttataaaactgatgatacacaaatctcagcgaatatcattgcaactatagggaccttttatagtaagaaaaattatattccaaatgctgaaaatgaaagttatagctggcaagaagggtatctgcaatatggtctaaatgcagaacaaaaaattggggaattaggttctatatatagtaaagccaacttagtgagtgcaggtacttggggggatggtgatgcagcaggttttactgatggtgatgaacgggcaacaaaaattgaagatgcttttgttggctggaaatcaggcgatttaattccatggcttggacataatgggttagatatttcttttggtcggcaaagtatctgttttggagatggttttctgatatgtgcagatgcaccgaatgtcgggcattcacctcttttaggtgaagctttcaaccgtaaaggtggtggaacctattatttggcagggcaccgaaattttaaagataccgtcgtggttaaacttggaaatcaagagggcttacacggtagcctctctacttttaaatctaataatgcaattcaagcctattcaaagttttatgctgctaccttagattacactgatactaaaaaaggaactctaggctttacttatttacataatgagtctattgatcaggcttttgcaaaacaggtttcatcaattttatctgaccgggaaggaatgaatgtatatagcttacgtggtctaggtagcttaggtatagaaaatacactttttggttttgaatatgcggttcaagacaaacgcgatgccaatactgaaaatgcttggtatataaaaactggctataccttcaataccgcctggaagccttcttttacgctgagatatagccgtttttcagaaaaatgggacaacttgttcgttggtgcgttggaatatggaaaatggtttcagggagaagtggcatataactattcaggaccatttaatgccaatacacaaatttcaaatttcggttttagtgtcagtcctcatgaaaaagtaacattaggattgcaagcctatgattttgatactttaaagaaagaaaataatactgatttatcgggccaagagcttgatttatatgctttatggtttgtgaaacccaacctcacagtatctccattattgggaatttataaaccgaaatatgatttggcacataacggtttacaaaatggagatgataaaaccaatctttatgcacaactggttttaaatctctcattttaa

SEQ ID NO: 60601 - DNA, 1209 bp, Acinetobacter baumannii
atgactgatattaccctagctccagtacaacctgatcaaccaacacatttaatggctacttatggtcgccaagcgatcagttttgttcgaggccgaggggcgtatctttatacacaagatggtacagaatatttagatgcactcactggtattgctgtatgtggtttagggcacgctcatccagctattgcagaggccattgcagagcaagcagcttcactcgtgcatacgagtaatttgtttgaaattccttggcaaactgcggctgctcaaaagcttgctgaagtttcaggtatggaagaaattttcttttcaaacagtggcgccgagtcaaatgaaggggcaattaaaattgctcgtaaatttggtactcaacaaggtataagcttgccaaagattattgttgctgagcagtcatttcatggtcgtactttggcgacactttcagcaactggtaacaagaaagtacaagacggttttgcacctttagtggaaggctttattcgagtgccatttggtgatattgaagccatccaagaggctgccttacaacatcccgatatcgttgctattttaattgaaccaattcaaggtgaaggtggtattaatactgcaccacaaggatttagctatttagaagaagttcgccaaatttgtaaccagcataactggttaatgatgctagatgaaattcaaactggtaatggtcgtactggtaaatactttgcgtatcaacatacgaatattattccggatgttttgaccacagcaaaaggtttgggtaatggttttccggtgggtgctgtaatgactcaaggtaaagcagtaggcttgttagggcctggcagtcatggttctacttatggtggtacagtattgggttctcgtgtggtttacacggtaattgatacgatccagaaggaaaatgcagtagagaatgcagcagtagtgggtaattatattgttgaccaattacgtgctcaattgtcggataagaatgtgcaagtacgtggtttcggtatgatgattggtatccaattacctaaagattgtgctgagctcgttgcgattgctcgtgatgaatacaaacttattattaacgttacggcaggttcggtggtgcgtttattaccgccaattaacatgacacaagctcaagctgatattttgctagagcgtttagtcgcattaattacgaattatctttaa

SEQ ID NO: 60602 - DNA, 657 bp, Acinetobacter baumannii
atgaaggggcttagaaatgcacggcaaatagatagatcagaaaaacgagaaagattgccaacaaatgaagagctgcaattattaactaatcatttttatagcatgtggttaatgtctaaatctacttttcctttgcatctcattatgtggttagcaatttacaccacaagacgacgtggtgagctatttaacatgctcttagctgatgatgatccagagcataactcttggttggttagagatattaaaaacccaagagggtcaaaaggaaacaataaaagatttaaagtatgtccagaagctagagcaatcatcaatatgttattagatccggaagtacggaaaaaaatgacaagatgcaatcctgaaaatggtaaattaattcccacaatggcagattcaactattcgtgtatttaccgaaacatgcaagattttgggaataaaagatttcaggtttcatgatttacgtcatgaaggggcaactagattagctgaaaaaggactgagtattccacaaattcagcaatatacattgcatgatagttggtcaagtcttgagcggtatgtcaatttagatcataaaagaaagaaagtattagaattcgatgaagctatggaaaatgctaaaaaagctatcttagacgattttatataa

SEQ ID NO: 60603 - DNA, 237 bp, Acinetobacter baumannii
atgacatatatcgataagcttgccgaccctgaatttgtgaaaaagttagaatctaaattaacaggaactattgttgacttatatttacgtgaaggtaaaagcccgccaattccaagattaagagatcataaattccattatgatgaccctaaaataaatagggccgtcgaacgtgtcagactaggttttctggttatggctcaagtgctggatgatttagaaaaagcccctgaataa

SEQ ID NO: 60604 - DNA, 237 bp, Acinetobacter baumannii
atggtgacgactatgcataaaccaggtgaccgcgtatatgtcgatttcatttccgctaatagaactgaaaccgatgggacacgcatttatgggaatggaaccattgataaagttgaccaggataataacggttttctaattggccgtttagacaacggtagaccttttggctgtccagcttcagatgcacaacccgagcgcaaacataccgttcaagttcataattggggttactaa

SEQ ID NO: 60605 - DNA, 567 bp, Acinetobacter baumannii
atgaacacaaatgaatttattaaaactcataccttagcaaaagcaaaagaaatctttgaaaatgcgccgaaaaacgcttctaaagtagtttatcgaaatgaaaatagttgcatctactttaaaaaaagtaaaagtggcaacgtgatgagctttaacgaatatcttggaaagtttacctaccaaaggacttccaattgcgcttggtatgcacccgagatgattgaccttattgaactaaaaaattctatagagtcagtagaaattgttgggctattcgactcactagctaacgcaaaagaagtttatcaaaatggtattggctttcactctgttttaattggcggttatgaaatacctattgagcgtctaaaaattgcaatatcagactatgaagcaatttatgaaagtgatgtaaaactccaagttcaatttggcattcccgttgtctcaggtcagaaagttggaagcatgttgagccttggcactagcataacaataggtattgatttagcgaatggtccagattggtcagcacctgtttcaataaatggtgacgactatgcataa

SEQ ID NO: 60606 - DNA, 762 bp, Acinetobacter baumannii
atgtttgatgaagaaatccgaccaaacttatatgtaaagccaagtcttaatgatgatgtagaaaaatggcttaaaaacaaacgcaataaaattactgttttagctgaaggttttactaattttccagacggtagattacctctagcacgtgttgaggttaagccattagacattgaaaaatataatgctgaaaaggtaactaagaaagctccagttaaggctaaaaagccgaagctggagaagcctaaaaaagttattgctaaaccagttaaaaaggtaaaaaccaaacctaaaaaagtaaaagttgaacaggaaaaaactttaatagttaaacccaataaacccttaaagccttcaaaacttattgtttatacagaacgtgcaatgatctatttgcataactgtgaagtagcaaataatgctagaaaacagaatcttaaacgagctgaagcactatgcagtaaacatggttacacaacattcacagttctaactaatcgcatgcgctgcttgaaatgtattgaaggttataaccgacaaaaaagccccgaacatccacgacttcaatttaatcgtgatgctttaaaagcagctcttgaagctggagaaactacctttattggtaaatgtgttaatcacggtgaaacagaattttttatccgggaaaacaaatcaactttggctaatgctagttataaatgccgcaaatgccataagaccactcaagctaaatatgaaattaatcggggtaaagcagcatga

SEQ ID NO: 60607 - DNA, 288 bp, Acinetobacter baumannii
atgacacctccagaaaaaccatttcttgctaatagcctgtttttgcttattgctcgatatcagtcaccagtagttcctttagaaactattgttaaagactactttagccacatgcaaattgctgaagcaagacgacgtgcaaacagtcaacagttaccctttcctgcatttcgtagcgaaccggagaacaaaaaatcaacttggatggtgaacgttgcagatttggcagtttatttagataagcaaagccaaatcgcaaaacaagatcaccaggcaatgcatgcctag

SEQ ID NO: 60608 - DNA, 207 bp, Acinetobacter baumannii
gtgacaaacgtaattgttactgatcaaacagatggttcacaacgtttttcgattcactataccgggcattcagctacacaaattattgtggccgatccagaacagcaagaagatttattgctttctcttattattcacaatcaaccatcaatggaagctgcaactaattctgttgaaatttggaaaaaaactaaggaggcacaatga

SEQ ID NO: 60609 - DNA, 2106 bp, Acinetobacter baumannii
atgccaggcgaagaggtcagccaagccaagcaacagctcaaattaattatcgacccttacttatcggtaagtgaagtcgaaaaagtgcttgctgcctgcgattttggagatctggcacacactggtattacccgtaaaagtggtgaaccttatattctgcatcctatcgcggttagctgtattttagcgaatatgcgcctagatcctgaaacattaatggctgcacttttacatgatgtcattgaagacactcaatatacaaaagacgatattattgagcgatttggacaaacagttgcagagcttgttgatggcgtaaccaaactaagccagtcgagcgataaagaatataataaagctgcttcttttagaaaaattctacaagctactttgcaagatccacgcgtcattattattaaactagctgatcgctaccacaatatgaccacattgggcgccttacgtcccgataaacgtgctcgtattgctcaagaaacctttgatattttcgtacctatggcaagattagtcggcatgaatgaaatggccgataaccttgaaaatttatgttatcaaaatctcgatttagatatgtttgataacgttcaaaatgcgttgcttcaaaccaagccagagcgatgtaaataccaaagtatctgggaacaaaatcttgcggagcttctccacaattatcatattcaaggtcgaattaaaaagaaaaataataatattgagctcttacgccatttcgtaaaaaatgaaatggatttacaagaacttactcatagccatgcctttgaaattgttttgcaatccattgcagactgcgatcgtttagtagcagccttaaaagaaaattttcaggtcatccaatatcaagatcatatccgccgcccgttaccaggtggcaatcagtcattaatgatcaagcttaagggtgaaaaaactaccttatcgctcactattcaaactgagttgatgcgtaaagctgcacgtttcggtgtagtactcggcgaaaatgctccacaaacttgccgctctgccattcaagcttccatgcagaacctaaatacactcattgatggtgaatgcgctaaaacgacttttaatgacttacttgattatttacatcaagaaaaaatttgggtttacacaccacacggccagttacatgaattaccacaaggtgccacagtagttgattttgcctactcagctagtcttttcttaggcaaccatgcggtaggtgcaaaagttgatggtgaaattaagccactttctacaccattagttagtgggcaggttattgagattattactgacgttttagcaacgccaaatccagattggttgagcttcattaacactcaaaaagctcgccgtgctttacagcacgtactcaaagaccaagatattgaagaacaacgtttagttggtgcccaagcactttcaagagctttgaaactctttaatcgttctattaacgacctttcagatgcagattggttagatctcttaaaatggcgtcatattgataataaagatgcattatttgagcaaattgctgttggagatttacttcctcaacttgtagctaaccatttgtttgcaaatgacaagcatcctcgagcagaaaattcagatcgactaattcaaggtactgaaggcattgatgttaaatatgcccactgttgtaatcctattttaggcgacccaattcaaggccatttaacacgacgtggtttaattgtgcatcgtattcgttgtcataatttgcttcatgaacaacatttacacccagaaaatattatgccgcttcaatggaaagcagatgacgtagatgatgtacgttttactgcttaccttgcgatttatatggcaatgaatgatgaacaggtatcagacctcatctaccaatgtcgtaaaaataatgctggggtagaaatggtacattccaacgaacagcgtactttcgtcaatattgtagtaaacaaccgtaaacatattgcaaaagtcattcgtgatttacgaatgcactatggcttcccacgtattgagcgtctagacgcccctgctccacaaatggaaatttccaaagtcagctaa

SEQ ID NO: 60610 - DNA, 132 bp, Acinetobacter baumannii
atgtcccaagcagtagatatcattttctatgatggcatagtgtctaaaccataccgtgctcagatttcagctcaatctgaaactgaagttctgattcgatatggtgagcaattagaacaacagcgtcattaa

SEQ ID NO: 60611 - DNA, 894 bp, Acinetobacter baumannii
atggaactgattcgtttaccaaataccgcaactggtgatgacattgcaaaagcattgagagagcatggtcattgtatcattgaaaacctagtttctcctgagattatggatcgtattgccgaagaaacgcatgaatatgtttattcaagtccatatggcgaagatgtatttttgggtaaaaagacccaacgtactggttctttggtggctcgttcaaaaactgcacgtgaagaaatcattactcatccattaatgctggatgcggcaaaaaaacatttgcataaagcgtctacgattcaattgcaattaacccaaatcattacagttaatccaggtgctccagcacaagtattgcatcaagatcaattgacttgggacttttttgattttccagatgattatgaaccacagttcaatacactttgggcaatgactgaatatacagaagaaaacggtgcaactcgtgtcgtaccaaacagtatgtatattggtgcacgtcaaaaatttacgcaagatcaaacgattgctgcggaaatgagcaaaggttctgttctagtgtatacaggtaaaatttaccatggtgctggtgtgaataataccgataaaattcgtcaagcaattaatgtgaactattgtgcaggttggttaagacaggaagaaaaccaatatttggcaacgccaccagaaatagcacaaacacttgatgatgaattgcttaaattgatgggttatcaatgtgcttgctttgcattgggttatgtacgtgattttgaagatcctttggatgtattcaggggtaaagctgagcgtcgttctgcggggttaaaccttgtggttgatacaggtaatgacatcatcaaggaatatgctgtggaagtaggggatcgcacatga

SEQ ID NO: 60612 - DNA, 408 bp, Acinetobacter baumannii
atgaaattaagtacaccagatttggattacttcaagcaagatgtttttgatctgtttgcgttcagtcaaataatagaggtcggtaatacggtatatctttcgggcattgcaccacttaaaggtggcttggcggatttatcgctggtcggaagtactgttgcggatcaattagattttgttctaagtattgctagtaaaagtctaaacagtattggattagattttggcaatattgcaacgtggacgatttatacgactgatatcgctgaatttacaagccaatccagtgatattctgaaaaaatatcttggctcacatcaacctgcatgtactttggttgaaatcagtaaattgattcatccagagcaattgcttgaaattacgattacagctgttaaagcatcataa

SEQ ID NO: 60613 - DNA, 822 bp, Acinetobacter baumannii
ttgctgacttctctatctgcctcagctacaccattaaagttacctgatgactggacacaaaatactcagccattccaaattactgaaaatatatactatgtaggtactcacggtcttggaacctatttattgacctctgatcatcaagctttattgatagatacaggtcttccggaaaatacagagcaaatagagcagaatattaaaaaattgggttttaagttatcagatgtaaaaattatggttacaagccatgctcattgggaccatgtaggtgcactggcccgcattaaacaagacactggcgccaaattaattgctatgcagcaggatgttcgagctttagaaataggaaaaccaataggtgaaaacaccttccaaagtattccttttactccagttaaagttgataaagtcattcacgatggagaagtagttaaactagggaaattaaaactaaaagctactcttaccccaggccatactccgggttgtacaacttggtcaactgaagttaaatctaatggtaaaaacctaaatgttgttttcccttgcagtctctctgttgctggcaatgttttacaaaataatcatcaatatccaaatattgtagaagattatcgtcagagttttaagcgtttaaaaaatatgaaggcagacattgtgcttactagccatccagaagttgcagatgttatgggaaataaagcacgcaaagatgcaggtcaagttaatgcatttattcaaccagaaaaactttctgttattgtaaaagatgcagaaatggcatttgaaaaatcattagttagtagtaagccgtaa

SEQ ID NO: 60614 - DNA, 816 bp, Acinetobacter baumannii
atgaaaactgaaacaaatacatttatggattatattcctgaaaatcaatggcctgcagtttctaaaatgctagatggctttggtgagcaaacattacctgcatcttcttcattagtaggaacttccttgtctcttacaaatgctgatggacaaaagatcgattatcactttataagtttatctcaactcacttggactgataatagtggcactatgccaaaggaaggcagcgcaacttataaagcaattgaagcgcgtgaggatatttttttaatcgactttattgttggggagggagcagaaattcaaaatgtgacctttgtttttgataggaatactggcgcagtaactactggtgtttcttcatttgttgtaaaagatggtaaaaaacgcggtactacagaatttatgttccatcatacactcgaagccattaatactcttggtcatccacgctcaacaagtttagttggtaaacgagttttttatcgttacagcgatgttgaggcatatgaacatatatatcttgcaccagggacttttacttggcattgtgtacgtggtggagaacaaggtatagctgatactgaacgttgtatggcatttgatattgcagaagacctctatctctttttttggacagagaaagtaatgactgtagaagccgtactacttatagacttccgagaaaagcgctctattggccgtatgatgtgctgggatgactataaagatcaacctgttcttttgccatttaattctcgtttatctgtattaaatgaaactcaatatccacaagactataataagcactga

SEQ ID NO: 60615 - DNA, 546 bp, Acinetobacter baumannii
atgaaagagaatgaggaatataaacgggatggtaaaaaagttattagacaaggatttaaaaatggttcaactaaagtttgggaggttgaacaagaaattaaaaaacatttaaccgaaggtataaaaagtcaaaatttagagaaaaattataattgtgcatacataaatcaaactgagataaaaaatactcagaaaattaatttggaaaaatttgctgaaattttgagaaagagagctaaagaaaaaagtcaacatcaatgtgcaaagtatgtaagaattgcattagaggcaggaggagccgacacttcaggacatcctgtcgcagcatcagattggggaccaactctcaaaaaaataggttataaagaaatacctgaagagtttaataaacctcaattaggtgatatttatatcatcaccaaaactgataagcatcaatatggccatattgcaggctatgatggtagccaatggatttctgattttaaacaaaaaggtcatagaatttatagcgatcatgttaactacagatattttagaatgtaa

SEQ ID NO: 60616 - DNA, 312 bp, Acinetobacter baumannii
atgactaatgatcaatttcatgcggtagtaagaaaccgactatctgctccagattttggacaaccacaacaacattcaggaatgaatattttccgtgacaaagctctagaccaaatcgacaaagctttaaaaaaaatatctgaagcacgtacaagggatggacttttaatcgctaatactgaagcccatgcatttgttaatgcttcatacgatttcgaggtgattgattcaaaagagaaacattcccttgaaatgaaaattcgtcgtgcatatcgcaaccaggtaattggtgatagacatgattcagaataa

SEQ ID NO: 60617 - DNA, 432 bp, Acinetobacter baumannii
atgaagttaaaagatgcgtttgactatatacttgataaaaataatgctttaagtgatttcaatgcatacatgataggggtggcatatgaagataatgattctttcttattcgttaatctcaccatagatgatgaagaaatagaaaataatgcgctttactaccatgctcatgttacaagtggaaaaattcgaagttcagagggagaagaggatttttacagtgcagagagcattgaggacttgcttgatcaattgccgctgattgcttctgatttgagttatcatgtctataagctagatgaggatgtgttagggttgagtagtgaatatgcgttaaaagcactatttccaagattacccaactctgatgtatgtgatcttaaagagttcaagcaagaagcgattaagcttattaccatgttgaataagtaa

SEQ ID NO: 60618 - DNA, 255 bp, Acinetobacter baumannii
atgtttgtaggagtaacaggagctattggagcaaatgcaatcgcaaatttattaaatattttttctcaagcagcaggtacagtttccggactcgcggtatctttccaatttggcttcggtgcattagccagttattttacagtattactttatcgcccagactcttcactagccatgacactcattatggcaatttgtggatttataagtttcttaagtttgagaataaataagcagctcaaaaattatttatag

SEQ ID NO: 60619 - DNA, 129 bp, Acinetobacter baumannii
atgacgaagcatacagatgaaaccgcaacgaaaaaatactttttaaattttcctcagcttgaacaggatattgatgcggatgttgtcatcatttgtgatggtttttctcaggtattcatactgcactag

SEQ ID NO: 60620 - DNA, 207 bp, Acinetobacter baumannii
ttgtcgtgtacagagattgatttcattaataaccgctcatggatggtagaaaaacttttaaatttaaccgactttagtattctaccgggacttaatattttaagagaaagtcgtgagcttgtgcagcaactggtagatcagttcgaaataaaagggctacgtgttcaatcaggccgtctggaagttcaagttggaatcgcaaattaa

SEQ ID NO: 60621 - DNA, 1131 bp, Acinetobacter baumannii
atgaaccagaactttttacccacttttactattagtgacttacataactttttaggtgatacattaaatgcttgtattgcccagcggaaaaaagaacaacaattgttctgtgtgcgaggtgtattaataaatgtggaggaggagctacaaaaaactcgataccctttagtgtatggcctgattattcaggatagaacagggtcaattgaagttgagattccaaaaaatctgttatctggcttcaagaatggtagttgtgtagaaatacatggagtgccaacatttaatttttttaaagagcaatgcaccaaaaggttaaagggctatgctgtacaggctatagatgaagataaagacttgcaggcattccagtcgaagctttcaacattagatgttttaaaaaaacatagaccgaaaagccatacttttcccaatcagtttaatctttcaattgctgtgatttactcatcagcgagcaaagttgatatacaaaaagacttctatgattatctcaaagaatattgtgatgagttcgattttgatgagaagcctgttagcttgagcaacgttaatgccctatcacaagaaataagctcctgcgcagatcatgatatcgttgtgattattcgaggtgggggacgtaatgatgcatttgatatttttaatgatgaaaaggtattaaatgctttttctaatttgaaggggtatcgaattttaggcttgggtcataattcggatgtaacgcttttagattgcttggcagatcattccgcaattactccaacagcagcaggaatacacttaaaagaacagtttgatgaattgtttgctagaaatcatactttgcagcatcaaaagactcaaatattaaagctgcaaaatgatctcaaagcaaaaagtgatgatgtgattgcattgtctgccaatttaaagcaactgtctgaacgaaatgatatacagacattaatgaatgaaaataagagcttagttgagcttaatcaggaactcaaacaacaaataagcgatagacggaagtatgacgaagaagccaacaaaaaaagctccgttgtgatgtttattattgccgttgttgctgctattgcaggtgcggtattagcaagactaatgtga

SEQ ID NO: 60622 - DNA, 1296 bp, Acinetobacter baumannii
atgagtacggttgaaccttttgtaagcgaagcagaccaagctgaatggattgaagaaattaaagcaacagataagctttgggtgattggtgacgaaggtggtgatgtatatggtattgggccctatgtttctttttatgtttatcactcagaggaagaagtaccccaactgattaataagttcattgagatctttaatgagtttagccaaattaaaaatgaagtgtggactcattttatacatccaatcaaagatgtatttattaaagcggacaatgctgaagcattactacttggtttagaatcgatttgccaaagacaatatcagaaaacgggctctgtttactttacagcaactgtctcggatgatactgaaattagttcagccgtgtggtcatattcgatgacccttgctgaaagaccatatatgcgatacagccatttgaaaatgaactttaggtatgcttggtatattgcgagtcaggaaaataaagagaaatggcatcagtttgttgaacattgtatcgatacgttaaagcctcgtcatacttacagtggatttgaaattgctcaggctgcatccatgcatttggggagctatgagattaacagtcttgaaaagattgtgactcaggctttttatggtgtcgatattgatcatccagacttcaatggaagccatagtcatgaagatactgatggttatatcaatgaacgtaaattaggctcaggtatacgtacacctgtctggagctttttacttgatccatattggattgcaaaattagatagaactgctgaagagatcagagcttactttagccgctttaaagaagtcgaaatcaaggaaatcgaatatccagaaaatcaaataggcttatggattcgactcggagagctctccatgtaccctgttgaagatggtgtgcctgttttgcctgtttatgccaatgcattaattaagccgatacgttgtgatgagctgaaactggtcggttatgcgcaatgggatgatgatcctaatgagcatctaagttatgaagaagggattgcgtggatgcgtcgttttgatgaaggtagtagttggcctgaaggaaaacgaatcgataaggtgaatggattatctttagaggacgatacgctcaaagtgaaaggcggagagttatgtccacgaactggttattggcaaacaccagcgcaaccagattcacgtcaatattttaagcagggtgaaattcttccagcccttgccgagctggattggggagaagtgtattggtattgggatgaggaatag

SEQ ID NO: 60623 - DNA, 1065 bp, Acinetobacter baumannii
atgggtgagctatttgatgccgcaaaccaatggctagaccaggttgaacaaacacaagactatacattaccttatatagatgttgattcaaaaactgagcctgtacgtttgaatcttatgatgtctttttggttctatcatggagaaacattggggatcagagagtatatttttaataaggtactccagtatatgcagttaacaggtgtggagttccaacgagaagcttctgtcaataagcaaaaggagcgtaagtttcgtaaagaagggttccctgaaaattggattgaggatattagaaagaaagatacttggagttcattaagctactacttctcagatcagcctaaaatgagttttgctcctaaatatggtgttgatgtgctatgtagttcacaaatgggtgaagggcactggtactccacaatgaattttatatttcctttcgattttataaataacagtgatcaacgtttgcagtgtattgagttttttaaatcgatagtacgtgagactaaaatagaacaggcctattgtggttatcgtttgggacagtctctggactttacacaggctgtgccatggcaagtatttgatactgctgctagttatcgatttttgggtttggatattgaaaaaaatatgtcgcagagtagtgctgttattaatgatgaaccttctttagaaaaaggagtgcggtcaacagcatggctagtttatttaggtgaaacgtgggtaaataaattgggttcgatagatgtagagcaatatatcaatacaccactacaagtagaatcaatcaatgatggtatcttttttcaagcagatgagcttccacaattagcccgtataggattaccgcgccctcaaggttatcaagctttaaataatattctcaaaccaattagagagaaaatgttgccattgactcagtatgctgattctttagcagaatgggagcctgttttttttactccagagcaatgtgactggtggttagaacgttgggatagggaggatgatgttgacttattagatagatatcctgtgagaaatagtctttag

SEQ ID NO: 60624 - DNA, 957 bp, Acinetobacter baumannii
ttgcagtatgttgctatcgttatcgcatttttacttcgtgttttattaactgttctaaaaaagttattaaatcaagcagccaaagttacatctgagattgttaagaaacatcttatcccgtttctgaaagatacaggggctgtaattgcgcaggaaattattgaatttgtattctcctttgcgactgaagttgcaacagatattaagaaagaacaaactagttcaacagcacttcaaccgagtggttcaaccaaaccaactgctccttctcgaccttcaagtgttggagcttggtatgatgtatatactaaaaagcgaattctgtttaagtcggtaatttgcaaagtttgttgttttagcaatcaaattggtggggcgacagggaaggcatctaaaaaggaaactgtgactgaaaaagtaatcaacttatgggggggattacggcatctcagacaaaaagcagtacaagtgatttttgcacttgtagatattgtgatggagcataagtgcccaatcaaagcagaagttatttatgataaacgaactaaacagccattgatggtaaatggggcagagccacctcgacatcaatttatggaaacacctggttctggtcgttttggtgcggatgtgattgttgtagctaatatcatgaaagctccaacagttgataatatcttgcactgggttgagattaagtttttagatagtaatgatccccctgatcgagaacagatgcgagattatgcacaatttctaggtagtagtacaaagttggcgatgatcagagtctcagaagatattaaaaaaagtgattgtggctgtaaagcaaagacgctaccacaaaatacacaaaagcctagtagcacgcctcaagcaaagaggacaagtaagattaataaaatgcgtgaaatttgggatgtgattgtaacgaatgtcgaaaatatttggaaataa

SEQ ID NO: 60625 - DNA, 1014 bp, Acinetobacter baumannii
ttgcgtactgatcagtggggtgcagtacgtgcaggcgatggtttattactttccacgcataaacaagatcaagcacaaggtgaacacctcgatgcacaagttgctaaacagcagcttcagggtaatcaaagtaatgccaaggcactcagtgaagttgccaagaaccagcaaacagatgaaattgaatcattagaacagctaaaagactttgctgatcagattcaggacaagatcgcaaaatttgagaaagcactattgttactcaattcaccagcggggattggtctgagtaccagtgaagatattcatctttatgcggatggacagatcaatcagattacgggcgatagcattaacctgagtacgcaaaagaatctggttgcccatgtccagaacaggattagcctgtttgctgcgcagaatgggatcaagcaggtggctgcgaaaggtaaatttgaagtgcacgcccaatcggatggacttgacttgctcgccaaacaagggattcagatcatttcaaccgaagaccgtattgaaatcattagccctaaagaaattgtatttactggtggtccatctcagctcaagctgaatggttcagggatttttccgaccacaggtggcaagtttgaggtgaaggcggggcagcatttgtttatgggtggggcgaaggtaagtccagcattaccaatcctaccagtgatggtggatcaaccatattctgcggctataacatttttaaatgagttaaaacagcctatggtgaactataactataagttggttgcagaaaatggtgctgtattaacgggtgtaacggacacctctggtaagactctgccaattcaaacagacgtacgggaaaaagttgatttatttattgcggatattcccaatagtgacgaggcttcatcagaatctcctttactgaaaaaaagttatcaagagcttttctataaagaagatggcgaagatatatttgatgatgttgatgctgaaagtgaagaagaataa

SEQ ID NO: 60626 - DNA, 192 bp, Acinetobacter baumannii
ttgattacagataaaaaagttaaagtctatatttctagagatatgcatccttttgttatgaaatctttatttgtgtataacgctaaatctcagggatggactgatgaagaagttcaaaagttacttaaagagttagtacgtgagagtgcagagaatatatggttaactttacgagtttatagtaagaattga

SEQ ID NO: 60627 - DNA, 1029 bp, Acinetobacter baumannii
atgaaaaaattactcttgaacagtgttttgcttacagcaggcctcagtatctataccgaagcgaatgcagcttgtgcccctacatcaggttttacaacaaaagtgattagtatggctgttggccgtgtggtcgttagaccttcagatgaagttggaaaggttttacgtaaagcgacctttgcaattgatcccaacaactcaacaattaactgtagtccaaactcttctgggacggtgaaagcagacttgatccagagctaccctgtaagttcacaaggtagtaacatttatacaactaatattcctgggatcggcatccgtttatatcgtgaagcacagaataatgcaaacttttcaggatattacccatattcaagaaatattacaggtggttggagaggtactaattattcactcgattcaggttattttgttgtcgaaattgtgaaaacagcagagcaaactggttctggtgctctcgtgcctggtcaatacagtagttattatttaacaagccaccaatctcgccccattttaacaagtcatgtacttgcgaatgcaattaccattgcctcgtcatcttgcgaattacaagggaatatcaataaagtcgttcagcttccaacagtaatgaaatctggtttcagtggtattggttcaacgcagggtgaacaatcctttgatttaaacattttatgcaatggtggaataaatccaacaggctatgaagaaaagaacttaatcagtctagatttcgacttccctcaagatggtaacaatagcgaagtaatgaccaatacagcacccagttcagctagagccaatggtgtaggtgttcaattgttctggaaatatcaaagccagaataagcctattcgtaaaggagacaagttacaagtgggtacagtaaactcgaatcaaactgtacaatacaatattccattgtctgctcgttattatcaaactgcaactaacgtaactgcaggccgagtccaagcaatggcgactgtaactattcagtatgattaa

SEQ ID NO: 60628 - DNA, 2574 bp, Acinetobacter baumannii
atgtcaaagaaaaatgcaacagctaaattcttgaagcgtcgtatttgttattaccttacttctggggtagtcacaatcacgatgcctatagctgtttatgcagtagaacagacagcagaacaagcaccaccaatggaagcagagtttgactctgtcttcttgatcggtgatgcaaaaaaagtcgatatttctcgttttaaatacgggaacccagttttgcctggtgaatataacgttgacgtttatatcaatggcaactggtttggcaaaagaagaatgatgttccgttcaactgaacaaaataaaaatgcctttacctgtttcacttctagctcattacttgaatatggcgtaaaacaagacgttcttgtcaatcgtactgaaactgctgcgccgaatgcctgctacaaaatcgaagaatggatcgaaaacgcctattacgatttcgacacttcacgtttgcgtgtcgatatttcgattccacaaatcgccttacaaaaaaatgcacaaggctatgttgatccgagtatttgggatcgtggtgtcaatgctggatttttatcgtatagcggtagtgcctataaaacgtttaatcgcttaaatgaaaataaagaaaccaccaatgccttcatggcaattactgcgggcgccaatattgcaggttggcaacttcgccacaatggtcagtggcaatggcaagatggtgctcaaagtgaattagattcaacaactaaaaagaaatcaaactacgaatcgacaagcacctatttacaacgtgcttttcctcagtatcgaggggttgttaccttaggtgatagctttaccaatggtgagttatttgactcatttggttatcgtggtttggatttttctagcgatgaccgcatgctaccaaatagtatgctgggttacgcaccgcgtattcgtggtaatgccaaaaccaacgctaaagttgaggttcgccaacaaggtcagttaatttatcaaaccacggtagcgccgggtagttttgaaattaatgacctctaccctacgggttttggtggtgagcttgaagtttcgattattgaatcaaatggcgaaattcaaaaacttgctgttccttatgcttcggtagtacaaatgctacgtcctggactgagccgttactcagttacagctggtgaattccgtgaccgtgatattgatctaacgccttgggtaacacagggtaaatatcaacgtggtctgaataactatttgactggttatacaggctttcaattagcagaagactacagtgcgctattattaggtgcggcagttgcaacgcctattggcgcagtgtcttttgatattacccaatccaatactgattttgacaagcaagggtcgcaatcaggacaaagtttccgtctcagttatagcaaacttatttcgccgaccaataccaacttaaccttggcagcgtatcgctattcgacagagaattattataagttgcgtgatgccctgctcattcgtgaccttgaagataaaggtgtaaatacctttgccgtcggtaagcagcgtagtgaattccaaattacactaaaccaaggcttacctgagggttggggtaatatttacatggtgggttcttggaatgattactggaaccgtaacgaaaccagtcgtcaataccaagtcggttatagtaataactatcaaggtttaacctatggcctttctgcgactaatcgtcagatcgaatatggatcaaacaaccagactcgcgatactgaatatttgatgacgctctctttcccaattaatttcagaaagagttctgccaatattaatgcaactgcttctcaagacagtcgtactgtcggtatgagtggtatggtcggtgatcgtttcaactacggtgcatcggtatctcatcaagatagacagaatccaagcttcaacgttaacagccgttatcgtactaactttgcaactgtgggcggctcttatagcgttgccgattcatatcagcaagcgatgcttagtgtcagcggcagtattgttgcacatgataaaggcatcttgtttggtcctgaacaaggtcaaaccatggtactggtctatgcaccagatgctgccggtgccaaagttaacaataccgttgggctcagtgtaaataaatctggttatgctgtgatcccttatgtaacaccataccgtttaaatgacatcacacttgacccacaagaaatgtcgaccaatgttgaattggaagaaaccagccaacgtattgctccttttgctggcgcgattgctaaagttgatttctcaaccaagaaaggctatgccatttacatcaacaccaaaacagcagcgggtgaaagcttaccattcgcagcacaagtatttaatactaaagatgagtcagttggtattgttgcacaaggcagcatggtgtatttacgtacgcaagagccaaaaggtgatttgtatgtaaaatggggcgatgaaaccaatgaacagtgccacttcagttatgatgttacagcacaaatttctaaagaccagcaaagtatgatcatgtctgaggccgtatgcaaatga

SEQ ID NO: 60629 - DNA, 735 bp, Acinetobacter baumannii
atggcactgaaaggttacaattttttgcttggtttaatgatgtcatcggctttaatcgcaagtcaaacacatgcagaaattattttgcatggtactcgcgttatttatccatcagatgctcgtgaagtgactttgcaagtgagtaacaatggttctaaaccctctttggttcaggcatggattgacgaaggtgatgctaaaagtacacccgatcagtctaaagttccgtttatgattacgccccctatttcgcgtgttgatccaacgaagagccaatctcttcgtattactgcattacccaatgcagctcaattaaatcaaaaacaagaaacagttttttggctgaatgttttggatattccaccaagacccacagcgaacagtaaagatgctgttcctgataattttttacagcttgcgatccgttcacgtattaaatttttctatcgtccagcaagtattaaaactgatgccaatctcgctggtgaaaaattgcagtgggctaaaagcagtcaaacactgattgtaaaaaatccaacgccgtttcacgtcaccatgactgcggtgtaccagcaaaatgcaggaaaacctgttgacttgctgcctaaaggtttgatgttaccgcctttttcagaggacaagatccaattgaaaactggtagtactgaaaagctcagctacgtgaatatcaatgattacggtggtcgtatcgaacaccagatcaagcttcaataa

SEQ ID NO: 60630 - DNA, 534 bp, Acinetobacter baumannii
atgaaaaaacttgctttgatcgctgctctttcagttgtaggtattgctaacgctcaagctgctgatggcacgattacaattaatggcttagtaacagaccaaacttgtgaaatcgtgactccagctggtaaagactttaccgtaacacttccaacagtatctagacaaactcttgctaacgcaggtgatattgctggccgtactccattccaaatcaaactggataaatgttcaaaaggtaaagttgcaacttactttgaaccaggtgcgactgttgattttaatgatgggcgtttaaaaaaccaagaagctggtggggctgaaaatgtaaaagtccaattattaggtgataacaacagatttcttcctattaaagcagcgggtagcaacggagctcaagagaactctcaatgggttgacgttgtagaaggcggtactgctgaccttaattactatgctgaatactatgcaactggcgcttctactgctggtaaagttaacacaaaagtgcaatatactattatttatcaataa

SEQ ID NO: 60631 - DNA, 495 bp, Acinetobacter baumannii
atgaaaagaattttatttgtgggactatgtgttttaggaatacaaggatgcacgactccgtatcaaaaaatgggagcgtcagggggagttgaaagtacgattattgatgataatgtctttcaagtgaaagcatctgtcaatggttatactcagaagtcggtagcaacacagtatgcaattagaaaggctgctgaagtatcacaatcattaggatgtaattattattcagcaattaataatactagccagagttatgatcaaaacacatcaaaaacgaatacaggccttatgacggaaaatggtggtgtttactatactacaagtgctggaacacgctatcgaatagtaaaaccgtcaagtcgaaatacttatgtttgttttaatgagaagccagatacagtgttacccggattggtttttaatgttaaatatgttctaagcccaaaactacctaacggtagtgggaagtttcgagtaccgaatagttggcgttaa

SEQ ID NO: 60632 - DNA, 1113 bp, Acinetobacter baumannii
atgaactcgaatccccagattcaaaacactttgaacaatcaaccgctacaaccttatttacccaatttaaactcatccatccagcccgttgaggttggaacacgaagcaaacgtatacctagaaaaaataaagtacccactgcaaaacgtcttgccaacactaaacaattaaattaccaacaatggctagaagtcagaaaacagggtattggcagcagtgatgcagcaaccgcttgtggactaaatccctatatgtcgatgttggaactgtggatgatcaagacaggtcgaatgcaacaaaacatcgaggatgaaagtgcaggctatgcccctttgtactggggcaagcagcttgaacctttggtggcggaatactacagcatgtacaccaaccataaggtgcgtcgagttaatgcagtgttacaacaccctgatgaagacaaacattttatgctcgccaatttggattatgccgtggtcggtaatgaccaagttcagatattggagtgtaaaaccgtaggtgagtatggcgcaaagttatggcgagatggtgtgcctttatatgtgttgtgtcaggtacaacatcagttagccgtgacaggcaaacaagcagctcatatttgtgccttaatctgtggacatgaaaccaaaatctttaaagtgactcgcaatgaaaccgtgatccagcacattattaatgccgaacgccacttctggcaatgtgtggaattggatattccgccaagtgtcgatgcctcagaatccgcagccaaagccttgcagcaactctacccagaacaaattccgttactggttgaagacctgacccaaaatgaacaagcaaactatttatttaaccaattgttagaggagcgacataaggttgaacagcaccagcagtatttcgatgagctgaaacatcaactacaaatgatcatgaaagaggctgaacgagctgtgtttactggtggctcagtgacatggaagaaagcacaggattcgattagtctgaacagtaaagctcttcttaaacagtaccctgaatatctacagcaattcccacaaactaaagttggaacacgtagatttcagatttatcccaatggtagataa

SEQ ID NO: 60633 - DNA, 1158 bp, Acinetobacter baumannii
atgcatcttaaggaattctcattttggcctgctgccccagcaggcctttttttatgcacaaaatctgaatttgaaaagattcaagatcaatccttagaaggaaaacttatggcacatttaattgaaacaatggcatttgtgggacagactccttggcatggcttaggaaatcaattgtcgcagaaccagcccatagaagtgtgggcacagcaagcaggcatggactggcgtattgaatcttctgatgtcagttatatggcacagaatgaacgtggacaaagcatcatcctgccatttgaagaacaacgggttttatatcgctcagatacccatgcaccgctatcggtagtgagtcaacgctttcaggaagtacagccgatggaaatcctgcatttctacaaagacctaactgaacaatcaggctttgaactggaaaccgcaggggtactcaagggtggcaaaaagttctgggcattggctaaaactgggcaaacttcagctttaaaaggcaaagatgtcagcaatggttatattttattggcaaccgcatgtgatggaactctggcaactacagcacagtttacctctatccgtgtggtgtgtaacaacactttagctattgccttgaaaggacaacaaggcaatgttggtgtggtcaaagttccacatagtaccaagttcgatgcagagaaagtcaaacagcaactgggtatttctgtacgtgcatgggatgaacacatgtatgaaatgaaacaactcagtcagcgtaaagtcactcaacaggaagccgcagcctactttgatgcagtgtttaacaataccaatctcagtatggctgaacaagatgaaagcattattcagttttatcgaaatgcagctatgccgaatcaaaccaactcatccaaagcagataataaaactgaacccaatggaagggccatgtctaaagtcatgactatgtttaacggacatgggcgaggggctgaacttagttctgctaaggataccgcttatggattgctctgctcgatgacggagtttgtcgatcacgaacgaagagcaatgagcacagatcaccgtttggatgcagcttggtttggcgcaggtgcagccattaaacagcgagcgttagaacaagcccttagactcgttgcttaa

SEQ ID NO: 60634 - DNA, 1119 bp, Acinetobacter baumannii
atgtttaagcctttactgctcagttgttgtatagtttctattttggttctaagtggttgttctaagaaagaggctcctgttccagatttggaattgaaaaccgaaggtacaacggaaatagcaactcctataaagcaagtagcagtaaaccagcatgtgattgtttctaaaaatgatgtctctgcattaccgttgattgatggtaatgtttacagtaatttcgttgactcgggctatagctatgcaaaccctgaagagttttcattagagtctgtggattcatattctggtcaacatactcaatcttttgagaagatattagcattcgctagacaaaagctaaatctgagagatgatcagattattgtagctggtggtgatgcagggcctgttaatgactccgatactgtactctttgatttgacaaatcaggagtattataaatattcgaataactttgctatcaattatatacggcttttaaaaacagttcctgtagatgctaaaggtgagtttgaaactacagagcaatatcaagagcgtattaaagtattacaagaaagtccaaaaaaccaccaagtcgattttgatttgagtttattacaaacagctttaaacaaaactttagcacgtttgtatgtaaaaaatggagatgctaaacctgagtatcaatatgatgctgatcaggagttactcacattagccttgaaggagaaggaatctacgagagtagtcgaatcattattaaagataaaaattccttcagacttagcgcaagagatcgtaacaaatagcaattggcaaaggggctatgtcttagatttcaaagacaatcgcttatctgtatctggggtgtttttctataagtttaactttactgttagcgatagagaccaagtctatgaaggctctttagattcaacgtcggtttataaactactagacttcaaacaaaaatcctacgatcaaatggaccatgatgtagatccagagaagttaagttttcaagatatttcaacaagctctgccaatacatttatatttggtttaaagaattatttttctcctgagagccgtttgaaaaaactagcaacacagaatacttcggctgaagattaa

SEQ ID NO: 60635 - DNA, 762 bp, Acinetobacter baumannii
atgaatgtacatgttttaggaatcaccatgaataaaaaagttatcctagtcctacttgctggttgcttaatgcaagcttgcactaaaaacgaaactacagaaaaagtatcatcagatagtgctcaaacagaagcagttaaagctaatacatctgactcacaacagttcatcgaccaaggcaaaaaagatattgcaacctatggtaaagagaccttgcaataccttcttgatcaaaaataccctgatcgatatacagccttttcagtcgataatgttagattcctacgtcaacaatctgaagagctttttatttatacatggaatatccgctttttagataatcaatcggatgatgtttatggttgtgatagtcaacaactttcatggagcaagcgaaccactgatattgaatctacgttaaacgaagagtgttttaatatcattgagcgtggcaatacccctacaagtcaaaatgaaacggtttccacaactcctgcaacttctcctatcaaaattacagtagagcaaaatccacattactcatttatagcaatgattaaaattcagtcacttgttgatgatgtatctatatcgaatatcacagtcaatcgtggcaactgtcctttattgaaaaaaataagtaatccgagacggcttggctttggacaaacaacatccgtggatacaaacaactgtggtaaagataaaattattgaagtggttgtatctacagatcagggcgattggaagtttggttcataa

SEQ ID NO: 60636 - DNA, 741 bp, Acinetobacter baumannii
atgcaaaaatctacttatgccatttcacttgctttactgttagctggctgtaatgaagtcaactatgccaaattaacttatcaagcgcagtcttgtaccgcagataattctgtcagttgtaatgatatccgtgttcgacgagctatagttgctacggaaatgggatatcaacaaatgcttgatgaaaaaaataaatttgtcgctgaactgggacaaaaaggatatgaccaattacttagcctgacgaaaaaaaaggtagagcatctcaagaaacaacgtccgagcctttatttacgctggtttcagggagattctagataccataaggatgtagattttggtgactacattgatgctgaaattgaaaagctcaccaatacaaagtatacaacgtcaccatcatctacaccaataaatctaattcaggatggtgaacccattcatgtagcatcggaacaaaacctgacagatcatttttctgagaagtatggacatagttacactttcaaactgatagaaccagttttgacaggagattatgatttacttttgaatacccaaacaggccctgtcaagtttgacttacaatatacatccgtcgcgcagaactatatttttgagcacttaaaacaaggtgactgtattcgttttgatgctaaagatactcctgtgatgaatgctgaacatcagttgtatttcgagactttcattactgatccccaaattgtgaaatgcaattag

SEQ ID NO: 60637 - DNA, 273 bp, Acinetobacter baumannii
atgcaaatcaattgtccatattgccattcagagcatgtgatccgtgttgtgcaaaatagcagcccacagggatgcaatcagagtctggcatcgtcagcatcatttgccacaattggtgcagcattatcaaaaacattgcctgtgtcgcctctcatcggggggattgcaggagtcgtagtcggtggtttgttaggttcagtatttggttctgcttcaactcaaaatgtacaatcttgctttcaatgtcagtattgtggacattctttttattga

SEQ ID NO: 60638 - DNA, 396 bp, Acinetobacter baumannii
atgtcgaaatggaacgaatcaaaatgtggttttgataagctaaagaagtgtattaaagagtttgaagaaactttagaagagtttgaaaataatttggaagagcagctaagcctagtgcgtcaacgtccagcggaatttacagatgatctgctaggtttggtgaatttgatggataaatctaatccccaaaatggtgatgccgatatattagataggaagtgggtggtaaaccagttgttagatgcttttgatgagcggcttaactttatagcggatttgagtgagaaggcgacaaagtctcctcgtttaatattgatcgaaaagttaggttacatgaatttaatcttgttgaagattaaagatttaaatcctaattggaaagaggaactgctttga

SEQ ID NO: 60639 - DNA, 879 bp, Acinetobacter baumannii
atgaacgccatccttaaccaaaatccaattaacgaagcatcactattaatagaaatcgagaagtttgttctatcaggtatgaattcaacacaacaaccaagatcattctatgaaaacttcacacaccatctcttaaacttccaccaagtctataaccctgactttagctacacatgcttaatcgaactcttttgtagtctgttacatgactatgatctgaaatatgaaacatcaagttccctttacaatcatttaaagcaaacttcatttagagactggcaaaggtatttcaatagagctagagctgaccacatgaatgaaatacggcagcatcgttataacgaaagattaaatgccaataagctagaggatcggttatgtgagttgcagagggagtattctgcattgttagtggtgcgtgtggatttagcctatacagtgaatcctgatatcgaacaggttgatcatgatttagagaaactgagaaaaagaatcaatcgttccatttatggcgatgacatattgctgttggtatgggcattagagcagggggagaagaaaggctatcattgccatgtggctttagttttaaatgagcgtaagcgcacaagtgcatggagtatagccaaagccgtaggggagctctgggaagatactacaggtggtaaaggaagctattttaattgccatgatcgtagatacctaaagcaatatgaagagcagggtatcattggcattggcgtgatctttagcaaggtaatgtaccaagcagataaaatgcgttcaacgctatcttatttggcacggcctgaaaaggaacaatatctcagagtaaagacctctaggaggatgcgtacctttggtatgtcacagcgttaa

SEQ ID NO: 60640 - DNA, 228 bp, Acinetobacter baumannii
atgaatacatttgttggtgaaacctttaccatgcatcagatcataaatctaaagcaagttgtgttctttacaggtattagccgcgccactatttacaagcttataaacgctaaaatgaagtgttatgaccctacgtttccaaagccagtacatttaaccactggtcgagttggttggtccgctttggaagtacatcagtggattgagagcaagttgaatagccgttga

SEQ ID NO: 60641 - DNA, 2730 bp, Acinetobacter baumannii
ttgcatactgacaggccaaaacacgctgacgatcaacctgtgagttacgattcaggtgtaaatttgattagcaacgaagacctttttcgtctattgaaaaaaagatacgaccctagatggacaagctataaagatcgtggcaaagaggtttctgagggcatcttttacgaaacaatatgtctattggaaaatctagaacgtcagcttggtttggtttataacagagcctatcctacgcgggatgaatttttgattgcgctagaacatggtgatcagcaaacactaaatcaaattataaagttttatgaagagttacgtgctgaacgtcacctaattgaatatggacagtcaacgtacttttttagtaagaatgtacaagcctatatcacttacctgaagcgttaccctgattcccctttttggaaaaagggagaagggtggcaagttgaaacatttcatcatgaaactatttttgatttcttcgagacgtatttggggggtgtacatgtagggcagactgagtcagtcacttcgactgtggagtctgggatagatgaaataagccaacaacgagaacttgctgaatcggaaaatattaaaaagactggtctcgtagcagtagcacctcttaccgaagggctaactctggatgtctataagcaatttgatgagggggtaagacaatttaatgagttactagcattacataagtctttacgtgtgatgtgtcttgagatcactttgacaccacaagaaattacaactgggataaagtggcgtgctttggataggaagcgaatcgaactactaggttgttttgaacaattgggggaaaggtatggattgcttactgagtattcccgtatggagataggaaccaattcaagccttgttttgcagtgggtactattgtttaaaggccatgatcctttggatataggaagggtgcgagctagtatccaacaagatttagaatcacagatggctggtgattctcatttgagaactcagtcatttaaagttggtgtacaagatttgggatgtttgtttcattcattggatactaaatacaaagatgtcattaaagcaagttctaaatcagagagacagttatttgaatactgggtacttggctacttgtatcgtgttgattctatacttaaacctgatctagatctgttagccggtagtctgtatgtggattggcatcgtgaacattctgttttacttaggggtgatgatagatctcagagtatcagtcatcggcgacatcagatcaaaacggatattaaaaggatttatgattttattgatttggacttcagtgctgaaagtaagcagatatggaaaaacaataacttaccgaaacaggccaaagatgatttaaagttgttagcattactttattcacaatacaaaaacaaattacctataggggggaccgaggatgagagctgtgtacagttattagtgtctatcgagcatttcatgcggttgatccagcacaacccagttcatgcattgattgaggaatacttaccacaaagtcagattgaaaaatcacccttgaaatgtttatcacagcaagcaaagcagtatttgcatattggacagcagttaaagcaaattggtcttagcttaaaagagaaagagcaactagcaaattccacttttgttggatggcgggtaagagagtttctacacctgttcattgagaatccatggaactttcagaaaaatctatctggggtagctagccttcagtctagcctagagcgttataaagatgtagaacgctatcgtgttggtgatttagaaggagaaccattcttatttgatattgaaaaacaggaagccatcagtgttaaacgcaatcaagctaaagcaaaggactatttaaataaagcaatcatgcaagatgtgtttgcttttcggttggtgttttcctatcaatcgaataaagcatttaccacagaggacaacattactgcatttaatgcgttgctcacggactttttaaaaaatctgaagcgtaccagaaaaataagtggtgagagtctagttgcttatgttggtacacgcatatttatagaaaaggcgttgaatgctgatattacattgatttttagtgcccagaccttgtccgattatgatgaacagaaaaatgaagaatacattgagcaatcaagagcaaaagtaatcgagtactggcggaagtacctttccataaaagaattgaagatcgctaaaagtaaaaatttatcaacagtacaacatttatatcatgaagtattcaaagatgagaatctcaaagttagtcaaagggttatgatctcatcattacctgaaccaccaggtttgatacacatcaagcatcacgacagtaaaacattacgatctttcaaatctgagcttgccgatttttattcgggacatggactattgtgcaaatggaaatcagacatgctaaaaaatcttaccccgagtgacaaaggccagagtagcaaaagcatggatcagtttttgaaagggcatgtgacttctacaaaaagtaagcctttaaaacctaaacaggcaactactttagctcagtcaaagattgaagaagctacgagtattgatgaagaacaggttgataacaaggaacaagttgtttccatggaagaattgagatctaaattcactcaacaggtttttgatacgttagagaacactaagtatgacatctag

SEQ ID NO: 60642 - DNA, 819 bp, Acinetobacter baumannii
atgacagtggaaactgaagctcaagacatcgtagatccagctactacggaaaataacagcgcagcaagtcaagagtcagaagaactaaagcagcaaacgcaagaacctgaagttgaacagactgaagaggaaaaagcgaaggctgctgaagaagctgaagagaagaagcgtagtcgagcaaaggaacgtattgaacgtttagctcgtgagaatgcagaacttcgtaaatttaaagaagaagctgaggctaaggctaaacagccagttcagtcagatgaagcaccaaaaattgaggactttgaagattactcagattatctaaaagcccaacaagactggtacatcaaacaagctgaagaacgtgttttggcccgcttaaacaaagacaaagcagaacaaacgcaagtccaacgacaagcagagtttcaagctgcaattgttgaagctgccacagaacatcccgactttgatcaagtcatccaagaaggtatttcacgtcagctacctatgccaattaccttggacgaagttgctgatgagtttggatatgacgccaaaacacagacacgtcttctttatgaattagcatgtgatgaaacctttcatgagcaagtttcagcagcaacaaagttaaaagctgcactactgcttaaagagcgtgttgattctttctctaaaacagcaccaccgccaacaagtaaagctcccgcaccaattaagccagttacagccaatgcgccagcatctcgtgaccctgaaaagatgtcgacagatgagtggatgaaacatcgtaacgaacaacttaaaaatcgtaaataa

SEQ ID NO: 60643 - DNA, 606 bp, Acinetobacter baumannii
atgtcaaaagaatatccaaagatgctctataagggcgatttagttaatttcgaatatgctacggctcattctgttgagcacgaagatgaactgaaagaaagcggttggattgaacatcatgagctaagtttgccggaagaaagtccagatattaaaaatgcagctgatgaaaaagaagaagttgatttaagtgcttttattccagttgaacaatttgatgctgtagccaaaaaacttattgaaactgaagaacagttgaatgctaagagcattgaacttgaacaagcacaaaggctaaacaaaacactcgaagctcaacatgcagaaaaagttgcaaatctagaaggtgaaatcactagcttgaaagatgagttgacagcattgccagcagctacaggtattccacaagaagtttatgatgcagtttatcaagaacgggaacaacttattaaagaaaatgccactctaaaatattcagcgatgggtgctaatgatttgaaagcaattttagatcagaagggcattaaatatggctctcgtgatgaaaaagatgctcttgtgaagttagttctcgacagtgagtatggcaatggtgattcagagtga

SEQ ID NO: 60644 - DNA, 576 bp, Acinetobacter baumannii
atgagaaacttccactttttgccacctgtagatactactagtttaatgctgaacattaagcgccatccagaactttggaaagaagacacttttctacgtgattatcctcagggtccatttggggagatagaaagcattatgcttcgattccctgaaaaacgtgtatttgaacaagaagaagagcttgaaaagtatcgtcgtggagaaagtcattttgatcaacatgaaagtattgattacccagctttttcagtattgatagaagctcgtgcaattgtttttggattaatggcttttgtgcagggtgaaagacttgggcgtgtgatgatcaacaaaatcgcacccggtgggcgcatatatccccatgaagatacaccagaacacacagactattacaccagatttcatgtggtattgcagtctgcgcctggatgttatttgagagcaggtgatgagcagttagaaatgaagacaggggatgtattctggttcaacaataaactagaacatgaagttgtcaacaattctgcacatgaccgtatctcaatggtaattgatataaaggtgagaaaatga

SEQ ID NO: 60645 - DNA, 705 bp, Acinetobacter baumannii
atggtagcagcagccatggttggagccgcagcaattggtgcagcaggaagtgcatatgcgggcaaacaatctaataaagcagcaaaaggtcaagcagcagccgcagaaaatgcaagccaaatgcagtgggatatgtatgatcaaactcgtaaagatttagatccctacaataaggcagggcaagatgctttaaagcaactccaaggacaaatgaatgggggtttttttgataaagtttatcaaagtaccccatttaatttcgaagaatcgccaagttatcagtttagaaagcaacaaggcttggacggcattcaaggtcaagctgctgcacaaggtgggttgctaagtggagcaactttaaaggcccttaataattacaatagtgatttggcttctcaagaataccagcaggctttcaataactggcaatctcaggataacaataactacagtcgttttgtcactgatcagaataataggtttaatcgcttatccacattgattggtatggggcaaaacgctgcagcacaagttggcaataatggtatgcaaacagcacaatctgttgccaataatacaatgtcaggtgcaaatgctattgctgcagggcaagtggctaatgctaataattgggcaaatactgctaataatttaggaagcttggcgactagttatgcaatgatgaagaatagcggagttatataa

SEQ ID NO: 60646 - DNA, 1386 bp, Acinetobacter baumannii
atggctacactggactatacattgccccttcaagttaagtcaccagacatgatgggtatattaaatcaaggctcgcaattagctcagtattatacgcaaaacaaaactgaaggtgagcttaatcggctatatcaagaaagtggtggtgacttaaataaaatgctagaacttggacaacaatccaagttggcaaggtttgttgttccacagattcaagcgcaacaagctgcacggattaaaaaccagctagatcaacaaaagtctttagctgatattggtaaaactatcagtgaagctacaaagaataatgcccaagcaggtggtttcacgttagataactctcaaaaaaagtttggggctattcaaggagcattccagcaaggagcattaaatggagataaaggacaagttttattggcactagatgctatgaaaagaacaggaatgatttcacctgaggattacgatcacaacgccagcattttaagtgtgatgaaacctgaagaagttaagcagtatggattgaatagtggcttgttgaataaagagcttgctccatatcttttccaaactaagaacaatgaagcagataatcaaacagctattacaactaatcaaaatactgtaaatgctactcttactggtcaaaaagttgcggctgaaactgctaataaggatcgcgcccttaaggaaaaacaattccaacaagattttaattttaaatcacagcaagattattttgagaaaaataaacctgttagttttggagttgacatcaatgggcgaaaatatgcaattttatcaaatgggaactcaaagtacataaaagatgaaaagggcaattatatttttgaaaaccaaaagggtggtggaaaacctcaaataagtgatcaagctttaaagtcagttaatgagatcaatactaatctttcaacagctacgcaaaatgctcaaaagattaatagtctgatttctgatgttcagagtggcaaactgaatttgagtgctgccaatcagcttggagctaaaacaaagaaccttgttgggctatctgatgaaaatagccgtggtgttgaaaacttccaaactgctcttaaccaagctgttaatgatgttttgatgatggcgaaaggtactcagacagaaggtgatgctcaacgtgctgcccaagtcattgctgctaatccaccgcgagataatgctgcagctttacaagtgcttcaacgattagcagcagttcagcaaaatactatttctgcccttaatcaaaatatgaatagtatttatgacaactatggcgtttctagaccacaacctaaaacaccacaggttgtgcaatcaaatgcagataaagccaagttgaataacattctgtttggtcgttaa

SEQ ID NO: 60647 - DNA, 252 bp, Acinetobacter baumannii
atgctaaatatatttctaatatttttgattctacttattgggcactatacaaagaagtgcagagatgagataaaaagtttataccgtcaaattgaacttaatgatgagcggattcgtgatcttatgttgcgtaatatttccaaattagaaaatactgataaaggtcttaaagaaagatgctcaaggcttcatgaaagggttcacagcttggaacaactaaataaaaaagacttactggacgatttcgattaa

SEQ ID NO: 60648 - DNA, 2052 bp, Acinetobacter baumannii
atggcatcactactttctgccgtacgaacccgcttttttgacaaaagcaataaacctcttgctggtggaaaggtatatacctatgaagccaaatcaactaaccctaaagttacatggtcagatgaagctctaacagtccaaaatacaaaccccgttttacttgataatgaaggaacagcattaattttcttttctggtaaataccggtttcgtattgaagataaatatggtgttttgattgaagataacccatctgtgactagtcctgttggaatagatggggttacttcagatattgttaaagatggaaatgaagatcaaaaaagtattaatgataaaaacattcaagaagttagtaatgttgatatgctgagggctttggcagttcgaaaggacgggcaactagttcgtacaaactgtcatacaaaagaaggttttggcggcggtatctatcgttttgaatcactttcaagcaaagttgacaataatggtacatacattgcctcaactgccgcagctggcacgtgggtattacaagacaatttgaagtttgagcatttcggtgtaactgatgatgatattgatcagtcaacaagagtgcaaaaatgcatagattatgcattggaaaatacaatcacatgctatggttttgagaaagcctttaaatgtcgcattgataatacgctagtatttagtgcagtcccaaatcctactgactgggggatgccaacagatcgcacagaagtgacgatgaatggtactagttttgtgtcttcagtaaataatttaacatatatccgaattttacgtgatcgtgttgaatttaaagatactttggctgtggatgggaaaggctcaactggtcagattggtatagcattaggttatgaaaaaacagatgacccgatggacacatctttacgtcgatcagcatgtttcatggttttaaatgggtatttccctgcaaatattgacattggtattaaatcgaatatcccgcgttcaattaacggctctgcttacggtatgtataaccacaaagtattcaattttgatgctcgtcatgtgaatattgggtggtacgcagataaaggatttgctgatgatccggttacaaacaaattaacgcgtacacgtgtatttggatttggtcacattgatggctcatgctccttctatatgttggcatgtgaatcttttaaatgctatggatacagtggcgaacacttaaaacgtgacgatgctcgtttaccagatggcaaagcagttggctggtattctccagaaaaatcaaatccaattgacacttatcaaaactcttataactatatcagcggtttcattgaacaatcatatcgagaatatgttaaccaaagtccttttttcacgtgggatgttcagagttggtttacggaaacttcaattgatgtagctaagcaaggcgttgccgaactttcgctttcaaaaatgggaattggctcaaatggtacattcattgaaaataaatctgttaaagattttcactttaaaaatggcgggtttagaaccgcagttgtgacaattacatcaaattcagcagcaaacgcatcattacccgatttttacaaaaataaggacttctacgggaatgtgcaatggttgccgatggcaaacgattttgaagatgccggtttacttatattgactgattttttctattcagatggtggatttagacagtttgtttcacagtacaggaatggcgcatggtcaccttggggggatttatcttacaagtatggtattggtaataacgatatctctatcataaataaatctttagatacttttaagtttgtcagtggtggtgttcgttttgctcaagtgacaattactggcgaagatgaagtttcgggtcgttcatgtccgaacggcagttatttttacggagctattcaatggatacagacaaatgaaaccgaaggtaagcagatcgcttatagtacagcacccggttcgaatagtagtcgatcatatgtgaatggcgcatggacgaactgggttgatctttaa

SEQ ID NO: 60649 - DNA, 294 bp, Acinetobacter baumannii
atgcaagagcatgaaaagatggcgcttcaattaatcttaatgggagtagtaattgctatggcaaaagtactcattagcactgaaaaattaacattgcgagttgtgttgggtcgtgcaattttaaatggatttacaacacttggagctggtggcgctcttatttggatttcagatctaaatatgcttgctattctgggccttggtgcattcttagggacattaggcagtcaatttgttgaggcacaagctgaaaagtttgtaaaagataaggtaggcactaatgaagataagtaa

SEQ ID NO: 60650 - DNA, 444 bp, Acinetobacter baumannii
atgaagataagtaattctggaatcaacctaatcaaaagctttgaaggtttacgtctcaaggcatacgatgatggtgttggggtttggacaattggctttggcactatcaaataccctaatggtgtccgagtaaaagcaggtgatagctgtacatcccaacaagctgaagactatttgcgtaatgatttatcagcatttgaaagtgccgtgaatcgtctagtaaaagctaagatcactcaaaaccaatttgatgctttagtttcatttacctataaccttggtgaaaccaatctaagtaaatcaactttacttaaaaaattgaatgctggcgattaccaaggcgctgctgaccaattccttgtctggaacaaagcaggcggtaaagttatgaaaggtctagttcgtcgccgagaagcagagcgagcactctttttaaagaagtaa

SEQ ID NO: 60651 - DNA, 855 bp, Acinetobacter baumannii
atgcaagaaatattttctctacaggagattatagcagtttctgaaaacaaactaagtgctaacaaaattaagtaccattgtagacgtgatgaattacatccttgtatatattttgaaggaaatattgtttgtattgaggaagagcgttttcaacccagtatagaccccaaaagtcctgttgctcatattgaacacgtaagttggtcgatgcaatttaaaggctatgttcatgcttcaaattttataaattatattgaccatccagacccaagagcaggcgatgttttttttaatattgataaaatagttgagtttcttactcagcctacaacttatgcacccttgctaccgctttcgagtgatcaatatcttagagcgttcccaagaatgatggatgatgatatacaagaaaagaaatggctaaatgagagtttcagttttgaaggaaatccattcttagcaaatgatattgtttttacattaaaagaattaaagaccgtcttccctacaatttttaaatgtaatgaagattctcaattagagttaacacaaactgatgaaattaatgatttaacaaaacagttgcatcaagcacaagagcgaattaaagagctagaacagatcaatataagtgaatccgagtttaaaaaaatttctacggcgaactctagattattaacccttattggcgcaatgctatgtgaaagcaataaacgagggttaagaagtatcaatcaagctggaatagttagtgaaatagcaaatatgcagatacctaatttaagtaaaagagtaatagatgaattttttagcgaggcaaataagaaatttaaaccatataaaacaatttcttaa

SEQ ID NO: 60652 - DNA, 1278 bp, Acinetobacter baumannii
atggctaaagaatcgaataaattagatgctaaaacagttaaaaatctaactgcagaccctaatcaagataaaaaatattctgatggtggtggtttatatttactggtaaagaggaatggatctaaatattggcgaatgaactatcgtcacccaatcagtaaaaaacaaaatactttagctttgggcacatttgagcagctcagtctccagcaagctagactcaagagagaatatgccaaacagttactattacaaggcatcgatcctgctacagaaagaaatcagaataggaatgaaaaaaaggcgatttttgaaaatacctttaataaattttgtaaggaatggctaagaaacagagaacttgaaaataaggtggatagcgaaactattcgtaaactgaataaagatattttgccatttattggtgatatgccagtggtaaacatgactgttgaacagttggaacgtgatgttactgataaagtagttgaacgcggtgcattggaatcagcacggcgtattaaatccatcatggcaatggttttaaaattagcggtgaagaagcgaattatcacttataatccagcatatgatattactctgccccaaccggttaaaggcaaccataatgccgtcaccgatgaaaaagagctagctgagttattacgcaagatgtggcgattcacaaaagataatccacgaaaccggctcacaacagagttggctatgaagttgtcagtttatattttccagcgccccaatgaaatacgcggtttattgtgggaatcggtagactttgaaaggcgacagctttcattttttgccagtaaaacccaccaagaacatatagttccactttccagacaaactttcgatattttaaaagagttacaggacctacgtacgaattcagcctatgtattccctagtgtaaaaacaggtcgcgaatgcatgagtgaggataccattcgacaaggattaatccgtatcggttacaaaggcagacatacagcgcatggcttcagagctacagcaagaaccatccttgatgaggaactggaatatagaaccgatattattgagcatcagttagcgcataccgtaaaggatccaaatggcactgcatataaccgcaccgcctttttacgccgtagacgcgaacttatgcagttatgggctgactatttagacaccttacgacaaggaggtgatgtttctcaattcaaaccaaaaagtgatgagagcaatatcattttatttaacaaaactaccgcttaa

SEQ ID NO: 60653 - DNA, 396 bp, Acinetobacter baumannii
atgtcacagcaaactgttcttcaaattatcaaagaattgcttgaagaggggatgagaacagaccctcaaaagacaactcagctactgctgcaacttcttaaggatttagccattactcaaccacagcaagatgaacacgacttatcggtttttgaacaataccgtcatgttctatatcagattgttaaagagttagagcatattaaatcatttattgcatcaaatgggctaggtggtgttaccactaaagaactttactattatttaaaccaaagtagcgaactcagttctgcccgtataagagaacggttagagatgttgatttttaataagagcattaaacaaggaaagaagagaatgggggcgtatgtaagtaatgtctattacatcaagtga

SEQ ID NO: 60654 - DNA, 837 bp, Acinetobacter baumannii
atgcaatctttatcaaaccatcaaattcaagatcatctattacgttctggttttactaaaatcccccccaaagaccccaataactacaaagtcattggattcaaaaagccacacttacatcatccaatctatgtaaaagcaaccaacaatttcccgttggtgatacatgacacatatgatgctatcagacctaaattgctgaaaattgatggagtacacgtcgactcaggtaaagagtattacaactcgaatatgaaggaatttaacaagaagataaatcctaatagctcatcaaaaaacccgactccaactaaatttggtttggattttggatttgcaaacaccaatgtacttcaaaaatttttagagcatcttgccccgattgttaaagctaacccaatggccaaggttagccctgaagatgtagatgactcctttgatgagtcaacaccacctacagaaaaggacgcaatcatcaaagctagaattggacaaggagcttacaggaaagccttactagattattggaatggttgtgcagtaactggttgtacaagaaaggcattactcatttcttcacatattatcccatggaacaaggataaagaggcacgtcttgatccattcaatggtttacttcttacacctacactagaccgagcttttgacaatggtttgatcagcttcaaagatgatggcttgatcctattgagctcagcactgagtaagactgatctagagctattacatttggatgcaactcttcgtttacgaaaagttgatgttaagcatctaccttacttagcttggcacagggctaacttattcaaatcttaa

SEQ ID NO: 60655 - DNA, 603 bp, Acinetobacter baumannii
atgaatacacgaatctatcttcgagcctctaccaaagatcaagatgcacaaagggcattggctgaactaaatactctcaacgactcgttagaattggggaaaccaattatctatgttgagcattacactggtaccaagctcgaacgaccagagttgaataagttgctgcaggaagcaaaccaagcagatgtattacttgttgaaagtgtggatcggttatcaagactaacccaacacgatttcaatgatctcaagagaagaatccaagagaaagaactccgattaattgttgcggatcttccgaccactcatcatctaatccaagccaatgacagtatcactagctctatcctggagctgatcaacaacatgctgattgacttattggctacgatggctcgcttggataacgagaagcgcatagagcgcattaagcaaggccttgagcgttcaggctacaaaccaacaggaaagaagccaaaccagaccaaacataagcgcatcaaagagctattagctgctgggaacatgactaaaaatgagattgctaaggctgtaggctgtggagttgctacggtctatcgtgtatctaagtctaattga

SEQ ID NO: 60656 - DNA, 432 bp, Acinetobacter baumannii
atggattgtgatgcaacttggactgaacctgacgaatctcgtttacaacgagaggatgaagttcgtatgcaggaactcagacgtctatttgatttgatggacgaacaagagttgaaacagcaggctctgggagtaaagttagatagagctctgagaatactctcatgggatgactttgatgatattgaagtatgtcctgggttagctgagctaaagggccagcaacctacagatactattgagcaacatcgtaaatggttaaaggcatttcgttcagcgatgccttaccttgcgaagatgctgctagttactgatgcctccttgcttatcagattgagatccacattggaccggtatgctgaaattagctacccgaacctactcgtaatgattcaacccaaactccaaacactaaattctataaaggcctaa

SEQ ID NO: 60657 - DNA, 885 bp, Acinetobacter baumannii
atgcatattgtctatgtctctgatggtaaagcagggcatcgttcacaggctttaggcttgtttcaggcaatgcaaagacagcaggcaaatgcaacttttgaagaagtttctattaatgacttgcctattatttccttaattaaagcgcttttctcttcaaaaacttctctacttcagcaagcacccgatttcatatttggagtggggagccacactcactttcgtgtctggttgctgggtaaagtttttaaaaaggcgaacactgttattttaatgaagccaaatttacctattgcttggtttgactatgctgtgattccagagcatgacggtattctttcaaatgagcgcgttattgttacgcgtggagcattgaatccaattcgtaatgaaaaccgacatcaggcaggcagaattttaattgcattgggcggttcatctaaacgacatcagtggaaccatgaaaaagtattattaagtgtccaaaaaattgttgagtgtaattcaaattctgagattatcctgaccacctcacgtcggactcctgtaggtttcactgatattttaaaacaacaaagctttgctaagcgtttgcagatatgtccggttgagcaaactcctcaaggctggatttttgaggaaatgcaaaaggcagaagctgtgtgggtaaccgaagatagtgtttctatgatttatgaggcacttactgcaggttgccgagtcggtgtgattgcaatggacagactcaaacaagatcgtattaccaattcggttgatatactgctagagaaaaagttaatagcaaatgtatttgatataaatttgcttcctgaaggacaggtcctgcaggaagcggatcgggttgtgtatcagcttactaaatga

SEQ ID NO: 60658 - DNA, 534 bp, Acinetobacter baumannii
atgaaagtattaaagatagtaataggtacatatattctattaaacagtataagtttatatgcagaaagtacaaacgagtgtatgaagtattggagtgaaaaatctgctgcatctctcaaggttttgggagaggtggaatgtgaaaatatttgggagtatggaaaaagtaatgtgacccaaggtcgcttgaagctattgaatcaattgaaattaaaaccgaataataatcaatggatgtcaacaggtgagtgttctaaagtttcatataataaaaacaattattatatttaccgcgcatattataaggaagatagagatgaaatatggattgcatataatgataaaggctcattttcttatttcagaaaagtaagttcccccaaaaaagaaggagaaaattctaaagtatctttaagttgtgcaaaaaatggagaatatgatgaagccagatctgtgttaaatacttatttaaaaaataatacttcagttagtatgagctattataaagtaggggattggtacaaaggggattaa

SEQ ID NO: 60659 - DNA, 270 bp, Acinetobacter baumannii; identical to SEQ ID NO: 54737

SEQ ID NO: 60660 - DNA, 228 bp, Acinetobacter baumannii
ttggctaatccatggggtataccacacaatattgaaaaattagttttggaacgtgacaaagactgtgtctattgcggttgtgagtttggaaccggaagatcaaaaaaggtcatgggaacaatcatcaatgacatcaaaatcaccacattagataatatccccttatgttgtgttggtttcaatgcttccaaaaataataaaaaaattaagtatttggttttattataa

SEQ ID NO: 60661 - DNA, 1881 bp, Acinetobacter baumannii
atgagttcacatgagattggacgtcaaaaaatgtctgcaatgacattgggtgctttaggggtggtttttggtgatataggtactagcccactttacgcttttacccaatgttttcatacatcacataatgttcctataaatgaagcgaatgttctaggcattttatcattgattttttgggcactgatgatcgtggtgtccttgaagtttagtatgttaattatgcgtgctgataatcatggtgaggggggcatcttagctttattagctcttaacatgcacaataagcaaattgggcctaaagtgcgctttgggttaattacaattggtttatttggtgcttcattgttttttggtgatggcattattacccccgctatttcagtattgtcagcagtagagggattgtcggtagcaacccctatttttacaccgtatgtaataccaattacgattgtgattctaattggattatttatgatccagaagaagggaactggatccgtaggccgtttttttggaccaatcatgctaatctggtttttatcattaggttttattggcctatctcacattatcaagaacccttatatcttgaatatgcttaatccgtattgggctcttcctttcattgaaaataaccccgtgactgcatttgtagtcatgggagcagttgtattgacgattacaggtggagaggcgctatatgcggatatgggccattttggtcgtaaaccaattcaattggcttggtttttggttgcgctaccgtgcttggtattaaactatgcaggacaaggtgcgttgattctgcaaaacccgcaggccatcgagaatacttttttcatgatggtacctaaaatagcattatatcctatgattgctttagcaactgctgcgacagtgattgcctctcaggcagttatttcaggtgtgttttctatggcacgtcaagctatccaattaggttatttaccacgttttgcgattgatcatacctctgaatctgaaattggtcagatttatataccagcattaaactggatgttgcttggtatgattatgagtttagtgcttatgtttcaatctagcgctaatctaggttcggcttatggtattgcagtaactttgactatgttttgcgatacgattttagttgctttcatcatgtatcacttatggaaatggccttcgtgggtcatgttattagttgcgatacctttgctaattccagatctcctctttattgcttcaacttcactaaaaattgtagatggcggctggttcccattaatgatgggtgcaatcacttttataattatgacaacatggcgccgtggacgtgaattactactgaacaagttgcaaagtgacactatgccattagatttatttattaagagcttggagtctagtgcttatatggtgagtggaacggctgtatttatgacaagtagtccaaaagttgttcctcatgctttattacataatttaaaacataataaaatactgcatgaacgtaatattttgatcaccataaatactcgtgacattccatatgtagatgaatcagaacgtattgatgtcgaagtattagataagcactttttacgtgtcagtgcttattatggatttaaagagcagccaaatgtacctcaagcattagaacaagctttaactaagttgaatcaaccatataacattatggacacaagcttttttgtatcacgtgaacgtgtaattcataacgtaggtgacggtattgtttcatggcgtgaaaaactgttcatttctatgcaacttaatacgagtcctgctagtgatttcttccagataccagctaaccgagtggtagaaatggggagccaagtagagatttag

SEQ ID NO: 60662 - DNA, 228 bp, Acinetobacter baumannii
atggtggctactaatttatgcgtagggcaggtggctttatcacctgtgcaagctacggctttcccatcaatgagaaataatgaatttccactaattactttaccgccgcccgtggttgggcaacctatggttatatacggtgtagccaaattattattccttgttattctcatgaattgtgtgaatgataacaaagaaaaatatacagatctgtctatttttatgtaa

SEQ ID NO: 60663 - DNA, 696 bp, Acinetobacter baumannii
atgtcagataaaaatttaagaaacccttatagtcgtaatatacctgacacctcgcccgcttgggatgcttatccaaccgaacaaaaagtttgtgaaattactgaaccactttgtaatgaacatataaaaattagaaactattacatggcaagaccatacaattttatgatgaacataaatcaatggtcagaagtcaaaaatgatattgaactattaatggctgtacgttttggtatggaatgggatgtaaataaacttccttcaagtaatatgtctgatcctgcttttcatacaggaatgtatataaagtttcataattatgtactcaaacatgcaatgaaagaaggtgcgcgaattgttggtgaatttcagcaaacagcatttaaagttcgcttcttaagtacatttgccgtagatgaacttcttgaacttcgtaatttaagcaaattcgaccaaggcaaggaaatttactcaaaaattggagacttaaaagatacactttcaaaattaaatgctggatcagcaagtgccgatttgacaaaattacgaagaaataatggtccacttttcatcaatagagaaatgtttaaaaaagtattcaatcaggattacaaccctaaaatgatccagattatgaaagaaaatagagaatacaatggagatcctcacagtgttggcaatcagcaacttttctaa

SEQ ID NO: 60664 - DNA, 498 bp, Acinetobacter baumannii
atggagatcctcacagtgttggcaatcagcaacttttctaaaaaatttattgtacctttactattacttgcgattactggctgtgctaatacacaagtaaataatgaccgtgaagctttagtaaatgcgacacgtggagcagtgaatatggtgatcacagatcatcatgtttatcaaaaggctttagcttctgaaacaagtgaagtaaagaaagcaatgatctactccactttagaaaaagcagatattttgcgaacttttgaaacggaaattggaaaggatttcgttattgaagaaagtttgaatacgcgtaaattaaatgatttatgctggatggctaaatttattagacaatctaaaaatgaactaccatctaaggatcagactatctacagcgatatttttacttggattggtgagaaggaacagtcgtggttaaagaaacttaatcaatcatatagtaaagacgaactcggtgaagacgattgtcgaaagtga

SEQ ID NO: 60665 - DNA, 969 bp, Acinetobacter baumannii
atgaatacatctacagctaaacacaattatgccccagatattttaggtgccggctacgaacagctaacactcaactttccagatgattatgaaggtaaagttatagccaccttagttcgtaaaaagaccactcagccaactcaaaaagccgtactttatattcatggttttttagattatttctttcaaactgaaatggccgagcaattcaatgcgcatggctatgacttctatgcactcgatttaagaaaatatggccgctcaaagttgcctcatcaaattttctataatgtgcttgatttaaatgaatatgatgccgaaattactcaagcattagagatcattggccaagaaaaacatacacaagtattacttgcaggtcattcgactggcggtttgacagcaacgctttatgctactcatcatccagatcatccacttattaaagcactatgggcgaatagtccgttttacgacttcaatttaagtttagttgaaaagaaatttggtattccaatgctcagtcgagtaggaaaatatctgcctaaagttaaatttccaagcaaacttaacaaatggtacaccaccagccttcacaaacaacttaaaggtgaatgggacttcaacctggattggaaaccgacctctgcccctacagttcaacttagctttctacatgcgattcatacagcacaaaaagaaattcaccacggcgttaagctaaacgtccctgcactgattatgcattcgcaccaaactaaaaacccacgtaaatggggaccagatgcaacccaaagtgatgttattttagatgttaaagacattgcgaaattcggtaaaaaaataaagggcgatgtttcggttgtctctattcacaatggcttacacgatttagtcctttcggcccagccagtgcggaatcaagtctatcaacaactattccagtggctggatcaaaaaatcacctaa

SEQ ID NO: 60666 - DNA, 498 bp, Acinetobacter baumannii
ttggatcaagaatgggtattcattgagggaagctacatacgcgcgcatcagcatgcaagtggagctcggcacggtttcaagcgagcaattggacggtctagaggtgaaagaaccacaaaaattcatcttgcaaccgacgcgaatggattaccgattgattttaaaatcactggaggtgaactctatgacagccaagttgcggagcacttgattggtgaggcagattatctgattgcagataaaggttatgattcggaaaaaattaggacattgccaagaaagcaaaatattgtgccgatcatcccaatgaaatcaaatagtaagagagaaaataaagaatttgatcggtatttatatcctttaagtcatctagttgaaaatgtctttgcgagattaaaacatttccgagcgatagcgacccgatttgataagcttgcacgaaattatcagtctatgatttacattgcttgcatgttaatttggtgcaaagccaaatga

SEQ ID NO: 60667 - DNA, 372 bp, Acinetobacter baumannii
atgtctaagttatcacaaacgcaaaaagtcgcagaattcttaaaaacgtatccaaataaaaaatttaatgcacgagagattgccgaattcatcattcaaaaatatccagaagattatgaccaaaaaaggaaaaataatcgttttgaatcagaagcagattttttacaacaaattgtccgtgaaattagtagcggagcaaaaaccaatattctaaaagtatctcctcatattcacatacaagatcaaccccgtcccagacaattctggtttgatccccacacaatttatgaagtagaccataatataaattcagacattagcgaatctcttttagacagtttagaacctgaaattaacttgccaattatatag

SEQ ID NO: 60668 - DNA, 1602 bp, Acinetobacter baumannii
atgacccaacagggcttgattcatttggaaagagggcgcttcgagaaaaaagaccaacaacgtattgatgagcgtaaagcatggtgtctgggtttttctaatacttctcgtctaaacttactcaaacatgaatatagtcagttagaactacagcttaaacaacaataccaacagattgaacaggctcggcagttactcaataatattaatcagcaaaaaggcttatgggaaaggttgcagcgttatcaatgggatgccattaatttaccatattggcaacaacgccagcagcagacgcagcaggatttgcagcgtttacaacaggcagattctgatgctaaacaggctcaccagcgttgggaagcggcaaaaaatgaattaaaacagattcgcttacaaaaaggtgagtcgcaaaaaatccgaggtcaattagaacagcaacatggtgatacccagttaaaacagcaaaaagcccaacaagcagccgagcagggaatgagtgatgatgcccgacagttattgaaacaacggatcggtgaagtcaaacaactggatgatgcgttgcagggagaaatcgaacgaaaacttgagcgtttaattgggcagacaaatgaccaaaaaacgacgatcagtaataccgccaatggtattatggtgtcattctgcagtaaagataaatggacacatatcccattacaacgagaatgggcaacaggtttggtagcgctggatgactatgtcgcttatttacaggagttacagcaggagggtttgccgaatttggttgaacaatttcaacaacgtctacataaacatactactcaatctttaagtgtgattcaggataaattgaatgtcaatcgggaagaaattattgaccgaattgacatgattaatcaggtattacaacgcacggaatttaagctcggtagctatttaagacttggctataagaaagaaaaatatccacatgtacaggatttcgaacaacgtttaaaacaggttctgtctggtgtaaatagtgaagaatatgaacgtcgttttaaacagttggcggagttgatggcgattttggacaaggccagcagttcggcaaccgccaataatcaagaaagtctacgtttgcttgatcctcgttatcaaatgtcatttcatgcagaagaagtggatgcacaaacaggggtaatacgagatgtgcttgagtcttccagcggtaaatcgggaggtgaaaaagaatcctttgcaggcacgattgtcgcagcaagtctagcttatgtactgacacctgatggctatgattatccaatttatagtactgtgtttttagatgaggccttttccaacactgccgaagcggtcagccgccgtgtactaaaggtatttaaggcactcaaaattcatgtcaatctaattacgccttataaaaacctaaatctggcgcgtgaatcagctcgatcattattaattgctgagcgtgatattgaccaacatgaaagtcatttatgtgaagtcacatggcaagagattgatgaacggatgcagcaacacaaacagacagtagcagcagaggctgaacaacttggaattcagcttcatggctag

SEQ ID NO: 60669 - DNA, 1203 bp, Acinetobacter baumannii
atggctagaacagcagcatggggacttttgcctgatgatgtcattgcccaattacgcaagaaagaatgggatcatcaaaggcatttaaagcaacgcttgcgtcatcaacgtccattcccgattgtactttcactcaaagccccgacaggccagcaggcaatgagcaatctggatcatttccatacattttttaaggcatggaaaaattttgtctatcctgatctggtggaatggcaacaacgtcaattcaaacagttggcaacacaacaagtccctgttaagttgataattcctaccttggatgtcatggtggatgtgctaggacagcaacagcgatttaaaaaaatttcagataaaatttcctatttgttactgcaaccatttgtacagccacaagtggaatatgctttgttctgtacattaattgaatatttggaactgcttgaaaaatatcgtgaggcagactggcaattgctgatccagttgatttcccagcttaaagcaaatatgggggcaggacattatttaagagcattacctttgcagcatgttgataccaagtttttagaaagaaatatgctgttggtcgaagccatttgtgatgtcttataccatggagaagtacaggcagcaggtggattactaaattggctcaattgcctggatcatccgaaaggctggctgatgatcaaacctttatgtaccctggtgcaacagtcattgggaggactgccagtttttcagctttctaccgatgtgttgatacaatttgaattgcctgctcaacatattattgtgattgaaaatgttcagtcaggtttagctttacctgtgatggaaaatacgattgttgtctgtggcggtggtaaaaatattaaatggctagatgcaccttggctacaaaataaacaagtatattactggggtgatattgattccgaaggattaaatatcctgagcatggtacgacacaaagttccggatgttattcctttgatgatgaatgaagccactctattacaatttcaggataaaatggtggatgagcctgattcagtttttcttgaacctaaatatttaacagacgaagaattaatattatttcatcaattaagaagtaaggcttatatcaataaacgtctagaacaagaaagaatcactaatgattggatcagagaaaatttaaaaaggcaaattaaataa

SEQ ID NO: 60670 - DNA, 192 bp, Acinetobacter baumannii
atggtgcaaagcgttaggcttaacgacaaagagcaagaagagctcagaaagaaagctgttgaattgaacaagattttaattgcgaaaggtcaacaaccgattagagatagtgagctggttcacattctaatagaaactggattggatcttgtagaaattagtaacagcggaaagttacatatcccaaaatag

SEQ ID NO: 60671 - DNA, 1260 bp, Acinetobacter baumannii
atgcatgcatgtttacatggtggggaaatgttggataaaatcgagatgaggataccggttgatgcgtctctcgtagaagtacgagatgatggcaaatactgtattttcggttttgatcttctcgatttatctattcgtttcgatgcaatggaagtttataaggatgaggacggggagaagcatcaccaagttttaagacatccttattctcgactgccaacttcatatacaaagatggctttcaaatttgtacatgaaggcgctgtttatccgtatgtcgagttgaaatgtagtcctgcgaagattttgcaggggcataacgttttcggtactgactggataaaagaaggagctttcgagatgcttggatggttgcttgaaacacatcctgatctttattcaatgttacatattgaatcggcagaagttatggttttagacgtgacttattcagcacgtttaaaagatgacgatactgtggctaaagttcttgcgtttatgcgtaatttctctggtcagtacacacgtaaatcgaagcattcagtgcttcataagaatacggtttatttcggttctgagcgtgcgaaatggttgcaacgtaagctttacggcaaatatgtcgagtttatggaacaactggaagaacaacgtaagttggcaaaaaagaatgacaaagctgctgaacgtgttgttgctgtgatggaagatccacgattacagcaatgggcacaaggtttacttcgtattgaaactggtatgaagaaggcttggctacagaaacttggcattccaactaatttatttcaattaattaattatcaagaacttaacccgaattttttacagcagttatggctaaaagccaatgaagatatgtttaaagccctagagggtcaaactatgaaacttactgatcatgattctgtttatgcagctttattaagcaaatttacgactattacaccaactggtcgtaagtcaataactaaggctcgtaatttgttcaatttctattgtggcttggagcttcatggttgcgaagctatgaagaaacgttactgtgaaactcaatattacaagcatttcagtgatttagagaattctggtttgttctcaagagtatttttacagaaccttcattctcagtctgcaagtaatgtaattccgttcatcaaacttgttgaaatcaagttcgaagaacaagtaccagattggttcgttgaaccagtatcaacattccgttttaaaaatatcgcttag

SEQ ID NO: 60672 - DNA, 288 bp, Acinetobacter baumannii
atgtcaaacaagcaagtttttacagttgtgggaattgagcctagtcaaggcacatttgtagatcaaaaaactggccgtaacgttaattatgacagcacaaatttctatgtgttggttccagttaaacaaggtcatggttctaaggttgctgtgcaaaagatgcctggctcatctaattatcaacgttataaagatatgacgttaccgtgtgaatgtgagtttgattttaacttggaatttactggccaatttcctaagacgacattgttaaatgtggtaggtctgtaa

SEQ ID NO: 60673 - DNA, 1338 bp, Acinetobacter baumannii
atgggtagcattacatcttattgcgtcaaagttataaaagataactttaaattattaacatggcttcaaatcttcattatagccattgcacctaactttattttttatcaagtagcttctgcaaatactcttgcagatgaaggttggaaagttactaaacgtttagttcagggtgccacatcgttttatgatggtactaaaacggttcttttaaacggtaaagattacgttataaaaggttcggcttacattatcccgaactcaggtcaagttgctaaaatgattgttagaacgggagctgttttagctgttgatttagctattaaggagcttattgacggtgttgaatatgtgatggatcctgaaaataatcgtgtcaaatactatgttactaaagacccagacccgaccgatccatctgtacaattttattatcagacgactgctgctggtgttgtaaagaagttttcatcaaattctgctgctgctacagatgtttgtacacgtcaagccacggctcttggttggattgctgtttctgcaattcctgcgtcttggtctgctgatgaaacacgtctcaaatatgcgacatgtactattaaacggactcagctttctgaaaatgagaattttacttggtcttatactcgtgtaaaaaacccagcttatgaccccaaggctcaaccgaatagagaagaaaaatatttaccgtatgaaactgttgcttctcaaataatttcagatgctaatgcagaaaaagctaattctaaggcttatgttgcatctgttgcagataccgcattagaacaggacgaacaaaaacaattagttccggcacaagatgttattaatcaacttgaatataacaaatcaattcctacaaccgaagctgtacaaggaaaagcgactccgcaagctgatcctaatgatcctacggctcctaaagcgcctccgatggatattaatttaacttttcctgttttctgtagttgggcgcctacagtttgtgaagctgctcaagcaggtattaactatgttgcttcatatagcaaagacgtagaagcactaaaaaaagaatatgcagataatcctaaatttgatgataaaccgcttcaatttgacaaagaccctgcaactccggatacaacaatttcttttggtggtggttgtccggcacctttaaatgctccttattcttttatgggtatttctggttctattgagattccgtttactccattttgcaaaattgcagaagtttccaaacctgtaattattgcagtttcggcctattttgctgctcttattattggcggcattagaagtggggatgcttaa

SEQ ID NO: 60674 - DNA, 192 bp, Acinetobacter baumannii; identical to SEQ ID NO: 60670

SEQ ID NO: 60675 - DNA, 1260 bp, Acinetobacter baumannii; identical to SEQ ID NO: 60671

SEQ ID NO: 60676 - DNA, 288 bp, Acinetobacter baumannii; identical to SEQ ID NO: 60672

SEQ ID NO: 60677 - DNA, 1791 bp, Acinetobacter baumannii
ttgaaatatttaaaacagcttaaatcttgtcaaacacaaaaagatttagcaattttattaggatattcagaaaagaactttactcgtatcttatttagtgaaaatattacaaaaagatatcaatcttttgaaatttctaaaaaaagtggtggtaaaagaagaatttttgctccaactcctgagcttaagatattacaaactcgtttatctattcttctaagtaattgttatcgagaattggaattaaagagactatcaacctcctcttatgttaactgtattagttcacatggatttaggaaaaaactcaaaataaacattccaacatcaaaacaaaatcgtacatcacttgaagctaaagaaattaattttggtatatacagtaatgcacaaaaacatacaggcaaaagactagtattaaatattgatctaaaggatttttttgaaagtattaccttttctagaatagttggcttttttagtaagaataaactttttagtttaccttttgatatcgctattttaattgcccaaattgttacataccgagaatctacctcaaaagaaggttttttacctcaaggtagtccttgctcccctataatcagtaatttaattgggaacattcttgatgttaaaatggtaaaattagcaaaagaatataaatttacatatactcgatatgtagacgatttaacactatcaactaatttacctcaattttctgaagatatcatcgaatttgatggtgaaaaatgggttctaggttcagccttaaaccatacaattaatagcagtaaatttaagattaatcctaaaaaaacaagattaactgacaaatataataaacaagaagtaacaggattaactgttaataaaaaagtaaatattgatcaaaattattatcgctatacaagatcaatggttcaaaatttttgtgctgaaggtgaatttttcaaatcaaaatttcacatggataagcacaaaacaaacagagaagcattaaatggaattttaagccatatttatcaaataaaaaatcagcaagatattaaatttccaaatggcacaagaaactttaatgaattaaatagtgttgataaactttatgttaagtttctctttcaccattatatagttcatcccacaagaatgttcgtaattggggaaggctataccgaccctttacatctaaaattagcttgccacaaactttataaagattcattaaagtttctaaaattctcctcattacaagagacaaaaaaattttctaaaatcatgggatattttggaggaactggtttacttcaaaaatttctaaaaaattataaattaatatataaaggctcccttttaagcttaaagccttgtgtaatccttatcgatggagataaagctggagatgacgtaattaggacagcaagcagtgaattcaagaccactttcaaaaaaataagtcattcttctatgaccacagctggactattagattggtatcatatctttaacaatttatatattcttcaattgcctaacaataaagttattgaagatttttatgatcctttaattttaacaattccaataggttctaaaacttttcacccagatgacaagaaaaaaaatactaaatttgactccaatatacattatggaaaaaaaattttattggaaaaaataatccatgaacaacaggatactattgatttttcgaagttcgatttaatatttaatactatttttcatatacaattctatcattatatttattgtaatatggaagattaa

SEQ ID NO: 60678 - DNA, 315 bp, Acinetobacter baumannii
atgagtatacatatacatgcttatagtgctttcactaaagaagaaacagataaaattaatcagattataaagtttgaatttcctagttattttaattatgactttataatttatgaggctgatgatttaaatggttatgaaaaagaaatagctgatgaagatgttggaattccagcttcattcaaggctgattttttaatttctttaaataataaaagcgcagcttctaatatttttaaggttgcgctaattataaaagaaagatttggttctgaaaatattattttaatgcaaaatggagatgtaagaatataa

SEQ ID NO: 60679 - DNA, 483 bp, Acinetobacter baumannii; identical to SEQ ID NO: 59882

SEQ ID NO: 60680 - DNA, 1782 bp, Acinetobacter baumannii
atgcaagagatgactttggataccttatttgctcaaggacaaattcgtttggcagaaatttcagtgtttaactgggggtcatttcacaatttgcacacggctcgtattgatcctgagggaacattaattacaggggataatggagcaggaaaatctacttttattgatgggttgatggcgttattacaacctgccagcaaagccacttttaacgtggcagcagcacagggcgaccgttctgatcgttcacttgtgacttatatgcgaggcagttacggctctgagcatgatggttcaagtactaaagtcaaaagcaagcgggaaaaagccgtgactacggcacttcgagccttgtataccgcagaggatggttcgcagattaccctgcttggaatcttctggattggacagggcaaaaattcgctcagtgatgtcaatcgtttatatatgattgccagtcgcaatgtgttgcttactgaagtattggatatttttgccgatggtaatactcgtcaactgaaacagcattttaatccgaaaaccgatcaacgcattcattattttgataatgattttaaaagttatcaggacatgtatcgtaaatatctatttatggataatcagaatgcacctgcattgcttgctcgggcattagggttaaagaaaattgatgatttgactaagctgattcgggaactggtgttggaacccagcaatttaagggaaactgctcagacggctgtcaatgaatttgctgatttagaggcaaattataagcatctggtagatactcgggaacaagtcgaacatctacaacgtttgccacaatgtgctgaaaagattgccgaattgacacagcatttggcgcagcttcatctggaaaaacaatctattaatgcttatttgggtgaattgtttgctgcattatggacagagaaattacagcaacttgaccaggaattgctacagctcaatcaacagtttcaacagattgaacagcaggaacaggatgcagaaacacggcaagaacgttgtcatgaagaatatttgcaactcgggggaaaccagattgaaaacttgaataaagagctaggctttatcgccgataagctcaaaagtttggtcttggaggcatctcggtatcaggatgacgcccgacaattacagctttctgatgatttaactgaacatcgtttgctggaaaaccatgagatagcgactgaaaaactggtcaatattgaacagaataccaagcaacgccaagatgaatttgccgaagtcagtggtaaatatgcacaaactcagcaacaattcaaggatattcaggaagatattcaggaaatggaagccagacctgacagtaatatccatgatgtgcatttactgcgtttacgggatgaattaaaacagcatctatcttttgatgaacatgaactgatgtttattggagagttgattgatgttaaagattgcgaaaaagcatggcagggagccattgaacgagcactaggcggactcaaaaccactttacttgtgccacaggatcgctattccatggtgactaaatgggtcaatgctcgtaataatgaaacccatgtgcgtttacaagtggtcaatacaaagcaagtagagcatgtccattttaaggacaatggttttctgggtaaattactttggcgagaacacgcctatcgtgactggttaaaacagcatttacagcgtttcgatttaaattgtgtgagtgatacccaaacactggatcatacaccgggactgttctaa

SEQ ID NO: 60681 - DNA, 786 bp, Acinetobacter baumannii
atgcaaccacaaaaaagcagtttttttgacagagtacgtcgcccatcatctgatgaaaatcatgatattcaatcgcagtgcatcgcggaagtcgaagatgagtttacaggggttgaagtggatcaagagctagaaaatgatcctcaggcaagcgatgaactgtctagtatgccgcatgaggccagacgggttgtggtctatttgatgcggcagggaacaattttggcagccgaaaacctgaaactgtttgatgtgttatgtcgttatgaaacagcgattcgtcaacatcttgccgaagtgtatattcaactgattttagatgccagacagggcgttgcctatattattaatgtggaaagcattggtaatgaaaatgataatagtccattatcagatgattttcccacactgattcgtaaacgtactttgactttgtatgataccttggttctgctaattttacgtaaatattatcaggaacgagaaaccgcaggtgagcaaaaaattattattgatctggagcggattcagggaaatttaattccttttattccgattaccaatcatgaaagtaaagatattagaaaattaagcggtactttggataaatttagtgaaaagaaaatacttagtgtgatacgtggtgaagaggggcgttatgaaattacaccgattatccgttatgtggtcaatgccgaatttctacaaagtttattaagcgaatataagcaattggcggataaaacagctctgcatcaatctgaacaaaataaaggaaaagtataa

SEQ ID NO: 60682 - DNA, 1467 bp, Acinetobacter baumannii
atgaatattcagggaatacaggcaacttaccgccgtttatatcatgaaagttcagtctggaaattattaagggcggaaaatgcaccactcattctagcatttattgcagatctatttgcggaaaaagccgaagttctgtatggacatgccagaagcctacttgatgagtttatcaaatatagtcgtgaacaaggactgtggcaaactgaaaataatgcagcctattatttaaatagttggattaaggcaggttggttgcgtgaaatggatgacttactcagcaagaccgataccagtgaaacagtattacgtttttgtcgcaatctggatgaacggcatagcggtaccactgcgtcacatttaagaattgtacaggatgctgttagggattttgtagtggctatcagtgacaatattgatgatcgggtggccttgttagaacaaaagaaagcacagattcaacaggaaattgatgatctgcatgcgggggtagttacgcagctcaatgaaacggagcaacgagaacgaattcgggagatttatcaacttgcttctattttaacaagtgattttagacgagttgaagatgaaattcgtcagttagacaaagagttaagggttgagatgattgggggcaacgcttcacgaggtgaggtgttacttgcattgatgcaaaaagaacaactacttgccaagagcgatgcgggcagtgcttttgatggtttctgtcaattattgcaggatcaggatcgttccactgaatttcgggaacagctacgcagtattctcaatcatcctgtggcacaacagctcagtgaagcacaaaagaagtatttagggcaaatcatgcgtgaattggcacgggaaagtagtagggtctttcaagtacgttgtagaacagaagagggccttcgggcatatattgaaagcggtgccgcactggaaaatcatatgattgattgcttaatgtctcaattggaaaagcaggcggtgaatttaacactggaacagcaatttgatttaaagattgaaacacagatgtatttagccgtaggttcggttcaagttagctcaccagagaattttgcattgaaaagtcctaatgagcatatggatacacgaggtgtacagcagcagcaaaatcgtaaagaaccaagtgctcagatgctgcaatatttggacagtgtacaggttcgggtggttgctgaaaaaacacacaatactttgctaaaaaaaggtgtcatgagtattgccgatttaactcaagaacatccattacaggcaggtctagaggagttagtggcgtatttgcgtattgccaaagccattaaagcgcctcaattgacagaacaaaatgagcagattcagtttagggaccaacatggcgtgaacctgcaagccagtatcccgacctattatttaagtgctgaattatttcctgaaaatttagatgaactgacattataa

SEQ ID NO: 60683 - DNA, 351 bp, Acinetobacter baumannii
atgcatttaaataaaaatttattttatgtccatcgctgtgtgacaggcttttatattttaatgttgatcatagcaattttccttctggcaaattatggagtcaaaaaagaaaacttaattttttctgtttttgttcttgccatttatgcgggcttaggagccttacactttaaagcttcaaatgaagtatctaaagggactgaatctggcaaaaatttatcacagggtgttggagtattactattgcttggtttcccgatcggtacaattttgggtattattattttagtgctaacggctaaaaagcgctggcaatggggagaactaccagaatatgaaaatattgaataa

SEQ ID NO: 60684 - DNA, 621 bp, Acinetobacter baumannii
atgagttttttctcaaaactttttactaaaaataatagtgaagcgacagcgctgaatacgttaaatatagccagagaatatgctgctaaaaagtacaatatcccagtaaattttattgatgatttgatgaaacttcccttagaacaattaaatttagcattacagaatacgttgaaaaacaatcaagatatagctctaaaacctctttcagaacaatatgcttttttgtactcagaactatatgatcaatatttaataaaaattggaaaaaaatttgattattttaaacaacttactcctattcaaatagtagaggacagggaacaaggattaaattatttgttaggaaaaaataattttactaaagataaaaatatggctgaaaaactacttattagagcaggactacagggggatgttactgctcaagaaattttgggtgatctatattaccaaggtaatattctcgataaaaatttagctaaagccactgaatggtactccttagctgaagatggttatggctcagaaaaagcgcggaaatgcttagaatggatgtcttcaagaaaagaaactgtatttttagaagaaaatgcaattttaaaagaccttcagagttag

SEQ ID NO: 60685 - DNA, 489 bp, Acinetobacter baumannii
atggtaattatttttacactattaatattggcaatattaatatcgattgttgtgataaagacgcgaaaatccttacctgggagtgccgcgattactagtgatttcattgaaccacaaatagaaaaaatgaaagatcccaagagtcttgttgaaaatagaattactttttcttctcttgtatatatttctcttatatctgaaaaattaacaggaagaaggattaggtatgaagaattattgaggtttctaactttggtttttgatagagatacacatacccaagtacaattaattttaaagcgatttgatacagaaaactcagcagatgattactatattttacagcaaattatctcaaaagaagctgaaatagatattagacgaggttctcaagaagcctattatttatggaatgaagctagcagagctagatataatatagattctgtaaaagattatttactcactggtgaaacaacagatatttaa

SEQ ID NO: 60686 - DNA, 240 bp, Acinetobacter baumannii
atgattttgctgccttattttctggtatcggcgttttatcttaaagaatcgattcgccataaacgcacgccacatattgccattgcaagtgtcgcttcaatctatgcactttggttgctttatgcagcaggtttagacttacttctgttgtctggtgtgttgtatttggttggcttggttattttttcaattagctactttgagcataaaaaatcgctcaaacaaaaccagcttaattaa

SEQ ID NO: 60687 - DNA, 1041 bp, Acinetobacter baumannii
atgaataccgcaattttaaatccatccattcaacaggcaagtactccatttattgccccaaaattattcacagccaaacgcttggttaacacaaagaatatgactcaggcagaatggcttgaagtcagacgtcaaggtattggtagtagtgattgtgccgcagcgtgtggactcaatccctatatgtcgatgcttgaactgtggatgatcaaaacaggacgagtcaaacaatccattgaagatgaaagtgcaggacatgcacctttatattggggcaaacagcttgaacctttggtcgctgaatactacagcatgcataccaataacaaggtacgcagaatcaatgcagtgcttcagcatccagatcctgataagcattttatgcttgccaatctggattactccgttgtgggtagtgatgaagttcaaattctggaatgcaaaaccgcaggggaatatggagcaaagttatggcgagatggtgtgcctttatacgtattgtgtcaggtgcaacatcaactcgctgtaacaggcaaaaaggcagcgcatatttgtgtgctgatctgtggtcatgaaaccaaaatcttcaaagtgacgcgctccgaatccgtgatcaaacatatcatcaatgcggaacgttacttctgggattgtgtggaaaaagatataccacctgatgcagatgccagtgagtcggcagccaaagccatacagcagctctatccgcaacatattccattaactgttgaagacttgagtcataacgaacaagccaatcaattgtttgctcaactgattcaagaaaagcatcacattgagcagcatcaaaataactttgatgaaactaagcatcaaatccagatgttgatgaaggatgctgaacgagccacctttgccactggttcagtgacgtggaaaagagcgaaagactctatcggcttagatacgaaggctctactgaaacttcatcctgaattgattgagcaattccctcaaaacaaagtcgggacacgacgctttcagatttatagcgatgattga

SEQ ID NO: 60688 - DNA, 300 bp, Acinetobacter baumannii
atgagcttgagctgtcccttttgtcattcaacgaatgtgatattggttgaagtaagtacacaacaaccaaatacaactttatccagtctggttacacccaccacattaggtgcattgggaaccacagtcgcaaagtcttttaatctaccgccgattgttggtggaatcgcaggaacgtttttgggaagtatgttgggcagtgtgttgaattcattcacagaaccaagcacaccatcacaacagaatttgtgcttctgccacaactgctaccaaaagtttccaacccatttattgcactaa

SEQ ID NO: 60689 - DNA, 963 bp, Acinetobacter baumannii
atgtaccaaaatgttcaatttcaaaataatccatatgatcagctttaccatgaagcagaagtattggcagcagtagaccatttcattcaagaagtatgcttgggtagctatgatctatatcatcaaaacctgatgatagacctacaaaaattagttcagtcatttaagccaatctataacgctaattttttctattgcaatacagtgcagatattcattgaggtggtgaacatcgttgatcacacactcagtctaatgccacaggcagactatgattgtatagtctgtttggatgagatgaccgtctggcatattttgacttacatccagtcattatcaggctgtgtaaaacagcaactgatagattttcaacaacgtgaattaaagaatcagcaaagcctattcgactatacatcctcattgatcaatcattatgcaagactattagttgtacgtgtggatttatccattcttcaggaatatcaagccttatacaacattcaggcatttaacaaagcattagacactttgcttcgtcgaatcgcagatcaggatacttgctttaatgctttgcagggttatgcatgggcattagagcatggtgttagcaaaggctatcactgccatcttctgcttatgtacgatgggaatgtacatcgaagtggttttgaaatggggcagtgggtaggtgagtcttgggagcagattactcatggctgtggttatatttttaactgtaaccatcccgactatatggatacatataaagcgatgggaacattaggcattggtatgattcatcgtgatattgagcatgaagtttttaactttcttaattatgttgccccttatctagtgaatggagaaaaagtgcagcagcatccgaggggaaaagataagtcaaacatgcgtagttttggtacagggcagtttaattctaaaaaccgtagagggattgaataa

SEQ ID NO: 60690 - DNA, 1377 bp, Acinetobacter baumannii
atgaatacaaatactcttcccattcataatcttcaaattgaacaagcggttcttgctgcattaatgaccgtagctggatcttatgcacaagttgaaaatttattatctgaaaacgatttttatgcaacacgtcataagttgatctttagcgcaatcgtagaccttgatgaaaaagattctccatacgacgccgtactcgtaaaccaatggttagaaatgcgtaactacggtgaagcatcaggcggtgataaatatcttatacaactaatgaatgatgctccttctagtttctacaatctgcaatcatatgcagaaaaattaaaggatttgaccatatgtcgtcaggttgaagctgaagcaatgagaataatccagcaagcacgacatttgactgtaaatcgtggtgaactggtacagaatgcacaaactgcttttgccaatctaaataccgaatcagggagcgaatccctatttcatatccatgatgctgcatcaaatacttttgtcgaaataagcaaaaagatggaagccgctattgccggtacaacactaatcaaaggtattcaaactggcatttttgatcttgacaaaaaacttggtgatgtagaacctggctgcttaatggttgtggcagcaagaccggctatgggtaaaacgacaatgatgcaaataattgcaaatcatgtctccgtcgttcagaaaaaaccagtactgattatgtctggcgaaatgcctaaagagcaaatcgcaatgcgcttatgctgtgctatagcacctgccgacattagtctagtgcgcaattcccctcaccttctccctaaagaagaatttacagcatatacaaacgccgtagtgcacctaaaaaatattccaatgcaaatcaatgatacttcacgcccatcaatagcaaacatcagagaatcgatccgaaaagtacttcatcaatatggctcagtaggattagtactaattgactatctacagattatgaagacatctaagcaatttgctcgagaggatttaaagattgcttatttcactggtgagctcaaggctatggctaaagagtttaattgcgtgattgtccttttatcacagctcaatcgtgagttagagaaacgaccaaacaagcgtcctatgatgtcagatctacgtgaatctggtgccattgaacaggatgcagatcaaattgttttcctttatcgggacgaagtttacaacaaggaatctaaattccgtggaattgctgaagccatagttggtaagaaccgacacggcgaggttggaactgcctatatgcattctcaattgaaatactgccaatttactaatttagatcatgaagcacttaatcaaatccaaggagcaacaatatga

SEQ ID NO: 60691 - DNA, 822 bp, Acinetobacter baumannii
atgagcattgatgcaacccggtggtcatggacagcttctgttaaaacttctgctcaacgcttggttctgctttcattagcagaccgggctggtgaagaacataccgcatggcctagcattgatcgcttagctgctgacactatgctagacaaaaagacagttcaaaaggttatattagagctcataaaaattgggctagttagcgatactggcgaacgtacaggaccaacaaaaagagtccgtatacttaaattaaacggcgtaaaaggccgtgaagaatataacccaaatctggctaattcaggttcaaaaaatgatactgaatccagaacaaatatacccaaaagtgggaacattaaacattcccaaaaacggaatgattccaataatggaaatattcccgaaaacgggattttgaataatcccaaaaacgggactttgaatgtacccaatttggggatgcagaacctatcagtgaatctatcaatgaatctctctcaagaacacgagtggattccagatcgagatcaactaattggcatcctaaatatagcgggacagcagcagaatttagaattaatttttgggttaccagatttcgaatttcaactcggtgctttcaatgctcactatgcaggccaagcgatgcctaatgctaaaaaactttattgttttgcccgttggatcattgataaatttgaacgttatcaaaaagcaaatccgaattatctaaagcaatctgaaactcatcctactatcacgactcaacctataattaatttagtagacggcaaacctaaaagtttactggggagtatgtaa

SEQ ID NO: 60692 - DNA, 168 bp, Acinetobacter baumannii
atggataagcctcaagcttcagtcaataaaaattcggttcagcaaactacagaatcgcaaccaacttcaccgtcttctacttatgttgaatccgtacgcatgacaccagatcgactcattaccgccatcattagaaatattaggcaaggaggatctgatgagcattga

SEQ ID NO: 60693 - DNA, 555 bp, Acinetobacter baumannii
atgaacgctaaagtacaaattcgattacaagagcaattagtccccttctatactgctactgattatttaaatgcttataaaattgcatatgaaacggctactcaacttcgcactctactcaatcaaattagtaagactgcagcgttcgttaaagattatgcagaaagacatgatttcgatagttcactcttcacagagagtgaaaatttaatcgcaatctcgcttcaactttccaactcttatgttgatatatatagcgctgaaataaacagacattttcaagaaccatatgatcgatatgacgcgggcgatctatttggggcttactcacttgctcaagaaaatacagcttggctagaaactttaatttctcaaattcaaatcgaagttgaattgagtaaagaagcagtaaaggatgtcattcacagcggtgtttttacgacacttgagcatttaattaatattgctgcattcttcgctgaagccaatgttaatactttttctactgaaagtgaaaaatttgaatctgaatgggaggcatctaaaaatggataa

SEQ ID NO: 60694 - DNA, 1629 bp, Acinetobacter baumannii
atggcgatatatcatttttcagttaaagcgatcagtagaagtgatggacgtagtgccgttgcttgtgctgcctatcgtagcggtgaaaaattggtatgtgactattacggaaaagagcaagactacacaaaaaaaacaggtgtcgaatttacaaatatctatgcacctgaaaacaccaaaaaagaattattagaccgtaacaaactttggaacgcagtcgagaaagtcgagaacagaaaaaattcacttcttgcccgtgaatttgaaattgcattcccaagtgagctaaacgcagaacagagaaaaaccctactggatgaactgtgccaggaacttgttaaacggcatggcgtgatcgttgatgcagcgattcacgcaccccacaccgaaggcggatctgatgaccgcaactatcatgctcacatcatgtttacgacccgatctattagtaaaactggtgactttgaaagcaagaaatatcgtgacttcagcagagacgatgggacaaaaaccgttagccagtggcgcagtgattttgccgatcttgtaaacaatcaacttgaagctattggctctaaagagcgtgttagtcacttgagctacgaagagctaggcaatggactagaagccactaaacacgagggctacgcagtcacacagctacgcagacttggcattgatacagaaatcagccttgctaatgatgagattaagcagcgaaacgctgaaaaaatcagaaacgaacaagtgatcactggactagatcaagaaatcacggtctcagagcgtcttatttgcgatttaagagaagaaaagagcgagtacgatagaaagcaagctgaaactcaaaaagcggctacaatcgcagcacaacgcaaaatagagcatgatagagaacaagctaaacaacttgatcgagataaatttcttcagcttcaggatcgctataaaaactttgctgatagctatttcattacaataaacaataaaaatcagtcacttaatgatatttctgagcagcttgagaggtcgaaaaagtggctatcgaaacagcgagatgtttacgaacgagagggcatattttatcacgctatgacgcatgacatgatcagcatcaatacacctgagtattggctttcaagcgtccagtttgatagaaagaaaaaagaaattgaacggcaatatcagacacaaattattgagttaatttcagattctaatattgaaattgttgtacgtgatttaagagaaacggcagcaaaaatcttagggcgtggcgaggatctacccgttaatcatcaagaaaaacagacgtttttcaaaaagttattcgcaaaaaaagagtatgtacatagctatgaaacactttctgattatgatgaacatgtcgtccctgttttgaaaaaaatagagataagacaagaacttatagaacgtcaaaaagagaagcaactcgaaagagaaaaactcgatgagatcgagaaaaaacgttatgaacaggaagttcgacaaattaagcttgaaaatgaaaaacgttacgagtcagaacgcaatcagcgttatcaatctcagcgagattttgaaacagaacagccaaaaccaagacctaaaaatgattttgaaatttag

SEQ ID NO: 60695 - DNA, 261 bp, Acinetobacter baumannii
atgagtcttgattatctgaatgaaaaaattgcaaaacaagaagagcgattgaaacagttaaaagtgcaaaaacaagcaactattgctcgtgaaaaatcaaagcaaaaagaacaagaccgaaaggatgatacaagacgtaaaattttgttgggttcttacttactcaaaaagatggaaaatgaagaaaataaggaaaaaatactcgctgaaatgaacgagtatttaacacaagaaagagacagaaagttatttaatctttaa

SEQ ID NO: 60696 - DNA, 348 bp, Acinetobacter baumannii
atgcagattaaattcaataatgcaaacccatgcatgccaaaaaacctcgctaaacaactgattgtcgaaagcgcaaaacttctgaatcatcaacaacgccaagccttgctcgatattttcatgactttagatcaggcggaaagaacagctgaaaatacacttcagcaacatgctgtagcgcaacaaagcacccacaacttttctcaagattacgaatgccaagaatacaatcaggaatattggtcaggtcattactatgattcttacagtcaagaatatccggaagattgggtaaaacggactcagtccaccccaggtcgtcataagttccctagaactgcttactga

SEQ ID NO: 60697 - DNA, 144 bp, Acinetobacter baumannii
atgaaaaaactgaaagagatcctacaaggcattgcatttctatttatcgggattccgatcatgattatggccagcattatggatcaacgagcctttaaaaaggagcaggatcagcgccagaaagcccaagatcaaagcaagtga

SEQ ID NO: 60698 - DNA, 555 bp, Acinetobacter baumannii
atggctaagttatcactaagtgaagtatccaatcgctttaatgttagtcgctctacgctatatagggctataaaagaagggcgtatatctcgaagcgcagatggtctttttgacattgcagaagtcattcgctgctttggagagccaatcaaaaagcatgaaaaaaaacaggaagttgatcaatctaaggatgatgcagatttacgtcagcttgttgattttatgaaaaaggagattgagtcatataaagatcgtgagaaacgctatttagaccaaatagaccgcttccaattgttgctaggacataaagagtcagaagaaaaaatgtctcatgacacaccaaatagacatttcaatgaaacaccttgcgacaacaatgatgactcaagtgaaagtattgaaaataaaagcatagagccaaattcattatctcatgacacagtaacgagacataccagtgaagcaccaaaaaacgtatcacagacacatcatgagacaagaaaaaagcgtagcttatttgggcgagtactgagtgcggtattcgatgaagactaa

SEQ ID NO: 60699 - DNA, 951 bp, Acinetobacter baumannii
atggccgacttagtcgtaaaatcaaataaacttgttcaagccttacagacacttactttaagtgaaactcgcctattacagctcgctattgtcgatgctcgtgaaacaggccaaggattatcagcagaagaaccattagaactaaatgctagtagatatgctacagcctttaatgtttcacctgatgctgcttatttagctttagttgaggcagaagattctttatttaaaagacaatttactattaccaatgaagatggaactttaacaaaaagtcgttggattcaagatgctaattatcgaaaaggtgaaggtcgcatactagtaacattaactcgtgttgtaattgaacatgtcacaaaaatagatggctttgaacaatattttactagttaccatcttaaaaaaacttccgattttaaaagcgtttatgctgtacgactttatgagttgttaatgcaatggaagtctgtaggcaaaacacctatatatgagttgaataaatttcgtagccaattgggtataggagttaatgaatatgatcgtatggaggcttttaaaagacgtgttttagatattgctattaaacaaattaatgagctttctgatattaccgttaaatatgagcaacataaaaaaggtcgtgctatttcaggtttttcattcgtcttcaaacaaaagaaaacgaatcaaccaatagcagataagcgagatccaaacacgctagatcttttttcaaaaatgacggatgctcaacgtcatatgtttgctaataagctttcagaattacctgaaatggggaaatattctcaaggtacagaaagctaccaacagtttgctgtacgtattgctgagatgctacaagatcccgctcaattcaaagagctatacccatacctaaaaaaagtgggatatatgccatcaaataaaaaggacttagtaaatggctaa

SEQ ID NO: 60700 - DNA, 324 bp, Acinetobacter baumannii
gtgacggaacaaaatattcccacaactgcccgaaaaaatcttgaatggttgagcccttttattactgaacaattagagcctgatatctgggataacctacataccatttcttattatttttcaaaaaaaccagggatttctatcattaaactctgtaaagagattgatattcaagaaagaactacggctggaacaaccctacaatatttaagaacccttatagcaaatcgttttattaaatttgatatccaacagccattccagaaattaacaggatcggacctggtgtttgatttagaggtatcttatgtggcaaatcaatga

SEQ ID NO: 60701 - DNA, 909 bp, Acinetobacter baumannii
atggatataaaacaacaatttactgaggttgaatttgggcaacaaaaaatcaaagtacctaaaggtggttattatgaccgttttagaatgaatcccgatttagatgaagtcgctcaagaccctgctgctggtaatatcgactttttccgtcatattcctaaaaaaattgtggagtcccgtgtaggtcctgtttgggcacccaacttttattatcgtagcgcaaatgtgcaactgctgatgcttgcacctattaaacagattaaagcaaaacttcctgctgacttaacaccattacaacccttcccgggttatgggttggtcgctgttacgttctttacctattcggtttgtgacaatgacccttataacgaagtgtcgattgcgattgtggtacgcaagcctaacgctcgcggaccacatattgcagaactaatcaaatcgatacgtcaacgtcatttttatgcacatgttttggcgttacctgtcgatacagaaattgccagagtacgtggtgtatatggttaccagttaccaaaatggctgactaaaattgacgtgaacattaactcaaaaagcgttcaagccaatatttttgaccttaatggtaagttagatttaagtttagagactgctatccccactttaaaacatgttgactctgaaacacatattaataaagcaaccatgctacatgttgttgatggcaaatggcaccagacagaggttcaatcaaacattctttctttcgcgcaaaaactttttccaagaaaagtaaaattagtgaaaaacgaaggccctttaacaaagctattaaatgaactaggtgcttcaaaaattttgcgtttagatgttatagaagatgcacaagtcgtgcttaatttgcctaccttaattaatttaaaagcataa

SEQ ID NO: 60702 - DNA, 819 bp, Acinetobacter baumannii
atggaaaattttgaagttataaaagcactatttctagggtttgttgaaggtttaactgaatttttaccaatttccagtactggccatttgattttatttggtcatattatcgatttccattcagatggtggtcgtgtattcgaagtagtgatccagttaggtgctattttggcagtatgctggttatatcgacaaaaaattattaacttgattaaaggcttctttagtggcgatgtagagtcgcgtcattttgcttttagtgtattaattgcttttttcccagcagtgattattggtgttttagccgttgattttattaaaagcgttttgtttagcccaattgtggttgcgatcgccctcattgttggtgcactgattattttctgggttgaatctagacagtttgagcataaaacactagatgcgacaaaaatcacgtttaagcaggcacttttagtcggtcttgctcaatgtgttgcgatgattccgggaacttctcgttcaggtgcgacaattgtaggcgggatgtttgcaggtttatcacgtaaagccgcaacagaattttcgttcttccttgcaatgccgaccatgttaggtgcagcgacatttgacttaattaaaaatgctgatgtgttgacctcagacaatatgattaatattggtgttggttttgttgcagcatttattgcagctttatttgtagtaaaggcactggtactttttgttgagcgccatacgctacgcgtatttgcttggtaccgtattgtgcttggtgtcattattttgattgcagcaatgttctttaacttatctgcttaa

SEQ ID NO: 60703 - DNA, 915 bp, Acinetobacter baumannii
atgttcctaaggaactttttttctaaggataatcacgagttttcataccctaaatcaatttataccgttaaagatgcagtatatatttcatcatcaaaaaatggtgttgttttagattatttcgcaggttcaggtacaactgctcatgcaacgattgctttaaatcgtgaagatcatggaaatcgaaaatacatccttgttgagcaaggcgagtattttgatacagtcattaagccacgtattcaaaaagtcgtgtattcagcagattggaaagaaggtaaaccaaccaatcctgagtctggtattagccattgcttaaaagttgtgaaacttgaaagttatgaagatacgctcaataacttagagttggtgcgtaaaggcgctcaacagacgcttttagcagagcaacaaaattcaaccaagcctgaagatcaaaatgcctatagtgactatctcatgcactatatgcttgagctagaaagcaaagattcattgctgaacgttaaagatttcttaaagccatttagctatcaaatgaatattacaaccgatagcgcaggtgcgtttgaacgtaaaaatattgacttggttgaaacctttaactatctgattgggctgaatgttcaagaagtagattatcagttagataaaggctatgcccaaatcacaggtaaattgcgtacaggtgagtatacgacggttctatggcgtgattgcgacaaaattggctatgcagaactcgatcaattactttcaaaacttaaaattaatccaaacgatggcgagtaccaattgatttatatcaacggtgatcacaacgtagcaagcaaatacaccaccaaagagggtgaagaaaaacaactcaaagtccgttcaattgaacaaaccttcttaaagaatatgtttgaggagtaa

SEQ ID NO: 60704 - DNA, 3423 bp, Acinetobacter baumannii
gtggcaaaggctcctaaagaaaaaacgaaagcggttaaagtcaattttcacgagcaattgattttaaataaatggttgtggtcgaagtttaatcccaatcgtttggaaggcatgaaacaacagcttgatcatccgcaatttgagggaatcgagcatgagggtgataatgcaggacaaacgaaattctttagtgtaatcagcaatactttgtttaacaaacaggttgtagatatcgatgttctacgtcgctatgacttaaacattgtgaagcactggcagaaaattactgaaaaacgtaatgagatagaagggcatattttaaatctaaaatatttccaatacctttcattgctttttacagaattgtatttagatcaatattttaatcatcaagctggcatgctcaacgagctgaatgttgaacttgaacaatataatgatgaccagaaaagtgacgcagagcaatttcagcaatatttacctgaagacctaaataaaattggttattggaatgcaacgggcagtggtaaaacactgctcatgcatgtcaatattttgcagtatttagactatttccaacatcaaaatggcgatagtacttatccagatcaaatcattttacttacaccgaatgaaggtttgagtgaacagcatttgcaagaactcacggactcaggttttcaagcgaacctgttcgataagcagaagagtcgtaatagcttgtatcgagatgaaattcaaattatcgatatgaataagctgagtgaaacggatggtgataaaaccgttgcgacgatgagcttggaaggcaagaatctggttttgatcgatgaagggcaccgtggtacgagtagtagcgcaggtgcttggatggaacgtcgagatattctcactaaagatggttttagttttgaatattcagctacctttggtcaagctgtaagtaaggcagacaacgtctacaaacgctttgaagatgccaaaaaacagaaagtcaaaatgctgtatggtgtggcgattaataagctgactgaagaacagaaaaaaaatattcagcttgatgaattagaacagcaaaaatatcgtcgggaagcactacgagaagtctatgcaaaaagtattttgtttgattattcgtacaaatatttctatgcagatggctatggtaaagaagtcaatattctgaacatgaaagaatatcatgaagatgatgagcgcaatctatatcttacagcttgcctactttcattttaccaacaacagtatttgtttaaaaagaatcaggcaaaacttgccaagtttaatattgaaaaaccactttgggtatttgtcggaaataaagtcaatgatgatgactctgatattttagccattgtgaaattcttggctgactttttagatgcctctcgtaagagcaaggtgattggttggctgcatgacttaattactaatacatctcgtttggttgatcctaaaggaaacaatatttttgccaatcgatttgcacctttacatggtcaaaatgcaactgatctttaccaagatattttaaaaagcttttttaacgctacaaccaatcaacgtttgaatgtagtacgtatcacggcgaataaaggtgagttacgtttacaagtcggagaaaatacgccttttgcagtgattaatgtcggtgatgaaaaaggcttatacgataactgtgatgaatcaagcaaaacacattatttaaatgcacgtactgatgattttgcagagtcattatttccgacattaaataatgatgatagtgaaacacatcttctaatcggttcacgtaaatttaccgaaggttggagtagttggcgtgtctcgaccatgggcttattgaatatggggtctggtgaaggtgctcagattattcagctctttggtcgtggggtgcgtttaaaaggtgagcacttctctttaaaacgaacaccaagagaaatttatagtaaggctgaatataaaggtctgcatttagatttgatgcaaactattaatatttttggtttacgtgctgactacatggaaaaattccgcgattatctaaatgatgagggcattatcctgaatcaggatttagtcacattggattttccaaccaataaaattcaagcgcctcgcttaaaaacactcacattaaaagatggctataaagataatcaagccaatggttttaaggctcagttaaagctctcgatgtttaaaattccaaaacaatacgaaggtaaaatcaaaaaaccttttgtcgttttggatttgtatcctcgcttgcaagcctttcataccgataagtcaaagcgtcaaatggatgttaaagacaagcgtcaagagcatgagatttcaccaaaaatcatgtgtatgtttgattttgatgaaatttacttgcaacttcagcaatataagttccaacgaggatatagcaacttacagttgaacgttgatgatttacaggagttttgcttaagagatattaagacctctacagaagactggtacaagcttttagttgactcatctgaattaaccaatgacgtgagtggaattaagaaacagcaagcgatattaactgagttgttacagtcctatatggataagttctatcatgcgattaagaatgcctatgaagggcagttttatgaagtgacagaatttagcttggatgataaggatttgcctgtacagatttgtgagcaatatacccttactgctaaagacggtcaaaataacgaggcacaagaagtatttgatcgtttggaaacactgaaagatttggttgccaaaggtgatgtagaaaaattagcaccttggaaagaagatggtagctttagagcgattacgtttgatcgtcatttgttctatcctttgttggataagaaggatgaaagcttaccatttacatggtcaccaatgctatttgactacactagtcatacccaaagtagtgaagtgaagtttgttctggatttgcaaagttatatcaatactccagatgccaatgaactcctgaaaaatcatgaactctatttgttgcgtaatgctgataataagtatcgtggactaggtttcgccttggcaggtaatttttaccctgattttttattgtggctagtgaataaacaaacagggcagcaatatttaactttagttgatcctaaaggcatccgaaacatgaatcacgatgatgccaaaattgagttctataaagagataaaaagtattgaagcaaaactcgatcattctgacttgattttgaatagctttattttgtctattaccccaatgaaagatattctgaataactctctttctgaagaagagtttgctgaaaagaatgtcttatttatggtgggtaatggtacagcttatcttgggcaaatgttgaagaaaatttttgttcaataa

SEQ ID NO: 60705 - DNA, 525 bp, Acinetobacter baumannii
atggggaaagcccaaactaaaaatactgtccaatttcaaactttgagtatgattcaagatcaatttgaaataataattaatgatgatggcagtggtgaaattgctgatctagtcgctttaagacaagagaataacgaaataattctaagtttatatcattgtaaatattcaagttcgcctgaagctggtcgaagattagctgatatgtatgaagtttgtggacaagctcagcgttctatacgttggaaacatgcgggtctaaaacacttattcaaacatatcaacggtcgtaacaataaatggctatctgaaggttttagtagatttgtaaaaggtgagttagctgacttagaaaaatatagaaatatggcaaatacgatgccaattaaattagaggtaacaattgttcagcccggcttaagtaaatcagttattaccgaagagatatcaaagttattagcatgtactgaatcgtacataaagaaaacaacaagagctgacctaaaagtttggtgttcgacatga

SEQ ID NO: 60706 - DNA, 1548 bp, Acinetobacter baumannii
atgtccagccagagtccagacgaaggtctacaatttccgatacacgcttcaacaaaaaaacaaagtacttctcgcacaggccaagagattttgtcagaagctttatctattgtagataataaaactgctcaacagattttgactgaaaaaaactggcggaaaaactatccaagatactttaaatcacttgttcaacatgggctttctaatagcaataacccgattactatcgccaaacagggcttacataaggctcatcatctttttgactatttccgcgatggtaaacactatcttttaaaagatgctctgcacatccctaccactaagcctttaaatacagttaaatttaaaggtgaaagtgaagctgcaccagaatggtatgttccatataaaggccaaaaacttagcgggcaaagcttacttgatcaaattcaaaaatgggaaaatgcaggtattattgaaccaagccatgccaaggctttacgtgaagctgccgctcatccagaatggtttgatttatctgatcgaaccatggttctgtttggtgcggcttcagaagctggtcctttaccttggctagcaaagtggaaagcgaatattgttgcaattgatttaccgaacccacgagtttgggggaaaattttaaatacaattcagcaaggaaacgcaacgctgattgcacctacaattgaatcagttgactcaacagcaaaagcttctgaattaagagataaattaggtgccaatttactgactcaactaccagaaattgcacagtggttagttcaatttcctcaaaaattagatttagctgctattgcttatctagatggtgaaaaacatgtccgcgtctcaatggccatggacagtattatgcaatatgtgagtgaacataaacctgatacaagcttaatgtttatgtgtactccaaccgatgtttacgcagtacctaaagaagttgcagaggcagctcaagagaaatttaaatctcgttcacaactacaaaaaatggctgcaaaaggtatctctacactatcgctcaaacgttttttccaagcaccttatcaagacttgattaccagcgaaaatggcaaaacttatggtattgcagactgcttggtagttgaacaagggccaaactacgcattagctaaacgtattcaacaatggcgagcaacacttgcccgtcatcaaggccaacgcgtgagtattaatattgctccatctacgacaactcattcggtcacaaaaaatccactccttaaggccgcttttaacggtgcggaactttttgatgtagaagcgtttagtccagaaaccacaaatgccattatggcggcactctggatccatgacttaagaaatgaatcttctgtcgcaaatcctgaaactgtgcttgaccatcctctagagttgatgatggaaggtgccaaccatggcggtctatggcgtgtggcttatttagcccgtacagcccttccttttgctgcaatctatggttttgcggccgaaaagcttccatttaagaaattttctaaaaaataa

SEQ ID NO: 60707 - DNA, 471 bp, Acinetobacter baumannii
atgaaaaaatatttattaacttgcctcttgcctatttttgctactgcttgtagtgctaaaccaacccaacaagaagaactagatattcaagctacctttttgcctactgtcttcaatcttgatgcgggtacttatgctttagctccaaaagaagctcctacagctttaaccaaacaattgtatgatgatgcattatttaagcttggtttattaaaaagatatgatgaccaagcaagtgcaaatttcaagcttgaaaaaactgtagagccaataaagttaaatactttatgtttaatgagtaagtttgttaataacccaacttatataaaagctgtaaagcacagtattgagcaagatcctgatttaaataaatggctcaaagaaaaacaaccaaaatggcaaaaagctttgagtaaggaagacccagtaatttttgactacccatgtaatataacaataaagccgctttga

SEQ ID NO: 60708 - DNA, 948 bp, Acinetobacter baumannii
atggttaatggctcaacttttggtttacatggtacagaaaaattaaagcaacatttacctaaagacgagtgggtctatttccctgacgtgattcaggagggtaatgcgattaatagtgtactcaatgtaaaacatgtcattgttggtgttgaatcaagctatgctcaagacataatgcaagagttattgcgtccattcttccgttttagctatcaatatttattcatgccgattttagatgccgaatttactaagctcagcatttcaggcatgttagcaactagaattagttatatgaatgaccttgctctagttgctgagaagttgggtatagatattgcgaatgtaaagcatggtattgctgctgacacacgtattggtgcagcctacttgtcggcaggtgttgggtttgggggtgaaaatttttcacatgatattttaacactttctagtactgtttccgaaacgggtgtgaaaagtcgtcttttagaacaagtttgggctattaatgaacaacaaaaagaaattttattccgtaagttgtggaattattatcattgtgacttgagtggaaaaacggttgcaatttggggggcttcatttaaagagaacaccccaagtacacataactcacctattcatatcctattggctgctttatgggcccaaggtgtaaaagtacggttacatgatccgcaagctcttgatgaaattgcggctttatatggcagccgagaagacctgattttatgcgctgatcaatatgaagcagcggaaggagtgcatgcattgtgcttagttacagcatggaagcagtattggagtcctgactttaaacagttacaacaattgatgcagcatcctcttattttggatgggcgtaatatttatgatccagcatatgtaaaatctaaaggttttgcttatgaaggagtaggtcgattatga

SEQ ID NO: 60709 - DNA, 297 bp, Acinetobacter baumannii
atgattgagtctcaagttaattatattttacaacttattgaactcgtagataaatctggtcaacacgctgtagaaattaaaccggaagtccaagatactttcaatgaagaaatacagaaacaacttcaaggtaccgtatggcaagcaggcggttgtaatagttggtatcaggctgctgatgggaaaaacttttctttatggccaacttatacttggaagtattggttagaaacccgtaaagttaacccccaaaattatttactgctaaataagttctctaagagctatgcagcataa

SEQ ID NO: 60710 - DNA, 417 bp, Acinetobacter baumannii
atgagcaaaaagattatcctacgttttaatatagaaaataaaattaatttacttggtctaaatcaggatgtaatacttttaggacgtaggaatgatattgctgatttaatgtcagttgccgatttattcgttttaccttcagcatgggaggggtttggtctagttgttgcagaagcgatggcatgtgaatgttttgttgttgcaacagattgtggtggcgtaaaagaggtattagggggacatgggctgttggtagagcctaggaattcagatcaattagcagatgctctgaacactgctttacagttagatagaaaaaccaaggatgtacatactcaacaggctttgctttatgtaaaacaaaattttgatttacaaaaaattatcaagcaatggttggatatatatgcaaactaa

SEQ ID NO: 60711 - DNA, 606 bp, Acinetobacter baumannii
atgaatatattgtacttaattacaggccttggtggtggtggtgctgaaaaagtcgtggttgacttagcagatcaaatgcatttacgtgggcatcgtgtgaaaattgcatatctgaaaggtgaagttattgttaagcctcaatcagccgatattgaattaatttgtttagaattaaatagaataacgcaaatgagacatgcatttaaaaaatttaaatctattatcaaacaatttaaacctgatgttgtgcatgcacatatggtacatgcaaatatttttgcgagattagtacgtaaatttataggctttcctcgtctaatttgtaccgctcataattctaatgaaggggggcgtatgagaatgatgctttatcgttttacagatactctttctgaccttaatactaatgtaagccatgaagcaactttgaagtttgttgagcttaaagcatttaatgagaatgcaaaaactgtttataatggtattgatttaaataaatttaatagaaaagcgaatctttgcagatatgattttgtacatgaaaaccaaaagtttttattggcagtggggcgctttaatgagcaaaaagattatcctacgttttaa

SEQ ID NO: 60712 - DNA, 408 bp, Acinetobacter baumannii
atggcttttattggtctatctgaagtaataaaagatagattagaagtcttaggatctgataaagatggtagtaataatgtgaagtttgaagcattacagtattttttttctgatccaatgcatatattttttggttacggcaatattgtccggactcctcgcacacctattttttttgaaggggcgacagatattacctttttttttgcaattatagctatatttggtgttttcgtaggtggtgggattctacttggttttatcacgtggctttttagaagtaaatataactataaagaaaaagttgtaatattgcttcctttaataaaattaacaaatcccgcattaatattttttagttgttttatttttttaatattaagccttgaaagaagagatagacaatga

SEQ ID NO: 60713 - DNA, 873 bp, Acinetobacter baumannii
atgactgaaaattacattacttcagaagatttagcatttcgcccacgagcacgtctattacaaatgctcggtgatcagttgatcggctcttctcgtttagcaatttttgagcttgtgaaaaatgcttatgatgctgatgctgatactgtattaatcactttagataaaattaatacagagaatgcaaaaatcattgtcgaagataatggtgaaggaatgtcagctgatattattaagaatatttggcttgtccctgctcacgatcataaggaacaacagaaaaaagaaaaaagacgaaccaaagctggtcgtttacctttaggtgagaaaggtttaggtagattcgcagtacataaattaggaaatgaaattcaactcgtcactagggctaaagattctgatgagtgtgttcttcatattaattggcaagatttaattgataaaccttttttggaagatactcgagtagaagtagttacgagaagcccaattatcttcacaggagaaaatacaggcactcaaattactataagtaacctgagagaacaaaattggtctagaggtgatgtaagaaaacttttacgccaaattacttcgatatctacaccttttaatgaaaaacgaagtgacaagtttgaaacattacttgaagttaaaggacatccagactggaccgaaggtgtttcagatattgataaattaaaggagagagcgccttggcatatctctttttcaatcgtcaatggtttactatctttaaattataattttattggtgttcctggaattaaaatagaacctcgccaagaattatttgaaaatgagaggcttttattaccatcaaattttaaaactatgatcgcgataaactag

SEQ ID NO: 60714 - DNA, 1047 bp, Acinetobacter baumannii
atgaaatttagattgaggtggtttttactttcgcaagaggtctattatgaaacctataatgaatatcttactcatgtgattgcgaggcgggatatcaagcatgatgtgccaggtatttattacggaggacttcccaaagctcagcttgatagcagctatttagcttttttggaatcagcacttacaccacattctaaggaacttacagaagacacggctgaactcaaaatattacaacaacaattcaaagtgcaatctgcatctaaagggagggtagggagtcaactggcacttgaacccagttttgtgaaagagcaatttgcttttttacatagacattgccaagaaaatattcaaaaagatcaacatatcattaatcaattgaatgcatacgcgtgttggatgtggcatgttagcttgctaagcatggccagacggcctaataaaaatctgttggggaatttggaagattattgttttgagcttaaaattctatatgtaaacgataaaaagaatagcaaggtaagaaaggatggacgatttatcccgctatccgatttcttcttaaaagcactgcaaaattacactgtatttttaaaacaaataattgaactgtatagcccacttttaaaacaagtatttgcaaagaaaaaaattgcgctcaatgacttattcggaaaggtcattgatagtaaagatatcttgccgataactgtcaaagagtggcagagcaggaaagttaagttaatccctttatctcgaaactgggtaaatttatatatggaaggaatctttccaaagaatatgtattcgaattggttacgtcattttgatatgaattttttgatgtatgcagaagaaaaagaagaaaaaaaaactgctttagcattccatttaattcaggctctttatggtcatgaccaacgtgaccgagaggcttttcatccgtattcttcacttattccgaatgtctatgtacagcaagtccgccagcaattgcaagataatgtcaaatctttatcgattaaacacttagagcgaaaatag

SEQ ID NO: 60715 - DNA, 756 bp, Acinetobacter baumannii
atggagaccgttcagggtggcatgttgcttatctatactttaatcgcgattgttgctttgattgttatgatcgcgaagtttagaatttacccctttttagttcttattattgtttctctcggtttagctcttgcagttggcatgccaatggatgggatcgttaaatcatatgaggctggtaccggtaaaacattaggtcaccttgcgattgtgattgcgctaggaaccatgcttggcaagatgatggccgagtcaggtggtgcagaacgaatagcaattactttaattaaatggtttggtgaaaaacatattcactgggccatgatgttcattgcattaattgtggggcttcccgtatttttcgaagtcggttttgtacttctaattccaattgccttcaacattgctaaacgcacaggtaaatcattgttggttgtaggtttacctatggttgcaggtttatcggtcgtacacgggttgattccaccacatccagcagctttgctagcggtgcaggcttaccacgccgacatcggtaaaaccattatgtacagtttgttggttggtgtcccgacagcggttgttgcaggtccattgtatgcattatggatcaacaaatatgtcaaattgcctgaaaataatcctttagcaaagcagtttgttgaagcagatgctaacaagacacgtgaattaccaagttttgggattaccttatttacgatcatgctgccagttgcattgatgctagttgtttag

SEQ ID NO: 60716 - DNA, 282 bp, Acinetobacter baumannii
atgaactatatgaaaaatgcagcaaaacaaaaattaaaagcactagatgagtttcgcaaactcaaaaaaagacattttaatgccaattcaggtttaatgaagattgcaacgactcatagctttaaaggttttgaagctgataccacttttctgatcattcagccaaatgatagcccagaaattgtttatgctggactgacaagagcagcaaataacttatatatcattgatttagatactagcaacgtatataaaaacttctttgagaaacaactttcttaa

SEQ ID NO: 60717 - DNA, 273 bp, Acinetobacter baumannii
atgggtatcttagataaattaaataactttacaactaagtgtgctgaaggtgcttctaaacttgaagaaaaaacagcaaagctggctgaaaatgctagaaactatgctgaggaagaaagagttaaggatttttataaaattaaagctgaattaattgagataaataaaaagcagaaagaagcaggtgttgaagaaacaacaatttttgatttctttaaaaaccgtcccgaatatgcagatttattagagttagagcgaaataaacagaattaa

SEQ ID NO: 60718 - DNA, 2838 bp, Acinetobacter baumannii
atgttctacactaaccaccaaataaaatattttgcatgggaaataacgaaaaaacgttcagcatcagatattgatcgtttgtcgcagtcgttgtttgatgctcaggtcgatgtaaatcctcaccaaattgaagctgcactttttgctttaaataatcctttaagtaaaggggtcattcttgctgatgaagttggcttaggtaaaacgattgaagcggcgttagtgctttgtcagtactgggcagaacgacgtcgaaacttgttgattatttgcccagcttctttacgaaaacaatgggcacaagaactacaagataagtttaacctgcctacgcaagttttagatttaaaaacctggaatatggctcgcaaagatggtgtttatgatccatttaaaaatgggaagatttctataatctcctatccttttgcaaatcgaatggagcatgctttggcacaaatcccatgggatttggtggtgatagacgaagcgcataaattacggaatgctcatcgctcaagtaacaaaattgggaatagtcttaaacgctcattgataggtaagaagaagttgttattaacagcgacaccattacaaaataccttaatggagctttatggtctaagtacgattatagatgagcacttatttggtgatgagaaagcatttcgttctagatatgtggttgatggtgatattcaatcgttaaaaaaaagaatccagcaatttatgcaaaggactttgcgtaaagatgttttggaatatgttccttacaccaatcgccatgctctaactgttccttttaaacctactgatgatgagcaaagcttatatgattccatcagtgagtatttgcagcgagatgtaagctatgcatttccacaacaacaaaaacatttaatttcaattgttttaagaaagcttttagcttcatcaactcctgctgtaatcgcaacattagaggcaattcaagcacgccttcaaaaattgttggaacaacagactttagatgaggattggttaagtaattttattcttgatgaggatatggatgaagagttattggatgacatggatgatgaaacaggtcatcaacaaatagataccaatttaattaaatctgaaatagctgaaattgaacgttatatacagcaggcttataaaattaaagatgatagtaagacttttgctttactttccgcgattgagcaaggctttgctcgcatgtttgaaatgggggcgaaacgaaaggctgttatttttactgaatcaaagcgtactcaggaatacttgatcgcattcttggaagcacgaggatacaacggaaaagtaatagggtttaatggtagtaatacatctgcaacgaatacaggtatttatcaaaagtggttgggtaaatatttagggactcaacatgttacaggctcaccagcaattgatcgacgcacggctttaatcgatttttttaagaatgaggcagaaatactaattgcgacagaagcagcagcagaaggtgtgaatttacaattttgttctttggtcattaactatgatttaccatggaatccgcaacgtgtggaacaacgaataggtcgttgccatcgttatgggcaggagtttgatgttgttgtcgttaatttcttaaatgaaaggaatgaagccgatcagcgagttttagagttacttaaagataaatttcaattatttgatggtgtctttggtgcctcgaatgacattttagggacagttgaaagtggtataaattttgaaaaacggatttctgaaatttatgatcagtgtcgtagtccagaagaaatagaacaaagctttaagcaattaagagatgagctagaagagcaaatcaacgttaaaatgaaaaggacgcaagagctgttacttgagcattttgatgcagatattcatgacttgctaaaagtacaaaaagaacgagctgaactacagctagataaaattagtcgtttgttttggctatctacaaaatatattcttggtaaatttgctaactttcacgaccaagatttaagttttgacttaacaaaatctccagttttgaatgcaccttcaggtaagtatcaacttatacgtaaaggtgagcggattcctgaaaatacctttatttatcgtttaactcaccctttgggtgaatttgtactagattatgctaaaggactgtcgacacctaaacaactaatccaatttgattatagtcggtatggtcaaaaggtaactttactggaagagttaaaagggcaaaagggctggttatctattacggtattaagtttagattcctttcaggaagaagaacatcttgtgattactgcaatgactgatgatggcaaagttttagatatagacttgtgtgaacgattacttcaagtaaatgccacagttcttcaggatgtaacagaaagcattcctgagatttttcaagcaaatgtagagaagcaatatcaagttgttttgagtcatgcattggaacttaatgatgaatttttcaaaaaagaacgagataagttggatcagtgggctgatgatagtttgcttgcggtagaaaaaatgcttgaagatataaagttaaaaatatctagtcttaaacgagagtctcgaaaagcatttgatattgaaactgaaaaacgactacaggaagaaatacaaaaagctgaaaaagaaaaacgaaggatgagacaacaagtttttgatgttgaagatgaaatagcggataagcgtgatgcaatcattgatgcactagaacaaaggttgcatcgttccagcaaagctgaaaatttatttatagttcaatggaaagttgtttaa

SEQ ID NO: 60719 - DNA, 3078 bp, Acinetobacter baumannii
atgaataagatttatcgtgtgatttggaatgcttctattggagcatggattgcagtttctgaaattacaaaatcaaaaactaagtctaaatctacaacagttagtgcggttgtaactgtagcgctcatagggctttcaggtaatatttttgctgaaactggtacaaatggtggtacaggtggaggtactgcaatttctaattgtacaggagcttctggaacaccagacgggcaggcgactacaccaactggtgctacgggttcaaatgcgattgctattggttgtgatagtaaagcagatgaaaatggacgaattttagatagaaacaacccttataataacagtacaaccgccaataccaatggtgtgaagtggagtacagatgccggttattctggaagcagtattgcggtgggttctggagctgaatctggtcctttggcagttgctttaggtgcttatgccaaagcgactaatgttgcttcagttgctgtaggtcctgctgcagtttctacaggtaatacttctttagcagttggtagacagtcggctgcaacagcagactatgctcaggcaattggtaacgttgctgcagctactggtaaaggtacattagctataggtcattcggcaactgcaacaggttatcgagctattgctattggttcgcctgatattgacaatgcgggcaatgtcggcactggccaacaaggtaatggctatcaaactacagggcaaaccaaagcgacagcaaaagactctatcgctttcggtggtggtgcgcaagcaactcaagataatgctttggcaatcggtgctttctctgaggcatctggccaaaagtcggttgctattggtaccggagcgaaagccactaaagataatgctgtagttgttggtgaaaatgcaacttcagacgttacgggcggtgttgctctaggtctcggttctaaagtgagtggcgataacagtgcggcaattggtcagaactcggtagcaactgcacaatcaggtgcttcttatttaacgaatgttgctgcatcggctacaaacggtacggtttccgttggtgatgttggcaaagagcgtcgtattcaaaatgttgctgatggttctttagatactgatgcagtcaatgtagcacagttgaagaaagttgcagcagcttcaaatactcactatgtgagtgtcaatgataacggtacacaaggcagtaactataataatgatggcgcaaaaggccgtaatagtatagcaattggtgtaaatacagcagctacagctctcgacacaacggctgttggaagtggggctcaggctgttggggctggttctgttgcactaggtagtgctagtcaaactgctgggcgtggagaggttgcaattggccgtaatgcgtcaacaaaaggtgcggatggggtcaatagtaatcaatcggtggctattggtgaccaaacaagtgctattggtgatcaatcagttgcagtgggtgcaaatgtaatttcaagaggtaactcatctgtagcgatcggtggtgatgatatcgataaaatcgcaaatgatgcggctttaagtaaaacctataccgatattacaggcggtgtactaaaggcaggtcaatacttttcgactgaagcaggccacggtgcaacagctgttggtgctcaagcagtaagtaccggtgcattttcttctgcttatggtatgacttcaaaatcaacaggtgatgcttcatctgcatttggtgtaatgtcaaatgcttctgggaaaggtgctacagcattcggtgctgttgcacaagcgactggtgatggtgcatcagcgatgggtattaactcgttagcttcaggccttaactcaactgcaattggttcaggtaatcagccaggaaaaggtgcgcaagcgactggtgaaaatgcagctgctattggtagtactgctcaagctacagctaaagatactgctgctattggtgctggttctattgctaaccaagaaaatgcaattgctgtgggtaaaaatgctcaatctttggttgtagctggggtggcattaggtgctggaagtaaggttgactctgcaaatagtgcagccattggtcaaaattcagtagcaactgcacaaaaaggtgcttcttatttaacgaatgttgctgcttcagcgacaaatggtactgtttcagtaggtgatgttggtaaagaacgtcgcatccagaatgttgcagacggtgcattagatacagatgcagtaaacgttgcgcagttaaaaagtttaaaaggtattactgatcagcaaggtacaacgactgcacaaggtttaggtggtggttctagttatgatccaactacaggtacagtaagtgcaccgacttatacagttaacggtacacctgtgaacaacgtaggtgctgcaatcagcgagctggataaaggctggaatttacagacaaatggtgcaaacgcaggtgccgtaaaagctggtgatactgttgacattggtacagccgatggtgaaaccaatcttgcagtagcaaaagatggtaacagcattaagtacagcctgaacaaagacctgactttaaacagtgttacagcaggtaatactgtaattaacaacgatggtctaagtattgcgaacggtccgagcattactacaaatggtattgatggtggtagtaaggtcatcaagaatgtagcggcaggtgtagatggtacagatgcagccaatgttgaccagttaaaagcggcctcggcagcgtctaaaaccaaattacagcaaggcgaaaacattgtattaaccaagactaccaatccagatggttcggataactacgtagttgcaacagccaaagatgtaaactttgataaaaccacggttggtaatattgttactgacagtacgacaaacaagattacaggagtagaggcaggtacagtagctgcggattctaaagatgtaatcaacggtagtcagttacacaatacagcacaaagtattgccaataacttcggtggtggttctgtagtaaatccagacggtacggtaagtgatgtgtgcttaaaaaacaggagggtttaa

SEQ ID NO: 60720 - DNA, 732 bp, Acinetobacter baumannii
atgttatatattaatattttacaaccaagaaacattcgaatggctaattttttcccaagtttagaagttattgatcaactcacagtcaaaccaactgaaggtgaatcatttcttttaaataaactggcagaagaattagatgacacatttgatgtttatttcaatccttatcttgatggagatcgtcccgacttcttgattttaaaaaaagggcatggtgcaattattattgaagtcaaagactgggatatgtcaaattattttattgataaaaacaatcattggcgcacatctcataaccctaaaattagaacaagtgcgccaatgcaacaagcattcaaatataagtcacatttatttgaactccatatcccttcattaggatttgcaaatatattaaatcctaacttttataaaacaattcaatgctttgtatatttacatactacaacaaaagatagattatctgcactctatgaccgccctataaatgaagtaaaacaacttataaattcagcaaatgagcaaagatacaattcaaaaaaatatcaactagaacgggacagatttaatacgtttgctcaagacaatatttctagtttaattaaaaagataaataaccttaaaaaaaatccaatatttcaagatcatatttacgatgattttacgaaaattttaattccacccaagcattccaaatacaaaaatgaaaattcgaggtgttgccggtag

SEQ ID NO: 60721 - DNA, 315 bp, Acinetobacter baumannii
atgagtactcagttttctgcacttgtttctaaactcaaagagatttttcaaatcaatcgtcctgatttggattttggagtttatcgcattttaaatgcacgtagtgccgaaattgctgagtttttggataagcgtttaaaaaccaaagtagagcaatatcttggcgaagcaaagtcgagtcttgatgaaaatgttttaaaagaattagaagctgagctgaaagcagaatttggtaaacgtgcttttaatgagcaaggacaactcattgatgctgaagcaattgaaagtgcattaggtcaaaaaatattgctctaa

SEQ ID NO: 60722 - DNA, 1338 bp, Acinetobacter baumannii
atgtccgcattctttcaacctggtaattattttgaagcaggtatttctgttttagacccagatgtatcgggtaaagaagcaggttcgagtgcaacacgtcgtgatattagtgatatggctaatgattactacttcccaagtgcagcattaaaactacaacttaacgataaattctcttttggtctactctatgaccaaccatttggagcagatgcggaatattcaggtaacaatgtattcgtttctaatcctggtactgattctgttttatcagcatcagctatcgatggccttgttactaaaaaagcaactgatgctttgcaagcacaaggtttacctgtcaatgatcaaactttagctttagcaaaaggccaagttttagcaagcccacaatttaaacaactcgctggcgctcttgctgcagcaaataattatttaggtaatggtggaactaaagttaaagttgatactcaaaacttatcttttgtatttggttatcaaccaacgaaaaacttcaacttctacgcaggtcctgtattacaaacagttaaaggtaatgtaagtttacgaggtcaagcgtatagcctatataatggttatgatgcaaatatcaaagaaactacaggtgctggttggttagcaggtgcagcttatcagattcctgaaatcgcacttcgagcatctgtaacttatcgttctgaaattgaccataaagtggatattaatgaaaatttatctttattaaacttccctggtcttacttcagtacttggtggtttagatgttccagcttctaaaatccaagcaattaactcatctggtaaaactacaattactactccacagtctgttaaccttgattttcaaacaggcatcatggcagataccgttgcatttgccaatgttcgttgggtgaactggaaagacttctcaattcaaccatataaatttggtaaagtttcagaagctgtaggtgggctagttggccgtccaaatggctttaacttagttgaatattcagacgatcaatggacagtgaatgctggtgtaggtcgtaagcttaatgaaaaatgggcaggtaatgtctctgtaggttgggattctggcgcaggtaacccggtgactacattaggcccaacagaaggttactggaacgtaggtgtaggcgttcaatatagccctactccacaaacatttattgctggtggtgtgaaatacttctggttgggtgatgctaaagcacaaactggtgcacaagcgggtagcgatcaatatgttgcagaattctctgataacaatgctatcgcctatggtttaaaacttggctataaattctaa

SEQ ID NO: 60723 - DNA, 639 bp, Acinetobacter baumannii
atgagtatgtacgctgtacgtcagataaaagcgctgaaccagctgtattgtaagcgacacaagcgttttaaaaggactacgaatagtgaccataatcgagcgatctatgaaaacctgctggagcaacaattctcaatgactagaccaaatcaagcatggtcaagtgatattacgtacatatggactgttgaaggatggctgtatttagcagcggtaaaagacctttacacgaagcaagtggttggctatagcttaaatgagcgcatgacaacacagcttgtttgtaatgcgctaaatatggctattcacaatcaaaaaccaaccaaagaactgattgtgcattcagacagaggaagtcaatattgcagccaggaatatcgaaatatacttgagcaatatggttttcaaggttcaatgagcaagcgcggagactgttacgataatgcaccgattgaaagcttttggggaatactgaaaaatgagttagtgcatcattacaactatcaaaccagagaagaagcccaagcagatattataaaatacattgagttattttataatcatcgaagaattcaaaagggtttgggttttaagacaccaaatcaaatggccgaagacttttataagttggctgcctag

SEQ ID NO: 60724 - DNA, 639 bp, Acinetobacter baumannii; identical to SEQ ID NO: 60723

SEQ ID NO: 60725 - DNA, 1491 bp, Acinetobacter baumannii
gtgatagttacaaacatgcagcaacttgaggcattttgtaattggtgggatgagttaaatgaaagtaatcaagatagctcggaagcatcaaagctggaagtaagtcaaatggaagaaatagcacaacctttaaaccgtattttatttggcgctgctggtacaggtaagacataccatacgatcaatcatgcactttcaattataaagaatagttccttagagaaaattttaatcgaagaaagaaaacttggtcgtaaagttttaaaaaaacagtttgacgagtacagagaacaaggaagaatagagtttgtaacttttcatcaaagtttcagttacgaggattttgtagaggggattcgtgcagaaagtaaaaaaaatgaaaaaaatgaatatattgttcactaccctataatatcgggcatatttaaaagaatttgtgaaaatataaaaaaagagaaagaaaggattgattttggtgatgattacgttagtgatgagagtattcaaaaagcactaaatgagttaattgaaaaagtcaaaaaacaggaaacttcattttttacaaagactggctatgagtttatattaagattaaaccaaaatggaaaacttgctgcacgagcggtatcgggtaaaggcagtacaacctcattatctcatccagcaattgctagatatctcaaagatcaatcagatgaaataattgcaaataaaagttatgaatgggcaatcgcgaaagagctacgccaagaagtaaaaaaagaaaaatataaatctgattatattcaagaaccttatattttaattattgatgaaataaaccgtgggaatatttctcgtatttttggtgagttaattactttaatagaagaatcaaaacgtacaggggcagaagaagaactatctgtcactttgccatattctaaacaggaattcactgtaccaagtaatctttacattatcggtactatgaactcttctgaccgttcattaaccggtttagatgttgccctacgccgtcgattcacttttattgaaatgccacctagaccagatttacttaaagataaaaatggacaacctattcagattaatgccgtaaatcaagaaggcgtgaatatgtctgtaaacatttctgaattgcttacagttattaaccaacgtattgaagtactgttggatcgagatcattgcattgggcatgctaactttatgtcgctaaatagccagtcgacagtagaggaattggctcaaatttttaaacaaaaaattattccacaacttcaagaatatttttttgatgattggtcaaaaattaatatggtattaaataggaatggtatgttggaagctacttctttagaaagatcaaagatttttccaaacgttaatacagaagaaataggtttctttgatgaacaaaaaatatggaatttggtagaaagtgaatttgataatattcaaagctttgcaaagattattaagcattaa

SEQ ID NO: 60726 - DNA, 603 bp, Acinetobacter baumannii
atgaaaccgatgcaaccttacattcttgtgctttattacagtaaatatggttctactaaagaaatggcgcatcttattgcgaatggtgttgaatctgtaggtatcagcgtaaaaatacgaacagtacccaatattgcaacagttgtaactgaggctgaaccgagcattcccgaagaaggcgatatttattgtactttagaggatttagccaattgtgcaggcttagctctagggtctccaacccgctttggtaatatggcgagcgaaatgaagtatttttgggatcagaccacaagtctttggttaaatggtgctttgcatgataaaccggcatgcgtttttacttcttctggttcaatgcatggtggacaagaaagtactttgttgacgatgttacctccattatttcatcacggcatgatgattttaggtttgccaaattctattcctgcgttgtcgaatacgaaaactggcggaactccttatggtgcaagccatgtgagtggtcctagacatgaccaaaatttaagccaagatgaaaagcttttatgtgaagcacaaggtagacgtttaggtgaaatggtaaaaaagctttgcctatag

SEQ ID NO: 60727 - DNA, 1122 bp, Acinetobacter baumannii
atgaactctcccaatgtaaatagctatcatccggatttggtagttgaagaagcgaaaaatggttggcgtatagtacgtttgaatcgacctaaatcattacatgctttagatgaatcaatcgtaacggctttattacgagtatttgaagacttccgtgatgatgagcgagtgaaagcaatttggttggactcgacaacaccaaaagctttttgtgcaggcggagatgtacgcaaattacgtcagctggtcattaatcaagaagtagaaacagcaaataagtttttccagcaagaatatgctttggatttacttttgcataattatgcaaaaccagttgttgtatggggcgaaggttatgtaatggggggcggtttaggcttgtttatggctgcacctttccgcttagttacaccatattcacgtttggcaatgcctgaaattaatattggcttatacccagatgtaggtgcaagccgtttccttgctgaccgtgggcaaattggtttatttactggtttgacgggttctatcatgactgccgctggggcctacagcattggttgggcgacgcatatttgcgaagcacaacgtgataatgttctgcaaaaagtactgaatattaattgggctcactatcctgcaggtgatttccgtgcgattgacgatactttaaatagcttgcaccgtccggttgcagcaggaccattgcaaaattctttagacgttatccatagcgtttgtcgtggttcaagttttgaacaagactatcaggcgattgtaagcttacgcgatgcaagcagtgattggttgcgtcaagccagtgaaaacttacaaaagggttcgccaagtacagcagcgattacttggttgttatggcaatggggtaaacaagttcattcttgggacgaagtttttgacctggaagcgcaaatttctgaatggaaaattcgccaccctgactttgtggaaggtgtgcgtgcacgtttagtcgataaagatttatcgccagaatggaaagcatgtgaagaccttacattaagaggcattttggccgatgacccaccaattacgactattgatagctggaatgcattacttagacagtatggtgtagtgtcataa

SEQ ID NO: 60728 - DNA, 360 bp, Acinetobacter baumannii
atgtcagcctatttgcaacagtgccatattaaatcagttcaagaagaggcaggcttaagcctaggagcagcttacagatatcctgatatcattgataaaattgaaatttcaaaaaatcgtgaaatcttaaattctaaaaaagataagactctgaatgaagttgatagattacgtaaagaaaaagctaaggaggcctctatgaaagataaatatcgtcaagaacttcaaattactaatggtttattagataaactttacgctgaacaagcaatgcaaatgatggctatgtttaaccttttatcaaatgaagataaaaagcgtttgttagaaaatgaacaaagccctattgtaaataattaa

SEQ ID NO: 60729 - DNA, 315 bp, Acinetobacter baumannii; identical to SEQ ID NO: 52100

SEQ ID NO: 60730 - DNA, 606 bp, Acinetobacter baumannii
atgagccttaaactttatactaacaaagaatcgcgtggtgtagtgatcgactggcttttagtcgagcttggtgttgaatgtgaacgtattgaagttgcataccgaaccgagatgaagtcaccagaatatttaaaaattaatccttttggaaaagtacctgtattggtagatggcgatgttgttatttatgagttaggggcaatttgcgcatatcttgcggacaagtttagtgacaaaggcttggcaccagccttgaatgatccgaagcgtggtttgtactatcgttggttatttatgatggctggaccttgggaagctgctggcgttgataaagctctaggaataaaagtatctcctgagcaaaaaatgtttgtgagttatggtgattacaacgatgcttaccaagctttgattcaagggctgagtgaggctaatccatacttatgtggtgaacagtttacggcagcagatgtcagcgtgggcgcgatgttgttatggcaattgaaaatgaacacgattgaatcacaccctaccattacacgttatgttgaaacgattaaacaacgtgaagggctaaaacaaagcagtatgggcggattattgtaa

SEQ ID NO: 60731 - DNA, 189 bp, Acinetobacter baumannii
atgaatattgacagacgagttcgagcaaaagaatttatgggtcttcttgctgttggtcgaaccaagttttatacactgttaaagaaaggccatattcctgaaccagttagaattacagaaaaagatgttttctggtatgaatcagtggtaaaaaaagaagtcgaaaagtttaaatatagacgtgagtaa

SEQ ID NO: 60732 - DNA, 294 bp, Acinetobacter baumannii
atgtttaagcataaatatatcatcactgtagaatccgaaacaccgcctaaaatatgtcttggtgattcaattcacggcgctacagttatagcattagaaactgagcaatatcctgatcttgtagatttagcatggctcactaaacgctttccaatatctagagaaacactttctcaaaaattagaattattcaatgtaggtagtgcagggaaaaagctttatgatcctaatattgttatttccttcttaaaaacagatataaaaaatagaaaaggtagaccaagaaagaattaa

SEQ ID NO: 60733 - DNA, 174 bp, Acinetobacter baumannii
atggatgtaaaaacagcacgcaagaaagctaattttcatgaattgccatttccggcatttaaactcgagcagtccgctaaagccccgtggatggttcgtcttgaagattttgctatatacctcgatcaacaatatgccctctatcgacatgattatgatgcaatcaattcgtga

SEQ ID NO: 60734 - DNA, 315 bp, Acinetobacter baumannii
ttgcttcgctcatcattgcctgtgtttgtagtcaataaagatgcgatgactaagctgacttggtcaatacaacaagaacaaaatagtgcttatctttctattaataatattgggaatcgccatgcgcttttaaataatttaacgcttgtagatactacttcaaacaaaagttatccgattaaagtaaataccgtaaatggttatattctttccggaaaatcaagaaactttaatattagttctgattttaaatttcaagctgaccataaatataatatttcattgaatattaacggtaagccagcatctctttaa

SEQ ID NO: 60735 - DNA, 1470 bp, Acinetobacter baumannii
atgcctactgagctgtcattaactcaattgcaaagtcttttacgtgagttgtgccgtctccctgctgaaacagagtgggttgaatttaaaagcaataaagattcagcggaaatgataggtgaatatatttctgctttggcgaattctgcagccttgataggtaaacaatcagcctatgttgtttggggagtcaatgatgaaaatcatgaagtgacaggtacgacttttaagccaagtgaaatgcaacacaaacaacaagaattagaaagttggcttttacaaaaaatcagtcccaaaatatttttccagtttcatgagtttttatccactgaccatcagccagttgttattttggaaatacaagcggctagcaataccccagtacaatttgatggcacagaattcattagaattggttcgtataagaaaaaattgagagaccattctgagcgtgaacgtgcgctatggagagtgtttgataaagttccttttgaaaaacaaattgctgcagaaaatcttgtggcggatgatgttctccaatatatagattatccacaatattttgaacttacgaatcaacctttaccagaaaataaagcagcaattctcaatgctttagatgcagataagatcatcactaaaggaacaaatggtttatgggggataactaatttaggtgcaatactttttgcaaaaaaattaaaaaattttcagcatttaggtagaaaggctgttcgtcttattctttataaaggcaatagcagagttactactattcgtgaaatagaaggtgctaaaggttatgctgttggattcgaaaacctaattgaatatattaaaactttgcttcctgaaaatgaagaaataggaaaagcattcagaaagcaagttcctatgtttccagacttatctatacgtgagcttgttgcaaatgctttaattcatcaagatttttctataactggtacaggacccatgatagaaatttttgaatcaaggatggaaattactaatccaggcataccgcttgttgcaacagaacgattcttggatgctccaccacagagtaggaatgaggctttagcttcatttatgcgtagaataaatatttgtgaagaacgtggtactggaatcgataaagttataacggaatcagagttgtatcaattaccagctccaagttttgagttaagtgaccatcatactcgagtagtcttatttggatacaagtcgttcaccgatatggataaagaagacagaataagggcctgttatcagcattgttgcctaagatatgttaatagagagcatatgaataacacttctcttagggaaagacttggcattgatattaagaatagtgcaatggtaagtagagttattaaagatactttaactgcggatctgattaagccatatgattctgatgctgggactaaagcgatgcgttatatacctcattgggcttaa

SEQ ID NO: 60736 - DNA, 963 bp, Acinetobacter baumannii
atgttattccatttgcctaaactccctgcggaaatacgtgttagtcatttaaatgcacgtgtaaatgaacagagaaaaaaaattgcacaaacgacagcaagccgtttagagcttttacaattggctcaacaacttgcgaaagaagctaaaatccgccgtaagaacaatcagaaaatttttgttttagattttaaaggtgatattcaagcatctgcggttgaaaacctccgtgaagaaatcacacttattttagctaccgctaaagctggacgtgaccgcgtagtggtacgtcttgaaagtccgggtggtatggttcatggttatggactagcagcagctcagttagttcgtttacgtgatgcaggctttcatttaacgatttgtgttgacaaggtcgctgcaagtggcggttatatgatggcttgtattgcaaatgaaatcatttctgcaccatttgctgttgtgggttcaattggtgtcgttgctcaagttccaaatttcaatcgtcttttaaaagagcataacgttgactttgaactttacacagcagggcaatataagcgtactgtgactatgttcggtgaaaatacacctgaaggtaaagcgaaatttgaagaagagctacaacagacgcatatcctgtttaagcactttgtagaaaagtatcgtccacagcttaatgtagataaagttgctacaggtgagcactggtatggacaagatgcgcttgatttaaaccttgtagataaactacaaacttccgatgaatacctattagcgttgttacctcagcatgacgtctatgtgattaacacacgcaaaaaggcgactttgggtgaaaagttaggtttacaagcagcacaaatggcagatagcttgattccagcagtaatgcataaagttgcagatacgttggcaaaagcgaattcaactttagtgcaaatgcacgataccaaattttaa

SEQ ID NO: 60737 - DNA, 291 bp, Acinetobacter baumannii
ttgcagcaacaacagtttcatgactcgattacccaacaacttcttaaaactggtgaatatatgggccagtttgatgaaaaatttgcatcgggtaagagtgtttatttatggcttcatattaatgcggttaaagatgaacacaatcaagtcattaattatattggttttgcacgtgatttaactgagcaaaaacgccaagagcaacatttatcttatttaaaaaattatgatagtttaactcaccttcctaaccgtttttattattacaatcaattacatcaatataattaa

SEQ ID NO: 60738 - DNA, 1290 bp, Acinetobacter baumannii
atgtctggccttcaggaagaatatttacagcatcaaacaaaaattgaacagctccggctctcaattcaatatattcgctggtatctgattagcctaatattactttgcctaatttcagcccttattttctcttgttactttacttcttacattacaaagtttatttggtcaattggctttaccgttttaatttttacctgtctattatttattccaaaacttttaacacaatatcgcgatattaattttattaaaaaaactgatttgaccctgcaagctatttgtttgctctctggaattttaatgggaataaatataattgttcttcatttttcgcttccagctagcttaatctccgtatccgatgttcatatcctaatcgccctatttattacttcagcacacattattggtcttacttttttaactcagcagccccgatatttttatttactctttattccaagtacagttccactccttattagtcaatttacccattctcaagtcacccaacttcctttttactttgcttataacttagcctttgtagcaactttgctttgtgcatatgcaactcaacgtaactatcaaaaaatttctcaactattatttaaaaataagcaacttgtacaagtcgcagaacagcatactcaatgggctgaagagttatgtgtacagctccaacaagaagtaaataaatccaaagatattgaagcacagcttcaatttaataatcatttactcgaacaaaaagtacgtgagagaacatacgacttaaccaaaatgaatgagaggcttgaaagtcatcgtcataatttagcatttgcccatgaaactgcaggtattcgaccgtgggactgggatattgaaaaacaaaaactagaaattactttttttgatcaacaaaaacaaacgcaaaatacctctttacatctcaaagccatattagagcgtattcatccgaatgaccgaaaattatttgatgaacgtttaaaagaacatttggaaggaaaatctgatcatttcaatattacttttcgtattttacgtcgtaatggctcttggcgttggattcatgatgtagggcgtgtcattagccgtgatcctaaaaccaataaagctttacgcatggttggaatgaccagagatattcatcaggaaaaaaaagatcaagagcatctaagactctgcgctattgtgcttgaacaagctgctgaaggaattttcattctagatgaaaaacttaattatattgatgtaattgattgtaataataaaaacggttag

SEQ ID NO: 60739 - DNA, 1002 bp, Acinetobacter baumannii
atgtatggcattaaattgattgcgactagtactcatgctgcaaatagtgaaaatatcgttagggaccgatttcagaagcaattttatcaacttatcgaagaggatattattaccttaaagaaaatagaaggcagacctagtatttataaaatgggtacagtgaaaaaggttaaagaatgtactgttcgtaagtcgctcgatcttcatgttgatgctcaggctgaaccacaagccataaaagttttggactcgattatgagtgatgaactcaaagataaaacttatcaagcattggggcaaagtaaaaagggtaacaatattcgtgatattttgaataatctagatgggtttgagcagttaaaacttaatcaatattttaaggatggccgttttctagcacctaatgctttatttgatagtattaatcctattgaaagtaaatcatcagatggaaatcatttgtttattggtccttgctatagtcagagcaattcaaagattatattgaataaaattaaagaaagcattgctaagaatcatcaagtcagcagtatctactggttagcgccagatgatgtcttttggggtaaatcactaagattcaatacttttattaatgctttagggcaaattaagactaaacagaatactgatttacaactgaaatgctttttaccgatgcatgatgaacaagatcgaacttctgtaaataattaccgtaagattattgcgaaagatcagcaaaagtatttttatgggattaaggatgggatacttgacggtaattttgaaattattgttgttaaaaatgaatttgctgtaattgttctacatgttttagactcagaagctgagtatttaacatcatttccttttggttcaattagttatgataaacagttggtgaatggtttagttagtttgtttgaagcatgggaaaggccaaaagatgacggtggaattagttttggccaaatgtttaaaaaacatagccaatcgtaa

SEQ ID NO: 60740 - DNA, 852 bp, Acinetobacter baumannii
atgaatgaagtcacggtatcttctgcctgtaaatacctaggtgtcagcacttcaggctattatgcctggcgaaaacgtcaggccaatacggtagagaaatataatgatttaaaagccgtatattggcagcatcatgcacgattgggtgcaccttcattggtacatgacatgcatgatttaggttacagcatgagtgaacgcactgttggaagaatgctgaaaaatctgggtttacgcagcaggattgcgcgtaaatacaagcatacgactgattcaaaccatcgtttgcctacagcacccaatctgttagagcgtcaatttacagtcattcagcctaacaaggtttggacaacggatattacctatatccgtaccaagcaaggttggctgtatttatgtgtgatgctggatctatttagtcgtcgtatcgtggggtggcaaaccagccatcgaatagaccgccagttggtgtgtgatacgtttaactatgcaatggctcgtcagggttatccaactggtgttatggttcattcggaccaaggttcacagtactgtagtcgtgattttagagcgctgttactgacaaatgattgtactcagagtatgtctagacgtggaaactgttgggataatgcagtgactgaaagcttctttcatacattgaaaggtcatgtggtccatggcagtgtgtttgccactcgaaaagaagcgaatgctgtcttgtttgactatattgagatttattacaatcgggtcagaagacattctgcaaatggctggttaagccctgaagcctttgagaagaaatattttaagaatttagagggatttgttgtccacgatactgtctag

SEQ ID NO: 60741 - DNA, 333 bp, Acinetobacter baumannii
atggctgctttatttattgcacaagcatgtaatgtagacttatccattagtgaacagcttgcattacttttagtggcaatggtgagttcaaaaggtgcagcaggggtaacgggcgcaggctttattacactggccgctactttgtcggttgttccatctgtaccagtggcaggtatggcgctaattttaggtattgaccgttttatgtctgagtgtcgtgctttaactaatttaattggtaatgcatgtgcaacaattgttgttgctcgttgggacaaagctctggacaaggacgttctagataaagcattaggaaaatctaaaacgaattaa

SEQ ID NO: 60742 - DNA, 1017 bp, Acinetobacter baumannii
  misc_feature (972)..(981): n is a, c, g, or t
atggatttcaatacccttgaccaagaaacggtacagaaaaaacagaagtttcaccaaattttgtatgtacaggtcatttttgcaattattttaggcgttttaataggtcatttttaccctgaacttggacaaagcttaaaacctcttggtgatgcattcatcaagatcgttaaaatgattattgctcccgtaatctttttgaccgtggttactggtattgccagcatgacgaacatgagtcgagttgggcgtgtgactggtaaagctatgctatatttcattactttctcaagtcttgcacttgtggttggtatgattgtggcaaacatcattcaacctggtaaaggcctaaatattgatccagcgaccttagtcagcgataaagtaaatacttacgttgagaaggctcatgctaccaatattactgacttcttcatgaatattatcccgcaaacactggtaagtccgcttgctggtggtgaaatcttgcaggttctatttgtggcggtgttatttggtatttccttagctgctttaggtgatcgtgcgcgtccaatcactgatttcctaaataaccttactgctccagttttctacttagttggcatgttaatgaaacttgcgccaattggtgcttttggggctatggcatttactatcggcgcatatgggatcgaatcaattggtaatctattactgttgattatgactttctatattacagctgtgctgtttgtattaattgttctaggtgctgtggcgcgctataacggcttttcaattattgctttgattcgttatatcaaagacgagctttggttggttttaggtacaagttcatctgaagctgctttaccttccctcatggataaaatgcaaaaagcaggttgtgaaaaatctgtagtgggcttagtcattcctacaggttactcatttaaccttgatggtactaatatttatatgactatggcnnnnnnnnnngactatggctgctttatttattgcacaagcatgtaa

SEQ ID NO: 60743 - DNA, 720 bp, Acinetobacter baumannii
ttgcaatggccaactaaaattgaactcaaaaaatttcgtgaaataaaatctggtaagtatgaagatatcggacataacgcaaagatcagtttttatgatgcctctcttcacaaagatgaagatggtgaaattgagttattggacattgaagtagaattatactcagaagatgaaaaaactaaaaattttaatcatttaattagtgattatactgcatattacacgcggcatcgccaacgccgtcatgtgccatttattacaaatccttattatttagcaccagatgtactgaagcaaattgtttatgtgttgagaactgagttaaatgcggactgggataaggctgcaatcgctgccgcatgtttattgtcacttttgactggattatctcccatagcactgatggattttaacgagctcatacaagatggtgttttgatccagaatggttcaagaaaacgacgggaatatttacttaatttaaatttgaaagttaccgagcagaaaattaagagtttaaagcctgtgcgttggaatgaagagatgactcaccaactacatctacctgcggcatggtttgactacatagaacaagcatcgaatccaaagatctcttcaggagatattaattccgaacttaagaagtggtttgctaatcagtatgtgggtactatcaccgttgaaaaacttcaggcccaattatattttcatatatattag

SEQ ID NO: 60744 - DNA, 492 bp, Acinetobacter baumannii
  misc_feature (466)..(475): n is a, c, g, or t
gtgaatacacaatttgtcgatctatcagatgatttacgtgaaaaagcccacgctctatataaggaagcgcaacagatatatggctatatatctagctctagacaattaggtaaatattattttctagcttctttaagttattttgcatgtccagatactagtaatacacaagagctgtcatcgcaacgttatttgattctacaagcgagttttttaacatatcggcagtatcaagaatttgcaaaaattgctaaagctgagaataagcaaaaacatgtttgtgacctcctacgctatgtctcacgatatgtgctggattctaataatgctgaattatttcatgaatgtagtaagctgctaaattgttatgtcacgtacgaacgtaatttgaaaaaagaggatcgtaatcaactttttaatattaaaaatttcaaaaaagtacaagtcatagagtatttatcggctnnnnnnnnnnctattaataatttttaa

SEQ ID NO: 60745 - DNA, 1179 bp, Acinetobacter baumannii
atgcatattcaaggatgggataatgatggtgatgtctttaacatgttagataatgcaaaatcagcaggattaaaagtaattgttagtacacaaaatgatttaggtgcaatagcagatgttgcttcatgggtggccagtatcgactcacactcagcaattattggttacagtgttatagatgaacctgcatataatggaaagacaatccctgaacaggatgcaagaatctcgttgcttagaggtgtaacgagtaagctattaacaaccgttgatttcactatcgaccccataactaaattgatctcagataattatgacattatatttttagacatctataatgattcaaacttagaaatgagtgaggagaaagctactcaagaagatctttataaaatgagagcagcattagggttatataatcgccaatataaatcccaaattctgcctgttgtgatgggatttaaatatattaatggtgctccattatctagaattattaaaacatcaaaaatatttgctaaagcctgcggtggtaactttggttgttttgtttgggatggcgatactgaaccctctattgaaacttctgttagaaattcaaatgaattagataaaatgtgccgtgatatatgctcatataaaaatctcaaatgggatataccagaaacattattatggggctatattaataatcaaggtcaaacagataatggattatatgatttaataaaacatcaagttcacaatgatccatataaggttggagaggtttttgaaggtataaatgcatatcctacacaagttactggtggttcgattgacactgatagtacatccttagaacttaatgaaggtattgggttaaaagctttatggttcaaaggtacttatggggcttatgtttctgatataccaatgcgaaaatataattatatgagagttcatgcagggactttacagtcgggattattaccaatcattacgattagaggatcctcaacaggtggctatggtttaggagtagttttagcaacaatacccaccatagataatgtagaaacagttaaatttgaaaatcaagatgaatcagatctattttgcattaaatatgattcaacaggaaccacttactatagaacatatattagaggagtatatgtcacatctaattggtaa

SEQ ID NO: 60746 - DNA, 909 bp, Acinetobacter baumannii
  misc_feature (361)..(370): n is a, c, g, or t
atgtcaaaaaatttagcaacattgattggtttaagtgccatcctgatgtgggcctctatggtgggttttgtaaaacatattacgaccgtgattggaccagatgttggcattacactgatctattcactaagtgcgttactactgcttattatttttagagtgccaaactttaagttaatttctaaaaaatatttaattttaggtgcaattttatttatcgcttatgaactctgcttttcgtttgcacttgcctattcaaagacagcgcaacaagcgattgaagtcagcattgtgaactacctttggccaagcttgactgttttagcttttgtcatttttaaagagctaaaatttaatatcnnnnnnnnnngtttaattatttcaattttcggcattatttttattcagaccggaaatggcgattttagtctaggtcgagttatagacaatttttatagtaatcctctaagttatattttggcttttataggtgcaattatttgggctttgtactgtgtattaaccaagaaaataggtaaaggacaaaaccctatttctattttctttattggcgtcgctctaacattgtggttaaaactattctttagtggtcaagctgttttacctacactcgatttaaatacgactttatctctcgtctttgcctctacagcaattggattaggttatgccgcatggaatattggcattattcatggcaacaccacgatgctagtggtggcttcttacttcactccaatcatttcatctttactggccatgctggttttacaaaccgagttatcaatcagcttttggcaaggaaccgctatggttacagccggttcactcatctgctggctttcaacaaattggatagtaatccgctcttatttcaaaaagaattaa

SEQ ID NO: 60747 - DNA, 723 bp, Acinetobacter baumannii
atgtttgatatgcgtttatctcatgagcgtggtgcagcacatcatggctggttacagtcaaaacacacgttttcatttgcaaattattgggacccgaaacaagtcggcttttcagatttgcttgtgattaatgacgatacggttgctccatcaaaaggctttggtactcaccctcaccgcaacatggaaattatttcttatgtgcttgaaggtgctttagaacataaagattcaatgggtacaggttcggttattgtgcctggtgatattcagttaatgagcgcaggccgtggggttgcacatagtgaatttaatcactctgctcaagaaaacgtgcacttcttgcaaatttgggtggttccaaatgaagtgaacacaacaccggactatcaacaattgcatatttccgaggaagacaaacgcggtaaattgcacttgatgatttcaccaaaaggtggcgaaaaaactttatccatcaaacaagatattaatatttattcaggtctttttgatggtgaagaaacagcagaatttgcaattccagaagaacgctatgtttatcttcatgtggcaaaaggccgtattgatgtaaacggtaaaacctttaatacaggtgatgctgcgcgtattcgtgatggaggcaagttatcatttaccaatggtgacaatgctgaaattctgatttttgatatgcgaccggaagaaattccaaccatgccataa

SEQ ID NO: 60748 - DNA, 1080 bp, Acinetobacter baumannii
atgaaaaaaatttgttttcttattggtgatattaatcattcaggtggaacagagcgtgttactactttaattgcaaacaatttagctcaacagaataataatgtctttattttatcattaagtcatggagaccagcctttttttgaacttaattcaaatattaaaattcaggctttatttaatgaaaaagtttcaatgaaaaagaattttttccaagcagttagaaaaatccggaattttttgatatctaagcaaatagataccctgattgttgtagatagtatcagttgcgtttttacagtgcctgcttgcgctggattaagaattaatcatatttgttgggaacattttaacttaaaagtcaaccttggctctcggtttcgtgacttgggtcgatggatggctgcaaaatggggtaataaaattgttacattaactgaaagagataagtctttttgggataaaagatttaatcttactcatacgaataaagttgttgcaatagcaaatcctagtccttatgagcttcaagacaataccccaagcctagaacataaaattattctgtgtgttggacgtttaacttatcaaaaaggtttcgacttactcatacctagttggtcgaaagttgctcataaattggatggttggaaaattataattgttggaactggagaggatgaggttagcttaaaagaaatggctgtaaactatggcgtttcagagtcaattatttttgctggtcagcaaaaaaatatggatcaattttatcggcaggcttctttcttttgtatgagttctcgttttgaaggcttgccaatggttttattagaagcacaaagttatggattacctatcgttgcatttgactgtgatacagggccagctgaaataataaatgatacaaatggctgtttagtagaggatggtaatattgaggaactatctatgcaaattttccgattcgctcatgatataaatagtaccgatttttgtacgatgataaataagtcctttgataatgcaaagagctataatattgaaagtattgtaaaagaatgggttaaggtgatttgttga

SEQ ID NO: 60749 - DNA, 429 bp, Acinetobacter baumannii
atggctcaagaagatgtggtagtacccactgaatccgcacaagaaacgcaacgtagttatgcgacaaatgcaattttatttaactttaataaatcttcgattaatgatgtggtaggaggtgaagaagttcttgatcaagtgaaaaatgatatcaagagtaatatacataatataaatcgtataacagtaactgggtatgccgatgaattggggcaaagtgtttataaccaaaggttagcttatgcaagagctgccacaattgctaataacttggcacaaagtggattaacttcattagaaaaaattaatattgaatctaaaggagctacaaatgcatttaaaagctgtgtcggtgtaggtaaaagaaatcaagttatacaatgtttagaaccaaaccgccgagtagttgttacaacaataggtaattaa

SEQ ID NO: 60750 - DNA, 261 bp, Acinetobacter baumannii
atgaatatgccaaatcgtattaatgtggctttatctcgagcgatggatcggttggtaatttttggtgcatctcgtctatgggatatgccaagacataaagaaagtccattaggattggttcttagttatatcctggagcatacaaatgatgatcagcattatcaatatattgctgatcagaaacttgcaccaactaagaatcccaattcattgaaatttaaatataaaacaagttcgaatcgaggtggcaatcatgagtaa

SEQ ID NO: 60751 - DNA, 264 bp, Acinetobacter baumannii
  misc_feature (233)..(242): n is a, c, g, or t
ttgattcatacacctggtattttaaattctctaggatttaaaattcttgaccctaaaggttggctcgatggccatgttcaattactgaaaaaccttgatgaccttcagtttgtacaagaacatgccactttaagtagtttcttaaataatatgattgattatccaggagggattaatcaggacatgttattcaatgtttggctacaaaatccgttgaagcaaggttctatttnnnnnnnnnngttctattttattaaaagataa

SEQ ID NO: 60752 - DNA, 510 bp, Acinetobacter baumannii
gtgaataatttagttaaagactttctaaaaccaattcgaattaataaagcgtataaatattaccctctgtttgcagaatggggagaaacgctacaaaatgcatttgaagataaagtaaatattttgtttgatcagacagaaattcctttgtttttagctgatctaaacgtttttaaggatgaatctgagcaactttatataaaaatctatacagaagatctctttggtttatatcgcttaaatatttcagatcaatttccctcaggctacatgtatgaacatgttgaaggaagtttaatatctattaagactcatagttcaactatttctttcgaggaaaaaatggtgaaagatccagttaggatccattatgttgatggttcaatgagttataactgttatttgatccaaataaatttaatagacaataccttcgatgtagatggtttgaatcaaattaattggactgaaccgtaccgggtttgtcggagacttttttatttaagttag

SEQ ID NO: 60753 - DNA, 240 bp, Acinetobacter baumannii
gtgaccttaactgttgaaccagcttctgctgtacctgttacaggattagttgcattgattggatcaattactggtgcatttggcgcagtggtatctacagtcaccacagcattagttgtacctacattacctgccgggtcagtcgctgtcacagtcacagtatgtggaccgtcagccaatactggaagtatattgtctgcaagggtccaggtgccatcgccattattggttgccgggtag

SEQ ID NO: 60754 - DNA, 267 bp, Acinetobacter baumannii
ttgattgaatctgaaaaagattatccatcgaattgggctgcgatcaccgctattgctcccaagataggttgtactcctgaaacactacgtgtttggtatcaaaaatatttagataaactaaatccagttaaagtacagcagctttcagatcaagaacgtattaaacaactcgaacgtgaaaataaagaactgcaacgcgccaatgagattctacgtaaagcagccgcttttttcgcccaggcggagctcgaccgcccacacaaataa

SEQ ID NO: 60755 - DNA, 162 bp, Acinetobacter baumannii
atgaaaaaaattgttgtttttgacttggatgagacattactatcaggtgaatctacaaggacatggttaacagataaattgaaatctaatatttttagatttatcgctgcactcattgttacgctcattgctttatctcttatgaaatttaaaaaaatataa

SEQ ID NO: 60756 - DNA, 315 bp, Acinetobacter baumannii
atgataattaaacctttttctctgttaataattacaatcttaagtttaccgacatacgctacgacaggaaccattacatttcaagggcaaattgttgaaaatgcttgcgatcacatgacaaaaagtaatgataagcgttgtaccgaatttttaaaaacgacgggtattcagcagttagatgctacattgggttatcaaacattaagcgaagtacagcaagcaatacagaaccaccaccatcaaatcgcagtgattgcagttgaagctgttgcagcggatactcgggcaggcaatattatagtgagctatcgctga

SEQ ID NO: 60757 - DNA, 1077 bp, Acinetobacter baumannii
atgttaaaattccagaaattgattggacagtgtttaggtatcatgctgctcatgttaattgccaagtcgagctgggcgttgtcatgttaccaagggacgacttatggtggtaaccggactcaggtggagtcaattacccaacctgtttatgtggcaaatgggattactgctgcgggtacgacactatggcgctcgcagacctataccacaacatttacctgttttgatacagatcgtaatcctcaaggggaaaatgcctatttgtattgggaccctcagaaaacgctttcaaccattcacaactcgattaagttgggtatcaccgtcaactctgtagactacaacttggtcaatggttcaaggctatcaattgggccagcaacaaagccagcaacaacatattctcaggcattgtataactgccgtgtgattggtctttatgatcgtaataattgtgcgacaccgcagacctttaccattagttattcattatttgtgaaatcaaccggaaatacaccgccatcgacaggggtgattcctaactcggctacgtatagtatttttcaggttgatggttactatgggttaaatgctgttaaaaattctaactttaacctatacattaatggattgaataatatccgctttattgattgtaatccgcaactgagcattatgggaaccagcagcaatacggtcgattttggtaccattgtgcctagagccagtaatgtaaatacagtggtcaaacgcgtaccgtttaccttgtcggttgcattaaacaatgcagattcaggtggggtgtgtagtggcaaaacactgatgtcaacgtttactacgccaaataccatcaaaaaccagaacacgattttggcaacaggacgtacagatgtgggcattcagattttctctaagaatgcgacaactcctattaatatgaatacgccagttgaactgggatatatcaatggagctgtgactgcaaatagctatgatgcaggcgttttgatgttgagtacgacaccagcaccaggtgatttttctgcaattgccaatgttgaaattacatttaaataa

SEQ ID NO: 60758 - DNA, 2574 bp, Acinetobacter baumannii
atgaaaaaacgcacccagctcaagtgcacaaacgttccatttcgtctattggttctgtgttgtgccatacaacaggtccatgcctcagatgagtttaataccgcattcctgaatggacagacagataaggcgagcctagaagctgtagagcaaggctatgcaatcttgccgggtatctatagctttgctatccatatcaatcaagaaaaagtagatcaacgagaacttcgctttgacaaaaatgtgaaaaatgaagtcgtgccttgtttagatgccaagtttctcaaagattatggtgtgctatggaatgcttcggaacagcatgcccaagatgcgggtacatgtctggatattacacagcttattcctaatgcaacgttgagtttcgatgctggattgcaacgtttggatttgtctattccacaggtgaatttgacatatcagccacgtggttatatccctcctaaactttataatcagggcatgaatgctgttctactgaattataatattaacggtacatacagtactttcaataaccgctcagactatggctatttaagtgctttacttaatggtgggtttaatctgggtgcatggcgttatcgtaaccagtcgaactatattcagcaaagccatagcaaagaccgctggcagactatctctaaccgcttagagcgagatatattaccttggcgttcgcgtctggaaatcggtgacagctataccaatagcgatgtgtttgacagctatggttttagaggcgtgcagttgagtagtgatgatcagcagcttccttatagcctgcaaaattttgcaccggtgattcgtggtgtagcggtaactaatgcgcgtgttgaagtgcgtcaaaacggatatgtcatctataccaccaatgttgcggctggtgcctttgaaatacaggacttaatttcggcaacagatagtggcgatctggaagtgcgagtcattgaaagtgatggccgtataaaaactttttttcagccttactctgctgtgccaaaaatgttgcgtaagggcatctggaaatatcagctgaccgcgggacagtatcgtagcagtggaaccagtgataattatcgaccatcattcgtacaagcgaccgttgctcgtggtatgaataatgtgattaccccatatgtcggagttcttgctgcagaagattatttttctggtggtgctggtgttggcttgtctttgggcaaacttggtgctatctcgacagacgttactatgtcaaacaaccagctagctgctggggggagtgccacaggggcaagtttacgctttttatattccaagtcactgaatcagtttggtaccaacttaaaaatagtaggttatcgttattcatcacgtaacttttttgactttgccgatgctgtagcagaaaaagcccagtggaaaaatggtcaatatgaatatagctactatttgccaaacagcaacgccagtgatccattaactgaagagcaacgattacgttatgcctatagtacacgttactacaataagaaaaaccagctacaaattgccttgaaccagaacctgggtaaatatgggcaattctatgtcaatgtgagcaatcaggatttctggaacagtgaactgagtcagcgtagttggcaagtgggttataatacctatatccaacgtgccagtgttggggtgttctatcaggacagcaaaactcagtttgccagttctgactatagtgtgggtctaaatgtgacgatcccgcttgggaaagacaagaaaaatccacatgatttaacttctacatcatcgtatcaatataacgatggtaccggttatgctttacaaacgggtgtatcgggtaatttccttgccgataaaaatctgcaattacaggctcaggttggatattcggaacaaaacgatcagaacctttacttaaatgctgcgtatcagggtgccaaagtaaatgccggtttaggctatagcgttggatcgaactaccagcaaatggcagcgaatttgtcgggcggtattctggttcattcgggtggcatgacatttgggcgaccactcaatagcaacccgattttagttgaggccaaaggtgcaaccggtgtgggcgtagaaaaccagacaggtttgaaaattgaccgaaatggttatgccatcattaatggtagcagtgcttatcgtcgtaaccgtgttgcattacgtgctgaagatatgccaagcaccatgaacatcgatcaattggtcgtccgtgacattgtgccgaccaaaaatgcagttgtgaaagtgaaatttgatgtagtgaatggtcaaaatattctggcatcgttaaagacagctgatcaacaacctttgacacttggcgctgtgatttataacgcagacaagaaaaacattggtttggttggactggatggctctgcttacattacaggtgcaaaaccacaagagactttggtcgcaaaatggggcgatgatgcttctgaacagtgtcatttcactttgccagcgttgcagccagtcaacaatggttatgctgaagctgagctcaactgtgtgcaatag

SEQ ID NO: 60759 - DNA, 699 bp, Acinetobacter baumannii
atgaatgtgaaatcgtctttagctgttatgtgttttgctgctagttttgcctgccaatcggcgcaggccgcgattcaggccatggcaactcgtgttatttatgaagcacctgcttctgctgcaacactaaccattaaaaataatgtgtccaaaccgtatatggtacaaacatggttagaaggcaaaacaggtgaaacaaaaaatttacctattattgttgttcctccattattgaaattagacccagacaaagagtctattcttaaatttatttattcgggtcaaggtctccctaccaatcaagaaagcttgttctggattaatattcaggaaattccgcctacagcgcaggaaaaaaacgtcctacaactggcgatacgcagccgaattaaattgttctatcgtccaaaagaagtcaaaacttcattggatgatgcagtaaaacagttgaattggtttgtcgatggacaacagcttaaggtgacaaatccaagtccattacatatcacgattggtgtcttaaagcttaatgcacaaggtaagccgctcgataattttgtgcaggatatggtcgcgccgaacagcacgattactgtgcttgagcacattcctgtaacgacccaaactataagctttacctatatcaatgattatggtggtgcaaccgcagtgccatcggtaaatattcatcgcaaatga

SEQ ID NO: 60760 - DNA, 528 bp, Acinetobacter baumannii
atgaaaactaaggtattactttcgattttggcattgggtacggctgtaagcgctcaacaagcaatggcaaatactggtacgattgcatttaaaggtaaaatcgtaacttctacttgtcaggcaacaactgatacagcaaaccaaaccgtgcaattgggtacatggccaacttctgctttgtcaactgcaggtcaaacaacttcaccacaaacttttcaaatcgatcttgagcaatgtgatgctggtaatttgaccgttcgtttagatggtacaactgtttctgcaactggtgacaatgcgaatcttcttgctgtaactggtggtgcaactaatgtaggtattcaagtaactggtttggataacaaaattgttccaatcaacacagctttggcaaacggttacgagtttgcaattccatcaggttcaacaactgcaacacttgatcttaaagcattctataaagcgactggtgctgcaactgctggtgatgcaaacgcgacagcaaacttttcgattgaatataaataa

SEQ ID NO: 60761 - DNA, 447 bp, Acinetobacter baumannii
atgaatcatcctaattcaattttaaaattttcacttggtctaaatagcctctcgtttgatgtagacagccaacacattcactttgagcaaggcttaggtttaattaattcaaaaagtaatggccaaggtgttattgatgagcttgcggttgaaaagatgatttatttcattgaagaaatcatcgagtcacaacccctcagaaatctaaatataagtagcgtagctgttacatctgatgcagccatgacacagctcagtgagttattttttaatgctaaaaagtacatcagccgtatcgagcttgagcatggatttaatagttttattgagcgtttaagctactccacaaaccaagtggctccagatcagctttatatttttacctactttgtatttatccgagagatgatgcatcacttaagagttgaagaaattcaaatcatttaa

SEQ ID NO: 60762 - DNA, 264 bp, Acinetobacter baumannii
ttgaaaaaatatttctctaataattttagcaattattatcatagcttacctaaaataaaaaaatttgtaggtggttttattaattttagaaaggctcaatctttaactcaagatcagattgatttggattacgagattgttaagattcaagttgcagctccttttattaaggatattttatctcgtttttcgagttattatgctagacaggggcaaccagtaatttatattgatgatcatattcaagaaatcatagcatcataa

SEQ ID NO: 60763 - DNA, 1809 bp, Acinetobacter baumannii
atgtcacctaatcagcattacattacgctattagaagttgatcctaaaacgaataagaaacttaatgctgtcactggagcttgtagcatcagcagcagtaaatcagatgaaacagttagtttatatttacaagggaataatacccacaagattgctttaggtacgataaaacttgatacgttaggaaaatatggtgcaactcatttaacagttttggatatggcgaccgcattaattggacaacctccagcttcaatgagtaatgttgatccaacgattaaagtggctatgggcttagttaagttgttccaaagtattggtattgagcgtggcgataatatggtgggtgatttacaaccaacccaatttactcaagataagaaaaatctgttgaagagtttgtcacaagatataaccgcagctgaatggaagaatggacaatatgcaactcttctaaaaccttggttagatgtaagcaaagtgtctgatgcacaagcttatgcactggtagttcaagtcacgaacttggcaaacgcagcattattccaggcaactgaagcgacttatgcgggatttgcagaccctgtaaactctccactaccccttgggttttatggttgtaatcaagcattagcagattgctttaataaatctaccagtaatttacgccatatgatggctaatatattcatgctgactgaccgtgaaggttatgcaataggttatggcttacaatggcgtggagatgctactttatacagagataagaatggaaacgtaactggtgtagctccaccagttttattgtggactaaggttaaaccactacaaatggtcgttgctgcacaacaaaatggttggcttaatccaatctcaaaaaatattcaatcgactcagccattacgtttgagcgttgatagcaatgtaaataatgatttgcaaatctatcaaggcaagtttataaatgattatgcggttgcaggcagtgaaggtttttataagcagttaatgcgttcgacaacaggaaatactcagcattatggtttatggcgtcaaacagtagacacagaaagttataagggttcactcgatattattaaagttaacccaattagttatcttggaaaagatatttttaaaacagcagctaatgttagttctggtcaacgttacatttttcccttatatgcgactttgacattcagttttgacactatagggatagctcctatcgatttaggtattgttattgacgaaaagggaaatattcgtacagatattaaaccaaatgcgactgcaacagatatgtctggtcaatgtgcaacaatatcagataatagcttaattgatagtaatggtgtgcaacaatatcgacttgggactacaggtggtacacagtcatccgataatgatagttccattcctgttcgtataattttatcgaatccacaattaggtaatcttaatgggatcttaataggactgaacactgtcataaaacaggattctaatccaaatgataatataaatgattcaatttcagtaaatggagccaagattaacctctataacttattggcaggccaaaacagcagtgatagtattaatttaagggattatgagaataagaccgcacattgggttaatctctatgctttctatcaagctgtttataataatattaaagatattagtccagtaccaacagatgctgaaaaagctttggcccaacgtatgaagggtacagtgaccatcaaacttgctgatcagtctattcctgcatgtaaggcaattaaaattaaatcttaa

SEQ ID NO: 60764 - DNA, 1116 bp, Acinetobacter baumannii
atgccaaccttatttttttatacaatattgcctttatttatttttttatcagttcttgggaaatatacatatgctcaacagccatctacaacactaatgacaagagaagaatgtaagcaagatttagattttattgcatattttttactatataatgatgctggaataaatgcactcgcatggagcaactatccctcattcattcaaaaagttttagatatacaaactaaaaaatctgttcaggcacaaactgttcaagaatgccttaatgctatcaaaccttttctcacaagtattcggaaagggcatctttgggtaagtggtaaaccgatgatagaagatgtcttccagaaccacgagaatatacaaccgcctctaaaagttacaactaaacagctaaccaatctaaccacttacattcacattccatcatttgatgaagatattcacacacaattagaaaatattattcaagaaaatcaggatgatattctccacaaaccctatttgattatagatgtacgtaacaataatggtggctttgactctgcatttaagccattactaatgttgatgggtgacactcgttactggttacagtctccccaaatctatacaacctcagcaaacatccaatcatggaaagaaattgagagattaatttctacatcatcagacaagaaatttttaagagatataattgaaaaaatggagcttaagaaagctggatgggtcaatatgtttgaccaactagaggtatcagaatttatacaagggtataaaaatatgacatatcccaacaaagtaattgtattagtcggagaaaactgtggcagctcatgtgaacagtttgttctttatgcccaacaaaatccaaatgttacaacaatgggacaacgaacctatggagcattagatgcttcgaatgtcagagaaaagcaaacaccttcagggaaaatattactttcttatgcaacaacctttgtatttcgtcatcgtcaactaaatatcgatacagttggcatccctcccgatatcctgttgcctcctcctcaaaatcaccaaacttctgaagcagagattgatttagcaaaacgcttcttagaacagcaatga

SEQ ID NO: 60765 - DNA, 486 bp, Acinetobacter baumannii
atgaatgcacaaaaaggttttacattaattgaactcatgatcgttgtagcgattattggtattttggcagcagttgctctacctgcatatcaaaattatacagttaaagcacgtgtttctgaggttattttggctgcgtcatcatgccgtagtacaatcacggatattgttcaaaattcaccagttgtagacttagggacagctttatctacaagctgttcaatttctccaaccaaaatggttactagtggttctgctgatactgatggtgttattactgttgttggtaatgcaactaacttgggtggggaaacatcaaatacagcaaattctattattctaactcctatgatgaatgctactactgctttagtagcaagtactgatggtggtaaaacgattcaaggttggaaatgcggtcctaagactagtagtaatcctatgccaaataaatatttaccaggttcttgtcaaggtacatattaa

SEQ ID NO: 60766 - DNA, 735 bp, Acinetobacter baumannii
atgaccaaacgccttatattttttttaagtcatttatctctttccattttactggctttaataattattacttgggtttttcttatatggtatccccaaccattagctcaagcggttggtgttacccatatttttctaatgatggttgctatagatgtggtattgggacctattctgggtttttttgtctataaagaaggtaaaaaaacacttaaatttgatcttgccgttatcattttaattcaactttctgcattaggctacggtttatatagtattgtacaaggtcgtcctgcgtggttggtgtataatgcggaccgatttgagctagtgcgtaagaatgaaattattgatactaatattcaaaaagctcaagcacaatttagaactccttcatggtttaatccaaagtttgcggctgtcgaaatagctaaaaataatgaagagcgtagtaagaacatgtttgaagagctacttggcggtgtttctttagcgcaacgacctgagcgttacgtaggcttagctcaagtaaaactacaaatacaaaaacgtgctcaaaacttaaatgaactagaaaaatataattctaaacagcaagtagaaaatattttgaaaaaatacccagaagcgaatgcatgggttcctttaaaagcaaatgctgtagatatggttgttttaatggataaaagctcagcccaagtgatcaaaattgtagatctaaggccatggaaataa

SEQ ID NO: 60767 - DNA, 441 bp, Acinetobacter baumannii
atgaggggaattattccacaagaagggttcaccttggtcgagctaatggtgacgattgcggtcatggctattattgcattgatggctgcgccttcttttactaaaacaattcgtaaaaacgaattgatagttgataccagtaattttgttaacttattgactgagactcgttcagaagctgtatttaaacaaactaatcgagtgttggctttagatagtagcgtaactaccttttataaaaaatggacaccttctagccgcgttgagaaatatagtggtgtggcaagtattacttataatcgtcagggacaatctgcagcaactacaaacttatgttttgtattccagcatgctttggataatactttaaaatcatatatttatgttcaaaaagatggcatcgttttttacgataaatcggcagccagctgtccgaattaa

SEQ ID NO: 60768 - DNA, 492 bp, Acinetobacter baumannii
atgataacatctcaaaaaggtgctggtttgatggaggtgcttgttgcattacttttattgagcattgctgtactgggttttgttgctttacaagtacgagcaattgctgcaagcactgaagcaggtcagaacattcaagcaatcaatatagcccgagatttagcagagcgtatgcgtgtgaaccgaactggtttaaatagctatgtagatcttagcgaaggcgaaacattaacagactgttcttctgggttttgtagtgctgctaatatggcgaaatatgattatgctcaggttaaacaacgtgctacagacttaggaatgagtcttgtggtgttgaattgccaaggctctacgttaactcgtcaatgcatatatgtagcatggggcgggacaacagctacagatggaagtagtggttcaaattgtactaatggcacagcctatgtacctgatgccaaatgtatcattatggaggtttacaaccatgattaa

SEQ ID NO: 60769 - DNA, 915 bp, Acinetobacter baumannii
atgattaaacctcaacaagcttttactctgattgaacttatggtggctttggcacttggtttacttattgttgcggcaggacttgcggtttttttaagtagccagcgctcaatggggctacaaagcagtttagagggcttacagcaaaatgctaattttggactttcatctttaacacatgatttacgacatgccaatttgaataccgcatccagtcaatatgtaaataataaagtgatcggctcaggtattatttttgcgaaagaaaaccttcctactaatttgcagaatactactgatttagaaactaaatttgtgtctttacagaataaagatactgacaacacttcagggaaaagtgatcaattaactattcaatatgtgcctgctgcaaatgaaattatagattgtgaagggaattcgattaccagtgcacagtctaaaactattgtgcaacgttatttcttaaaagagattaacaagcctacaggtgagccagtttcttattcattggcttgtgatgctggatggtatgccactggtgatacagcaattactggtttagataataatgctcagcaaattatgcaatacattgatgcttttaaagtgcgattaggaattaaaaacttagtaaataaaaacttacgttatatgacttttgatgaatataaagcagctatgggtagtattactgatccaaaagaatatctacaagtggtttcagttgaaataggcgttttagcacgttcaactggaaaaatcgggtctgattcaaatgtgaatactcaaaaggtatttaaattggcagggcagactgtgactttaagtggaacagatgcaaccaatcaaaaatatttacgacaagctgtaaatcagatggtggcattaagaaatacattgggggcatcatga

SEQ ID NO: 60770 - DNA, 4107 bp, Acinetobacter baumannii
atgagaaatttaaatcaaaaaaaaccactttctatgacgatgtcagcattaatgacatttacaacctgtcatagtgtgtctgtgtttgcgagtgatattgagatttacaaaagcttaactagcggtaaaacttctattttgctgatgcttgacacttctggaagtatgggaattagctcattggttctgcctaaaaccaatcagtatggtagtccaggagatgttgaagcatcgttatgtagccgggtcgctgtgagtgaatattatagtaaccgttcaacagcaaatatgtatgaatggacatataaccttaaagatacacgatcatttagtccaacttataataaaacttctatttataaaacagtaacgattggaacaactacaattccttattatgttcgtggttgtacgaatggtacattgacagaatatgaccgtctatcacgtttaaaagatgcaattatacctttattagccagtaatgatttaagtgatgatgtcatcatgggactagggcagttttcatcgaagaccgaactcacgattggaacagctagtaatagattgacagatggtcactcaggaagaatattagttcctaatatggcactgacacaagcgcaacgtattaaaattgctcaacagattgcggctgttaaatctctggatacaacaacaaatgaagatggttcagcaaatgcaaacttaaaattatcaagtaacagttatcccaacgtaacaaaatcctcaagtggtacgccaactgcacaggcttatgcagaggcaggtgcatatatgatggggactgggaccggtagtagtggaacgaatagtggtaaagtctcaacgatctatgacggctatatggtgaagcaacaggcggataatgatggtcaggtatattttatctgtgtagaactaggcacaagtacaacttcagcattaggtgcaacagttaaacagtgtgttaatagttggccaggatacgactctactaataagacagctagttcaggaacttcaatttataaaccaaatgggaatggtggttggacaagtgttagtgcgacaacattaaagaatacggtaggaagtatgagccgattatgggatgtttatacgaaattacctgtaggttggcgtttcggtggttggatgaaagttgataatgaaccaatggacatagagccaattgtggggactatatgggggtatggtgacaatattcgtggtttagtttcatatcgaacaaatcccttctctgtagatggttcaacagacagtttaattggcggttttgcttattcggctagtgatacaaaaaatggaattgtctataaagcaggtggtagtacatcttcttgtgatggtaatggtatttactttttaacagatggtgcaccaaactcgactaaagacactatggcacaaaccattatgaatactacattaaccagtagttatgcatttagtggaaagccatcgggtacgggagtcttagtttcaccaacattaaaatctaatttattctctggtgaaacaggtggttgggaatatattggtgagtatgcaaaaaaattatttgataaaaccaaaaatccaaaatcaatgcagattaaaacagccgttgttgggtttggctcatcattttctggcattccaaaaaacacagatggttcatataactgtgatgctgtaaaagatactaatttagatgcatataatgcctgtaagtggggtggtacagattttggtaatggtggattctattatgctgagaactcagcagatattaaaaatagtattattaattttgtgaagaatgtaacaccgacatttgaccctgttcttacaggttctccaacattaccgcaagatgcattaaatccattgcgtattcagccttatgcatattatgcatcttttacaccaaaaccacaggagtctacgcaactttgggcggggaacatgaataaatatcatgtactcaatggtcagttgtatgctgcaaacaaatctacacaattatttaatacagatggttcattaaaccaatctgccgatggtatttggacaggtggtgtgaaaggtcagctaccacttggtattcagctaaatacagacaatattcaggttgccagtagaacaatttataccaatcgcgaaattacaggaagtgcgccttatacagcaagtgaaattgattcgctgaaaaaggtcaatttacaaaatgtctttgccatcgacccaagtggtacagctttatttgccaatgaccctgctaaaaactattggttaaatttactcggttataatgtaaccgcagatgaaacggtcgcattaagcgatcttgtaaataaagcagaacttcgtcaagtagggtcagtaatgcactctactccagttttactgactcaagaaggtaaaattaccactacaagtgggcagttaaacactacagaccgcaaagactatttactctttggtacaactcaggggcttttacatgtggtagatgctacaacgggtaaagaaatatttgcttttgtaccgaatgagatgatgcaaaatcagcctaaagcattcttgagtgaaagctcaagtagtggcggtagtagtaatctatattatggtattgatgcaccgtggactgcacacactcaatacgttgcaaaagcagatggaacactgacagtaaatgattctgggcgtactgtaacagacagtacaagtggcgatgaaattgccttaaaaggtttgcaatgggtgtatggtggtttacgtatggggggacgcagctactatgcattggacttgtctgatttaaccaatcctaaactcaaatttcatattaaccccgatggtgcaatcaatgccgataaaacaccaaatactgataatgctctcagttatatgggacaaagttggtcaaaaccgaccattgcttatgttaattttggcggtaagaaaaaactagtgatgtttgttggcggtggttatgacgcgggttatgaaaacccagcttatgatcagaccaataataaaggtgcaggcgtctatatgtttgatgccaacaatggtgatttactttggtggtcaagtgctaatgcatctgcagataaaggtgctcaagcacatactgaagatagtgatttaaaatacagtgtagttagtcaaattaatgctgtagatcgtgatagtgatggtctagttgatcatttatattttggggacttgggtgggcaggcttttcgcattgacttaaataataatgcaactggtgacaatgccgcagccaaaaaaggaaattttgtaacccatgtagtacgtttacttaatcagcatgttaataatgatggtacgagcccacgtttttatgaaatgccaagtttctctgtctctaaggatgacagtggttcacttgttggggttgtcgctctcagttcgggtaaccgtagttcacccttagcaggcgctattggtacaaataatgcgactgcttcaacaagtgcaaatgatggtgtatttgttgtttttgataaagatgtcgccaaaactaatttgtatagcttggtagatactgacttaacgaccaaaaatattgctactcttaggaatttaaatacatattttacagctagttttgctggtgatatttataaaaatggggtgagcgtagttgcgaatgatggttggaaatatacttattcggatagtgcaggtgtgtataaaggcatgaacgggctttatgccttagatggcatgctctatgtgaatgtattttatcgtgatggtgatggtatcggtggctcttgtggtgctggggtgaagggtaattcaaagctttatcagttttgcttgccaacaggaaaatgtagtttttatggtagctctacaacgcaaccgaataatacagatttaggtgctggtatcttgggtacagcacttggtaacgctacttctaataatgggcaaacactattacagaatgtagttaaaaaaactgataatttttgtactgatgcaaataaaaattcaccagaatgtcagttgtttaatactactgcgaagttgcaaaatttacgttggtatgaaacacgctag

SEQ ID NO: 60771 - DNA, 564 bp, Acinetobacter baumannii
atgttgaaacaacgagcttttaccctgcttgagttgatggtcactgtggtgattattgcgattttagctgctatcgcgtatccaagttatacgcgatacattgaaaaaaaagatctagccgtagcaaaacaagaggctcagcgtattgctacggagttagagcgttttaaagctaaaaactttagctataaaggttttgatgcgacttacctttataatgctggaacggttactccttataatgcaaccactggtactttattgttgccactagatgctacgtcaacaactgccaagtacacattgactctattagatggcactcaacatttacctttatctattttaaagggctctgatggtaacgagacagcagattctgcgaaagtccaaggtttaaactgggttattattgttgaaagggctaagaatagtagtggtgaacctaagcaagctaataactatgatttacttataaacagcgatggttttcgttgtatgacaaaagttaaaaatgtagtcagtggatatactgactgtggtagcaatagtgagacatggtaa

SEQ ID NO: 60772 - DNA, 1239 bp, Acinetobacter baumannii
atgagtgataaaaaaaccttttggtttattaaccaatatagctcaacgccagaaacagcaatgggaggtcgacattattatctggcccacgaactcgcaaagaaaggtcatcaagtttatgtgattgctggtcgatatagtcatctgttacgtaatccaaagcagtttgacgaacagtattttattgaggaaattattcctaatttctcatttgtatgggttaatttaccagaatatcaagaagctcatagcaaacagcgtgtactaaattggtttaagttttcttggctgttacgcaatatggcagatgtaattccagcaaaaccagatgtaattttatactcatcaccatcacttattgggtatttgggggctaaatatttagctaataaatttaaggctctttttatctttgaagtacgagatatttggcctttaacattaatggagttaggaggccattctccaagccatccattcataaaatttatgcagtggattgaggacagagcttatagtaaagctgattatgtattttcaaacttatataatgctgttgaacatatgcaaattcgaggtttagatagcagtaagttttattggataccaaatggcgtatctttagaagaggtttcgcagaaggaacctttaagtacagaagcgtttaatcaattgcctaaaaataaatttattatcggttacacaggaacaattggtgttgctaatgctatagatgatcttattgaagcagcacagaggttatcaaataatccacatttacattttgttcttgtaggttcgggaaaggaaaaagataatttaatacaaaaagttaattctttgggcttgcagaatattacttttattgatgctattcccaagaagcagattcagtcaatgcttgagcaatttgatgtttgttatataggttggcagaaaaatccactttaccgttttggtatagcgcccaataaattacctgaatacctatatgcaggtaagccaattattcatgccttttctggtaagggcgatatagttcagcaagcgcaagcgggaattacgattgaagcagaagaccctcaagcaatcgtaggggcggtagaacaattatatgcgctcactgcagagcaaaggcaacagctaggtaccaatggtaaacagtttgtattacaaaaccttgagtatgccatgattgcagaaaaactcgaaagtattgtttttaaggataacttatga

SEQ ID NO: 60773 - DNA, 1128 bp, Acinetobacter baumannii
atgaaagtattattagtatttggaactcggccagaagcgataaaaatggcgcctctggctttaaagttacaacactattcgcaagattttgagaccaaagtttgtgtaactggacaacatcgacagatgctggatcaggtgttggagctgtttggtttaaaacctgactttgacttaaatttaatgaagccaggacaaacactgtcagatgtgacctctggggtgcttaaaggtctggaagaggtgttcgagcaatggctgccagatgtgattttagtacatggtgataccgccaccacgtttgccgcatccttagctgcgtattaccataaaataaaagtagggcatgttgaggctgggctacgtacaggagatttatattctccttggccggaagaagccaatcgacaattaactggtgtgttggcaaattatcattttgctccaacacaatcttcttatgacaacctgattaaagaaaatgtgaatccagagactattgttgtgaccggtaataccgtgattgatgcgctattgcaagttaaacaaaaggttgagcaagatcaagcactggtcgaacaatttcaacagcagttctcatttctcgagcaagaaaagaaactgattttggtgacgggccatcgtcgcgagaactttggtcagggatttttaaatatttgtcaggccttagcgaatctggcaaaaaaatatccggacatccagattgtgtatccggtgcatttaaatcccaatgtacagcaaccggtgaacgcacttttggccgatattgacaatgtttatctgattgcgccacaagactacttacctttcgtctacttaatgagtcgtagttatctaattctgaccgactctggggggattcaagaagaagcaccatccttaggtaaacccgttctggtgatgcgagataccaccgaaaggcctgaagctgtaaaggctggtacagtgcgtttagtaggaacagagatcgctacgattgaacagtcggtagcagaattaattgaaaatcctgatgtttatactgaaatggctgcagcgcataatccttacggggatggcacagcctgtcagcagattattcagtttttaaaaaaatcttctttataa

SEQ ID NO: 60774 - DNA, 420 bp, Acinetobacter baumannii
gtggtagccctcgctaaagcaaatcctagtttatcttttgatatatatggaagaggcgactattttttacataatgatttgcctaaaaacgtacggcatattgataagtttataccgcaaaatagtatccctgatttattggataactataaggctgttgtcatgcctactcgtcttgatgcacaaggagtaatgatgtgtgaaatggctagttatggaattccaactattgtatctgatttaccagtttgtcatgaaatgctagatggtttttcgaatgtttattttattaaaaatgatgatttttttaataaaaaaatcaatatcttagatttgattcctttgagtcagtttgaacaggttgatagatttaatccagaagaacttgctttaaaagaacttagttttattttatcgtaa

SEQ ID NO: 60775 - DNA, 1911 bp, Acinetobacter baumannii
atgtctaaatcttttcaacctactcgtctggtaggggctatcgctattgcgatggggtgttcacctgttatttttgctgaagatgcaacagatgcaactcagcttgacccaattgttatcactgcttcaaaaagtgctgaaaaagcaagtgaagttccagcgcgtatttcagtaatctctaaagaagaaattgaaaaaaatcctgctttaaatctatctgacatcttgcaaaaagatgcatctatttacgtaaaacaatcaggtggagttggccagcttgcagacctatctttacgaggtggtcgcactggacatactttattgcttaaagatggtgcgcgcatcaatagccagaatggattaggtcctcttactccagaattcatggatctgacagatgtagaccaaattgagattttgaaaggacctgcttctgtacaatatggtagtgatgcgattagtggtgctattcaactgatcagtaatacccctaaaaaaaataatgcctttgttaccggtatatatggagaagataatacttataaagctattgtaggtgctgatattgtttcaccagaaggtttctatgctcaaatacgtggacagagactagaaactgatggaacttctatcttggatattcaggatgataaagaaaaagcaccttatgatcaaaaaggatatagtacaaaaattggatatgacaatgaggctttcaaaacaagtttagccatcagccaaaataaaggaataaataactatactactgattcctaccacaacaattcacaaaaacaatttgaaaatcagctcattaactggttagcaagttacaatatcaaccaaaatgttgctttaaatgcccgatattcaaacactaaaaacaaccagacttatttaggaaatcctgattcccattataatgctaaggcaaatgaaggtgatatcaatgctaaatggaagtttactaatactcaaaatttacttgctggaatagatagtaatcgcagtgaatatagtgcagcttcattaattggtaataaacaaaaaataaatacaacaggatattacatccaacatcaatacaataatgatggtattcatactcaagctggggttcgagtagaagataacgattggttcggcactcatactgttggccaagttgcagcacgttaccaaattgctcctcttacaagtatttatgcaaatatgggaacagcatttaaagccccaacccttgaacaattgtatggttcttatagtcaattcaattttcaaggaaatcctaatttaaaacctgaagaaagtaaggcatatgaagttggtattgaccaacaattagcttacggactctctgtttatatatctgcatattatacagatatcaaaaatcttattagctctggcaagatagataataagagtacttatataaatttaggtaaagctcgtataacaggtggcgaaacaggactcaaatggaagctgaatgaatatttttcaaatattgaatattcatatattaaaagccgtgctacagatagtttaacaagccaaagttatgatgttgcttaccgtcctcaccagactataacattcacagcaggctatgatgatggggtatatggtgtaaatgcatcattaatcgcacgttcaaaagctaatgcggacaatacaataaactcagttaaagttcctggttacgcaactattgacttaaacgctttttggaatatgaatccaaatataaagttatttaccaacatacagaacatcggtgatgtacgtaataagcaagtttataatgcagcctatcacaatcctgctaatcctcaatgggattctccagaatattggtatatcagcggtggccgccaagcttctgttgggataactttccgctattaa

SEQ ID NO: 60776 - DNA, 507 bp, Acinetobacter baumannii
atgaaatattttaacaatgtaaattcaatcgaatctttaaaagctcaatataaaaaattagcatttcaaaatcatcctgatcgtgggggtgatactaaagttatgcaaaagattaatgctgaatatgatgctatattaaaacagcttattaataatactgatgattctaaatatagaaatacaagtgatacttggagtttctgggaatcaaaggaggaacatgcagaagctgaaattaaagtaaaagaagctttagataaaattaagtttttagcaggcttgaaaatcgaatggattggtgtgtggttgtgggtatcaggtgatactaaaccacacaaagaagctttaaaagaagcaggctttagatggaatcctagactctctcagtgggtttttgcaggtactaagtctaaagggaggggcaccatgtcattagatgaaatacgcgctaaatatggctgtgagacagtaaatactaaaccattaaaacaattgaaaactgcgtaa

SEQ ID NO: 60777 - DNA, 141 bp, Acinetobacter baumannii
atgattggatcaagattatttgtaaaaaataacggtgaatgggtagaagttgtttatattggtcaaatgtcatttagattttatggtcaagatattattaatgatctttttgattatgattataggtggcaagggatataa

SEQ ID NO: 60778 - DNA, 456 bp, Acinetobacter baumannii
atgaataatttattttttgtttgctcttatattaataaatctggtgagcctgacgaaagtgtttggtgttatcttgaatcccatgaaggtacttatatttgttctttaacaaataaaactattgaacagcttgattccgatgttaaatcttctatgaccaagtattctttagatgggattgttaccactaagattgtttctgaggaagattattataaaaataaatataaagtaaatgttcctattgaaatttcgaaagatcgtttttgggagttgctggaatgcttaccaccagagaaatggattaataattcagaatatgaaatattcagagttatggagtgtcttgcagctaatctctatacattttgtgtttatcataaaggaaaaaataaatattttgagattgttgccgatcgtcatattgattatcaaaaactatatttaatgtgctaa

SEQ ID NO: 60779 - DNA, 747 bp, Acinetobacter baumannii
atgaatacacaaaaaagattagattctttaaaatctcagtttagagaggttttttattcaacagcacaacactacaatagatatgaagttttttctgattttattttttgtatagctgctgcttatagaaactcaataaaatttactgaatcaaccgagtttgaatatctccaaatcattaaaaaatacagtagatccgatgttgagaaattaaccgagctttttggattactcattcttatttctgatgtttgccctcctaaagatcatttaggggagttgtacatggaatttaatttatttaattaccatcgagggcagcacttcacccccagtcaagtgagcttgatgatggcccgaatgctaatgcctgacttaaaacaaaaaattgctatgaataattttgtatcgatcagtgatcccgcctgtggtgctggatccacgctattagcatgtattgcacatgcactaaattgcaatattaatcctcaaaaacaattttttattgaaggtagagacattgataggcttgcagcattaatgtgctatgtgcagctatgtatctggcatattccgagccgaataatagtaggagatacattaaaaaatgaagtgattgaatcgtggtatacaccatcatattacttaggtgcttggcaatggcgtttaaacgatgagccaaaaaaaatacctgttcaagaaccaaaccaaattaattttgtacttgttggtgatacgtacacctaa

SEQ ID NO: 60780 - DNA, 414 bp, Acinetobacter baumannii
atgatcaattcagaatttcgattgttatgcgaatcgctaggcttttacaccccaaaaagtatagttgtttttttgaaccagtttgagccatacattcggattaatgaacggcccgttgaatactggctgaatggaaaaaaagctcaaacagacccgatacctgaagatatacagcaattttttctttcaatacaaaaattgcaacttcagattgttgaacgtgaacgaaaaaatctatcggaaggaagaccctgtacttttaaatatctttttaaagacccgataaaaatgtggcatcgtcatagtgaattacaaggtttacctgtaaattttttgaatcaggttgtaatcagattgggtttaaaactagattattatgaaaataatgaatttttaaataaagaggactattaa

SEQ ID NO: 60781 - DNA, 360 bp, Acinetobacter baumannii
atggaaaagacgaacttcatagatgaatatgatttattatttcgtgaaatgggtaaacaacaaatactatctaagattgatgagaatttttcattcgatttaattcttgaaaaaattaaaaatgaaaaaaatactaaggtcatcgaagttttaaattgttttattgaacagacttttaaatatttagatttaaatgaacttcaatatggttatggctatttaattggctttctcaattcttcaaaggataatttagttcttacgtctgatgaatttaatgaattaggtcgcattggcaagtgttgctatttagctgctactgcaagaattaatcatgaaaaaaatctgactagcatataa

SEQ ID NO: 60782 - DNA, 219 bp, Acinetobacter baumannii
atgaaagctaatgcattaaatttgaccaaaattcgtcaatttatttttatgtctcaggttcttatggttatttttgcgatacatgtagttttagcaaattacctgccagtatcgagagaaacccgttttttacttttggctatatctatttttggatctggtatgtcttttggtatggctatagccttttatagtattaaacgtattttagaacggtaa

SEQ ID NO: 60783 - DNA, 420 bp, Acinetobacter baumannii
atgacaattacagtcaattacgactttaattctttctgtttgactagcgatccagttcttgtaactgaggttgtaaaacagtttggaaatgtatcaatttttgctctttttgcattagaacgttcgtatttgggtgattttgaagctaagaaaaagttttcaaaaacatttaactacttaggtttttttcaaaagaatttaaatttgattaagaatttctattcaaatgtatgttctgaactgggtactacagttttaacattccttgaagatgaaagaattgatccaactggtaaaaaccatcaaacagaagatagttattttcatacttcagattctgaagttattgaaaacttagtttggttagttgctcgtcatctcagcattgattatctggactttatttataataaagcttaa

SEQ ID NO: 60784 - DNA, 255 bp, Acinetobacter baumannii
ttggaaacgtcaaaaaaatataatttagctatctttttagataacaaaattatcgctgttaaagtttgtcgttctgaagaagaacgagacatggcaattaaagaaaatgaaacgttcggattcaaaaccgaaaaaggtttttaccactttaacccacaaactaaaaaaatgacttggagggggaaagggcattcaaatcgttcaaagaatgctgtagttcatgagtttgataaaaaattgattcaaaacaattga

SEQ ID NO: 60785 - DNA, 564 bp, Acinetobacter baumannii
atgttatttcatctagtgccaaaaatttataatccttattcaaatattagggttttaggtattgagtcaatagcgatacctgattttgatatttatattgctggaaaccagctaagttttggtaaaccttacccaaataaaaactatgttgtgggtatgataaaagaaggtagaaaagcattgaatggtcttttaatagacttgccgtctctcaacttaaaatctttcacagtagatattgtttggaatttattattagagaacaaaacaatagcattgaagcatacaattttaaatacaattgattcagaagatatgaatgatggattactgacgcatgatgcttttttttggtatggctacaaagagttttctcataaatgggcactacctcatcagaaacaagcacctattgattttgagccatgtttaaatcttgaaaagcatggtttagttaatttaattgaggaaattactattccagttttagagaaagaaaggcttagtgtttataaagcaagtcgtacaccagaaaatatttgtaatataataaaattaaattaa

SEQ ID NO: 60786 - DNA, 318 bp, Acinetobacter baumannii
atgggtgaacgctcacttcttaaagcagttggatttattcatgaaataaataagttagattcaggctctcatagcctgaaaataagtattgctacacgcgatgtaaaagaaggggatatttggaaaactatctatatcgcgatgacagtctatacaaaaaaagattttgaaccaccagttaactttgaaaaagttccctttgatttagaaatcgaaggcttaatgattgaaaaacgtgaaactgaaaaaggtacttttgtaaatacttcaggttatctaaagtcaatttcagtgaaacaacaccaaccgaaaaattaa

SEQ ID NO: 60787 - DNA, 324 bp, Acinetobacter baumannii
atgactgacatatcagccttatcaatacaagaacttaaagatttacaagttcaggcagaagaactgattaatttaaagaaagaacaagcaattgaagatgcatataatcaggtaaatgagattgcagagggcgtaggcttaactattaatcaacttcttgaaattggctctcagaaattcaaaaagccacgtaaagtagttgaaccgcgttatcgtaaccaaaaaaatgcttccgagacatggactggacgcggtaaacaaccacgttggttagtagctgaaatagaaaaaggggctaaattagaagattttctaattaagtaa

SEQ ID NO: 60788 - DNA, 255 bp, Acinetobacter baumannii
atgggcctattagaagatgattttgctataaagtttgtagcaggagtagctttagttcttatactgtttggtgggcttggatttgcaggttacattattggattcatgttaaatctttatccgttgagtttaggaattaatcctgttgattctgcatggattggagggttatctggcgctgctataggtttagtagtgacactatatcttttaattaaagatatgcgcgatgagtcaaaaaacgctaataaataa

SEQ ID NO: 60789 - DNA, 234 bp, Acinetobacter baumannii
atgaaagtagtgcatattaaaattaatccaaataaagttatattacaaataacttggtgtttggtatgggcattggtaagtattgtattgattaaaagatttgtaccttatattgaaccttcaaaccttacattgtggactgtaatatttgcagttttgttgtggtttttaactctaatttttggaagttatactattaattctattataaataggattgaaaaagacagttaa

SEQ ID NO: 60790 - DNA, 273 bp, Acinetobacter baumannii
atgaataatcaaaaagacagtttttcacgggtaatatttgcagggagtgcattagcacttataggagcttttactttcggttttattggttttgcgtgtggtttaataataaagctactctttaatacagaagttaatcaatacgcattaatttcggcatttgcgttaattggttttgttctagctatatttgtagtaattcatactgaaattaccgattatattaaatcgaagaaaagtaaggctaaaattaataattctacacataactaa

SEQ ID NO: 60791 - DNA, 153 bp, Acinetobacter baumannii
atgtactttgtagctatttgtggttttatgtttgcttcagttctgatgtttatagctattgataaaagaagctcaatggcgctttcgtgttccttaacaattattattggtatgttgataattatcctcttaaaaaataaaggtctattatga

SEQ ID NO: 60792 - DNA, 252 bp, Acinetobacter baumannii
atgaatatactagatgataaagtttttggtgaaatattggctggaattgcaacgacaatatttggcagtataatttttggatttattggtttattggttggatgcgttcttaattttccatttttcagtaatgctttaagttatgaggtagatccaattactactgcatgtggttttacgcttggtggatttgtaatctctttattagtagtaatatctgttatgattactactaaaaaagtaggagagtaa

SEQ ID NO: 60793 - DNA, 489 bp, Acinetobacter baumannii
atgaaagctctttttattttaatcattcttgccgtagttggtagtatcggctactcgttatacgttcaatatcgcattgacgaaataagtgcaggttacacctctcatgaaaaagaggtgatctctaaggaaattattcaagcgcaatctttaccaaacgttgcttctcctagtggaacatgggatatgacatctgcaacatgtggagagcaagattttactaacaatattccttcacatattttttttaatactaatgccaataataatgcctacacatggcaaacagatttcaaatatcttttagcaggaaagaaactttcagaagtaggtacttttaatatcaaaggtgaaacgatcgcttttaataattcaaagggtgaaacaagcacttacaatattaaatacacatcgcctaatcaaatcatcttgggtggaagaaaactcggtgactgcattctgaccttgatattcatcaaaacaggataa

SEQ ID NO: 60794 - DNA, 279 bp, Acinetobacter baumannii
atgaaaaacgctttaactattttactaatggtggttgtattcaatttctttttatttggatctttccatctatttaaaggcacatttaaagttgaaataatgtcaacttttcaaattctttcattcatgtatgttttattagcatcttcaacagcattcacagctttgactttctacataattaaattactaaaaagtaataatcaaactagactattaactttaggctttattgttatcaatattgctattaatttttatgttattaagagtatctaa

SEQ ID NO: 60795 - DNA, 174 bp, Acinetobacter baumannii
atgacttatctaccattgatagaatacaacatagtaaaactattggcaattatcgttgccttagctttgccaatgcttgtattggtttatttacttttaagaaaaaagactcgaataaagttaattttctttaagatttttgaaattgatattcagtttcagaaagatgattaa

SEQ ID NO: 60796 - DNA, 654 bp, Acinetobacter baumannii
atgcaacatcctgaagatgatcaaacgctcgatattatttcttatattgaagaaaaacctgctcacggccagacagtcggctatattcgtgtgtcaactacagatcaaaatacgattagacaattagacggtgttgaactgaataaaactttcgtggacaagatctcaggaagcacaggcataaaagataggcctgaattaaaaaaactatttgagtatgttagagctggtgacactgttgtaattcacagctttgaccgtttagctagagatttaaatattcttattagcttaatccagcagctaaatgataaaggcgttgcactcaagtcaattaaagaggatataactttcaatggtgctaataatgctatggataaatttatcttacatatatttggagccgtggccgaatttcaaaagtctcttattgcagaagcaagacaagaaggcatcaataaacgcaaaaaactcggtttgtatgaaggtagaaaaccttcattatctgaagaacaacaagaagctcttagagcacgtataaaagaaaaaaattcttcgatggaaaactacaaaaaaattaagtggagtgcggttgccaaagaatttaaagtttcagagccaactcttatgcgttatataaaaaaactttcatga

SEQ ID NO: 60797 - DNA, 180 bp, Acinetobacter baumannii
atgaataaaactgaaatgattaaaaaaaatttagaggctttaattgaagaagttgaacatataaggcaaacaggaacaaattttaccgtagcaaaagatttggaagttttaagtacaaaagtattaagacatacaaatttatgtttaaagcttttaaatgaatcagaagggcaagtttaa

SEQ ID NO: 60798 - DNA, 810 bp, Acinetobacter baumannii
atggctaccactaaaccaactccacagctttatgaagctctacagcaagcttatgatgcttttaatcatgcgttatttgatggaaaactagataatagcttaattactttgcaacgacaggctaatacctatggttatatgtcttataaccgttttatttcgacaggtaataaagatgcatacacacatgaattagcacttaatcctgaatactttggtgttaagccattggttgaagtattacaaacgatggttcatgaaatgtgccatttgtggcaatggcaatacggtacgcccagtcaaaagagctatcacaacagagaatgggccgaaaagatggagagtatcggattaatgccatcagatacgggcagggtaggagggaaaaaaacagggcaaaaaatggctgattacccaatagtagggggaagatttttagcagtaagcaatgagctacactcaagaggtgttatcgtagcttggtatgatagatttaaacctaaaaatacttctattcaatccatgatcaatgataaaaattttgcagaaatgcaatcttttaatgttgttgatggccttctaacaattccacatctacctgaaaatacagaaaatattgcttcagatttttttggccaaaaacctgaagaatcaggattatttcaggatacgaatttggaaaatccaattaaagaaaaacctatatcttcaaagaataaatttacatgttcttgtggcgtaaatttgtggggaaaagctactctacaagttacttgtaaaaaatgtaataccgattttgttatggtttga

SEQ ID NO: 60799 - DNA, 333 bp, Acinetobacter baumannii
atgggtgatactggagaactaaatacttggtctagttcttcaggaaaatggataccatgctctattagccaacatgagccaaaactttattggacttttgatagtttaaaagaaattgctaaaaagtatgagtataaagtaggggatctagttgtttattgtggtttagacttcagaaatgaatctgttacttataaagtaattggttttgaatctagtgatcgtgtaatcgtttgtgatactgaaaatgatgttataggcagcttttacatggataactggcgacttgctaccactcctgagcaattaatacgcaagagaatatttatttaa

SEQ ID NO: 60800 - DNA, 261 bp, Acinetobacter baumannii
atgattgaaaaaaaacctaccataatgatgcatgtaatttatgataaagagactgagcaatttaaagtcggttatcacgattttctatctgctgctgagtatcataagcaaaataaaatcgaaaaaatatgtttaactgaccagcagtttaatacccaaaaatattatgtatttagagaagtaggctgctttagcaaagataaacttgaagaagcagaacagttagcctttgatttcaatacaaaaaatgaatatttttaa

SEQ ID NO: 60801 - DNA, 357 bp, Acinetobacter baumannii
atggatataagctatgagttattaaaaacagctattcgcttagcaacaaatgggaaccaagttcgtaccgcaaatatagtttgtactgtcaatcaccaaacaggtgttcagtatattattattaatgctgaacttgattttgaaagttcacctattgtttatatcgcttttcttaacccattaaagatatacgttaaggttccaccatcttataatcctgtaacaggacttcatacagatgaatatatttttttccatgagtttttaaattttgaatttgatgaactatcatttataaataaatgcaatgatttttggttaagaaaaaaccccttcaaacaacaaaaacttttttag

SEQ ID NO: 60802 - DNA, 234 bp, Acinetobacter baumannii
atgaaaaaacttattttagcatctacattactattaactgtattcagtgctcaagccgctactaagaagggtggtgtatgctgggctggtggtggttctgataagttctcttgtagttgtattgatgaacaaggtctaacaattgaccaaatctattcaaagggttttaaagttgtagccattcatccagatagtacaaaggcatctactaaaatctatattgaacaacaatag

SEQ ID NO: 60803 - DNA, 216 bp, Acinetobacter baumannii
atgacttatttacttgatacaaaagtttgtgtactcatctatgatggattaggaaaatgcgcatacagaacggtagaagaatgtagtaatgcaattttcaaagaagatccagccgagctactaagttttgactgtgaagtgatgactttcagagaatggacattattacataaaaaattaggttatttaggaaaaccaactttagaacctaattaa

SEQ ID NO: 60804 - DNA, 942 bp, Acinetobacter baumannii
atgaataaatatcaaattgatttaaaaaaacattaccctaaagactggattgtattgcaaaacaaggtcttagagtgttttagaggaatgtctcttgatgagaaacgcttacttattttagccaccccattagctcgaacaacaaatgtttctgcgagtgaatcaatatttatttctgctgaagaatttgcgacagcttgtggtatcgataaatcaacagcttatacagccttagaagctgcttcggataaaatatttaatagattttttagttatgtgagtgatgataataaaagagtaaaagttcgatggacgtataaaacagaatatggggatggcggatccgatatttatttcaccgatgatgttcttttaatgttaaggacgtttgacgaattaaacccatataccaagtataaaaaagaaattgttcttaaattaaaactcgattattccttagatttatatcatttagctaagaaacatcaaaaaatgactgaattttcaatgactttggaagatttgtttgaacagttaggattgcctgaatcatataaggatttaagcaatttaaagcgtgtttttttacatccaacaatcaaagagattaataaacagacagaaattgaattagattatgaaaatttaaaaaaggggaagaaagttattggttttaaattttttgttaaagaaaagcctaaagctacaaagatcatagaaatacaagatgaggtatttcctaaattatctgaagcacaaatttcaaaatattcatctatgctatctcaagattcaacattgtcaaaattaagtaactttcccgattataattcctttgcattctggttagcgggtattttgcgtgatcctaagagtgtaaaagaagctactgcaaaaaaagtattcaaagcattacgtgagaatacagactttagaaaataa

SEQ ID NO: 60805 - DNA, 207 bp, Acinetobacter baumannii
atgagcaaaatcataaacattgaaatgagtaaaaaacagcatttaattcttggaattaaagttgctttatttttaggaattgctttgctcctaaaaacgtatttagctacgccttatgaagctttaaataatgctcttgctacagtattcgccacactgactcttatatcttcaatcaaatggataacagcagaaataagtgtttaa

SEQ ID NO: 60806 - DNA, 1647 bp, Acinetobacter baumannii
atgaaattgatgattgttgaaagcccaacaaaagctaaaactattaaatcttatttgggggatggttggatagtaaaagctacgattggtcatattagagacttagtagacgatgaattaggtgtagatattgaaaatggctttatgcctaaatatgcaatctataaagataaagaaaagttagtagccgaattaaaaaaattagctcttacagccgatgaaatttttctagcatcagatcctgatcgtgaaggtgaagctattgcttatcacattaccaaagctttaaaactcacaaatcctaagagaatcgtttttaatgaaattagtaaatcagctttaaatcaatccctaaaaaatgctcgttctatcgacttcaaaatggttaatgcacaagaaacaagaagaatattagataggctatatggttatttaattagtccagttttaagtaagcaaagcggtcgccctcttagtgctggtagagttcaaagtgcagccttgaaaattttaaaattaagagatgatgagattaaaaatttcgtgaaaacaaaatattacgaaatcgaattaaacgttaacggagttaaatttagttgtgttaacacaactctcggactaaaaaaagatgaaaaaattttagataggacaatacttgaagatatagccgaaaacataacacaacttaaattcaattatttggacgaagaaataaaacaaataaaacctagagcatgttttactaccgcctcattacagcaagttgcttcttctgtattaggtatacaagttaaaaaagttatggatattgctcagaaattatttgaaagtggttatatttcttatcacagaactgatagtcaaaacctttcaactgagaaatatcaatatgtatctaactacgttaaaaatcaaaatatacctgtaagagatacacaactaatttttaaagcaaaagacagtgatcaaagtgctcatgatcctattgcagttaaagatttaaatgttaaaaacctgcctgacgagttctcaaaaaatgaaaaagcactatatgaactcatctatgaacgtactattttgaacgtgatggaaaatggagaagattcgtttaaaaaaatagttgtggatactgattatcaaataaatggcgtgacaattaactttgaattaaattcaaccagcacaaaaaaactagggtggcgtgagttcttagttattgaaaaatcagataaggatgatactggtaaaaaccctgatatttctatatctgaaaaaaatgtttgtgttgatgatttcataatcactgataaaacaaccaagccaagtccaagatatacagaacgtgatttagttaaaatcttagaaaaacttgaaataggtagaccttcaacctatgcgtctataattcagactcttttagatcgggaatatgcgcagtttgaaggaaaatttattactattaccgatttaggtcgaaaagtgattgacgcattagaagatcaagcgttcttgaatctacaatatacaaaaaatatggaagcttctttggatcagatcgcgtccggtacattagatcgcataactgtattacaagaatgctatgaaacaataaattctggtctaggtaatattaaattcaaaaattaa

SEQ ID NO: 60807 - DNA, 867 bp, Acinetobacter baumannii
atggtattaatgatgaatagttatcaagatcttgatattaatttaataaaacctgatcctgaacagccaagaaaaatatttgaagatgattcattaactgatctaagcaatagtattaaggcaacaggtgttaaacagcctattacagtacgtaaagttaataatgagtatatgatcattgcaggggagagacgttatagagcttcaatccttgcaaataaaacgactattcctgccgttattattggtgatgaaagccaattaacagaagaagctttatatgctcatcaattaaatgaaaatcttcatcgtgaagatttaaacccaattgaaaaagcagagttcattaataaaagaattgaatacctcaaaaaaacaggagatgaaaacccaagagaaacagtctgtaaagaattgggtatttctgctagttggttatctaaatcattggcaccattaaaattaagtgatgatttaagacaattggtaatggagggtaaagtaaaagattatgatacagttaaaaaaattaagaatcttggtgatagaaaacggaaagaagctattgaactgataaataatggtgaatttaattctaaagagttcttttcccgcagaaagaaaaaagatgaagataaaaataatttagatgaatcaatagaaaataatgaagtagatttaccagtagtaaaggaagaaaattacaatattaaagttacgcgaagtcaactagaatccatttttaaatctactggatttattcatactattaatacacttactacagaagaaaaagagattttatttagtaagaataaaaaagagctagtaaataaatttttagaatctattactagctcatcatag

SEQ ID NO: 60808 - DNA, 1968 bp, Acinetobacter baumannii
atggttgaattatttaatctttatctaatgatgtttacacatcatttttatgcttatgcttgggctgttatttttcttttaggaagcctattttcaatgacacctttgtctattgataaagatcatcaatttcatacagttttaacaatatggctgagacgtcttttattagtttctgctttagttctggtatcaataccctttattatttacttaggatttgatgttgaaaataaagataaatcccctttatggttttggtatttagaattatttaaacgatcttttatattatcttttttatgttcagtaattggcttattaacacggtttttatttacaagatattttgcaccaattcattcagcatttttaaaaggaatacgtgttaatcaaacggaagatactcaaactgacataagagatgaagctgaaaaaatcaaagctaaggattttctaccttcaaattattataaagagggtcaaatatttttaggtcttgattctgaagaacaacctttatatgtacccctttcaacatggcgtgaagtcaatatgcaagttattggcgcaacacgctatggtaaaggtgtgttgatcggaaatttaatggaacaaagtatccttaatggtgatcaggtcatatatatcgatccaaaagatgataaatttgctccacatgttatgtatcaagcatgccaaaaagcaggtagaaaattcatatatttatctctaaatgatgatgaagcaggtagttggttgccatttgctggcggctcatatacagatgcattttcacgtattgaaacagcatttgggcttaaactcactggtgaagctggggacttttataagactcaagagactaagcttttagaaggtgcttttagaaaaactagagatgtaaaaaaattatttgatctgctcgatgggacggatgctcttagagtaattgcagaattgcaaaaatggaaatctattaatagttttgtagagaagaaatcacgcaaagcatttgatattgatcgcgcaattgaagaaaatgccgttgtctatattaaaggctctttaagtagtgaagttatacgtgtagccactaaattattcattattgaattggttcaatctgcaaagcgattgtttaagaatagaacttctcatttaacaatttatgttgatgaggttagttttttggcatctcaagaacttgctcgtgctatggctaccatgttggggtttaatgtcaattttgtattggcttatcaatcaccagacgatattgtaaatacagatgataaaactattgatggtagagctattagtcaaagtataaataccaactcccaactaaaagctatttatgggggtaaaaactttgaagttgcagaatggatagccgaattgactggtgttattacaaaacaagtttctaagcttgaaaaaacagaaatcaaagctttgggtggtgaagtatgggacaaaggtagatccattggtactgtagaagaaaatctaattaacaccaatatggttctttcattagaacctagagtatgtgtgcttatacgaccacgtgaacttgctaagttatgctatacctcatttgtgcctgtagaagatatgaacatcttccctactttcctcagtagcttaaaagttgttgaatctaatgaaactctggaaagaagttcacatactaaagactctttgatcaatgatgatgagattgaagattaccttcttaactctaccgtaacagcagtagaaccagttaaaagcactattacaaatgaaaaaatcgaaaataaaaattcagatgaagaaccttctgctgaaaatataaaaaatgaagatcaaccaaaaataattaaaaagaaaacaattcaacatcttaatgaaaaatccccatctaatttaaaatcagatgaggatatgttgaaagaattagatttagaagaagaagaataa

SEQ ID NO: 60809 - DNA, 240 bp, Acinetobacter baumannii
atgcttagtgcattttggggtaatgtaccattaccaaagttagttgctgcgcaaccaacttttaatgattggataagctacgcttatcatcaaatcatgctgcgcatgttaagagaagatatagacaagctatgcttgcctatagccaaaatgcttagtgcattttggggtaatgtgccattaccaaagttagttgctgcgcaaccaacttacttatgtttatctttaggtgatttatga

SEQ ID NO: 60810 - DNA, 765 bp, Acinetobacter baumannii
atgaaagtgattaaacggaataaggaattaaaatacaatatagatattgctcaagaaaaaataaaaataaccttattgtggatttatgagtttaaattcaccaatacaaaagtcgttgaaattcttttgggtatagatggcagacatgctagaacctttataaaaaaccttgttgagaaagagtttttatttttattcaagaataaaaatcttgatggtaaaaactatttctatggtttaacacaatttggtattgaatacttacaatataatgggttgcttgatgatacagctaagagaaaaaatatttcatctttgcaaaaatctatgagcattgttcatgatcttgtagtccaaaagtacattgcgttaaacatttcaaattataaagaagtcttttcagaaagcagcttgtatcattttttaaaaaaagaacaaatcttagctgatgctattgttgtgcttgatgatggtatgcgaatagcaattgaatatgagcgttgggctaaaactaaagatagaatttattttaacttttatagacattatgaaaatatttttattcatgatcattatgatggctgcatttatttatttgaaaatgacataataaaaaatacatatcaaaaattattcgatcaggatcattgggttagatataaactcaacaaaaccacttcaaaattgtatatgttgactgagacttttgatactaagaaagatcaaaatattaaagatgcattcatcttaaaaaccttctcgtaa

SEQ ID NO: 60811 - DNA, 501 bp, Acinetobacter baumannii
gtgcatttatatgttgtgaaatcaacaattaaatgcttgctttttctttgctttttttcagtaaaagtatgggcaagtgagaattgttatatccaagctggtgcacgttataacgttgatcctactctaatttattccattgctggggttgaatcagaccatgataatttagctattaataaagctaattctaatggaactgctgactacggtttaatgcaaataaatagtatctggttaccccatctaaaaaagcattttggtgcaagtgtcaatgatttatttgatagttgctacaatattcatgttggtacatggatattatcaaacgcatttgctaaatgggggtataactggaaatcggtaggggcttataacgtgggttttggtcaaagtattaaaaaagatagattaaggtctaaatatgctaataagatctacacacgttataagaaatactgtgctttatacggctgtactggtaatctgcggatgtactaa

SEQ ID NO: 60812 - DNA, 543 bp, Acinetobacter baumannii
gtgctttatacggctgtactggtaatctgcggatgtactaatgcacctagtagacaacctcttgaatatttaggtattcaacaacacgaatattcaaataaacatgttttttgtgacactgtagatcgtggtttatatccagtttgtaatcaattaacagttaagactccagcagataattttaatattgatgatttattaaaaaatgaacctgtggctattgttaattttgactttaataaaagcatattaaaacctgaagcaaaaaatattcttgatgcagttattcaaaatccaaagtatcaaggaaaaatactttatttaaaaggttatacagacaatatagggggtgaaaaatataacaatattttagctcaaaaacgtgccgattcagttaaaagttatctatcaatgaaaggattacccaacgaaatgatggtttcgttgggttttggtctttgttgctatgtagttgaaaataatacagatagtaacagggaaaaaaatagacgtgtcgaaatctatatcgactctaagaactaa

SEQ ID NO: 60813 - DNA, 342 bp, Acinetobacter baumannii
atgtttcaagaaagtttaattatgaacaacatgaatttaaaggaacaaaagcgccttattatcgtaggggttttagctgctattttgctttctttagtttttcaaagtgcagcttatgctggtactactggaaccgaatttaaagggctgtacgactttatttacggtgctgcaactggttatttaggtcgtggtatctgtatttttgctggggttgttggtattgctacgggtgcaggtatggggcgtgttatgccagcaattcttggtgtaattttagccgtgtttggtactttagggccacaaatcgtcaactcattgttcaagtctgcaattatctaa

SEQ ID NO: 60814 - DNA, 300 bp, Acinetobacter baumannii
atgcaagcaattgatactgatgatacttacattccaagaaccattaacgcgggacccgttgtttttatttggaatgcagacacctttgccatttttacaattgtattttttatctttgcaatgattggaaatgtagcagttggtgcgattttagggtttttgaccgttaaagcttggattcgactaaaagaagaagatggtgcaggtttaattattcgtcttatttattggttcttttggtcgggatacttggcacgtggaaatgcaccactttccgaaattaaagagtatatcggatga

SEQ ID NO: 60815 - DNA, 615 bp, Acinetobacter baumannii
atgaataatagaaaatatctcggttttttgtttgatgcaaaacatcaaaataaacggctatggatgctcgttggtggattaacaattattgtttttattttaagtgccaaactttacaagactgaaaataatgaaaaaacaattattgttccaagttcattcaacaaacctttttcagtgaaaggtaatgaatatagcaatgaatataaagagcaagttgttttatttgttttgaacaacttacttacttttcaacctagcaatgcgaaataccaatttggggaagttctaagatgggttcacccaaaagactatccaactttaaaagcaaaacttaatgctgaattaaggaaaattattgcagattcatctagtagtgttttttacattaacggtgttcgggtaagtggtgatgaagttattgcacgaggtgaaatcgttggtttcgttggtggcaatgaagtaagccgaagaaatgcgtctattaaagtaccactcgatactcaaaacggtttctatattacgggctggtcggaagtagctaatgaagcagatccagtgcaaacagaacaacagaatgaaaatgaagccgatttaatcggtgatgttcaataa

SEQ ID NO: 60816 - DNA, 711 bp, Acinetobacter baumannii
atgaaaaagatagcttttttacttttaactgcatttggttgtgttaacacaacttatgctgttcaaaacataaaaatgaaagatggtgcaactgctacggttattttttcggaaaaggaaatgacacgtatcgctgccaaagggtctataccgttaaatatatggacggttgaaggccaaatggatagtgctcaagatgaagtaacaggtgattggtttgtaaccccagttaacccgaacaataaaacttttagtttttttgttcaggatgaaagtggttcgactatgacgataatcgcaaacttacaggacgtaccatctgaaactatcattttcgaaggcgctaaattgcgtagccaatacgatgaaatgaatatgggaggggataactccgattcacgtaaagcaatcattcgtaatatgatgcgtgctatggctaataatgatgaaaaatcatatttagtgactgatattaaagaaagagttcctttatggcgcgaagtcgatttagtttcagtgaaagcatatgaaacatctaaatttattggaacagtctatattttaaaaaatatctctaatcaaacaatgaatttaggtgaggaggagtttatagattttggcccttcagttgtagcggtgggactaagtaataatcaggttaaaccccaagacactacatatttatatgtaatccgtagatcggttaattaa

SEQ ID NO: 60817 - DNA, 1296 bp, Acinetobacter baumannii
atgagtgtattaaagtcagctactcaaatagcaaaatcaaaaaaagctatttttagtattatagttgttgcattaactttttgtattttccttctggctgtatatatttcagatccgaataaaaatgaaccaagtgcattagatattgcaaaaaaaaatgctgcaactactgataaatcttttgatattaatccttctggtaatgtcgatagtgaagcaaactggcgtgaacgttcggctgctgatttacagcaaaatgctgctgaactagctgcaactaaagctcagttagaccagttaaaacaggaacttgagcttcaaaaacaaaatcaatcactttcatcaaatgtggcacctttagcaaaacctgaaccagaaccatcattaccgccaccaagcaagaaaagtaattttaatcctacattaccaccgccaccgtctcaaaccgctattggtgggcaagcattagctcaacaagcagaatacttaaatggtcagtcagcttttgcaccttcaaccagtcctgacaattctggtgttgttagaacgggaagaataaaaaaacttagcgcaaaatcatcagatagtgttgaaaatacatcgtctgaaggcggtgaatctaccgaagtaaaaagaactgtacgaaacgtaaaaacctatgtacctgcgggcgcatttggaagaataacattgctttcaggagtcgatgcaccaacgggtggtttagctgactctaatccaatgcctgttttaatgaagattcgggataaggggacactagcaaactattttaaaacggacttgaaagaatgcactgtaataggtgcagctaaaggtaatctttcatctgaacgtgtagaaattagactcgaaaccattacttgtattcttgctaatgggactgtaattgaagaaccaataaaagggtatgtagctggggaagatggaaaagccggctttagaggaaaagtaatttccaaacagggttcaattatcgctaaagctgctatggctggtgttgcaggtggtatgggacgtgctgttcaagagcaatatcaaacagtgtcaagttcagctttaggtacagtcacttcaatagatcctaataaagtatttcagtcaggtgctgcgcaaggttttggcaatgcaatggataagattgctgaattttacattagtcgagcgaatgagacatatccaattgttgaattagcttcagcacgtcaaggcgatttagttttaacgcaaggcgttgattttaaaattccacatatcaatttaaaaagagggaattaa

SEQ ID NO: 60818 - DNA, 384 bp, Acinetobacter baumannii
atgaaaaaggtaattgttctagctgggattcttttactcaatggatgtgcttcaatccaatatagttgtacgggtgacgataaaaattcttcaggctgttcatcacttagtgaagtagcaaataatctaggtgcagttgaaacaccagttgcaattgaaactgatgttatatctcgtaaagctgctttgaagaagacagcaaaacgtttacaagaaataccacatcaaggtttagtaagggccaatgttggtgagccaatattaacaccacctaaaactatgcgaattttttatacaccttttaaggatgaacaaggcgaccttaatgtaggaggttatgtctatgttcaacttaatgacgctgaatgggtgattgcacaatga

SEQ ID NO: 60819 - DNA, 2592 bp, Acinetobacter baumannii
atgataaatcttcatagttttaaaagtaagcttaaagaattaatcagtcacgataatttgccgtctggtgatgaagtaccttcatatcaaacactaaaggcatttaatgagcgttatacattctcaagtttattagcttatgagaggtatgacgagaaggataaaatttattttaataaagatacagtgggtatcatgcttcactgtccacctagcactggacttgtgaacgaaaatatagctgttttaaatggaatttttcagggaatttacccgcccgatactacgatacagattaatattattagtgactctaatattgaatatattattcgaaattgggcattagaaggtacagatccgactgtgaataatgctgaaatgtatgaatatttagcgttatcacgttatcagcatcttataaacgctaaatgggatcctttagttgatgaccagccatttattcttagaaatatgcatttggtcatttcaatctatcatccatatccaaaaggctatacaccttcaaattttgatgattttacttcagaaattgatcgtattaaacgaagtagagacagcttaattagtaaattagcgtctgcacagattccatcaaaagtgatggaacctcaacattttattaatattttaaacggattcttgaatcctgatagaaacgaacagcctattcttgaatacaatgatcttaaacctatttctgatcagattataagttcagaaacagtttttttacctgaacaatctggaataacaattgttcataaagatcaaaaatattctctactaccttaccatgttagaacatttcctcagcgttggaagggagtacgtaatggtgaattaatagggtcttaccgagataatattctacgattagggtgtccttttatattgtctttaaacgttattattcctgatcaatcacgcagtaaaacagaagcacttgcaaaacaagtacgtgctacccaaatggccgattcgccaatggctaaatttatgccaagttggaaggataaaaagcaggattgggattacacagttaaaagtttagaggatggtaataagcttgttgagtcttgttttcaaatcttattgttaacaaaacaaggtgaagaacagaagaatgaagaaacactgagatccctttattcatcactaggctggactatcaataaaagccgttatacccctgtacatagtgtattaaatgctctccctatgggagcaccacgtgatgttcaaaaggggttgcaaatcttcaaatactatactccgatgctttcccaaaattgtactaaccttgccccttttgttggagaatggaaaggctacgataaaagcctaatgttaatgatgggcagacgggggcagctcgcttattttgatcaatttgcaaataaaaaaggtaactacaatatagcgtgttgtgcaacttcaggttcaggtaagtcatttgtaactcaagagaatattactaatacattacgaaagggtggtcgtgcattcgtgattgatgctggccatagttatagaaatatatgtaatttattaggtggaacatatattgattttggagattatcggcgtcaattatgcttgaatccatttacaaatattcgagatgaatatttagtaatagatggggaaaaaacagaaaaaacccattttgaagaacaattgccgatgcttaaacagatagtcatgcaaatggctacaggagctacttcactcagtaagcaagaagaaactcaaatcgaaattgctataactaaaacatgggaaaaaaataaaagtgaaaatgagattaatgatgtatacgaatatttaaactcatcaacagatccgatagcaaaaaaccttgcaatggccctttacccgtacagtaaaaatggtatgtacggtaagtatgtcaatggaaaaagtaacgttgattatactaacaattttgttgtgctggacttagatgcactcaatgtaatgaaagacttacaagttgtagtgctattaatgctaatgatgcaaattactcaaattatgtacttatcgggtgataaaaagagaaggaaattatgcattatcgatgaagcatggcgtttgatggattcaggggaaacaggaacagtcagccatgccgctaaaagtattgaagaaggttatcgtgttgcgcgtaaacatggtggttctttcatgtctttaacccaaaaaattagtgactatttcaaatcggaaacatcaaaagctgcattaatgaatgcagacttcacaatttatctacgtcaaaaaccagccgaactaaattcagccgtcaagcagcaacatattgatgattcttcagggattgtagatgttttaagaactctcgaaaccaaacaaggtcaatattctgaaatggcaattgaatcgccagagggcttgagtgttttcagactcgttgtagatcctattaccgagaaactttattcgacttcacctgatgaagtccaatttattcaagataaaaaagccgaagggtttagtttgcttgaatctattcaattgttgcttgatcaacaaaacattgctgcctaa

SEQ ID NO: 60820 - DNA, 468 bp, Acinetobacter baumannii
ttggaaaacttagaacaagagaaaatgccagtagataatcaaggcatagaaaaaactgaagaaaaaaagaagccaagtgattttaatatcagttgggcaacagtctttgtttccgtattaatgtctacattagtttcattaattactctagttatctacatgaaattcgtaactccgcaagtttatacgattcgtgtagatgaaattttagcagatcatattcgaactataggagcttcaaatttaactgatgctcaaaaacagcaaatcgcatcagcttggtctgaagcatttgatcaatcaattaaaaatgtttatgcgaataaaaatgttgtgttaacacaacaagcagtagtaattggtggaactgattacacaacgcaattaaagcaagaaattgctgcaaagatgaatgcaaatccgaatttagcaaactcaaattcaccaagtgcaacaagtacaaaatga

SEQ ID NO: 60821 - DNA, 507 bp, Acinetobacter baumannii
atgctattaattaaaaatggagcaaaaaaaagattaattaaatattcaatttgcgcgggtattttaggcttatttgtttctgtaatgagtaatggtgttgcgggttactcactagcattaaatacaagtaaaagtctaagtggcaatgtttacttaattaatcacaacgataaaaaagtggtaagaaatcaacttatcgctttcgtagcacctaaaactaaatattactcagactataaccgttttattaagtatacgtggggtgtagctggtgatgatgttcaatttgataaaaatgggacgttttatatcaacggagtgagaaagggtgtagctaaaagctacacaaagtcttttgaacctttagaacatgcgcaaagtggcactattccaaaaggaaagtttttcgttggtacgaaccatttggatagctttgatagccgatacaaattaataggaaacatagatgaaaaaaatattattggtcgggcttatcttttgttctaa

SEQ ID NO: 60822 - DNA, 606 bp, Acinetobacter baumannii
atgaaaaaaatattattggtcgggcttatcttttgttctaaagcctttgcaagcgattttggtgtaatcggaaaaacgtatccaattaaagaaaccgacttaattgttgccatgcaaaaacgcatggctgagaaggttaaaaatggtgagtttaaagctgaaatcgacagaatgaaaaaaaggactcagcaatacgtagctagacctaaaggaattactttacctgtagcaagacaatattcagcggtaaatattaatgttgagtatcgtttgccgaacgatattaaagatgctaacgggaaggttttatatagagcaggtacagttgttaatccactccaaatttaccctattcgtaaaggcttctgttttattgatggtgatgataagcgtcaagtgaattgggctaaaaaagcgtgttatccagaaaataaaattgttttggtaaagggcaactatttagatgtttcaaaagaaacaaatctaagaatctactttgatcagcaacagaaattagtaaaccgattcaaaattagtgcggttccgacagtaattagacagtctggtaatgcacttgtaaaagaggtattcccaattgaaaaataa

SEQ ID NO: 60823 - DNA, 1044 bp, Acinetobacter baumannii
ttgaaaaataatatttataaaaaattggtaagtgttgcattagcttcgttgtcattctgtttatatgcggaaacttctaccaatactaatcctgattttgtttcaagccgaacacaaccttgtgacggtaaatttccaaatccgatatctgatatttgttggaaatgtatgtttccaataaaagtaggcgcaatcaatctttcaatgtcactccaaaaagataatgatgatccatccccaccaatggtatgtaattgtccagcaccaccaccaatttttcaaagaattggtgtaggtgtaagtttttgggaagctgcacgaatggctgaagttgtaagaactcctatgtgtagccctactttagggggtgcaagattaggttcaattaatgcccctgctggtacacatggtcaaactgctgaagatgaatcatcaagtttctatcatgtacattggtttagttatcccgttttgtcatggattggcatgggatttacatcggctgcatgttatgacggtgactcttacgacatgctttatatgactgaattagatcctctttgggatgatgataattcagcttttttattaaatcctgaagcagttcttttcacaaaccccgttacacaagttagttgtgcagcagattcaattaaggcaacagcaactctctttggtatcgatccaatgttctggtgtgccggaagtcaaggaagtgtattccctctttctggtacgcaatcaaatcatcacggagcagtagacgcatcattgaatttaatacatagatttactttcaaaatgcaccgtgaattgcttggtaaagatacatctacatacgcagcaatgtgtggttcagtaccgcaaccacttttacgtaaaacacaatataagcagcaaatggtttatccagtttcacaaacacaattaggcttgggctatggagttccctcaactatttggggtgcaggtcgtgaatatccttacaaaggtgaagattttgcatacatgatctggcgtaaaagaatgtgttgtgcttggtaa

SEQ ID NO: 60824 - DNA, 735 bp, Acinetobacter baumannii
atgaaaactaatattttaattaaatttggtatagtcacttttgttagttgtttgactatttcatcttttgcaaataattatgccgatgaattaaaaaagcgcaactacgaatttgaagaagtaaataaaatgcttcaaagtaaatcatttgcaagttatttgaatgatcaaaagaaggcaatgaatattgcagttgatcaatcacaaaaatcgggtaaaggattaggtttaaatatacctaaccagtattttgaaaatggttcaaatacaaactatttaacgcaagctaatttaaaacaagatcagattgcaaagaatggaataactgcgcctattgcttttgtaagtttttcaatgccagaagaagatataagaaatttaattaatgagatggctaaagtaaaaggcggggttgtgatacggggattggtagatgatgactttaaaaagactgtagcaaaagttgcatcattaaaaacaaaagatggtgcaggtttaatgattgatcctactttatttcaattatttgatgtaaagcaagttcccacttacgttataccgatgcaaacaatcgagccatgtgtagataaaaataaatcatgtaaacaaccgaagcacattaaagctagtggagcagttacttttagatattttgttgatctggtagagcgtacaggtacaacagaagaaaagacatttgctgcgaaatatagcgcaatgttaaaggggcgctaa

SEQ ID NO: 60825 - DNA, 1887 bp, Acinetobacter baumannii
atgaagaaatttctaagtacaagtatcttactttgcattacttcattggtatacgcagcttcagctaatgatgaaggtaagcaatttgcaaaaaatatgcttgatgggaatttgaaaaacattacaaactccctcaatacaaatcaagttccaaattatcaggaaaatgtccctgaaaaaaatctaactcatgatcaattagagtcaaaagcttacgaaaagttatctacagatcaagctagtaaagataatgccaacatgcttatcaatagacaaacttataagttagatactaaaaatgatccattaataaaaaactatcgaaatatagaacagggggcagcggaattaatcgctagtaattatgctggatgtactaatgttaaatatggcgctgatagtgccctaagtaatgttactaaaagctgtaaagttagtattcaacagacgcgtgaatttgactgtactgctacatactataatcagtgtatgaacccaaaagcgggtataccaaatactataactggaaatgatataaaagttgtttctcaacagagcagcacattacattttcaggataacggaaacggaaatttctcctttagatctgaccgaagatatacaggttgtggctggtttgtagatgaaattcagtttgaagcaaaagatgcaagcgcaattaaaaagcttgtgttaagtaatttttcatacgatgacggtttctggattgatattaacggggagcaagtattttctattattggttcacatgtaaatcctaccaataataattggagttgtgaacaaaaccgcgagtggcaatatacggcacctattgatctaacaagtaaagttagaaaaggcttaaatgtaatacgtattagaaatgtcgtaggtgatcaaggtgatatttcattcaatatgaaaattgaacgagtagaaccttgtgatattaacgaatcatataaacgtacttgtagtgtagcgggggctaatcctttagctgcattattacaaagtaaaacttgtaaaaactacattatcaataaagaaggcaaacaagtttgtgcaacatttgaagaaaaatacaaaacttcaggagatccatttaaagtagaaaaggaagaaagttcttgttcaactattcgagaatcaggctgttttgaagctaaaacagagtgtgtaaaagagttgggaggcgtatgtatagagaaaagaaaactattctcttgtaatgcttccagcgcagctaaaagcgtttctgtttgtgggtcacaattaatttgtccagatggtaactgtacttcagatgttgggcgtgaccaagttgatgctactgcggacttcaaagaagccgctactaagttagaaacggcagggcaactcgtaaaagagattacgaccgataaattatcaatttttaaaggtacaggcagaaaatgtactgataaggcattaggctttgcaaattgttgtaaagactcaggctggggaatggatataggactggcacaatgttcaagtgacgaaaaagaacttgggttatcacgtcaaacagcaagagcacattttgttggtagttatagcaaaggtacgattattaagactaagtaccaaagcttttgtacattcccgtcaaagctaacaagaatacttgttgaacaaggacgtgcgcaattaggctggggatggggatcacctgaaaatccagattgttcagggtttactttacagcaaattgaatcattagattttaataaaatggatctgtccgagttttacaatgatgtaatggataaagcgaataatggtacaaccccttccaatgctgaagcaattgatcgaattaaggagagtttgaataaccgctttgggggtaataattaa

SEQ ID NO: 60826 - DNA, 798 bp, Acinetobacter baumannii
atgaaaattaataccattgcaattgctgctctatttgtgagttgtgttaacacaactcacgctgagcaagtgtctgaaccagaaactaaacagcagcctgaccaagcgttttatgaccaaaaaaaacgcgggtggtttttctatgaagaaaaacctaaagtcgttaagaaaaaagaagttaagcaaaaaccgcttgaaaccttaaccccagtacaaattttaaaaaaacaaggcgaggattttgataatgcactggcaacagcaattctcaaccctagcccgcaaaactataaacgctatatggaaatgtctactcaaatccttacgcagtctgcaatgtttgcagacggactagagaaatttacctatgtaaatccaaaatacgattacacgattcaaaatccacaaggtagcaatgtccaaattcataatattatgaataatcaagcgaaagataatttgcttgcaacatcagctaaagataatgctctcttatttttctttcgttctgattgcccttattgccataaatacgcgcctattgttaaagaatttgccgctaactatggatacattgttgaaacagttagcttagatggtcgcggattacctgagtacccaaatccaagatataacccacgtttagctcaacagttaaaagttgagacagttccagcaatttatcttttgaatcctaaacaaaacaaagtaacggctgtaggttttggactgtccgactatggaactttaggtaataagattattgcagcattaacaagaaaaaatggagaacaataa

SEQ ID NO: 60827 - DNA, 483 bp, Acinetobacter baumannii
atgaataagaaagctttttacctcgttttttttggtttacttccagtaacagcttttgcatctttagacgatttagtaaacaagtggagtcgtgattttggatttaacagtacagaaccgaaattagcgaaaacatttatctctactgagcaaatgcttaaaaattcggctaaagataatgcaattatttttttctttagatcagattgtgcttactgccataaatacgcgccaattttaaagcaattcgcatcaaattatgggtatgcagttttaagctatagcttggatgggcgaggtttaccagattaccctaaacctagatatagtccacagcttgcacaacgattaaatgtaatgggtgtaccagctacttatatattaaatccccgtctaaatcgtataactaatgttagttatggtttatctgattacagcactctaacaagcaatatgttagaagctctaggagtacaaaaataa

SEQ ID NO: 60828 - DNA, 1440 bp, Acinetobacter baumannii
atgaaaaaatttagtctatctttattatttatatgtttagcatcaacaagttcatttgcatcactaaatagtgaagtaaatacttggttctcaaaccaagattatgcaaacgtgactcctgctggaagctatgaaacacaagcggggcgcatgtatacaggtggtggtattagtaccagatcacaagtaagccccgtattcgagttagttaatattcagtcgccaaaaattagtgctggatgcggtggtattgatatttttactggtggttttagccacattaatgcagatcagtttgtagaatctttaagggccattggtcaaaatgctaaatcactagctatgatgatggcaattaaaattgttacgccacagcttgaagatcttatgaataaggttaagggatttgctgatcgctttaaccagtttcaaactgatagttgtcaagcggcctcagctttgcttgagacaggcacacgggctttagggtggacagaaagttgtgtaacgttaaggatggagcgtttaggggagactagagccgttgctgagaatagttgtacaactggtggcaaaggtctaccgcagttatcaaatgatgagacaatgaaccgaaaagcttttgtggaaggtaatttggtttggaatgttttaatgcaagattcatatttcaggaacgatttagatctagctgaattattaatgaatattacgggcactgtaattttagataaagggtcaggtagtgatcctgaaccaaaagtcaaagcaaaagttacgagtattattggtaatgattatacctcggaacaatttaaaaatatttttaatgcactttatttggggaataaatctagcgaacgtctcgtaatgtataaatgttcggcgggggatcgttctgcgaatattaagagttgtacatctttaactcaaccacagaatgtaactgtaagttgggaggggatgaaaactaaagtagataatatattagcatcaataacaaataaaatcgtgacaggtcaaggtagatttacggcaactgaaattggattaattgaatcaacgaatctaccaatttatcgctttatttctgctgctactgcgtcagatatgtttgcatactctacgaatgataatcccgctgaacagttcggtaatcttatcgctcaagacatagttttaaaaaatcttcaaaatcttgttgagaaagtacaattccgagttgaaaacgatactaataatttatctgatgatgtaacttttaaagaatttgcagctcaactcaaggatgtaagaattggtttaagtcagcaacaatacaaggttgagagagaagctgaacttatcgcaaaaatgcaaaatgatattattcagtatgaaaaacgcatcttaactaaagtccaagctcgttatgtcgatgctgcaaaatttggcaaataa

SEQ ID NO: 60829 - DNA, 2832 bp, Acinetobacter baumannii
atggattttgaagttattacatttgctggcggtgactggttaagaatgatttttaactcagttgcaatgatttttgggaatggtgattactggttagctttacgaacgcttgcagttgcgacttttacggggattatgcttaaagtgaccttctcaagagatgggttgcataatgttcgttatatgcttgtgttagtgttttttatatatgctgtcttaattccgaaagtaaatgtcgtaattactgacaaggctgtaccatcaaattcggctgtagttgcaaatgtaccgattggattagcaggtattgcaagtgtaggcagtaggttctcattctggttagccaaagctgtagaaacgactacaacattaccagaccaagctaaatacactcaaacaggctttggtttttattctgaactaatgaactcatttaaagggatccgaataacaaatccaaataccattgagtcctaccgtcagttttttaatagctgcattattgttgacggtattggtcacaaacggttcacatttgaagaattaatgaatgctggtaatttagatcaattcttgaaaacacatgtgaataataatgtggcgggctttacttacacgagcagcacaggtgataaatctttccaatattgtgtagatgggtataacttaatttctcaagatttaacaggttcggtaaatgatgctatccgtttagcatccattacatttacagatcgttataaatctgtagatagtgcgaatcaacttgttcaaaatagtatgactgaaattatgagatcctttactaatattgcccttagtaaagaagcaatttcaaaacagtatatgctttataatgaattagattcttcagttagcagaatggcagccgaagtttcagatgattcaatgcagaactatattattgctaaagctaatttagagagacaaaccacatttaatgcagtaggtaaagttgctgctgataaattgccaattctaaaaattattttagagggtattatttatggctcattcccacttgtagtaatgatagctttagttgccccagcaccagtatctataacttatgcaaaagttgttatttggatagctttgtggacacctctttttgctttcttacattttggacaaacttattttgctgcaaatcacttacagagcttggcatctttaaacaatggcttatcccctaatgcaataagcggtctaaaccactatttaagtgaagctagtgatacagcagggtatctgatggtttctttaccgattattgcgtggttatttgtttctgcttcaggggccatgcttgcatcattaactacacgatttgcacagggttatgaaaaatcagccgaaagtgcagctagtgaaacagtagatggtaaaggttctgcgaatggccgtgattggaaatatgagcaacaagctgaatcaattaactcaactatgcctgccgcgagtttttcgcctagtctagcgggtgctggtttagctggagctaatgttagtagtgtattaaatagtgggacaggggttactacttcttcaagtaataacgtccagatgagccaacctaaatctgacctttatgtgagtaaccaagctgctcaacaatatgctgaaagtacaacagcttctctacagaaagcacaatcatatgttagttcaacacagcagagcctaactgagtcaatttcggctactttaagtcagactcaagctgcggtgcacaaaattatgaatagcgatagcatgagtaccgctgcaaaacacgcagtttctgaagctatggataattcacgtaccagcttgacacaaagcatgtcaaattggggtaaagcaaacggatttaatgtcactgatgaaatgtcagggcgtttaggactctcattttttggatctagtgccggtgcaggtgtaggtgctctcaatactgaagaacagcgttttgctcaagcttatatgacttcaactacaggccaagctgctatatctaatgcagtctcaaatgtaaatgaaacaataagaaatagcactcaaatggagtctgacgaaacaagctcaggtattcaatcttcactagaccgcatgaaacaagcaagtacagcttattcacaggcactttctcgaaaagaagaagcaagttggaaagctgacatagcaagaactaatgcggaaagtatgaccacagatcaaacagatcgcttgttaagtcatgcaattaaagaaggttatagtcctgcacaatatgatcaattaatacgtaatgttcgggatggtgatagtgctgctattgctcaatatggttcacttgtagaaagtgcaaatatgaaaatggatggtcatgaagctattgctaagagctatgaaaatcaggcggaaaaaattgccacgaatggtaagcaaagtttgattgatagccgtgacaaatacgaagatcgagtaatcgcacaacatgccgaaaatgatggacatgttgcatcacaatcagtagcgcaagcgcctaatatggctgatccgactgctcagggtataggaggtggaaatatcggtaatggtacagataacgctcatttaacgtctattactggtaagggtgaaaaagctgaagctctttatgaaaaaacaggagaacaagccaatgcagcagcgcataccgctggtagcgtactaggtacagttgtaaaaaatgggccaatcgttaatactttaaaagttggtgagaaaatcggcaaaatgtatgacgagtttaaatcagcttataatagctctagtgatgatcctatggatgggaatagaaagaagtag

SEQ ID NO: 60830 - DNA, 255 bp, Acinetobacter baumannii
atggacaattttaataaaacaagtaatttagactttcaaaaaaatccgttagattctcgtaatctaacgggggttatttgggaagatgctttgcgtaaagtcgatagaccacctttactaaataatgcggatcaatatacaaaaaacagtaatgttgataattcgattaaatcattaagttttatcggtgggttatttattgtatttcttgcgttaatggctttgacttggctttatagatttgtctttgggtaa

SEQ ID NO: 60831 - DNA, 297 bp, Acinetobacter baumannii
atgagtaatgatcttgaactgttgtacaaacggtattcagaaggggttctacaaaaagatctagagttattaatagatgtttgcccacaaggtgtagagcttgttattagttatgatctacatagcgattcatattttgtttctattctgatacttggttcaagaaacggtgaaaaaatcccaatgtttactcaaagaggttcacgaaagacatttaaagacataagtcgggcgttgagttggggagaatctcaaggatttactgccgtttcgttttatcataaatggaaaaagtaa

SEQ ID NO: 60832 - DNA, 300 bp, Acinetobacter baumannii
atgattttcataatatctaattttgatggttttgatatgggccgaagtgaagcaaaaaagctgatctcgattaaatccttaattaatttaaaagacagcctagtagtacaagatgctcaatttgtgggtaactatacagtaggttttaagctgtatctaacgttaaataacattaaatatgttgtagctacaacaagtgtagaaccagagtcaaaaaggttttttaacttagatcgtgcaatcaaaaaaattcaacttcaaactaacattaaacaatttagtattgaaatcaaggactaa

SEQ ID NO: 60833 - DNA, 762 bp, Acinetobacter baumannii
atgaagattataacagttgcgaaccagaaaggcggtgtgggaaaaagtacattatcaatgcatataggtcactttgcaaaagagaataatttgcgagtgttgtatgttgatttagaccctcaaggcaatagtgggccgacacttggaaaacaatatccaaatataaaaccagcatttgagctttttcaaaacgattttaaatatacagatgataagaatgattttcttatttttagtagccaaaaagataagcgcttatcagatttgactggtgataatggaaatttcaaaaagaacttaactaaattagataaatatttcgatatatgcgtaattgacaccccaccaactgcgggattcttacaagttattgcagttgaaaatacagactacgtaatttcaccacttgaattacatgactggtcgtatgctggtttaacagatttcttgacacttgttcaaaatctaaagcaaaaacaggtggataaaccagtttttcttggattgttatttaaccgtgtctggaaaaactcaacttctcaaaaaaatgatctagaaacttttaaaacaaatgaaggttttaaatcaaatttattcatgaagggtgaagttgttataccgttacgtgaaatttacatcaagtcaactaagacaggccttccagtttggcagtttaaggataactcaagcgctagggcagagggcaaaaacattaagaaaatatgcaaagaaatcttgcaacaaatgaaggtagaggtataa

SEQ ID NO: 60834 - DNA, 945 bp, Acinetobacter baumannii
atgagcttagaaaatttattaaatgatggcggtaaaatctctaatttaatgaagtctggtttaggtaatgcacaggaaattgatattgatctaatcgatattgacccaaatcaaccacgtaaagattttgataaagacagcattaaagctttaagtaaaagcattaaagaacatggccttttacagccgattagtgtgcgagaaggtgaaaatggccgttatgttattaactacggtgaaagacgttataaagcctgcatacaagcaggtttaaagaagattaaagcattcttagagaatgattatagtgtttatgcacaagtcgttgagaatgtcttacgtgaagatttatcgctagttgatcggttaaaattttttgcagagcaaaaaaaacttggttttacaaataaacaaatacaagaaaaaattagtcatcctgataaatcgtatatttctcgtcatatgactattttagatgcacctgagttaattcttgaccgaatttatgacggtacaattaaaagtttagaagtaggccagacattaacatcaaaatttaatgctggtcaaaaagatgaagttcgactctttcttgagtcaatttcagaaggtgaaacggcaacaacctcattgctaagacaattttttaagaaagatgaaccaaagtcatcaaatggtgaggaaaaaggggaagaaggggaaggtgggaaaactggttcaaaacctacaaaggataaaagagataaagtagtacaaaatatcaaaaaattaaaagatgatgactttactcagcttgaagcgatcattaccaatgatgctgttttagaacagttaaaactgttagatgacaaggccattaaagcactttctgatttattattgtacacaaataattcagatgaagatattaaagaagtctttgaacagggcagggaacaagaataa

SEQ ID NO: 60835 - DNA, 252 bp, Acinetobacter baumannii
atgttattcaaaaaattcgctgttgctgctgctgttgctgctactttagctttcgttggttgttctaagaaagaagaagctcctgctgctactgctgcatctgaagctactgctgctgcttcttctgctgcttctgctgcttctgaagctgctactgctgcttctcaagcagttgacgctgctgctgcttcaactgctgctgcttcaacagctgctgcttctgaagctaaaccagcttctgctgcacactaa

SEQ ID NO: 60836 - DNA, 195 bp, Acinetobacter baumannii
atgaaaacattcgctttaaagaactcccctactcaaaattccgttcacgaacacactccagtacatgacctggttgcattcaaacaacgccagctcaaactcaaacgtcaaaaactcatcaaaaacatattcgatgctgcaatcttcataagtattgcgggcttctctttctcaactttgttttggggagcctaa

SEQ ID NO: 60837 - DNA, 879 bp, Acinetobacter baumannii
atggataagaaaaattatcacgggctaatcttattagtcattctatttacagtaattgctgcttggttaagttttcctattttttttgaatggttgataaccaaatattttcatattgatccagtagagtatggtgccaaatttggtgcagtgggggatacttatggaagcttaaatacacttatttcttctattgcactatgtgcagtggcttattcaacttggttacaagtgacctccctaagagaaactcgtaaagcaaatcaaaaacaattgaatttcgctaaagaagttcatgatgagcaaatcaaagaatcaaaatttacaaacttttcgaatgcgttttacaatttacttaattttaaacaatcacgtttacattcactgaagataagtactgaaggtggaaaattttcacctgagtttatttttttaaaaatgactataaaatttattacattgcttgaggacgaatggagagatgaaaaattaaaaaaattaacgttggaacaagtggatcaagaatatgtctccgagtcaaaaaaactctttggaagttcattaataggaatcgaattaatttcatattacttactttatgatgatctttttaagttagttgcgaaagctgaattgactgaagagcaacagaatttttttaggggaattattttaaattcaatcacaatgagtgagttttacaatttagtgtggatatcaacaaatatttcagagttatcagtaatggtagaagaacatgcaattttcgaaaaagcaaattcaagattgcttttaccttatattaagagattctatgatgaaaaatgtttaaaaagatcaaatgaacaagaatctttaggaaatcaaaacccggcctaa

SEQ ID NO: 60838 - DNA, 840 bp, Acinetobacter baumannii
atgggatttgcatctttagtaatatttaaaaatgcaaatcccatcactttttataacgttaaaattatgtttaaagaaaaattcaaaaaaatacaattcaatttactagagctactctcaatactttcttttcttggtctttgctattgtttattttataaatatcatttttataacacgcttggtattccatggttcataactaatcttagtcctcagtttgttttctttgcatctttaaaacttattatttttgccacactagttttaactattggatattttatcggatttttctttagtaagttttcatataaagtagttagggtaggctcttcaccactaatattagtaagtatatttgcttattttatactttttttaatttttcaaaatagccttcctgaatatatcttttctatcaagtcttcagattttttatttacatacttgtgtgcaaatacaggtgttttcttgggtgccttctatcaacaatttacagtaaatgaagacataataaatgaaaacattctgttgtatagcggaagtatacaaatgcaatttataaaatataaaaaagaagtaatttacgtatcatcattttttttaataattttatttttcatgcaaccaatgtattttgggaaatcagaagcttcaaatattcttaagcataaagaaacttatctaaataaagcattactcaaagattcaattaaagattggtacctaattgaatcaatgggcgataaagttcttttgatagataaaaaaaataatataaaaatcgttgaatataaagaacttgattttattcaaacagaacaaaaaattaagtga

SEQ ID NO: 60839 - DNA, 819 bp, Acinetobacter baumannii
gtgagcacgctggtttcacttgggttatcggtcatacaagcctgtcgcttaagtggactcagtaaagccagctactatcgacgaagtacaagttggcgtaagcgagatgctgctgtcattgatgccttgaattatgtcttgaaacagtctccacaatcgggtttttggaaatgttttggtcgtattcgtcgtcaaggccatagttggaaccacaaaagggtttatcgagtgtactgtttgatgggcttgaatatgccacgtcgccaaaagcgagctcttcctaagcgtattgcacagcccttgaaagtcgtggcacaagccaaccatcaatgggcgttagattttatgaacgacagtctgtattgcggtaggcgttttcgtactttgaatattgtggatgaaagtactagagaatgtctggatattgaagttgatacatcactgcccgctgaacgtgttgtcagagtactggatagattgggtcagcaacgaggtttacctaagcaacttcgagttgataatggccctgaatttatttcggctaaattactggactggtgtgaagaacatgagattgaagtggtacatatacaacttggcaagccacagcaaaatgcattcattgaacggttcaatggttcattcagaagagaatttctcaatgcatatttatttgaaaacttaactcaagtgagagagatggcatggttgtggcgtatggattacaacaagcaacgcccccatgaaagtttaggtaatttaccccctgcgatttacagggtaaaactggaaaactctagtttagatatgtctcaataa

SEQ ID NO: 60840 - DNA, 270 bp, Acinetobacter baumannii
atgaaaaaatcaagattcaccgaaagccaaattatcagtatcttgaaagaagctgatgctgggatgaaagtggatgatatctgtcgtaagcatggtattagtaatgccacctattacgtatggaaaagcaaatatggtggtatggaagcatctgacgttaagcgtatgcgtgagttagaagaagaaaatgccaaacttaaaaagatgtttgctgaactcagtctggaaaaccatgcgatgaaggaactcttcgcaaaaaagggttggtga

SEQ ID NO: 60841 - DNA, 1374 bp, Acinetobacter baumannii
atgaaaaagaaaacattagtcatggtcatggcttcattttgtacgagcccactctatgcagcagcatttgatcgaacaggacaatcaatttctgcatttctacaacctggtaattattttgaggcaagtttatctgtttcagacacttcgttagaaggacaagaagcaggtacaaaccccacacgtaatagtatttctgatattgcaaactctgattatcgtcccagtgcagctttgaaattacagttagcacctcagttctcatttggttttctttacgatcagccatttacttccgactcagaatattatggaaataacagctttgttgctaagccgagcgatacggttttagtaccgggcattgattcagcaacacttgcccaaaagactggtggagaagccgtaacagggaacaccaaatcgaattttgatatgcaaaattttagtctgatatttggttatcaaccggataaaaactggaatttttatgcaggtcctgtttatcagacatttaaaagtaacgttaatttaagaggtcaagttttcagtgtatataatggctatgactttaatgccaaagaagttggagattggggatggctggcaggatttggttatcaaattcccgaaaaagccattaaagcctcattgacctatcgttcagaaattatgcatgaagtgactgccaatgaaaatgcgccactggttgatatgttgagtacacagcaaggccgtgattttcttgatcagcatttggcatatatggtttctataggacaactcactgaatctcgtaaggaggcactcaatcgtattgttgcgggcttacccgaagcaggcacatcaggctcaactaagtttagagcgccagagtcagtgaatttggaatttcagaccggattacgcaaaggtactttattgttcggtaatgtacgttgggttcactggaatgattttgagtttaaaccgtatcgtttcggtgaaatctcagaagttgttggagttctatcaacgccaagtcgtccaaacggttttaatctggttcgttattatgatgatcaatggtctgccaatcttggaattgggcaacgcctaagcgataaatggtcaggttcagtttctgtaggttgggactcgggagcaggtgaacgggtgtccacaggtgggccagctaaaggttattacagtgttggtcttggtgcgcaatatagtccaacttcaaaatactttatttcaggtggaatgaagtatctatggcttggtgatgccaaaggacagcttggtgctcaggcaggcagtgaatattatgttggtgaatataaaaataactattcaatcggttacggtttgaaaattggttataaattttaa

SEQ ID NO: 60842 - DNA, 594 bp, Acinetobacter baumannii
atgagaacttggcacatcattgctatatgtttttctataatactttcaacattaggggcgacgttctatcttaaatacgaacctaagtcccaattaaatactaattatggccctgttcgcttgggtaatgtatttgctgaaaaagtcatgtttgatctagttttaatagacaatgatcaaggaggactaactgagaaacttgtagatagtggaagctattatgatatgtctcaatcaacagataaggcttttacaaaatattttgataaattaaatttagaaagatcagataaagataaattatcttacgatcacgcaacaccactaactaaaaatctcaaaattaagattaatacttatataaatttctatagttcaaatttccaaacaattccatttacatttaatattaaggaagaaacctatccattacctcaaaatgtattaattaagaaaagtataaacgaaatacttaataagcatataagcgatactcagaaagagattagtgataccttgtttattactgataaagaaaattacaatgttagccctattacagaagataatgataaaaaacaaactcaaccataa

SEQ ID NO: 60843 - DNA, 729 bp, Acinetobacter baumannii
atgctaatggcttacaaattgctaattccgactctcgtctcatcattaatgctaatagcatgctccaaagaacatacagctgatcttcaaaagcaaatggaggaagctagagcgaagtctgaaaaaattcaagctagagaaatccaacaacaagcacttgagtcaatacagcaagaagttcaaattcccattagcgactcttcagataaagggacctattttttaattagcaaagaacagaaaggtaaaaactttattattgtttataaaagagttgggatagaacaaactacatttagcaaatacgaagttaattgtaaaactgaaaaaatgcgaacattaggtgaaggaagtgattcactagataatcttcaagactatccacaaaaaggtacatggtttacgcctgaaacaggtgctagcgcaggagatacttttaatttcatttgtggtaacaatactaaaactatagataaaaaagtatctcaagagagcacgaacaacttatcatctaatatagaaaaagatgccatcattggtgatcgagttactgatgatgctatcagagcacttgtgcaattagttcaaataaatggttataaatgtgacaccgtatcaggtgcagtcccttttaccatgagtacggggtatactctatattgtaataatcaccgttatacttatgagatcgaagataaaggtggaaatataattgttactgctaaataa

SEQ ID NO: 60844 - DNA, 273 bp, Acinetobacter baumannii
atgaagacacttaaattatcagttcactcaactgaacatatttggctacgacaactttttatagctaaaagaaaagagcttgagttatcacaacgtgctttagcggaacgtttaggagttgtttattcatttattggaaaggttgaaacaggtgatagaaggttagatatatttgagtttatggattattgccgtgcattaaagctagacccaatagaagttcttaatgagataaaaattaaattttataatgacttgactctaaataattag

SEQ ID NO: 60845 - DNA, 252 bp, Acinetobacter baumannii
atgaatcaagtggagcaattagcaaaatttaatcatcagcatttaccaaagttaagactgacaatgaatgaagtatgtgaaatgctgaatgtaagtagagataaattatctaagatggaaagggaagacccaacattccctagatcgtggaaagatggatcatcaagacaagcagctagattctatgattatcgagaagttttagaatggtacgaaaaagataaagaagaaaaacgaaatttgtatagttga

SEQ ID NO: 60846 - DNA, 372 bp, Acinetobacter baumannii
gtgttaagtaaaaaaataccaattaccataactctcctaacctgtatttcatatacaaatgctgaaatgatatcttttggagacaatctaaaatttgataaagaatcaattctagttctaaaaaatccaactagagtaacattcgttgcctatactacattagaagaaaataaaattttaaagtctaatatttctgttaattgtaagaaccagacattctattttaatggtggggatacaattgtgaacaatgatttggaatatgtttcatcatttcccaaaccaccaaatttaccaactaaagagaatgccagtgacttaataaaagactcattgccacacgtaatttatttaatatattgtcctaaatag

SEQ ID NO: 60847 - DNA, 528 bp, Acinetobacter baumannii
atgggggatggtatttttaattgggaactggtatcaaaatttataccattagtagcgccaatagtagcttgggtgatatttagtcaatggaataagcagaagggacgagaagttatagcacacgaatgtaaggagggatttaaagatattttagaaatagccaagatattgagtgacataaacattggtctaaaatcacctccttccaagaaaattgaagaaaaaataaatagtgatattgagcagttcgaaagtattaatagaagaattattagaaatttattatttgtggattcaacgataattgaaaaaagtctgtacggtagtatattgaaatataatgaaagttataatgatatgaaattaatgcttgaaattaagatgaaaacttatggatttgaaggggagtgtcgaacacaagagttttttgaaaaatttattaaaagtatgaaggggataactgatatatatcaaaaatatgctttataccaaaaaatacctaaatttaaaaatgagaaaaaggtgtga

SEQ ID NO: 60848 - DNA, 774 bp, Acinetobacter baumannii
atgaaacatagcattctgattagtggcgcagctcaaggtattggagcagaaattgcacgggtattttatcagcggggttataaagtcggcatttatgacattaatgaatcgcttgctcaaaatttagcgcaggaattaggaccaaatgcatgcgcagggtatctagatgtcagtgactacagtcagtggcaacatatattaaaagaatttaccgactgggctggcgagcttaatattttggtgaataacgcagggattttatattccggagcctttgaaaatatcgatatcaagtcacaccaaagaacaatcaatattaatgtaaacggcgtaatcaatggttgccatgctgcactcccttatttaaagcaagcttcttttgcacgagtcattaatctctcttcagcttctgcaatttacgggcaagctgacctcatttcttattcggccagtaaatttgcagtgagaggaattaccgaaggtttagatgtggaatggaaaaaatacggtattcgtgttttagatgtgatgcctttatttgtacaaaccgcaatggtcaacaatatggatgcaggttctattcaaaacatgggagtcgatttaacgcctaatgatattgctcaacaggtgctttcacttgtagagaaaaaagctcatttctggacaccgactcacactccagttggtataaaaaccaaattgctttatcaactctcaacaataagccctcagtttttaaatcgtttaactaatatttatctatcaagaaagtag

SEQ ID NO: 60849 - DNA, 1269 bp, Acinetobacter baumannii
atgaacatagatgaaattagggtgaaaattaatcaactttatctttgggatggttaccagcgcgaagctgcactccgacaattatcaggatgtttcgagcaatccttatttccacatttgctacgcaaattaagtgattatgtgcaagttaataggcatcttgcagctcgtcatttattagagtgggcagaacggtcagattgtgcggatttatgcatcacttattttttagatattgaggcaattaaggggcgaattcgcattgtaggagagattgaagatatattgatggataaaatccatcaaaatttagataaagtaaaattggttttattgtctagacaagggaaattgagtagagctttatttaattatattcaatctaaccaattaattattgaatcagagttgcttgagattgctaaaaatgcaaatgatcagtggattaggcactattggattaactttgctgtgaagcagaatctagactttttaaagtcggaatttcgacaatcaaaatatgtagatgtaaaaaaagttcttttgaatcgtttgttggaattagatgcattagataatgaaattttgatgattgctttaaatagtaagtacttatctattgtggattttgctatctttgtattgaaagatcgtaattttgattttaataactattttatacaatttcaaaataatgcgcttgagaatacaagtgtaaaaagatgcttattacaaatgctaattttagaatggaataaagaggatttttatttatatatagataagttaaatgataagtctattttatttatgattttatataaagcacttaaaataaagtatatttcactagatgaagtggttagtttattctatcggaaacaattaaagcttccattttatttacttcaaaagattgctaagttgagtactgaacttaaagaagtagacgaactctatttattaactactacaccaattagctttttacaaaggctagaattttgtgaaaatttatctttttggggtaaagtggagtggttgattcatatcgagaaatattgtcaaacagatgaagaagaggatgtgttgagagattctgttaaaatggtactgaatttggctaaataccaatactattcccctttatggaaaaaagaggacaaggaaatatattggatcttgtttcaaaatatggggaatattttaaatctcatagaaatatacccacaagaatatgaaaatttaaaaaagctaataactaaataa

SEQ ID NO: 60850 - DNA, 609 bp, Acinetobacter baumannii
atgaatttacttcctccaaacacgtctgcttttgaaaagaaaattgttgaaacaacagctaaaacaacagaattaaatacaaatttatcaagcttaattcgcattgatgatgcccctgcagatttcttatcaattttagcatggcaattttctgtagatcgttggcaagatgattggccagatgaagtaaagcgggcacaaatcaagaattcgataaaagtacatacctataaaggtactaattatgctcttcggtcaattgtggaaagttttggttattcgatcactattcatgaatggtggcaagaaagcccaatgaatgaacctggcacatttcaaatcaccattgatacaaatggtcgtgccttgacagagaaaacttcaaaaacattagttgaacttttaaacgatgcaaaaccccttacacgtgaattaaaaggtatcgaaattaacgttattgctgtagcaggaaacacgaatattggagccgcaatgtatgacggtgaagacatcacaatatatcctaaagtggacgaccccaactcattcattcattcagcttttggcttttatgagcatgaaataacaactatttttccagcagattag

SEQ ID NO: 60851 - DNA, 2388 bp, Acinetobacter baumannii
atggcagcacaatactactcactctttacagaacaaggtttaaatttactaagagaggctatccagaacggaacaaagttaggaattacgcatatgtcatttggagatggaggaggaattgttcctgaaccaaatgcagcctttaccagtcttgtaaatgaggtatatcgtgtacaactaaatagacttgctccttctcccaataatcctaactggctagaagctgatgcagtcattccttctgctgtaggtggatttaatattcgagaagtaggtctttgggctgaaaatacaatggtagcttatgctaattaccctcctacattcaaaccaaacgcggatcagggaactgctcaaattaaaacaatcagaattgtccttcaaattgataatacggcaaattttgagttacaaattgatgcttcagttgttatggcaacaatacaagccgtagaagatgcaaaaaaagaaattataaaatatgcagataacacaaaaatttctatatgctctaacttcaatgaactaagtctagttgagaaactagagggacgacttgtaagaacattacaatattactctgagacaaaggatagtaatggaggagcaacatataaatgtacaaataatgaatgggtattacaacccgatgggatttcagtttctcctgagcagtttggagcatatggagatggtattactgatgactcagatgcttttcaagcatgtgcagattttgcttatgcaaacaatttaagaatcgtaggtgagtctaatattggttattttattaggaaaaatgtttataactatagcgaattcgatgtagctggtatcatttttcctgcatcagataatttatctcctaaattatatatagatacaaagaaacctaaagaaaaaattcctttaagtctgttatctggactagaagaagggtcttcacgagttttaggtttacctaaatctgccgttggaaaatatattcggattagttcttctacagatattcttacagaacgttataatccaccaactaatactccatattttaaaaatacgaccttttttgtattaaatgaagctggtgatatttgtccagagctagacatgagttttgatccatcaaacgatactgggtctatagttgaaattattcctgaagagaaagaaattaattctactattgggtatattggaacaaggggagatgctgccgtctctactggtgaaattattataaaaagagattccacagttttaaagatcggagaagtttcatcaacaagtcaatttaaaacattgatttcagtactagcaaataattgcaaactatatggtacagcgaaggaatcagaatatgacggatatggatatggattaaatatctcatattgctgtgatacatttatatatgattttaaagcaacaaaatgtagaacagaattggatggtcgacacgcagctaatgttttcatatttaattcaaagctgaataaagccggttcacactggggaaatacatttaaatttaaaaattgtgaagtacaagatattgtttacgcaggaagaaacttatctttagaggattttaaattgcatggtttctgttctataagaggtgatatagcttatgtctcaggtaaactttatgtaagaaatatggcagctaaatcatcatctttcttaacatttagctcagctcctgttgcagacttttatacaagaccacgccgattatttgatgtcattgatattgatggagtcgagtgtgaaggagatatgcaaatattctatggatattcagcgaccccattgagcaaaatgaaagcacctagaagaatctgtataaaaaacattgatgcaccaaattcaaaaactttagcaatatccggaatattattagatcaagctgaaaagtttttaataaattcatattatcatttagaaaatattgatacagggggctatcttcaagtacttgggcgaggatttaaagatggtattagtcaatatgcctataaaggaaagattataaattgtggaaaaactcatatcagagcagatgcctcttattttgaagagcttgaagtttttgacacaaaaattattgcgcacaacaaggtaaatatttcaacacctctaggtagaggtgaatatatttataacaatgttacttttgaacataacagcaatttatccaatattgctctattaaatgtagaagcaaaaaaaggaatgttaaattgtgaatatcgcggtgtattttctaatgtaggtggagagataatttttaatattggagggagagctagaataggagctacaaactacccaactccactaaaatatatgataaatccaacttattttattgttgaaagttaa

SEQ ID NO: 60852 - DNA, 342 bp, Acinetobacter baumannii
atgaatcaaattgatcaaacgattaaccaggaacaaatcaaaaacccaaatgaagaagtggtgaccttagaagagccaatccgtatgggtgaacagatgattaccaaggtgaccattcgtaaaccaggtgtaaaggctctaagtggtactagtctacaggccatttaccagtatgacgtagatgccctttgtaaagttcttccccgggtaacatcaccagcactgacatcacagcaaattgccatgatggatcctgtggacttcgcacaacttggagggtacttagtcacttttttgtatccgaaagcctttcagcaggaaatcaaggctcagacgacctag

SEQ ID NO: 60853 - DNA, 360 bp, Acinetobacter baumannii
atgaataatttgaattttaaaactctaaagaagtactggctgcgattcgtgggtattgctgtaatcgcaggcgctttagtattggcatttgcttggaccgctggtctatttggacatcgaacaacatccaaaacttttttgggtgacacattaaaaaactttgatcctggatatcgacgtgcacatggtaaaggtatttgttttgatggcacttaccatagtaatggtgcggcagcagcactctctaaagctacggtatttgccaagtctgatataccagcaattggccgattttctattggaagcggtaatccgcatgcggcagataattctaccgcaacagtgagtatggctttatga

SEQ ID NO: 60854 - DNA, 237 bp, Acinetobacter baumannii
atggtatttcgagtgctatccagatacaccgacagccctatttttggaattaaactttcagttgtaaatcaaaccttaagccaaaatcgaataaacagtattaagcaattcttagttgttttaacccatgaaggcttttcagaaaataagtgtattcataaaggttgtactaactactcacttaatggaattaacgtatgccttaatcattttggttataagtttaatacctgttag

SEQ ID NO: 60855 - DNA, 1014 bp, Acinetobacter baumannii
atgaaaattgttcaggtattggcaacagatggtggaaagattgggggattagaaaagcatactttccagctttgtgcgaaattatcagaaaagcaagaagttcatttgtttttagacttaaattatcgaaatgaaatacctaaattagaacatcttcattgtcattattttgatttttctaaaggaagaatgaatatcggtcttctctattctctctttaaagaaattagaaaagttggtcctgatattgttcatgctcaaggtggaaaagcttcaaaaattttgagctttcttataccatttttaaaagtaccaagtgtggcaaccattcatggtatgaaaaataacatgcgtagttatcgtcattttgatgaggtaattactgtaagtcaggcggttggagataaagctagtgaatatcgaccagttcatgttatttataatggggttgcgcaggaaaaaagcttaactgacgatatacctagaacaagtctaaaaaaagctatcgcaattggccgattagatccagtaaaaggttttgatcgactcatagaagcatggcaggactttgaggttcagctagaaatattgggtgaggggccagagcatgaacgtttaagtcagttaattaaagatctacatttgcaggataaaattaaattagttggttatcagcatgatatttatccctacttggcagcaagtgatttagtggtggtatcatccttgaaagaaggaggaccattaattgttgcagaagcattattggtgcataaacctataattgctactgatgtgggcatggtaagagaatttattccagaaaaatatattgcaaaagataatactgtactagaaattaataatttaataaaagttgcgattaaaaactttgaacatattcagcatgactttaaacctgcttttgataaagctaaggctgaattgtctttaaatgcaatggttagcaaaacagtagatatttataacttagcgttgaaacaacaacgctaa

SEQ ID NO: 60856 - DNA, 150 bp, Acinetobacter baumannii
atgatttttatttgtagtacattaactttggtaggatgtgattcatctaatataaaagttgaaagttctaatagtgaattaagtaaatatcaaaagaatacagaaaatagtggtcctacttcccaatacaatatgggtgtagtatattaa

SEQ ID NO: 60857 - DNA, 144 bp, Acinetobacter baumannii
atgagcttccgttactcctctactgcccgaacacttattgtgttcggcaacctgatgaatcattactacgacaatgtgaacccgtctcaaatcgacaacttagtggatgaggcgaaatttaaagaagcgacttggagaaaataa

SEQ ID NO: 60858 - DNA, 879 bp, Acinetobacter baumannii
atgtctaatttattaaacgcaactgaagcatttgctgctctccagaaaggtaaaacagttctttgtcgctacgctggtgatggcgtacttaaagctgatagtactttcagttcccttgatcaaatgcctgcaactgtatttggacttccctattacgagttttgtattaaatctgaattaatggaactagctggtattgaatttaccaagcctttaattccccacgatgtagaagcagaacaagaaatctatattgtaatgccgactcgcatattgagaacgaagtttgatgaagaaaatagcgagattctttgcagtgtaatgaatggttttgctcaggcagatgttgaaaatgcaattttgcagctaaaagcaattggcgcgacattcggtcaagtaattggcaatgttgaaattaaagatggatttaatgacaagccgagaagacaacgtaataaacgagtaaaagctgagctctcagaagttaaacctgcgccatttgaaaatattaacgatgcctcaaatgtccaaaactcaacatcaaatgatgttgtaaaaaagacattacctgaagcagagcaaagagctgaaagtgtcgaagatgattatcaaaaaacacttaaagccctactccaaaaagtaagtgaatcaagaacagttgaagaggttaatgctgtttataaagatgtacgtcactggagtgatgagcaaaacagaccattgctaattgctacgcataaaagacttgaagaattggctcaagataaacctgcaggtaatgagccaccgtcgttgttggttcaaatccagaccgcatccgaccttaccactttagatgctttggaaattgatgtttcaggaagagatccattaatttaa

SEQ ID NO: 60859 - DNA, 330 bp, Acinetobacter baumannii
atgaatgctcaattcaaaccacatccagatggtattaaagcctatatcggccatgaccgcttaactggtctctactctgtacgtatcggctggactatttacgctgctaacgcaaacggtagtgtgctgtacacagtaaaaggcgaagtgaagactcctttgaatgttgaagagtttaaagcaaagcgccctaaggtctatgcatccttaatgaatgagattagcttccagcgtaaaaaagctttagcaactgcactgcaacttaataatatcccttcgtatgaccgcaaagcttataagaagaagcgcggctttactggttcaaaataa

SEQ ID NO: 60860 - DNA, 261 bp, Acinetobacter baumannii
atgactaactcaacattaatcctatctgaacgccaacaagcagttttgcaaactgttatcgaaatcaataaagaaggccaccagccttacacatggcaagttgtacgcagcatgggatctaaaggccaccaaattactgaaaaacagtgtgcctatgatctaggtgtaattattcgtactaaaggtacaggtgtaatttctgccaagtttgatagcaatcctaaagtttggatctatgaagaaccaaagggagcggcttaa

SEQ ID NO: 60861 - DNA, 267 bp, Acinetobacter baumannii
atgagcaatttatcagaacaaccaatcgaactcaactcagaagaatttgttgtaggtgacatggtggttgttaatgaattggaacataacgaaatttttgaagtgtttggattttactacagcacacctagacgactttttgtgaagtcagcatgcggcaagcagttagctctgccagttcaattttttagatcagcatcaattgctgagttagaagcaaaacgtcgattaactgcagaagaattagcacggggggaggtgtcatga

SEQ ID NO: 60862 - DNA, 294 bp, Acinetobacter baumannii
atgaatcaacaatttaaacaccttcctgaatataagcagagagaaggtatccagtcatggtatgagccagctcttaatctcctaaacaaaatgcttgaacgaaataaagcaaatctccgtaagcgtggatacaacgaacagaatgcagccatcacacgcgaagagtttagacaagaactcgctcgacgtggccgcattactttgtatttggctggggaaattgaaacgagtttgtataaggctcaaaagattgaatacatgggcggatatgtaaagcctaaggagatgcaatga

SEQ ID NO: 60863 - DNA, 915 bp, Acinetobacter baumannii
atgaatgagctggctttgttctcgggcgctggtggaggagttctcgcatcttatctcttgggatggcgaacagtgtgcgcagttgaacgtgatgcctacgcggcacaagttctggcgcaacgacagaatgatggaattctcgaagctttcccaatttggtctgacattacatcttttgacggaaaaccatggagaggaattattgacgttatatctggcggctttccgtgccaggacatttcatctgcaggaaaaggagcaggaatcgaaggtgaccgttccgggctttggacagaaatggcacgaattatcggtgaagtacgacctagatacgtgttcgtggaaaactcaccaatgcttgtttccagaggacttacaagagtcatcagtgaccttgccaaaatggggtatgacgcgcaatgggcacgtttttcagcatctaactttggagcgccccatatccgtgaccgaatttggattgttgcccacccccaaagcatcggatgcgaaaccaagaacgtctccagcagatttcctcagaaattcaccaggattggaaactgtagtcaatatgtggccaactcccaaagcatccgattggaacaagcgagggaaggtaagtcctcatccgagaaatggcttaccgggtgctgtcatgaactttccgacaccaactgcgagcgatgcaaacaagtggagcaacgagtctttagccgaacgcaaagcgaagggacgccagatccgtctcaatacagccgtttcgccagagggtgggaatggtgggcgattgaacccgaactgggtcgagtggctgatggggtggccaatcgggtggaccgacttaaagccattggaaatggacaagtttcaatcgtggcgaaaagcgcatttgaatttttaggggaagatctatga

SEQ ID NO: 60864 - DNA, 1317 bp, Acinetobacter baumannii
atgattaaagatatagtggatttactaaaaaagttttttgaatttgagagacagaaaatagctgattttgatatgcctcatatgcctacactgggagaagcatatgaagaaataactaaacaaggtctaagtcaaaggtatgtcttacctgatttgcatggattaaaagttgtttcgggttttataaaggtaggagaaaaattggttccccatcagattgattgcatgttagtacatggagatggtaaacaagtcggtttaacaagctcatatatttatgaaattaaaaatgttttagctatttttgaagtaaagaaaaatcttacaaaggcttccttggaagaagctcttgtccatttaagtgaaattaaaatggctatgtatgattatattgatgaagttttagattcagaggattttgaaaactattttgatcatttttctttacattttagttatttaattggctaccggtttgaaaaatttgaagatttaaaaaagttgaatcaagaggattttaaaatagcgcaagctttattaactgagatgattatgccagtaacgatcgtacatggtcatgaaggatataaaactatctctgggttaagaacagccttaaaaaacattattctcgctattcatgataacaatccaagtagagggttcagaatttttgatttacccacattaattactagtgcaaacggaggaattttaaaaactataggattaccttattggtgcactatacatagagatactaatgcttgggcctatatgtgctcttttacagaaaatccagctcggattatgattgaaaaaatatgggcaaaaattggaattgtcttaaatattcaatttccttatggagatgatcaagaaaaagaaaatctatttccattttttgaaatttataaaaagaagaataaaacatgggagggtttttttgttgaatatgatgatgaaaattatcaggaatttaagaatccttcaagtatgtttcaacctattgaattaaactcagaatatacagattatattaatctaatattttttaagggaggagtggataatattgatgaatttaaagaaactttaagtaatgctggtatagatgtagaaattttctttgatgttttaaggactttaccatttattggcttaagagatactggaatatttattacgaatagttggttatgtgcagaagtgggcgagaaaatttttgtttcttcagaaatagaaagatttcgaatatggctagatacccagtcagaagaatatgcaattttatataataatattttaattttataa

SEQ ID NO: 60865 - DNA, 1140 bp, Acinetobacter baumannii
atgtctcagaaacaaaaaatcaaaatttctaaaaaatttgctactaaatttgaaaactatattttatcaaccaggagaatttttcatatttctactgacccctcttatgatgagaaagtttattttaaagattcttattttggttcttatggtactggtacacttttaaaaaaaggtatgaagttttttttattaacagctcgtcatgttttagcaacatatttagatgaacctttatcaaatacttcaccatttagagtaaccagtcacagctcaaaatcttttgataatactctagatttcttatatcccaagaaaatttgggaaattggaaaactgataccagaatatgattattacgatttcgaagatgtagtcttggttgaactctttaatcctactcctggtcaaattgtagatcactatatcgatatggataaagtggaagtgttggaaatgacgaactatcaagatggtggcatattatcagatataggtttttccgcacattcgaatccttattattatgatggtgacaatgaggctcttccttttgatgaagagaaatttacatccagtactacatacaaacgtgacatgattcgtgggattttaagagaaaatgagttcacatttcattttgagaaaatgaattatttagatatagatacaaatggtatgtccggtggattaattgttgtgttgaatgaagtaggtgattcacggttaattggtatgcatatacgcggaagcacagaaagtagtgatatacattttttgccaatgtgtaaaattatcaaagcagcaaaaaattatttatatgctccttttaaggtaattgattactgttattacgataatcttaaagaacaaactcatgttggaggaataggcagagagtttgaggaatacgctaaaagtttaccaaaatctaaattgagacaaaattcagataatcctgaattggcacacttagataattttgctgattatgttgtagaaaataaagaaaggatactggttaatgctttagatttagctgaaataaaaggtacaaaacaaaattatattgatttacttatacttatctatgctaatgaaagacatagacaagaacggataaaagcaggccgaccttag

SEQ ID NO: 60866 - DNA, 918 bp, Acinetobacter baumannii
atgagttcaggcgctaaaattcgattatatgcttgtgaagaagcagtgttaggaacgactccagcaaatccagtttggtatacagttcgccgtgtaacggatggactttctgaaaacgtctctactgaagaaagcagtgaagtggttgactcacgcttccggcaaggtggtgtggttactgaagctgaagtggctggtcaactagaatttgaattatctgtagggacatttgatctatttttaagtgctcttgcatttaataactgggcagccaatgcgcttaactttggtggaaatgtacgtaaatcatttaccctggttaaagtttttgaagatattgggcaggtgtttatctaccgtggtgtgcaggtaaataccggtgaaatcaccattcaaacaactgggaaaatcacaggtaactttggacttgttggtagctcatttacccgtcagcaagtcaatcctgtcactaatcctatagcggcttcaacccgtccattggtcagtatgccaaacgtggaaaacttgcttattaatggtcaatcaattcaaggtaaagcgtgcatgcaatcgcttacgctttcaattaataacaatcttgaagcaatccgttgtatcggctcaggcaagtacacaccagagttctatattgaaaagatgatggatatcgaagcaaatgcttcattcatgttctcagctactgcggcaggatggattgatgccattaaaacccgagatgtgtttacgctgacctttgatattaaagacagcaaaggcagtaaatactcgtttaacttccctcaattagaagtgatggaagccaatcacccggatggtgggggtgatgacatcattactgtagacatcaactttgctcaagttcgtacagctccaacgattgtacgtgctcttgtgtaa

SEQ ID NO: 60867 - DNA, 714 bp, Acinetobacter baumannii
atgactaaaaaatcattaaataaaaaatttaaagtaattggattttggatatttgcaggtattttttggtatttagttattgctttttttcttaaaagtaaatatccaatcttcaattttagttttaaccttgacacagcttatgatgttttaaaagatgctttaacacttgcggctgcttttttagcgccagttgctgcttttgtattatttagtaattggcgagaacaacatattgaagttgaaattgaaaaaggaggtattgaactctacgagcgtttaatgcttatcagaaatgaaatatcagatattcaaagtgaaatatgttttaatttttctgaaaataaaaaggggcttgaagacagattaactatctctctttgggaaaaaatatttcaagtaaatttaattaaaaatagattaagaaaaagaaataaatctacaattactttctgctcctttgctgatcaaattggaagggatatagaaatttgttccgcatgtttaataaatatgtattcagctaaaattaaaattaacaatccggacatttataatttcgaatatataaacgaaagtgataaggagtttaaagaaagatatcaagaaaaatttgatgaatttgaaggacaatatattgatggttttaataaacttacaaaagatttggaggatttggatatacttactgacacgattcgaatccaaatttag

SEQ ID NO: 60868 - DNA, 327 bp, Acinetobacter baumannii
atgggcctatccgcatttaaccgaatgagagaacgtcaaatgacacaagcacaagtaactaaactcgaagaacaactggcaacgctgaaaggtgagtttattgcctttcagaatgatcctgaggcaatgaaaacacgtattgctgagcttgaaactggtgaagatggtcagaattccgaaggtgatcaaaatccgaatgaagttcaaccaatcaactacgcagggcttaaagttgatgagcttcgtgcagttttgactgagaaaggaattgcatttgaaccaggtgcaaaaaaagatgaacttttagcattaattccaaaggaataa

SEQ ID NO: 60869 - DNA, 792 bp, Acinetobacter baumannii
atgtcattgccatttattgttgattcacttgatgcaatcaaagaagagcaccgtgctctatatgttgaggaaaacgggaagtttcgccttgacttggaaggttatgaagatccaaaaggtcttaaaactgcacttcaaagcgagcgtgatgccgccaagacagcaaagcaggaactccagaagcttcaaaaacagtatgaaggtattgatcctgaaacagtcaaaaaactgtttgcccaactggagcaggatgaagatgcgaaattaattgctgaaggtaaggtgagtgaagtcatccagaagcgcaccgagaaaatgcgtgaacagcatgacaagttactcaatgccgaaaaagaacgggctgataaagcagaagcctatgccaacaagttcaagcaatcggttgttcagagccagattgtacaggctgctcttgaactggaggctttgcctgaagcaacagcagatattgccttccttgcccaatctaaatttgtactcgacgaaaacggtaaggctgtagcagtcgacgcacaaggtgaagtgatcatcggtaaagacggtaagacgccgttatcaccaaaagaatgggtcgaaaccttacgtgagcaaaagccttatttctggcctaaagccaatggtacaggttcaccaggtagcaccaatacaaaaggacaggtcgatatcaccaagccagacggttcggtcaacctgaccaaacttgctcaattacgaaatgaaaatccgcaactagctaaagagttagcggcaaaacacggtattaaactttaa

SEQ ID NO: 60870 - DNA, 1311 bp, Acinetobacter baumannii
atggcttatgttaagaaaatttatgtaaattacaaagattgctccacacaaactactttggtcttaccatgtatcttgactgagaaaggaatcattatttctcatttacgttatttggcatggttcaattcaaaaagtgaagcatggaaagaaagatcttgttacgcgcttaaacttttattgaaatatattaatgctactccgaaccttgatagtgctacaaaagtcctaaaagccttcactgaggcgttaatcacaggcactatacattctcccaataatactgacccacttgaactttattggagaccaagaacagttcgagatacaaataatttacttttccatatcacgcattacacagattttttagctattcaagatgaacatgcaacgaatagagtaaatccatttcgtaaagcaacaagttatgaagaacgtctgaattggtgtgcttattaccataagcaagcaaatgtttttctaaatcacttaaccaagaaagatctttctctagaaaaagtgcggttagttggaagttatagagaagatttagttgactttgaatatgctgtacgtttcccagaagatcaaattgaaagacttttatatccaggttttgaaaagaatggggtaattgattacaaatcccaagctatcactatgttaatgaattatggtggtctaagaaaaagtgaaatttttcatatttacacttcagatattaccttaaaccctaacaagcctaaagaagccctagttcgtgtgtatcatcctgaattaggtgcctctccagatccttatttcaaaaacagacgagaatatttattagctaaaacctcttataaaccacggaataattatttattttctgaaagattgtatgctggatggaaaacaccactactgacttcaaaattgggctactttgaagtcgtttttaatcctccagaaaaggctaaagagtttttattgatctgggcaaactatctcaaataccaacgtgtagaaccatcaaaaagtaatccacacccttttgcattcacaaataagttaggtgaacctgaaaccataaaaaatttccaacgattacataaaaaggcagttgagcgaataggtctaacttctaaaaaaagtcttggtacaactgaacatggtcatcgacatgcctatggatttcgcgcacgccaagctggtttgaatcaagtagaaatccaaaaagctatgcatcataaaagcccaacttcctgtcttgtttatataaaaccaactttagaagaagttcaagaaaagttgagagagatcaaatga

SEQ ID NO: 60871 - DNA, 2769 bp, Acinetobacter baumannii
atgataaaacctcaatcaattcgaaaaattgaaaataagcgatttaataaagagttttcaacattccctgacctaaactccctaaagcaattttgtaaagatgaaggcattacaaattctgttctctacaaacaaaaatatagagagtatggactgccagcacatcccgaaagaatttatgatgagtggatcagttataaagatttttttgatattagtgcttttatttcatacaaagaactaaaaaaattaattgaaaataaagatctgaaaaatgctaaggaatacaaaaaatttattttaaaacttaatgatgctagccttccgctagacccacaaactgcttatccagatgaatgggagaattggtataaatttttaggaaaaacagaaccattcaagccagattttatctcacccgactatgtgacttgggcagttaaaattaaagaatttatgacaaaagctcgtggtggaggcactaaagaaactcaactttgtcgttttgtccgtctttatattgaacaatttgataaaagcaaatcaccacatgcttttctcatacaagaaaaattcgatgtaaagccctttcgagatgttcttgaaaatatagaatctgaaccgatgaaaagaaaactcgttgtttatgtcaatgagttcttagactacattattgataatgatctaacgattgaggatgaagaaacaggtgagattgtacgccttgataatgctcgcaatccattttctcttttactcagccaacaaaatatatcatctagctcaattcgttcagaaacgacaaaaccatgcttacaatatcacttcgtaaaaaaggctcaagaatggattatgcctgcaaatgccaaatgctttcaggatctagagcatttacataagtttgatgcggattgggtgaaagtcgaatttaatcagctagacttatatgatcctgattgtgtttatcgtattgtagataatcaggcttacttatggtgtcctaccgattggatccatacctatgccctcaccaaggttccattacgtggtcgccaaattgcttataatgattcgggtgaagctgatgaatatattgcagatattgatacccaaaataaagttatttggctaaagaacaactctccactttcaggattaaccaaggaacaatcctttataaaaaaaatgccagatggacaaattggcatgtttaccaccaccaataaaacaaataataatggacagggttatacaattccttggatgccagacgacttagcttattggctagtcaagttacgaaaatggcagcaaaaatataatccaatctcatatccaagtgcttggctagattgccaaagaacaaatttgaatgaattacaaagaaaagccaaaggcattaactgttttttatttaggcgtttcaatgattttgaaccagcaactgtaacaaatgcacttacacctaggcttgctgctgctttatttcatattcaaccatcaaatttgatgttagcgactttggaaggaaacccagcaacactaggttgctataaatcaaaatatacgcctcatagtatgcgcgttagccttattacagcctatgtcctagaaatgggtatgccaatagaaattgtgatgaaaattgtcgggcatagctctgtcatcatgtcgatctactattgtaaagtttccaatcaagagattagaacacgactagaagaaggagagaaaatagctctaaaatcagaagcggaatccatccaaagaacaattgaacaaaacaaaattgaaagcattaaaaatcaattaattggaaacaacttagaattattgcaagcattatcgaatgatgtacctgtaggaaactatatatttagagactatggaatttgtccatttgcagcctcacgctgtgacgatggcggagatttaattaaaagcagttcattttataccccaactccccaaggttatctcggagtgcaaaattgcatacgatgccggcactttattactggtccagcctttattggaggattactggcaatcactaatgaaattttgctgcagtcgaatgatcaatctgaaatttgctctaaactccaaattaaaataaatcagattaatcaagaaattgataatctagagaaagaagaatatatcgctaatttaaagcaattgaaatttaatggtgctgaaaatagagcaaagttagaaactgaattacgtaattttgaatctgaatacgaaactgctgcaaaaaaactagatatgctcttatgtgatattcaagcagcatatagtcatatcaccaaatgccataagctcattaataacagccctactatagagggcgatacaaagctttccttaattacagccccaaatgctgaattggtattagagatggaagaagtgagccattatcaacaattacaggaagtttgcgataatgcaatgatctataaatcatgtaatgcggatcaagcgatttaccctcgaacacaactcattgacaagatggcaatgtttaatgaaattatgcctaacttatttatgctttcaaaagaacaacaacttagtgcaggaaatcaaatttttaaacttttaatgagccgtcttaaatcgtgggataaggtccaaaaagttatggatggcgaaattagactcattgaacttccagagtatgaactgattgaaaaatcagaaattgaactcattcttcacaattcacctactttgattgaggcaagctatgaatcctga

SEQ ID NO: 60872 - DNA, 612 bp, Acinetobacter baumannii
atgaatcctgaagagttattgaataaattaaaagctggctcatcacttaaaattcagcaatcccttgatgcaatctatgaaatatgtactgaacaacaggaacgtggaattcatgacttctcgatcagcacaattgctaaattaggcagtaaccgtggtgtcccaaaggctcaaagtatcagaaataaaactggtgaaaaatacagagttttaattcaaggctttgcagatttagtatctcagacacctaagttaagaaaaccagcacaaagtgagaatgattggatcgaagaaatacaaaacccaaaacatcaattactcgtccgcatcatggcatctgagctaaaagaagctcagcaaatcattcgtgaaatcattcctccaaaacaacgaattgatatttatgatcataagaatatatcaccgaatcagtcttttaagctttctgaacaagaagtacgagcgttacaatatttactttctacagactttcaaaaaaaatggaatttaaagccaactcattttggtgagcttgtagatgaatcaaataagcctgtttttaaagtttcaacattggatgccttacgcaaggctttggagtacttgtcttga

SEQ ID NO: 60873 - DNA, 264 bp, Acinetobacter baumannii
atgagtgcttgtataaatattcctgatgatatgagtaaaaataagacgatacacaagtcaaaaggcgatgaatttaataaggttttagagtcatataaggaactagattttattctatctcctaaattagtcgatgatgaagagcatcgcattcgatacgttgctgttagccgtgctaaggaacgactgtttatttcagtgccatcattagacattacggacgagcctaaatttagtgagcactttgagattgtgagatgctaa

SEQ ID NO: 60874 - DNA, 459 bp, Acinetobacter baumannii
atgaaagagaaaaaaattgttggatacaccttaatagtattatttttaatttcaattatttttatgctcaataaaaataagaatgaagaatttaaaataagcttgatacatgatagcttagttatcaattttccaaataaaatctttgttaaaaattatgcaattaaagattttgaaaaagataatttttccaattcaaatggaccaacagagtatagaaaagtattagaaaactcatactacaaagaagttgatcatataaaaatagaaaatatttcaaaatacaacattataccagatcatgcttatttttatgttatgactcaagaaaatgatcatgatttaaatgctagactaaaatctctaggtttctgtataaaaggaaatagtgtgctattacaaagcagtcgagagaaggactcagattttatagaaaaatgtcatgttaaagataaataa

SEQ ID NO: 60875 - DNA, 486 bp, Acinetobacter baumannii
atgaaacttttgtatttattgctattaattagtagtactgttagtgcttcaccatatgccaccctatatgtaaaaattaaagacaatgatgtctgtgtatttacaaaaggaggctatgataaagcatatgaaaatcagaccttaatttatatgggtaaagtagatggaattaatgcctttcatgattcttattcaaaaacttatttgaatcttaaaatgcctattactgaagaaaactgtattaagataaatagttcagaatttaaagaaaattttccttactctgttacgcttgaagtagatagagaatataatcaaaggatatgcgtaaaacaaaattctgaaggaaaaactgtattattagaagctaaagcagaccttgaaaaaggtatatattgtggcactaatcaatatgattactctagcaatggcctttggactaaattaaaaaatctctattattggttaattaattttttaaattaa

SEQ ID NO: 60876 - DNA, 390 bp, Acinetobacter baumannii
atgtctcagataaaaatttatgctttagatgaaactatagaattacatcgtgataatttaagtaaagctatccatcaggctttagttaaagaattaaaataccctgaagaaaaaaggtttcaacgttttattccactagaatccaaaaattttatatatccagcagaccgcagtacatcttatataattattgaaatttccatgttcgatggacgaacaaaagagactaaaaaagcatttattaagactctattcgaaaatataaacaatctatgcggtattgattcaaatgatgttgagataactatatttgaaacccctaaagaaaactggggcattagaggggaaaatgcggatgaactacagttaaattataaggtaaatgtttaa

SEQ ID NO: 60877 - DNA, 339 bp, Acinetobacter baumannii
atgaaatatatacttctaattttgcttgtggctgtaatggcggggtgtgagaaagattctgatgtcggtgcaaagatagattataaagccaagtttgaaaaatctgatgctctaattagtacttatttagataaattggattcaccctcgacaccacctaaggtaaaagaaaagatcctttgtgagaattatccaaaagagtacaagcaaaattacatgccagccttaatggcattggcacctaaagatcatacggaagcaaagcttttaagtgatttgaaagcagcggctgattactacaaagaaaagttaggtattaaatgctttaactcagtttaa

SEQ ID NO: 60878 - DNA, 444 bp, Acinetobacter baumannii
atgaaaaaaatatttttattattaggtttacttagtccatttaattgttttgcagcaaattgggtttatgtaacttcgtcttctaatgaaagctactatgttgataaggactattaccattacgatgctaagaataagactgtagaaatatggagtaagtcagtaggtaaaaagagtgatggaagtggtttttatactagttccaaatcattagataaatactattgctctatgaagaagtttaaaagtattgcatttgtcgaatatgctcaatctggtaatgtaacaaagtcaagggatacaccttctgcaaatcttaatttgattttcccagaaacaattgcggaaggaatatggaaggttgcatgtaattctaatggtaaaggttttagattttctaaataccaatctgaaactggtgatgctagttcgatcaactattaa

SEQ ID NO: 60879 - DNA, 510 bp, Acinetobacter baumannii
atggtcgatatcttcgatagcgcaacccgtagccgtatgatgtcaaatattaaaggacggaatacaaaacctgaattgctcatccgtagccttcttcatgcgcagggcttccgcttccgtatccaccgtaaggacctgccaggtaaacctgatatcgtattaccaaaatacaaggctatcatttttatacatggctgtttctggcatggccatcaaaactgccggttgttcaagttacctgccagccgtaccgaattctgggaagcaaaaatttataaaaatcaggaaaatgacctgaaagccaaagagcttattttaagtagcggctggagaatatgtaccatctgggagtgtgcagtacgtcgctctaaaaaagacccagtagcacttatggatattctgacaaaatggttatctggttctgaacaactgcttgaaatagatgagccgatgattatgcataagcagacaagcgataccgtggtcgaaattaatatgccagcttcctga

SEQ ID NO: 60880 - DNA, 981 bp, Acinetobacter baumannii
atgaatcaacaaaataaaatagatttactgaatgcacttcatattctcatagcaaacaatgtaattacagagaatgcatataccagcagatataaaggttttgtagcagaacttgattttttaccatggatgagaaaaaacaggcctgcagttccactttttacaggaggttactttttacccgcagtgaaaaaagccgattctcttcaattccccgtctacttcactatttgcaattcctcgccagatgaatatatagaaatttataaaaaaatagctcttgttccctgtaagagtatgtattttattcaatgggatgaatctatacctgtaaatgaatggcctcaaatagatgtaatgaatattcagtatcctgttccggtacccccattagtttgttacgagttttcagtacaggacaatacatttaagcaggtacaatttagtacttttactaataattttatcagccagacaccaagccggagtgccaatgcaatcacatcccaagctttcaatgctgcaataaatatgcttctcccgtttgaatataacgatattttaagtttatatgtgcagcggcttatatttgatggatatattgggtatgccaaggttaaaggaactccaagcgatattgactcaatcattttttcagaaagcttaaaaaaatatagtctgattgagattaaagacaaggatttgagtaaaaggccccctcagggattcggtatggatcttagacgtatagatgccctactcagattaagtgaaattacaggttggccaacatattaccttgtaaggcatattaataatcagcacgaaagaaagtttctaggctggaaaatgatcagtatggaaaagtttaattctaaactggcatcaccagtgattcagggtggaagcgggatggcatcacccgatgggcaatatccaacaagaatatgcccagttaaggaatttaaaccattagaataa

SEQ ID NO: 60881 - DNA, 1293 bp, Acinetobacter baumannii
gtgaagtacgttgatcttgattcatcttatatcagacaaaaaagaaataacatggggttatccctcaaagagttcgctttgctgcttgatatgaaagagaatggtgaaagaacagtcaggggctgggaaagtggcgagcatgttcctacaaaagcaaaatgggaacagatcattgccttgccagataaagctccgtacagggaacgtcctgaccagaagcataaattcacgtttattgatcttttcgccggtattggcggaatccgtttacctttccagcaattaaaagggaagtgtgtattcagttccgaatgggacaagtttgcgcagaagacctatgcagcgaattttggtgaattaccttcaggtgatatcacacagatcagggcagctgatattcctgatcatgacattcttctgggggggttcccgtgtcaggccttttcacaggctggtaagcgtcagggttttcaggatacccgcggtaccatgttctttgagattcagcgtattcttttcgagaaacgtccaaaagcattcctgcttgagaacgtgaagcagctgcaggggcatgacaaaggccgtacactcaaaacaattctcgagattttgcgtggcgagtttgatgaagagcttgatcttgaagttgagctttctgatgaaaccaaaaaggcgctttcggaaaaactgaattactgggttgatgtaaaggtacttcgcgctgcagattttggtgtgccacagaaccgtgagcgtattttccttgtaggttttgacaaggattactttggtgaagagtgtaactttgatgagctcttcagctggcctgttcctcccaaaaagcagacccgactcggtgatatccttgaagatgtctcaaaactcaaaaagagtgaagatgtctacacgatttcggatcgcctctgggaaggacaccagcgccgtaaggaagaacatggaatcaagggtaacggatttggctatacgctttataccgaagatagtccatatacaaacacattaagtgcccggtattacaaggacggctcggaaatccttatttcgcaggccgagcatggcaagaatccgcgtaaactgactccacgcgagtgtgcacgcttacagggatttcctgagaactatatagttgatgccgtttcacatggccagatctataaacagttcggcaactctgtatgcgtcaaggtgattgaagctgtagcaggacaaatggttagctgtcttgataaggctgaaaagattgtcgcagagaaacagctgaaattattctaa

SEQ ID NO: 60882 - DNA, 1374 bp, Acinetobacter baumannii
atgatccatacaatagatgaccttattaaccaaatatctacttataaaagtgttatgtcccttacccgagttccaggatggccatctataagattttcaaatacgggacggcgtggaataaaagagtttgaaatttccctattatctttagaaaaaacatttatagatataagaaatcatttcccagtatttgaaagtatctcgaattacgatgaaactccttggcgaactgcttttggagagtttctgactgatccagttgttaatgctctatcaactgtgcagacattgccattatattcagtaatacataaattcttatgtgcagttaatgatctggaatatattgaaaaacaaatgcctctcactgaagaaaatcttgataatacaataggatttttaaatagacaggtacaacattatacagctaactttattgcacctgagatcaccgcaaatagtaagaccccgcatacaagaggtggcgaaaatattatctattatggtgctccgggaactgggaaaagtcatgcgattgatgagcaaactgatgatgacaattctgttcgtacagtgtttcatccggaaactcagtacagtgatttcgtagggtgtctgaaaccctctatgaataatgatagtatcgaatatagtttcaaacacggacctttcattgaggcattggtcaaggcattaaaggatcctgagcatcattattatctcatcattgaggaaataaaccgcgcacctgcagctgcagtttttggtgaactattccagttgctagacagagatccagctggaaaaagtaaatataaaattgatatcaatgatagggatttattgaccttattaaccaaagaactatccgctccattgccagccaataaactctatattccagaaaatcttagcctctacgcaacaatgaacagtagtgatcaggctgttatgcctctggatacggcatttaaacgtcgctggaagtttgaatataaaccacttgatttcacaacttcaccgttaggtaattttgaactcaacacacaagacggacctcaaactgtaagctggactgactttgcacaggttgtaaattctattctttcttcagaatctattcctgaagaccgtcatatgggtccatggtttgtaaatgaaaacgagattaaagatccggaagatgcaaagaaagccctgacagggaaaatcctgatgtatctctgggatgatgttttacgccatagtgagcgttctgtcctcttccatcaggagattaaaacgttcggttctttagtaaagaaatttaatgccggtgaaattattttctcggaaaactttgaaaaaagactaaaagaagaaactggtaagtaa

SEQ ID NO: 60883 - DNA, 1254 bp, Acinetobacter baumannii
ttgaagaataatcattatctgctagatagaaaccctgtaaatgaactgcccactccagttgcagactttattcaggggcaaggcctgttgagctcaattaatggcttgagagtttcattctgtggccttgtctcctatcaggaagagaattacttcttctttcctcggcagtcagatatagaaaaaattaaacttgctcctgaacaatatacagcccttctgatgcaggcactttttaaatttgcccaagattcaaaaacacaggtcaccagccctgaagatggagctgacgaaaccggttttgaaaaactggagatgttcaaatacctgattaatgatttccagcaacatggtattttcaagaatgaagaagttcttctaaggaagaattctggaaaaacagactggaaaaaaaccattaaccggtcggtttctttccctgacagttctggccgtcctgtttatctggatgtgtacgggaaacagagaacttctaccaattcagaaattacacgtattcatgccggaatccttaaacaggtatataaaaactacggatttatttttacaggtaagaacaaagtcccatattcattaaaacagtatggtgaaacttccctgtctactgatgcccagatctcggtattaaagaatgaaataagaaatcactttgccgatcgccagacccttcttctaaaaacgcttattgaatatcttgaagcctataaaggtaacgagcagaagaaccagattattggcgttacacgctttcatgttgcttgggaacacatgctttccagatgccttgataatgtcattgatattaatagccgattacctaaaccggtatttataaagcctgatggaacagcgataccggcgaaaaaatcaggtatgcgcactgatatcgtgattgaagataaggcagctaataaactaactattctggatgccaaatattatgaagcaactactgtagagaatgctccgggctgggcagatctcgtcaaacagttcttctatgaaaaagcaatttcaataatgccggaatttaaaggctataaatttgaaaatgccctgatctttcctgggcaaaaaaacgcatttgataagattcatatgcaaaatcaaaaaaatggtaattatctggataccgacttccctatcatcaaatgtatttatcttgatccaatgagagttataaaaacatataaagaatcaactagattagatctaaaaagttcaatagcttag

SEQ ID NO: 60884 - DNA, 1143 bp, Acinetobacter baumannii
gtgaaaagccttcttgtaaagattaatagtaagctcaatgctcaaggaggctttttaaaggctgtatctgttttagtcggaggtacagcatttgctcagcttgtaggtttaatctgtttacctatcctgactcgactttatagcccagaagattatgctgtattgggaatatatgttgcaatagtttcaattctgtcggttattgcctgcttgcgtttagaaattgctatacctatacctgagaaagatgcagaggccaaatctttacttattctgtctttgctaagtaatttttttatagtaacaattttatatttaatactattctttcttaatcctattctacagaatttttatattatacaaaaattagatatatggatttggtttataccattaggtgtctttttatcaggattatattcagcattacaatattggtctacacgtagaaagcggtttaaagatattgctcaaactagggtgacacaagctatttgtaataatggggcaagtttatctgttggttttcttacaggtggtttttggggtcttattttaggtcagctatttagttttggtggaggattactaaaactaggttatagcacctataaagatactatacgtgttaaaaaaaatacgagtttaaaaaccgtattatataaatatcaagattttcctaagtattcaacatttgaagctttagccaacacaagtgctattcaactccctttaattattattgcaagctttttagtcgggccagaagtcggctatctaatgcttgctatgaaagttttaggtatccctatgggtcttataggatctgcgatgtcacaggtctatttatcacatgctcctacatattatcagaaaggtgaattatttgaatatactaaaagtattttaaataaaatactaaaactagtaatattgcctttcttattattgctattaattagtccctatatctttggatttatattcggcaaacagtggtctgatattggctattatatttctgctatggttccttggtattttatgcaaatactatcatcgccagtttcaatgtcattacatataatcgggaagcaaaaagtagctttaatattacaactgtctcttatacacatctga

SEQ ID NO: 60885 - DNA, 543 bp, Acinetobacter baumannii
atgtcatatcgattaagcagaaatgaccaagaaataattcttactatcaatgaccatcctattacaggtatagaaaatcttacaatgcataacgcacaaactagagactcatggttacattgttggtttgaattacgccttccttctgatgaaacagctttagaaaagttaaatcaaacttttattcggatgaaaagtgaatttggaaataattttgcctttatccccgctgatcaattaaaaaaatttgtagaaatattacagaaaaatagcgaacaacccttatattgtggctcagtaaaatattcagaaaattcctttgaatggggaaatttatgtaaatcgatgaaatattcctatcaaaatgaatatagatttttatttggagaatgccaaccacatgacacaacaccttatatttttgatattaaggatgatttaaaacatataatattgaaaaatccggtaataaaaattcaaggcccagatggtcatatctggtttgaacttagtaagaattcacatcaagttacttcgacttaa

SEQ ID NO: 60886 - DNA, 354 bp, Acinetobacter baumannii
gtgagaatgactaaaaaatatgatttaaagcatatctatagcttacttctatatcaagcaaacatgacagcatcaaaattatatgatttgagtatttcatctgaaggtaattccaatctaattaaagaaaatatttacacccttaaaatagcaagttatttagacaagttagaaaaggataatgaaaagcccaaatatccacgtcttcttcctgaaaattggacatattcggaagttgagctgtttgtgagtgctcatatcattggaaattacgaaaaatgggaaaatttcacaattaacgaaatattagctttatggagtgatgcagtcgaaatcaatatggataataagtaa

SEQ ID NO: 60887 - DNA, 1554 bp, Acinetobacter baumannii
atgccactattagattgggtgaaccgaaatcaagctgaagaaacagcaacaagtgttccgtaccatttattaaaattcgaacaagcatatggtgatgaggagcaagcaaaagagaatctcatcattcaaggggacaaccttcaagctttgaaggctttgttgccactatatggtggacaggtcaaatgtattttcatcgatccaccatataacacgcaatccgcttttgagcactatgacgataagttagaacatgctcagtggctttctatgatgtatccacgtctacaattactaaaagagcttttagctgaagatggatctatttggattacgcttgatgataatgaagcccattatttaaaggttttagcggatgaggtttttggaagaaagaattttttagctaatttaatatggcaaaaagcttacagtgcaaaaatggatgcacaaggtttcagtgcttcacacgaccatatacttgtttatggaaagacaaacaaagttgagatcaaaaggctagagttcgaacaaaatagtagtcagtttaattgttttgacgaaattaagaataaattttatagacgtagatctttacgtaaagagggttctgagtcattaagacaggataggccgtcaatgtggtatccgattattgctcctgatggctccgagatttatccgatcaaacctacgggtgttgaaggacgatggcgttggaaacaggagaatgttctttcaaactcagatgacttagagtttattttcaaaaataataaatgggaaatctatgttaagcaatatgctgaagataaggcatatcgacctcctgaaacaatttggctgaatgaggatgtgggacataaccatgaggcaaagctcgaagtaagtatttttaattcttcggatatttttgagaccccgaaacctgaaagattaattcaaaaaattcttaccattgtcaccgaagaaaatgacctaattcttgattcatttctgggaagcggaacaacatctgctgtagcccataaaatgggacgacgttatatcgggattgaaatgggtgaacatgccaaaactcatgtcatcccacgtcttgaaaaggttatcgaaggcgaacaaggcggtatttcatctactgtgaattggcaaggtggaggcggttttagcttctatacattaggcaatccagtgtttgatgatcaaggctttttaaatgctgatgttaagtttaaagaccttgcaagttatgtttggtggcttgagacgaaaacagctctaaatcaaacggagagctttgataatccatatttaggcacacatgatggggttgcttactatcttctgtataacggcattttaggtgatagacgtccgaatggcggtaatgtattaacgctatctgttttaaattacttaaatgaatgtcatacatatgaaggtaaacgagtagttataggcgaagcatcacgacttggagatgcccgacttgaggctctagacattgagtttaaacaaattccatattcgctttatggcaaccaagcccagtaa

SEQ ID NO: 60888 - DNA, 2580 bp, Acinetobacter baumannii
ttggctgtagagaatacggccttttttattggtgtttttatgactgtttctatttctgagcggcttagtcctttgtatgaaggcaatggtattaatacacgctttgattttaccttccgggttttcgatcaagaggacgctaacggtgtttcagttaagcaccaagtgggcgctgactttgaaaatattgatgagagtctttattccgtaacgattaaccctgacaacttaggcgggtatattacctttttaacagcccctgaagtaggatttgaattttatattgcaggggaaacacctgttgatcagcaattagacataacgaattatgataacttttatcctgatgctattgagcgttctttagataaattaactgcaatcctacaagagtggtcccattcattagggtttgaaaaattatcacgtgaaaaagcgcttgaaatacttgatttggctttacaagagcaaattcgtgatcagggacttgcgttagatcaaatcgacgcttttgcacaagaccttgctaacagacttaaaaatattgttgtagaaagagggtggttagctgaactaattgtcgatggtgatcaaacacaaaaagaattaaatagtttttttaagttaattgaagcgtcaccagagctatttggttataaaagtggagatgctacacaatattttaagaatgcttcagcatatgcaaaagcctttaatttacccttagttgctaagaatccaaatggctatttaattactgatagcttggatttctataccccaacaggtattagtaaagtaatcctgccagcggatggtgtatcccggtacttaactgtaaagacagccaaggcgcctgatacaattccttttgcttcactatctgggttgaatttatttagcacaaaagtaacaggattccctttatcagctgtcggtaagtatattcgtattacctcaactgatgttctgactgagcgcaataatccagataatgaaccttattataaaaatacggttttccgcttgcttgatgcaactggcgctatatccccaactttagacatgggttttaatgccagcagcacagctaaagttgaagttattccagtagaaacacgtattgattttagaattggagagattactacaacaggaactggcaaaaatcacaattcaattaaaatagagcgtgacagtgttgatgtatatatcagtaatgtatcggggtcttcagggtttagaactctcgttgatctaaggggtaatgattgcaatttttacagtccacttattaaagatgcgcaatataccggactgggttatggtattttaattggcctgtgctgtgacacaaatatttacagcatgaaagcatctaactgtacaaccacactagatggtcgtcatggttcaaacgtaacagtgcataattctcgtttagaaacagcagggactcactgggggaacaactatcttttcaaagattgtgatattgatattgtcacatggtctgggaaagatttaaagcttgagggcgggtccttaagaaactatgtttcgatgcgtgttgatgttgctatgtgcttggggaattgtgaaattaatggcaccaaagtgtatagcaacacgtatgtaatcaccccatcaagcaacattatcgctaacttcttttcaactccaagacgtgtgtttgataaagttgttgtacgaaatattgagtgtacggaaaacctaagcgcgatttatggctacagcacacaagatgtttatgccgcagattacctaccgcctaagaaattccattttgaaaacattgatgctaagaagtctgatgttttgcgattagctgcattaaacttaaataattcggtggcatttaccgaaacagcggaaataagagcacaaaatattcaagctaaagttgtggtcccattatttgctcgcggtttcttaaagtacgccagcagttatggttataacgttaaagcaattgggtgtggcaaaactttcattcagtgtgatgctaacgtgttttcaagatacaaattgatagattcaacttttgtgggcgccactcgtatcaatgcaactactgctctcggtgatatcatctttcacgattgtgctattgagcacgatccggcaattgccacagctggtttgtttaatattgaatcgcgcaaagggttctcttcagtcgagtatagaggagcatttgctaacgatggatcagtgaatggaacaacaatgtattcaagcggtagagctttgttaggtgcaactggttaccctaagccgctatcgggatatgtgaatagaacaatatatcagcgtgatgaaacggcaattgtatttgacccgccacttattcaacctggacaaacgaatcagcagatttttgacttccctggcgcacagttaggtgatccgattgtggcttcatttagtctttataacgcaagcatagcaattagagcctttgtatctgcaactaacaaagtaacagtatctattacaaacacggggtcaactgatgttgatttgttgcagggtaatttgattatcaaaatgctttaa

SEQ ID NO: 60889 - DNA, 738 bp, Acinetobacter baumannii
atggaatttgttcagggtttacctcaaggcgtattcgtagggcagacacgagttcatcaccctttggcattaccagcagagcaaaaagagctaacaggttttaaccttgctttgcacgttaaagacgaagctcagcgtgtccagcagcatcggatgatgctgttagatgaatttgctcagtttggggttaaaaaaatgacatggatgacccaaacacatagcacgatttgccatacagtaaatgaacaaattccttttacagctttaattggcgacggcttgattacgcaaaccaaaggtcatgcgttaatgatgatgacagccgattgtttacctgtcgtgcttggtaatgctgaaggtacagaaattgctaacttacatgcagggtggcgaggtttagcgggaggtattattgaaaatacagttgctgcaatgcagagccctccaacatgggcatggttgggtgcagcgattagtcaaccttgttttgaaattggagcagaggtaaaaactgctttttgtagtaaatatcctgaattggaaactgcatttattgatggggcagccccaaataaatttcatgctgacttgtatgcaattgctcgttttatcttacagagcctaggagttgaaaaagttttagggggagatcagtgttcataccaacagcaagatgaatatttttcttaccgccgtgatgctaaaactggccgtatggcaacttttgtttttatgtag

SEQ ID NO: 60890 - DNA, 1053 bp, Acinetobacter baumannii
atgacttcagcacaatcttcaaacacaaacttctctgaaacagacttcaatttactagaagattctgaggatgcagataaccatacttctgatacaactgcaacacgtttatcgttgcaagttcagttagatgaaagctacttagggcaacgtatcgaccaagtggcagccatggtgtggagtgagttttcacgcgaaaaacttaaacaatggatgaaagaaggtcatctgttggtaaatggtaacattgtcaaacctaagtatcgctgcgaaggcaatgaaacgctaactttaaatgttgagcttgaagcacagaccaacagtcaaccagaaaatattccactcgatattgtttacgaagatgaagatattttagtcattaataaaccggtaggtatggtggttcatcctggcgcaggtaatacctcgggtactttggtcaatgctttgctttaccattcacctaagtcagccgagctttcacgtgctggtctagtacatcgtattgataaagataccagtggtttactagttgttgctaaaaatctcgaagcacaattttctttgagtaaacaattgggagataaatctgtttatcgtatttatgacttagtcacttatggcaatattatcgcaggtggcacaatcgatgagccgattaaaagacatccggttgaccgtgtaaaaatggcaattttgccgggtgggcgtgatgctgtaacgcactataacgtgaaagagcgttttagagactttacccgtgtacaagcgcaacttgagactggtcgtacccaccagattcgcgttcactttagttatattggacatggtttggtcggtgatcaagtttatatgaaccgtgtacgtattccggcaggggcatctgagttactcatcgaaactttacgcggttttaaacgccaagcacttcatgctgctaaattgggcttaaaacatcctcgtactggtgaagaaatgttattcgaagcaccatggcctgaagattttacgcagttggttaatgttttacgtacagaaaatgctgcatattaa

SEQ ID NO: 60891 - DNA, 1158 bp, Acinetobacter baumannii
atgtcgctaccacgttataaaattacgatgcttgccttatctttaggtgtagcgtctgcatttgtgggctgtagcagcaatccaagtaaaaaagaagtggtcgatactggccctcaatctagtgaacaagcatattttgacaaggctcagaaagctcttgatcgtggtcaatatcttgacgctaccaaatctttagaagcgattgatacttattatccaactggacaatacgcacaacaagcacaacttgaacttctctattcaaaatttaagcaaaaagattatgaaggtgcgattgcactcgcagaacgttttattcgtttaaatcctcagcatccaaatgtagattatgcttactacgtacgtggcgtatctaatatggagatgaactacgatagcttgttgcgttacacctctttgcaacaatctcatcgtgatgtgagttatttaaaagttgcatatcaaaactttgttgatcttatccgtcgcttcccaagtagccagtattctgtcgatgcagcacagcgtatgaagtttattggacaagagcttgctgaaagtgaaatgaatgcagcacgttttaacgttaaacgtaaagcatggattgccgcggctgaacgttcacaatgggtaattgaacactacccacaaacacctcaagtaccagaagctttagcaactttggcatatagctatgatcaattaggtgataaggcaacttcgcaacaatacatcgaagttttaaaacttaattatccgagccttgtcaataaaaacggcactgtcaacatgcgtgctgcacgtaaagaaggtaactggatcaaccgtgcaaccttaggtattcttggtcgtgaatctaagtctgtaacaccagatacgactacttcttctgaagctgaaccaaaacgtagtctactaaaccgcgtaagctttggtttaattggtaactcgggtaaagaagaagctgaagaaacaactaacacacctgttgaagcagcaaaaagtgaacgtagttggactaatcgcttaagcttcggtttactagataaacctgagccaaaagcagcagaaggcgcaacaattgcaccagcaacgtcttcgagtgaagcaccgagtgcctcaccagcagataacgaagcagatgacgctgctcaataa

SEQ ID NO: 60892 - DNA, 168 bp, Acinetobacter baumannii
atgcaaattccttcgtcattgcaatcatcgctgttaggtcaaaaccaaaatggtgagttagcagggcatttattgtcgaccttaacgacctataaatatcctgaacatggcccttcggttttagaagtggtggatattcaaaaaagttccaacactttcaggccctaa

SEQ ID NO: 60893 - DNA, 438 bp, Acinetobacter baumannii
gtgaatctaattcctagcatatcactagaaaaggatagattaaaaattattgatttctatatagtttttccaaaaaaacttagtgcaactcgagttcctaatgagtataaaaggcttaaatctgaattaaaaaaaatagatgatacatatagaccatgtagcaatcccttttttatggctaagaaaatgggaggaatacaagagcaagtattaaataaacttgtcagtaatcgaattttaaattttgacagcaagtcaaattcatatagtagaggggaaaatttttcaaaatttctgattgagggaaatttaagtcccttacttaacaaagaaactgaaagagtttttctagagtatttaaccacttaccccttgaaaggtaaagatggaattaagcatcgaactcttttaatggaatatagatatgacaatatataa

SEQ ID NO: 60894 - DNA, 591 bp, Acinetobacter baumannii
atgacttcacaaaaaaatattgaagctggtggggatgttgctggtggcaatattgataaatcacagaaaaattatcattttaacttaccaacaaatggacacgtatcattacttcagccttttttggaaataattgaaaaattagaaaaaggccacgaagttgatattgagaatgagttggaagatattgatcatttttcgcaacagcatcgcacggacaaaagaggactgacccagaaactaattgattctggtcgggaatatatggttgatgaagctgtaagatataagttgaaggcagctaaatttatattacggaatcaagacaagccagccttgcaatatcttataggtagaatattaagtaaaataaagataacttacgattcattagttgtaccgctaatacaagcagatgcctcaattcaaacagttgaggaaataatttttaaagaagtcattacccctattcaaaatacattagtaggtactcctttatcgtccaatgatgattgtgtaatacacctaatgtattttctggctggtaactgtcatatttgttgggataaaaaatgtgaatctaattcctag

SEQ ID NO: 60895 - DNA, 180 bp, Acinetobacter baumannii
atggattttctaaatcaacatttttctgaaatattatctttctttggtggtgtactagcgggaggtattggtggcgtaagctttactaaatattttaacaaagtagataactctaaaaaagttaatcagaaaaaaattaaggctggcggtgatgttgctggcggtgacataaataaatag

SEQ ID NO: 60896 - DNA, 291 bp, Acinetobacter baumannii
atgaacacaaataatttatcagaacaaccaatcgaactcaactcacaggaatttgtagtaggcgacatggtggttattcaaaaccgcattatagggccgcttggtagcgatagtattttctgcattattgaaataaaaagtgattttcttggtgatcatgtctctatgactgataccgatggaaaggtttggacatctggagtgcagtacatacgtcatgccactgttgcagaaaaccaattaaaacgccgattaactgcagaagaattagcactagcggaggtgtcatga

SEQ ID NO: 60897 - DNA, 294 bp, Acinetobacter baumannii
atgaatcaacaatttaaacaccttcctgaatataagcagagagaaggtattcagtcatggtatgagccggctcttaatcttctaaacaaaatgcttgaacggaacaaagaaaatctccgtaagcgtggatacaacgaaaacaatgcagccataacacgtgaagagtttcgacaagaactcgctcgccgtggtcgcattactttgtatttggctggggaaatagaaacgagtttgtataaggctcaaaagattgaatacatgggcggatatgtaaagcctaaggctggtgagtaa

SEQ ID NO: 60898 - DNA, 330 bp, Acinetobacter baumannii
atgaatactcaattcaaaccgcatcctgacggaattaaagcctatatcggccatgaccgcttaactggtctctactctgtacgtatcggctggactgtttatgcagctaatgcaaacggcaatgtactgtacaccgtaaaaggtgaagtgaagacacctttaaatgttgaagagtttaagacaaagcgtcctaaggtttatgtaactttaatgaatgagattagcttccagcgcaaaaaagctttagcaattgccctacaacttaacaacattccttcatatgaacgtaagcgccataaacgtcgtatgggtatggttggttcacgctag

SEQ ID NO: 60899 - DNA, 363 bp, Acinetobacter baumannii
atggatccagaaaatgaggtttcagtaatatttgaagataatgagataactgtaaatggtaccagtcatttttctcaaagctcttcaatactattaaagcaccttttccacttagctttattattagtagctaatgatgagccatctatgcgtttgcccaagtttttaatattagatggtattaatgatggcggtttagaacaatcacgtgctgaaaatttgcaagccattattgttaaagtttctaatatgatgaatctccctttccaaatcatttgtgcaacttctgaaatttatagccctatgagaccttacattacaaaacaatatattaatggtgagaaaactttgaatttaagataa

SEQ ID NO: 60900 - DNA, 2313 bp, Acinetobacter baumannii
atgcaagatgcgacaagtttatggcacaaacgacgtaatagtcgggtgtttatgaataaaagtgcagtagaaattattgagattatttttaaagaatggcaaaacaaaagttctttatttgccgcaagtttacaactagatagcagtggcttaactaagaattatgatattcgacctttttctatgcagtcgaatgaaagtgattatacgtatttaacccgtctcatgcgggaagagggtatcaactggttaattgatgaatcagagtctatggtcttgagtaatagccagacgattgagcctcaaaaactacgccttattgatcataataatgaatataaagtcttagagcgtcgagctattcgctatcatagaagcgatgcaactgaacaaaatgacagtattaccagttttattgcacaaagacagttgcagcccacggcaatccatcttcaacgttggcaagcagataacttaagtcaagaagatgcaagtggtagtgttttaagcgtacatcagcatagttcacaacgtgataatgaaagtttaagtcttgaacaggcatggacaattgcacctgcttggattacggacttaaacggagaagatcaggcaaccacttcaagcaatagtcagattgaaaaactaaataaacaattaaatcaatatcaagctttgcaggcaaagtattttattgctcgaagcagcgtacgagatgctcaagttggttattggttcaagttaaatgaacatcttgaacttgaaagaaatcatgaaagttctgataaagagtttttgattttaagtaagcggttttataaccagaacaatttaccaaaagatatacgtgatcaagttgaacaactattaagtttgagccattggcaagtcagccatgatcgagcgcaagaacgtcaagccaatgaactcatggttgtacgccgctatatcgatattgttccagagtttgacccattaatacatcgtccctcggcccatgtgcaacgggccaaagtagtgggtttagatggagaagaaattcatgtagatgaatgggggcgtatcaaggttcgttttttattcacccgtaccgatgaccatcaacatgatggaggtgcaggaagcaaagacaatgatactgactcggcttgggtagatgtattaacgccatgggcaggggaaggatacggtgcacgctttttgccacgagtgggtgaaatcgttgtaattgacttttttgatggaaatattgatcgtccatttgttacagggcgagtccatgaagggcaacggtcacctaccaaatttgatattaaaggccagctaccggataccaaaaagttaagtggtattcgtactaaagaagtaagtgggtctggttttaaccaacttcggtttgatgatacgactgggcaaattagtactcagctccatagtagccatggggcaagtcaattaaatttaggtaacttaagttatcctaaagacagcgcgacaagcgaaggccggggagaaggctttgaactcagaactgatcaatggggagccgtacgcgcaggtgacggtttactgatttcaacatataaacaaaaaaatgcagctcatgatgcgcttaatttagagcagacaattgctgatttaaaaacacataaagaatggaatacagttctagaagataatataaaagaacataaagtcatggcattagatgctttagcgacattgacaaaaagtattgaggctttagaggcagcaggtaaagagacagaagtacaaacgttaaaagaagcgattattattctaacgagtccagcagatattaccttaaactcatctaaaaatattcttcttcaaagtcagtcaaatactcatatttcagctaaagaaaatattaatttaatgagtgatcaaaatacggttttagcaagtcaaaagaaattaagtcttttttcttatgaagaccttatgcaaattattagtgccaaaggaaagttagaaatacaaactcacgaaaaatcaattgaaatgattgcgaatgaggttgttaagattttgtctgttaaatccaatattgaacttacttcaccagaagaaattactttaactgctaaagaatcccaaatcaaaatcaatggaagtggtgtatttattaccactactggaaaatttgaggttaaagcagggcagcatgtctttttgagtggtgcaaaggctgacttaccaaaactaacgtggtcatttaaagagaaaactgcaagttgtatgaagaacgcgagtgaatcacatgaagccttcgttggttttgagggatag

SEQ ID NO: 60901 - DNA, 228 bp, Acinetobacter baumannii
atgttgaataatatttttgatttcttagacaagattggttttgcttcacaaaaacgggctctacatatttattttactaatcctgaaataaataatcaggtttttttacaacgtattgatggctttcattctataaatgaagggctttctgctgagcttatttgcttatcaataaacccttatatttctttaaaacaatttattggatcccaagtagccgtagaataa

SEQ ID NO: 60902 - DNA, 468 bp, Acinetobacter baumannii
atggttgcctgtcaggctgaaacggtcgatttaactttcttagtttataattacagtacgaaagggcttggagaaattcaggtcaatggccaaggcagtacgattgctgatgctgctgaacgtttaggtagtattggggaagcaggaactacttgttgtgttcatttactggcaaacagtgataccgccgatgtaagtttttatacggatatgggcgatggttataagcagtatcatattaaagtccctgtagaaaacctcaaagacactacacgttcatatgaagttttacattattttccaaataatacaggggtagtagaggtttcaatgcgtagaccaagtttccgtaaagatttatttgataaggcactaggtgaaaaggctaaaaagattgtattggactctcctgaaatgtggagcactatctctgaaaatgaagcagctcgaatagagtatccagattaa

SEQ ID NO: 60903 - DNA, 1482 bp, Acinetobacter baumannii
atgaataatactcaatcagcagcaatgccacttgttgaaaatgaagaagttaatcttttagattcgattgttgaacaaagccgtattgcacgaaatgaagaagaacattctcgtgctaaaagcttaattggtgagctcgctaaagaagtaatggcaggaaccattactgtttctgaaaatatgactttatcaattgataagcgtattgcagaaattgatgctctgatttcaaagcagttaagtcagatcatgcacaatgaacaattccaaaaaattgagtcaacttggcgtggtctttattacttttgtcaggaaacgccttcaaatccgctcattaaaattcgtatgcttaatacgaccaagaaagagttggtaaaagatttccaaggtgctacagactttgatcaaagcactttgtttaagaaaatctacgaagaagaatacggttcttttggtggtgcaccatactcagcattaattggtgattttgagtttgatcgtactccatctgatatgtatttgcttgagcaaatctctcatgttgcagcggcagcacatgcaccatttatttcagctgctagtccgagcattttaggccttgaatcatttacagatattgatcgtcctagagatgtttcaaaaatctttgaaaccgctgaatatgttcaatggcgttcgttccgtgatagtgaagactcacgttatgttgcattgactttgcctcatgtcttgggtcgtctcccatatcatccaaaagaaggtactgcgacagaaggctttaattttattgaagatgtttctggtgaaaaccacaatgaatatttgtggatgaatgcagcttatgcttttggtactcgcttaacaaatgcatttgatatgcatggttggtgtgctgctattcgcggtgttgaaggtggtggtttagttgaaggcttgccagtacatacttttaaaacacaagatggcgaagtggtattcaagtgtccaactgaaattgcaatcacggatcgccgtgaaaaagagttaagcgatctaggcttcattccgttagtacattgtaaaaatacagattacgcagctttctttggcgcgcaatcaactcaaaaacctaaaaaatatgacaatgatacagccaatgcaaactcggctttatcaagtcagattcagtacatcatggctgtttcacgtattgcacattacttaaaagcaatgatgcgagataaagtgggtagctttgcttctgctggaaatgttgaagcattcttaaatgagtggttgtcacagtatgtcttacttgacgatggtgcttctcaagaagcaaaagctcaatacccgttacgtgaagcgtctgtaaaagttgtagaagatcctgctcaaccaggtcactacaaatctgtggttttcttgcgaccacatttccagctggatgagttgtcggtttctttacgacttgtcactgagttacctcagtcctcaaattaa

SEQ ID NO: 60904 - DNA, 165 bp, Acinetobacter baumannii
atgggaaaaaaacttaatgtaatttatggggcattaaatattacaattcatcctcatgatcataatgtacaaagctttcaattaattattttagccccgcaatatatttgtaatttgagagaagtaattgcattaaaaaaatttaagagctatcaaaaattttaa

SEQ ID NO: 60905 - DNA, 654 bp, Acinetobacter baumannii
gtgaagaaaatattggctactactttaattgctttaagtttagtgggatgtgcaacttcaagaggcctaattgaaataccctcaggccaaaaactaaatcaatctcaagaaatagtagcgcaaggcaaatcgattatagtgaaggttgaagatgatcgaaaatttcaagacaagcctgcatcagcggatattccatctttaaaaggtgagcaatctcatgctacagcagaagaaaaagctagggctgttgctcgtaaaagaaatggttatggaaaagctttaggggatatccttttaaaggatgagactgtatcgcatttggttgataaacgtgtttctgaagcattacaacagtctggatataaagttcttaataaaaataatgaagctaatgctgatctgatactcaatattaaaattaataaattttggtcgtggttccaacctggatttgcttcaataaaaattcactctgaaattgataccgagattttagatgctaaacaccctaatcgtccgccatttaaaatctatagtaaggtaactagatcagctcaagtagcgaacgagtcaaagtgggttgagaatattgacaatgtgctcaatgactatgaaaagaaattgattatcgagctttctaagcaaagtcaataa

SEQ ID NO: 60906 - DNA, 555 bp, Acinetobacter baumannii
atgcgacatggaatgcctcattttgaaaattcctttgcgacaagaggtgcgccgatcttatctgcaaatgtgcttcgtgatttttctgccagagatcatttgaattgggaacatttcaagcagatccgtcagtattggcaaggacatttagtaattaaaggcgtgctcagtgttaaagacgctggtcttgcaaaagaaatgggtgcagatggcattattttatctaatcacggtggtcgtcagctggatggtgctacttcaccgattcgaatcttgccaaatgtcgttcaggcattaggttcagactatccggtcatgattgatagtggttttagacggggttcagacgtgctcaaagccatcgcattaggggcaaagatggtttttgttgggcgaccatttaattatgcagccgctgtggcaggagaagcgggggttgaacatgcgattaacctgctacgtgatgaagttgatcgcaatatggccatgttaggtgttaatcattgtgatgagctgaatcccgctatgcttatcaattgtagatcttcagattag

SEQ ID NO: 60907 - DNA, 477 bp, Acinetobacter baumannii; identical to SEQ ID NO: 44640

SEQ ID NO: 60908 - DNA, 837 bp, Acinetobacter baumannii
atgaataaaattattttgggtttattaatcagcagtggaatttcagtaaatacttatgctgcctgtacttatagttttaatgcaactcaggctcaagtcgatgcggtaaatgcagcaggaggaaggccgattaaattaatgtctccaattagtattgctgagcaaaaaggtacggcaacaattggttatataggaagtacaccagctgaccaaattgtaacttcgggtaaaatgataagtctaccttctattcagacaactttagttgataaatcagtagtaggaacaaatattatagcagcagagtttatttttgatgcttcaaatcttaaaaatgttgtacttggtgatagccatgaaattcaacagctagccttcaatatattaggagcgtctaatttaaaaaatgaaattagtttagatcttggttatgggttaattaataaagatgcaaattatactgatggaagttatgtaaccctcacgggagcaagtactaaaagagatagttctggttcagtagttgcaaaggagcttgatcgaaaggtaacccctgttacggtgccaacagatggcaaagttagagttgggctttactttaatcaggttagtaaacaaatgggatatatcatcaatggtactaattatggataccttaacttacttactgaaaactctttaaaaagtattggatttaaaggggcggggatacaatccccaaatcctaattctaaatttctaggtaaaactgtttcagtccagttaattactaataaagcaaatatgcagtttacgtatccaacaggtaccactgatatttgtggaaatgcgagttaa

SEQ ID NO: 60909 - DNA, 555 bp, Acinetobacter baumannii
atgatttacgaagcatactatgcaagcgaattaagtgattgtcacccgatgaaagtcaactatggctttgttcaagcaggtaatgatgagcagtataagttaactttggttgtgtttaatccgaccgtagcgggaacagcgctatcaaatctcaatgtgtctttaaaagcgggattagtaaagtttttgatagataaacatgtttatgaagttccagtaaagtttatacatgtagcttttatttggccgtccacagaaagcatatttgggggcctacgctgggagattgatgttttacacgcatatgcggaagaaatttatgctgctgaagtagaaagttatagtttttggaaattttggaaaagaaatccaaaagatttagtaataagaaaaaatacacgagaattaacgaacggacttacaaagcagatctgtttagagaattgcaaaactataggcgatgctgaagctaaaagcttattagaagcgttgaaagtaaatgattatggtgacttcaatttaatcatcaaaaagaatgtaattaccgctggttga

SEQ ID NO: 60910 - DNA, 753 bp, Acinetobacter baumannii
  misc_feature (735)..(744): n is a, c, g, or t
atgacatcgaaaccaaaaattgaaacggcttattacagtgaggactggaactttgaaaatggagatcctgaggagttaattaataattcaacccatataacagcaagcgaatttgatccagtaatggcaggtcatgttttttgtcctgtatgtaaaacacctctgactagagttccaaaatctggactcattcaaactaataatgttaaagcttattttaggcatcttccttcttatagaagtgtgaaatgtaaattaagaacgcctgagagtgaaggtaaaagatataaaaatgaagaagatgccaaagaagctattgaaaaggaagaattaataatcatctcaaagtttacttcggaacctgtagaaactaactctgatagacaagctgaaccatatgatgctactgcagtggaagatgaagaaggtgagttgactgaagtcccgattgcaagacacagaggagagaaattaaatttaccaacccgaattatgtcggttcaagctctttgtactaactttgacaagaaactttattcttatattcttttcccaggcaaagaacaggcattaatgctgaaagatatactgatgaatattaaggatataaataaagaaaaaatggaagagctggatgcagataaggaacaagttccacggctttattatggtgaaattcaatattcggaatttttaggtgaatctgatgataattacttaagaatgacttacctnnnnnnnnnntttgtataa

SEQ ID NO: 60911 - DNA, 642 bp, Acinetobacter baumannii
atgacggatcatacaggtgtggtcatttggaaagctcaatataaagcttggggtgagtgtaaggtagaacaggctaaatcagatttctttgaaaattcagaaattattagtaataacatccgtttccaaggtcagtattttgatggggaaactgggcttcattacaaccgttatcgttattattcgccttacgttggacgttttatttgcaaagatccgattggtttattcggtggattaaatgtttatgcgtatgcaccgaatcctaataattgggttgatcagttaggtttaacttgtagtaaatatagaagagcaagtttaagagatattaggaaaaaactaggtattccaatgagccagcaacctattaggcaaaaaatggttcctttaacagacaaaaatggtaaaagaattcttaatcagaataatatgccaataatgactcgagagttgacatataatgttaaaggaaaagaaattgtaattcaggatcattcagctggacatgattttggtgaagcagatggaaaaggtaatcaaccgtcccatcataatgttagacccgctgaaaatacacgtacgggtacggttgacggaatggatgatcatttttattttgattgcaggaatagtaaatga

SEQ ID NO: 60912 - DNA, 861 bp, Acinetobacter baumannii
atgaacattgttgcaaatataaatgatcaagaaatttccgttattaactataaagctattccagtggtcactactgaaatgctggcagacttatatggaactgaaattattcgtatccaacaaaaccatctaagaaatttggaacgctttgttgaaggtaaacatttttataaattagttggtgaagaattaagaaattttaaaaaagcactaactagcttaaagatagtcagtccaaatgcacgagcattaacactctggacagaacgtggcgctgcacgtcatgccaagatgctagacacagatcaagcttgggaagtgtttgagcaactagaagattgttacttccatcggaaagatattctatccaaaacacataagtcagaacgtgaaccactcaccagcgctgtaaatatgcttgtgtctaaaaccaagcacttgaactatagcgaagcatataaattagttcatcaacggttcaatgttaaaagcatcgacgaaatcccatacgatgtaattccaatcgccgtcgagtacgtacatcacttgattgctttatatagtcaagttgataagaaacagcaatatgaatctaaacatgtagattctatagctcgtcatatgctttggcttaatcactggtggtcagagtttggcgagtctatacgaagacttggtccatctatgggacatggcatccacgaccattttaagttcggtgctgaagatgcaagacagttggtagggcgagacgtctacatgcctatatttgaattagctaaaactcatgactggcataaagatgagattgggtttaaagatctaaatgaatgtggtaaatcagccatttttcactcttaa

SEQ ID NO: 60913 - DNA, 255 bp, Acinetobacter baumannii
atgtctgaaactaatgacaaccatcgtcttacacctgaacaacttgaaagcgttggcaaggccttatatggcaatggttttaaaattcagcttgctgagttcttaggcgtggatagacgcaggattaatcattggttagatggggatagacctatacctacaggtataacaagtgaactatttatgcatgcacaacatagacaagttgaagttactcaaactgttgagctgctaaaaaaaatattagatcagtaa

SEQ ID NO: 60914 - DNA, 999 bp, Acinetobacter baumannii
gtgtcatttggctttcctataggttttttaggtactttattatctttcactttaataggagtgttcttcttaaataaaaaaataaaattttcagatatatatatatttggtctgttgggtgggtttgttttctttatcttgttgtcacaaaactctcttgctgtagattatttattttggtttaaaacagttggaattttctttactggaatgattttgtttgattattttaaacaaaggaatgatgtttcgattaagtatataattgcatttttattttttataatgagcttacttgttttaaagtattcatctgatggaaattatttaaggctttcagatgcgtttgtgataacttcattatttttgatttcttaccaaaagcgtttctttttaactttaataaatataggtgtttcctgttatgctttatatttaattgggtcgcgtgcaggattaataatttattctttaatttctattattttagtttatataaaatttggctttatgcgttttttagttttcatacctccagtgatttatatattagtaatgtttattattgagctgaactcaaaaatcgttagatatggggataatagatttcttaggttgatttttgactcagaagaggatacttcattaaatgtccgaaaagagctaaatgaatttggatataatacttttttaaaaaaccccatagtgggagattttggattgtatcgtaaagtttatggggagggcgcatatgctcataactatttatcctttttatcagattttggaatatggggagctgtttttttacttgtattaatttggctctatattaagttttgcattttaaattttagagatagaacagactacaatatcttcattttttctacaagtacttttggtattataggtgtggcagtagctaagagttattattggttaattcctttttttgctcttgggttgttatatcgtgcaatttctacaaaaaggtga

SEQ ID NO: 60915 - DNA, 405 bp, Acinetobacter baumannii
atgaagaaaatatttttaggtttaactttatttgtcactaatcaattagttcaagcagcacctatgggaaagcttccaattatggcaagtagaggaaattgctttgctataacaccagtaggctttggcgaacataatgaatctataagctattatgtaaatgattcccatgatttatgggtgaggtcatttcaaaggtcaaaagggggagcggtaagatcaattgattctgcctatgcttatgaatggacttggcgagcatacgctggatatgttgattcaaaaatctatacgtcatggactgttaatggacatcatgccataagattttctcttatggatatacggacatctacgacaagtgcaacaacatgcaatttaggtcaaggttggccttggagttaa

SEQ ID NO: 60916 - DNA, 765 bp, Acinetobacter baumannii
atgtatggattaactccattaaatgaaagagatatttctcaaggcttccaagggacgtttgtgaagtgtacaaaaattgaactcgatggttttttcgatactaaaacagatgattttactgaaatacaagatattgaagatttaattccagatggtacttttgcaaatgctagaacattcaattttatattctttccatctaagcatttattggtaactgaaataaaagacaaagatggttcagttactattaatacacttgcaaaattttttgaattagctttttcattcaaggaagtaattgataagtttgaaaatcttaatgtttacatacttcctgatccagaaaaagttgaagcactcattaaaatgaaaaatattgtttctatggagttggaaattacaagacctaatccagatcatttgaatgatgttgaaagtagattgcataataaaatgaaaagaatgaatgtagataagattgaagaaacatacatatcgagcacgaaacagttcattgaacccgatgaagagactaaaaataaaatgagagtagcggcaaaaaatggtaaagtagaagtcaaagctatagatatgaatggtaagcgtaaagtttatagtaccgaagcaattcctttcactattcaagacgaatatgattctaaaactgaatcgaaaattgatttactcaaacgaacagcacagaaaatttttgctaagtttaatgcaaccaaaggtaagattgatgatagtaaggcagactaa

SEQ ID NO: 60917 - DNA, 534 bp, Acinetobacter baumannii
atgcataaattccaaacattacacaatcctttaattccagttgtggatgccgcaattggtggagatgttcaaccttgtgttgatgcccgtactttacatcaatggttgaaaagtggagatcgttttgctgattggataaagaaacgaatcaaaacatatggattcattgaaaatgaagactttgcttgcctttcggtaatttccgaaacccaaagaaaagatggccaaaaaggtaaagcaagacaaacggattatcttttgaccttagatgttgccaaagaactatcaatggtagaaaacaatgatcaggggcgaatcgcacgtcgttactttatccaatgtgaaaaagcattacgccaatctgcttttaacttaatagatcagtttaatagagcagtattagactttgagaatttgacggacattgcatctaaagcaggtcgaaccttatgtttagttggtaagcaatataagccgaaagcaaaacacaaagttgaagagttaaaactcaagatgcagccacttttaatctag

SEQ ID NO: 60918 - DNA, 315 bp, Acinetobacter baumannii
gtgttatctaaattcggcaggatcacgggttctgcttcaggaggtttgagtattgcactcaacactatgggtgatacctacatgcaattagcccaacaatttaatatttcgcctgaattaatgcatcgcgtcgcatcaatggcctctggggcattagattcactacctcataacggtgctgtgatcacaattattactctctgcggcttgacccataaacaatcttatttcgatatgtttgtggtggctgtggtcattccactgatcgcactgataggtgtcatcacaatcggcacatggttcggctcattttaa

SEQ ID NO: 60919 - DNA, 333 bp, Acinetobacter baumannii
atgaaattactggagacaggtcaagatatctttatttatgtggcaattgcgatcggaactggtattttggcaccaatgatgtttgcttcacaaagctcatttttatgccgacaattttcagtggaaaatcgctctaccggagtaagttctagcagagaaattggaacggcaattgcaggtggtttggctccattaggtgcgttgagtatggttgcagcatcgccaacacattcaacagtcagtgtaatcatgattttaattgtggcagcagtatttgttgtgattgccgcattatgtgatcagggttaccgattttctaaacataaaaattaa

SEQ ID NO: 60920 - DNA, 429 bp, Acinetobacter baumannii
ttgttttctgcaggtgtactttcttttattacttttgatagttttaatagtttccaaatccttaaagatggtccagatgtaaaaactatagtactttttttaatctctaaaatttttatcgctggtattgttgttgcaatatgtacatatttaattaagcgctcttcacaacaccgaaaaatgtcgcaaattgaaaaaagtacggctttggaacttaaagctatggggccatatttaaaggggatatctgatcaaaaaattgaggaaattaagatatcgttgataccaagttattttggggttaatcatatcaaagaagaagattttcatgttaatgaagctcttatcaataatcttaaagcaacctctgaaatacttaaaactactacagaagcagcaaaaactgtaagtgatgcctttaaaaaataa

SEQ ID NO: 60921 - DNA, 516 bp, Acinetobacter baumannii
atgcttgctctctggacaggggcacgtacgggagaaatttgttctgctgagtggaaagatattaattttgaaaaagcaacttggcatttaagaggtacaaaaaatggtactgagcgttttgtccaattatctaaacagtgtatagagcatttaaaaaagcttccaagtttaaatagccattatttatttccttcgtttcgaacagggaaacctatagcgcaaaagacaataactgaagctaagtgggtattaagaggggaaaatagagcaaaaaactataatttccaaccacatcaactgtggccaaaagatatggaagattggaatccacatgatttaagacgaacattgaggacaaatttatcgagattaggttgtccgacagatgttgcagaagcggtactggggcattctaaaaaaggaatcgaaggtacctacaatttgcacacatacgaaaaagagtgcgcaatttggttgcagaggtgggctgattatttagatagtttgattggttaa

SEQ ID NO: 60922 - DNA, 159 bp, Acinetobacter baumannii
atgcctttaatacctaaagccaaaagacagttagaagaactagcagctttaaaaaatatgcagctacatcatctacttgaggagatcattgaaagagagtatgaacaaaatatgcccaaaaatagtaatacatttctttttgataaaaggaaaaagtag

SEQ ID NO: 60923 - DNA, 126 bp, Acinetobacter baumannii
atgagtaaaaccattcctaaaggtgaaacttcaggtgacttaattacaaccgcattaccagcagctaaagcaggtgctaatgagcgtgcacagatcgaaacaggaaagttccaaggtacgatttga

SEQ ID NO: 60924 - DNA, 192 bp, Acinetobacter baumannii
atgaatacagttgtccgtcatttatcaaatttgttaagtggtgctaattttatttttgaagctccacataaacaacgtaaatataaatctccggccaatggttttcatgaagatcaatataatttgagaggagatgttagaatggttggtaacgatattcgctcaaaagccaaggaggcctatggccggtaa

SEQ ID NO: 60925 - DNA, 381 bp, Acinetobacter baumannii
atggccggtaataaaagagttgctgtaggtgcacgaaatggtaagggtgaagaagttcaattacaccatcaagaatcagatgctccaattgtttatacagcagagttagagaaactacacaacttccgtcccgacctcgttgattgggttgtaaaaatgacaacggaagaagcgcaagaaagacgtaaacagactagtagaacaaataagtttatattttgtgaaagaatcttaggtcagtttttcgcgggcgctataggtatttgcggaatcttaggtggtggttatattgctttacatggtcaacctggtgcaggagcaacaattgcttcagtaactattggaactttggccgtagcatttatttttaaaaataaataa

SEQ ID NO: 60926 - DNA, 699 bp, Acinetobacter baumannii
atgaaagagaaaattgataaacaactaatccttatttttatattatgcggtcttgccttattattttattttaaagccaatgatgatcctatctggccgtatttgaagggtacgtggttcgaatcatcattttataaatgggatactggtagtagcctggttagagacttatgtattggaattcttgtaagcacagtattttgggtttttaacgtttatttacctgaaaaacgtgatcgaaaaagaaaactgagtagactaaatagggcgttaaagctaattctggaagctaagaatggaaatccctttggttgggataagcattatatttactgtaatcctttagattactctgatattgctgatatccaagaactaactcaaagcattaatagtggaaaaatttataatacattggcagaaaaggccttttatgagctttgtaatgagtcatatgagatgttcaggatcttaagtattgcagctaatgaaatttcagcagaacatggagctttatgggattcaatgaccagaaatatttcacaaatcggtaagtttcatccagattattttgaaaagatacagaaatcgggatggaaattaggtgatgaaccaattgatttttcagaaggtctattcaagttgaatatgatcgagttattagaaaaaatggaacaatggataaagaacgatttttaa

SEQ ID NO: 60927 - DNA, 705 bp, Acinetobacter baumannii
atggtaaataagtctattgctcaatcagggtcagcaacaagtccaactacaaataagtcgggaacttatgttgaggtgcctttacaggacacaattccaattatatttgtgcccggaattatgggttcaaatatttttaatacggctttgaataagcctgtatggaagttgggtaatggcggaggcatagtgggtaccatttattcacaaatgcaaaaaagccctgcggcattacagaatgagttggacccgttaaatacaagggttgatacaagtggcgaaataaaagttgatagtcgacttaaattaactgaaaagacattaagagaacgctattggggtacagtgcattgggatagttatggtggaattttaacttatctacaaatggtgctaaataatgtggatttaaatgaaaaaccaatttatgccagtggagtcggaggaggctatgctgcaattcatcagatgaaacagcaagaagctatttatgagtggaaaagtttacttaatcagggagaatcaaaaaaatggactcctcaagagccatttatatcaattaatcaacaagagatagagcatttaaaaaaatttcattttcctgtctatgctatgggctataactggctacaatctagtgaaaatggagccgcaactgcacttaccagtccgccctctgatgagcctgcaacaagtcgtctataa

SEQ ID NO: 60928 - DNA, 339 bp, Acinetobacter baumannii
atgagaacaacattaattggagctttattcttaacgtttggagcctcggtaagtgccgcatcgaaaattgaaaaagaggaaacaaaaaatttttcaacaatgaagcagtgcattgaatggttagattctaaatatccaaatagtaagtggcatgacaacaatggtacttcttggaaattagaaaataataattcaaattttctatctggatttactcatattcctagtgagcaaaatcaaaaactgatacattcggttgccatttattgcaaattaaaagaaacaagcaccgaaggccttttctatgaaggaaagtatatcgttatagaagctatttaa

SEQ ID NO: 60929 - DNA, 381 bp, Acinetobacter baumannii
atggctgtggaagagcatatcgcagaacaaacaacaccgttagaaaaattagagcaactgtatctttggtatattgactgggtaaatcaaaatgatgctaaagggtgcccatttcataaagcacgcatggatataggagacttatacccatctattctagtcgtattggatgaatatcggaattggttattcaataccaccacttctattttgatggaattggaattgaatgatcctattgctattgctcatctatttatctcacttctggatggcatcatcaatagctcagtttgtgaaaaagccccgattaagccccggaaaacatgggactttatccagacattgattgaactagaaaaatcgaaaattaagttatga

SEQ ID NO: 60930 - DNA, 372 bp, Acinetobacter baumannii
atgactagttataaagaagaaatctttgggccagtactacagattatgcgagtcgacagcatgcataaagcgatgcaactgatcaacgaccatgaatatggtaatggtacatgtatatatacccgtgatggtgaagccgctagatactttagtgatcatattaaagtaggtatggttggaattaatattccattgccagtgcctgtttcttatcacagctttggcggctggaaacgttcattatttggcgatttaagcgcttatggtccagatggtgcacgcttctatactcgtcgtaaaacaattactcaacgttggcctgctagtgatgtgcgtgaaggtactcaatttgctatgcctaccttaaattaa

SEQ ID NO: 60931 - DNA, 231 bp, Acinetobacter baumannii
atgaatgcgccttcaactcacaccacttttgtaatgaacaaaatcatcaatattaaacaagtgatagagtttactggtctaagccgtgccacaatctacagcttgttagatcctaaatcagattattatgatcctacatttcccaaacaaattcgcttaacaaaaaaccgtgttgcctggtcggcacttgaaattaatgagtggattgaatctaagcttgctcaacgctaa

SEQ ID NO: 60932 - DNA, 252 bp, Acinetobacter baumannii
atgggtgtcgctcacacggatgatgcagatgaaatcgcaaatcaaaaattggttaatgcattaattgaaatcaaccgcgatttgcaggtaccggcgctagctgagtttggagtacaaaaagctgagtttgatcaagtggtacaggtcatggcagaacaagctttggcatctggctccccaagtaataaccctatcgtaccgactgtcgaagagatggtgaacctatatcaacaattgtggattacggaataa

SEQ ID NO: 60933 - DNA, 210 bp, Acinetobacter baumannii
atgttcgaaatcagtcaagaatttaacaaacagggttatttagctgagttagctcgacagttatttgaagcagctctacaaggccgatcttcatttaaatcatggtgggaatacaaccaaacaggtatgttccctaaacaaaaatatgaagaagagcttcagaatgttgaagcagagcaagatgggactttaaatcaaaaggtagagtga

SEQ ID NO: 60934 - DNA, 267 bp, Acinetobacter baumannii
atggaacttaaagctggtcaaatccagacaaaaggtggtgtttctctttcaagccaattacctgcaatgccagaattaaaatcacaatatgacgagcattttattttgcattatccagacggcgaacctgctaagaatctgaagtaccgaattacagctgaagatgggcaagtttttgaaggtgtatctggcgaagatggaaaaactacagtttttaccaaagatgctatgaccgcattaaatatagaagtcttttctccagaataa

SEQ ID NO: 60935 - DNA, 1305 bp, Acinetobacter baumannii
atgtcaatttcccaaatgtttcaagactttttaagcaatattaaagttgcgaatgaagaacaaatcacgttgcgttatcaagagataacatgtgcattaaacaaaaaatttcgagatacagaatcgaaaacatcgaatcaattacaagttggttcctatggaagatggactgcgattaaaggtatttcagatttagacatgctttatatcatgccaccatcaaaatgggatgattataaaaatggtggtcaatctaagttattaaaggatacgaaagatgcaattcttgcacgttatccccgaactacagtttttgtagatcgattagtcgtttgtgtgcaatatacgaacttctatgtagaggtacagcctgtatttaagcaagatgatgggtcatataaatatccagatactaaaaatggcggtagttggaagattacaaaacctcaagctgaacttgatgaaatgcaaaacatgaacaatgccaaaaatcgaaatttacgtcgtttatgtaagatggctagagcatggaaaaataaacatggtgtttccatgggaggtttattgattgatacgctagcttataacttcatgaaatctacgacttactatgatgataaaagctatatgtattatgactggttaagccgagatttttttaaatttttagctgatcaacctgatcgtgatcattatcaagctttaggcagtaatcaggatgttaaagttaaagctaaattccaagatgctgcacaagatgcctatgatttatgtttagaggctattgatttaggtactgacgataaagcttatagtaagtggcgaatgatttatggacgacagtttcctaaagcaccaagtaaacaagcagaaatgtcgatacgcattgaagatatgcgttatgaacatacagagcagtttattgaggatcaatatccaattgatattcgatataagctaaaaattgagtctaaagttactcaagatggtcaaacgattgattggctaagaggatttaaacgtagaaagaaaaagttaaatcatggacgtggtttaagtttttatattgaagaaaatacaacaccaaaaaatttacagaactattctgtgaggtggaaagtgctgaatagaggtgaagaagcgaaaagacataattgtattcgtggtcaaattgtgttggatgatggaaaagaacgcattgatgaatattcaagttttaatggtgaacatctagtggagtgctacatcattcaaaatggtgtggttgtagctcgtgatcgcatttatgtgccaattgaggattaa

SEQ ID NO: 60936 - DNA, 609 bp, Acinetobacter baumannii
atgaatcgatctgattttcttaaatgtatcactgaaactggctataacgtaggatttggagcgaaaaaacactttgctacttatgatcttgttgaaaaatccccaggatggattagttttatatcaattgctttcggtatttattctttagcattcaaggagctttcaacaagctttctttcagcatctttcactgtgcttggcgtggttggtctctatgtcagtatgtatgatgcaaaaaaaagtgattatgaaaaggcaggtgttgagctgactaaaatttataatcagcttcgagctttatattactcagttcaaagtaaaagtgattctgatgatttaacaaatttgattagtgaatatcagcagttagaaagtcagtattattcagtaggtctgagtaagcaaatattgttcagtgattggtatgcacactataaattcttttggcagcatcaaattgaatgggttgatgagcagaagaaatttaggttttttcgggataaagtacctttgagcttttatgtattcttggttgtcgtaattgttatgactatttgctttatttataaagcaaatcttagtgcatgtttcgcagttttattttaa

SEQ ID NO: 60937 - DNA, 3282 bp, Acinetobacter baumannii
atgaacggtctctcaattaagtttcaagaagaatacagtgctaagatccccgctttaacattgttaacaaatttggggtggtcgtttttaccgccatcacaggcacttgttgcccgtgatggtaaacaagaccaagttgtcttgcgtcaaattttacgtaaagagctctctaagcgtacttttccatttgcgggtcaagaatattcattatcgccaaaatcagttgataacttaattgccgaaatctgtagccctgccttgaacgaagggctactgacagccaacgaaaaaatgtataaccatttgttctacggtattcctgtaactgaatttgtaaatggaaagaaggtcagcccaacgattccattgattgattggcataatattgataacaacgatttttcatatactgaggagtttgctgtcacacgctcaggtggtgtagatacacgtagacccgatatcatttgctttgtaaatggtattcctctagttgtgatagaagctaaacgccctgatagtcaggctaagaaaggtccaacgattaatgaaggtatttcccagacacttcgtaatcaacgtcctgatgaaattccacatctgtttgcctatagccaactactactttctataaatggacatgaagggcgttacggcacatgtaatacccctgcaaaattttgggctgcatggcgagaagaagatatttctgatgcagagatgtatgcacttaaaaataagaaattaactgcttcacaaaaacacagccaattttcttatcgtccagttgatgacttaacttggtatgaaaatctaatttcaggtggagacttagctgttacaggtcaagatcaactgctgattagtctattaaagcctgaacgactactcgaaattgttcgcctatatacgcttttcgataagaaagcaggaaaaattgttgctcgatatcagcaaatttttggtattaaacgactcattgagcgtattagtactaagaatagcaagggtggtcgtgaaggtggtgtgatttggcatacaacgggctcaggtaaatcttttaccatggtctttcttagtaaagctttgatcttgcatgaggctttaaaacaatgccgtatcttggttgttactgaccgtgttgatttagaagatcaacttagtaaaacctttgtttctggtggcgaactgacagggaaaagagacaagcaaaacgctatggcgacttcaggcaaacgcttggctgaacaaattggtaagggtacagagcgaatcatgttctctttgattcagaaatttaactctgcaaccaaacttcctgaatgtgttaacacaagttctgacttcattgtcttgattgatgaagggcatcgaagccaaggtggtgaaaaccatgtgcgtatgaaactcgcactgccaaatgcggcattcgtggcatttacaggtacaccattgcttaaagatgaaaagaccgttaacaagtttggtcctattgtccatgcctataccatgcaaagagcggtagaagataaaaccgtaacgcctttgctctatgaagaacgaattcctgatttagatgtcaatgaacgagcgattgatacgtggtttgaacggataacagaaggtttaaatgatcagcaaaaagcagatttaaaacgtaaatttgcgagaaaaggtgaaatttatactgcggatgatcgtattcgcctgattgcgttagatattgccaatcactttgtgaaaaatattgatgatggtttaaaaggacagcttgcttgcgatagcaaggcttcagcgattaagtataaaaagtacttggatgaagcaggcttgtttgagtctgctgtggtgatgagcccacctgatagtcgtgaaggaaatactgatgttgatgaatcgactacccctgaagtgacccaatggtggaaagacaatgtcggcactcaggatgagcaaacttataccaaacaagtaattgagcgttttgaaaaagatgattcgcttaaattgctgatagtggtggataagctcttaacaggttttgatgaacctaaaaatgctgttctttatattgataaaaatttaaaacagcacaatctgatccaagcaattgcgcgtgtaaaccgacttcatccaatgaaaaagtttggtttattgattgactatcgaggtattttaaaagaattagattccacaattcttgattaccaagatctcgctgctcgtacccaaggtggctatgatatcaatgatcttacaggcttgtatacgcaaatgagctctgaatacaaacgtttacctcgtttgtataaagcgctatgggcgatttttgatggtgtaaaaaataaaaatgatccagagcagttgcgccaagttttagtcccacgcattgaagaacgtgagggtgagttagtcgatattcacttaaaagttcgtgatgatttttatgaagcacttacagaatttgccagttgtttaaaagttgcattgcagtcagcaaccttctttgaagataaaagcttttctgatgcagatcgtcagcactacaaagaaacagtcaaactatttacaagcttgcgtcagattgtgaaacgagatgctggagagactattgactatgatcagtatgctgagcaagtcaaaaaacttcttgataaacatgttgtgggtattgaggtaaaagaccctgatggagtctatgaagtcggcaagatgggcaaagtggcgcaacctgaagattggagtgaagagaaaacacgtaacgaaacggatatcatcaaaactcgtgtaaccaagatgattgaacagcaattgcgtgatgatccctatgctcaggaggctttctctaagctgttacgtcaagtcattgaagaagcagagaaagagtttgatcatccattgaagcaacacatgctgtttagagagtttgaagaacaagttgaggcacgtcgtttagatgaaatccctgatgtgttcagtgataataagcatgctcaagcttattatggtgtatttaagaaactattacctgaagcattctcgataacagatcaacagaatcaagataagtggattcaactcgcttttgaggttgatcgttctgtgatgagttctgtagctgaaaactcaattaatccacaaaatattgaagcagatatccgtaaaaaactattaccgcagatgttccgtgaatgtaaaaccattgggagtggtatggatcaagccaaaaaaattgtggaaatgatcgtacaaattactcgggtcggtttaaatgggctctag

SEQ ID NO: 60938 - DNA, 735 bp, Acinetobacter baumannii
atgctagatgagaaaaagttaagcatcatttatggtggtgaagttgttgattttgaggtgcttgaaagtcctagccgtactgaaaagatactgattaaagtctatgctgattgtcgggtagttgtatcggcaccgttaaatgcagatgataaaacaatcattgaagctgtaaagcagcgtagtcgttggatctataaacaattacgagagttccgtgagcaaagcagatttatcacgcctcgccaatataaaagtggtgaaagccacttttatttgggtaaacaatatcaattgaaagtgattcatgatgataccaagccaaaaggtgtaaaacttctgagaggaagattggaagtaaacaccttggatatgggtcttgaaagtattaaatcttatttaaatgaatggtatagaacccgagcaaaagtcatattcgaagcacgtttgcaacatattctagaacaagctttatgggttgaaaattaccctgatattcgtttgatgaccatgcgaacacagtggggaaactgctccccatcaggtgtacttacgctcaatcctcatctagttaaagcgcctacaatctgcattgattatgtgattctgcatgaactttgtcatttggttgaacataatcatagtgagcgtttctaccaactattgaatcaagttatgcctgattgggcgaaaataaaaaatcaattagatatgatggcgaataagttaataaattga

SEQ ID NO: 60939 - DNA, 219 bp, Acinetobacter baumannii
atgagctcaatacatgatcctcgctataaacagctaattgataaacttattcgaatacgtgagttaaaagaagttactcaggtagagcttgcctcacgcttaaaaaagccacagtcatatgtagcaaaaatagagaatttggatcgaagaatcgatattcttgaattaatggattggctagagtgcttaaattctaatattgatgagttccttaaataa

SEQ ID NO: 60940 - DNA, 609 bp, Acinetobacter baumannii
ttggcaaatagtaaggatagattccaaaaagcaataagagaatcatttgatcagttacttgctaatggtgaaaaaaaaattaccaaaactaaaattattgaaaatgcgaaatttgaagatggatcttcagtaggaaaaactactttatatgcaaaaaatgctgtaactaaagaccctattcatgcaactttaatagatgagctaaatgaaaagattgctaatctaccgaaaaataactttaataaaaaaaagacatcaattgaaacaaataaagagctcaaattgaggattaaagagttagaagataaaaataaccaactcttaacccaactagttgaaatggaaagtagttttgaaaatacagctcatcggaatgatgaaaatcaaatacaaaatttagagtcacaattgtatattttagctttcttattaaattcacaaattgtagggagaaggtataaagaactggatataataataaagacatttgaagcaaagtatcatggaaaacaggtagcgaaggttgcaaaagaacaaattcaaaaaatgaaaaatgagatagaatgttctaaagtcatttccatgaaaggaagttttaaggaagactga

SEQ ID NO: 60941 - DNA, 1788 bp, Acinetobacter baumannii
atgaaacagcctcgagataatattttttatataaaaaacaataatattgttgaagttgatgagaagttagtccaaagaaatactccatggttattaaataattatgaagatgatgtttggaagttaaaacctcatattcattctgatgataattcaagatatacagtcaattggaacatctttgatattaatgaatacattggggtttttaatagatgggattattggaaaagtgctgcgaaggaattagcttattggataatgaatgcacctaccaataaatgtaagactactagttccttagctaatttttgtcgttctattcgagaaatatatgaatggctatgctttgaaagaaagtgtttttctttatctgaagtaaaacaagaagatataacgtcttttattgagcatgtcgctgcaaaaaaattgactgaaagtacggtcttgaataaattgatagtaatttcgtatgtttattctcatcgaaaatatttgagtgaatcttttaaatttaatccatttaaatcaaaaaaaataacagctttagctaaagcttattcaatagaaaatggtcatacaccaacattgtatcctcaagaaatatttgggttgctaaaccatgccttaaaattagtaaaagaatctaaacttacattacaactatttgataaatacatgaaaatccattcggatacttccatggctcatagatcaatgtatttacgattttttaaattaactggggtgaaatctagtgacctacaaaggcaggtacgagctttgtatggggcagctataacaataatattaattttacttgctgaaaggaaacatgaattatctcttacaaaagaggaagatgttatagatttactaaataaagatcttgatattcttgttggtttagaaatgaaaacagcaggaacaattacaggtaaaaaaacagaaagagcagttattcaagaagttaaagatgctttaaacgttatattagaattaactaaatatacaaaagaaaagtctaggctagaaactattctattaaaattaccttttagccattctgtaaatggaacaggagagaaaagtttctatctcactacaaatggattgtatatggttttaagatatttcgcgaattctgcaaaatttaatagagttgatctaagaccacatatgtttaggcgagcatacgcaatgctatggacttggagatatgaaattggtgatcttgaagaattaagattaatgttaaaacataatagtttaaattttactcagaaatatactgatgatgaaaacgtctgggagtttatggggaaaaatgaacaggatttagcttttgatttgttgaatagggcttttcaaagaaagattgttgtcgcaggaaaaatgagtgagactttggaacgatacagtcgcatcatacaagctaaatctacattacttgatgctgtgactatagcggatcacatagatgacatcataataaatactggtttacgtgtggtagctcatgctgatggattttgttttataaatcatacaagtctggaaaatgctttatgtcgaactgaagggataggtttagatcctgttaagaggaaagacacaatatgtatgaagtgccctaacttcgccacagataattctcgtaaatcgtattgggagaaaagaattaaattacatcaagaagttgttgaatcaagcaaaaatgagcagcttattgaaggttcaaaacaatttattaaaaaggcagaaaaaatattaaaggatatagcttag

SEQ ID NO: 60942 - DNA, 2067 bp, Acinetobacter baumannii
atgagtaagctacaacgtattcctatttctctcaaaaaatctaaaagtgacacaattttagattttccaaaagcagagataaacattgaaaataaatactatgatctcagtgaattgaatacattagatcatttttatgaaatagtttcaggagtcaaaacatatcttcagggaaagcggtcagctaggacgcagtttttagtattaagaaattttctgagaataatttctaaactttcaagaaaaattgatgaaaaaacaatgatcctttataagaatcaattggatgctaatcctgataataccttatctactaaggggcaaaaatattcagctgcatgtaattttgttaagtatttaatttcaatagatgttattgaggattttattattcctctaaattttgaaaatattgaaaagaaaccaataccttcatttggggatatagcacggaattatatagaaaatgataataattttgataaattcgatattgatgagattagtaactttttttcactagcctctttagaagctaagactttaagttattgtttagcttcacttgatttgatacatgataaagccattagagacatacagaaatgggaggaagattgggataaaatacaagaaattattgataatatagatgaatttaacttcgataaaataagtaaagtgattgattttaataaggagtttagggttcctgagcgaacattaaatgaggcttttcaaatattatattcaaaatttggaaataatattccagcagtcaaatactggccaaaaggcatggaagatttctttcgttccataaattggaaaactagtagagttaaaaatgtatttaaggggattgaaaaccatgctggagatttagaagttttggataaagcgattagtagtctgtctttagctaatgaaaaaaaattaaaagaagttaaagattactatttaaattcagacgggagagatccgcgaagtattgagttagcgttatgcattctttttgtaaactatggccgtattttacctgattcaacccaatggcctaaagggatagtagattatcttaaatatagagggtggacgcctaatcgagttagagcagcatttttccctcatccagatactttagctccttttatagtaggattattgtcccatccagaattagctcccaatgttgattcagtagcgttctattgttatctagatagttttaaattaagtacaaagaaagagaaagttacagtttatctagaaaaatttagaggaaaacacttatatagagatataaacgaatctgacccaatgatttctttctgcatgcgtcatgctaatagaatgttaaatgttttaaagaatttgaatagaggtgaggttaaagctatcttaactcaaaaaaaaattcccttattcttacaatttactcccaataataatatatatattcgaatattagatcgatcaactttgactaatattgttaagagattcttggcagatttagcaactgagcaaccttcaattttgcctttagttcaagggtcttgtacagggcaaaactttagaccaactatagccttaattgaacgattaagtggaactagtctacttatgattcaaaaattattaaatcattctcattctacaactacaactatttatactgagcgtgtccatactcattcaattttactaaacaaatcaaaagaatttcagcattacttggtcgataatgctttaaacggagatattgaaaataggaacaaagcattaaaaaataaagaatttaatgagcctgttgatcagtggctgaattgtgaagcgaaaagactatggtttaaagatcatgaggtaattgcagaatggattgcatgggaaaaagcaattcgagaatctgaagaggagttgaaatttgacaatattgtaagatgggaaaattattggctaccaagattagtaaagtttcaaagcttaatatccatggtgctagaggtagataaaagaaatgctttagaattagctaagcatattaaacttccaccactctcttaa

SEQ ID NO: 60943 - DNA, 1131 bp, Acinetobacter baumannii
atggcatacattaattacttagatgaagtaaaactctctaataaagtttataagaaatttcctgtaattttaaataatgaacatattctaaatcggcttgttttaaaatattttctttcacacagggtagtgtggagtgaaagtacacgtcgtacttatagcaaacacttatgtgattttttctctcaacttgaagttgaaaatccagaagtatcctttgattatattgatgacgattggttagaagcatatgctgatcaaatacttgagagaaattcaaattttcctatttatgtttcacagattttaaccaccgttattaatttcttggtttggtgtgaagataacgagtactgtaaaaatttaattggtactgcttcaacttttaaaatcagaataatttcaaataaagattcttttactcatcaattgattcagtattactctaagcaaaagtctccacttaagcttgcacctaaagaagaatggatcgaaaaagtattagcagtagaacattttaaatccaacagtttggaaaagcgttttagtgtaatggtggattgggggaaagatgctggacttcgtgctcatgagatttgtgccttaaacattgatcaaattcctgctagagacgaaattgagaaaagtttgatagcaaagaaaaatattcatattgttttgaatgtgacaaaaggaatgaagaaaagcacaattcctgttagtcctgatttgttgaaaaaaacccgagactatatggatttcgaaagaaaggagattattaaaaagtttagagaaaaatcacaattgaccagaaaggcatatagtccacctcaagaagtttttctttctttaaaaacaggccaagcacttcatcctagaacgttatcgaatcaaattaggactggttggtgtcaggctgtaaaggatggagagctcacagaagaccaacatgtatggacacatgggctaaggcatcgttttgctactactatattaaaaggagtttcagaaaaaacgaatattcgtgatcctcagcaagttaccaaaatgcttactaggcataagcatgcatctactgtcgatacttataccgctcgtctttatttagatttagaggatatcgatgagtaa

SEQ ID NO: 60944 - DNA, 243 bp, Acinetobacter baumannii
atgttattcaaaaaattcgctgttgctgctgctgttgctgctactttagctttcgttggttgttctaagaaagaagaagctcctgctgctgctgctgcttctgaagctgtagctgaagctactgctgctgcttctgaagctgctgtagctgttgacgctgctgcttctgaaactgctgctgctgcttctgaagctactactgctgcttctgaagctactgctgctgcttctgctgcacactaa

SEQ ID NO: 60945 - DNA, 705 bp, Acinetobacter baumannii
ttgcaagcaacaattgcttcatatgcgtttaaagacagtccagctcaataccaagcagctttgaatgctgaacgaaatcaagatttaggtttattgaagaatttaccacaatcttctatagtccctgtcgattatataaaaggcaatgaatttatctatgagctggcgccgactttcttaacaggattacaattaacaagtggaggtagtatttcaagtttaggaaagtattctggtgaaattattggagcaataggtggtgcggcagctggttatgtatctggcggtgatgctcaaagtgtagggataggagcagcagtaggggttgtaggagggagagttaatgagaaagtagttggaaaagttgaaagtacacttaaaaagggtggttatgatccattagcaataggaatggcaaaaggagcaactacgattggtatgggtggtgcgagtggtgcagggggaactgtgattaataattatgtcaataatgatcctttaaagaaagatgtacctaaatctgcagttgttggcgcattagtacctgcaatcagtggtgaagcggcagttactgcggcgggtgttggtggtaaaattcaaaaggttgtgagtataaattccgctgtagttggtactgcagcagaaaaaattcaaaaggtagcacctaaaaaagctagtcagaataataaagaaggaggaaaataa

SEQ ID NO: 60946 - DNA, 240 bp, Acinetobacter baumannii
atgacagaaccagcatcaacaacaagcacagcaacttatggtttagcaacaaatgtagcagggggtacgatggcattagtcggcggtctttcaacaacggaatggatggcggtcttaggtggggtatgtgctgtacttggttttattgttcaagctattgctgcttatcgcaaagatcagcgtgatgaagaactacaaaggaaattaatgggtgaagatgaccatgacaaacaagactaa

SEQ ID NO: 60947 - DNA, 918 bp, Acinetobacter baumannii
atgggcagagcttataaaagtgatacgccgagcactggaaaacgtttgctcaaaacaagactggattttttgacacaaactggaaaaatccaatatctcaaagaaattttgagacttgaaggaaagcctgatgggattgttgatagtgccaatgttgattatattgcgaccaactttagtaagtattatgcatacgtctataaagatggtggagttattggaagtaaagctggtgttattcaagctttggcgtttgcgaaaggacaatccattgcttatgaagacttttcagctttttcagctaagtttggctataagttagtagatggttttgtgtctaaaatttatgggttaggggcaactaatgatttaactgtaaatgtggccaattcggttgaagtcacaattgataattcgcgccttgttcttaattttattggtgctacttctaatttctcatctattaagaacttaagcatgattaatgggattatcgttggaacatgttgccgcgatgtaggcaatgttaatacgaatagcatgcgcggaattgtgttaagtggctcaacaacttcaacaaccggtgctcatacagaattaggccataacttgccaactggtaactttgctaagcactatgtaaatagttcacttaccacgatctcagataatacaactactgatgttggttattctggattatccacaatagcaaaagcgggcttacaagctaagttatggaaaaatggcgcacttgctgcctcaggtggtactcagatggcatacacattacctaacacttatctctttatcgctaatgggaatgtatctaataacaaacattatgaatcttggataatctttggatcaaatgaaactattgctgctaatttaagtagttatttaagtaattcttaa

SEQ ID NO: 60948 - DNA, 1746 bp, Acinetobacter baumannii
atggcgcttacacctgaaacttttaaaaatttagaaagggatattgaagatgttgataagacattaaatacaaaatcaattatcaccccacgttatggccctcaatacaattcactgcctcttgcggttgaaaaggttgaaaataaaggcgggtacatttcggctccaaaccttgctgcattgaaggctataacaccgtcttacaatcatcaagttggccgtgatgacagcacgggcgatgaatatcgctggaaccctgctgcattacctactccacaatgggagccaacaggtagaaattatctacgcgatgccgaagtttttgctgatgaagcagcattaaagactattagcgaaaacattcctgagtatgagtcggaaatggccgctcactggtgggagcttaaagacgaaagtgtattgatgtggctaactccagacgcggagttgaatgttgatgaaattcagactagcggctttcgaagagaaaacttgccggggatattgcatctccttagcgattcaaatgagcttgtaactgcagcatttcttgatgatggtagtgtttactttgagaagccatttgaagatcgatatttaagttcagttgcgtatcgtccttacattgagcttgataagcagattaacaaaaatgttgagccatatttttttgaggaagtcgttgcaccatacggtgcagatggcaagttgcatcaaaggatggcggcaaccatcagagttgcagagaacaaactatttgttgttttttctcaatatgctacagccaatcaagatccagtagatgctcgcttagttgggcgttttgtcacatttgatgttctcacaaaacaaataagcgtagatgaaaatacgattattatgtatgaccctcaaaatgcatcaatagggtgtcgtcatccaaatttaattaagttaaaggatggccgctttatgtgtttatttaataaaacacttattgcgggtgcagcaaaaagccctctttatgcaatctactcagatgactgtgttacgtggtccgagccagttttaaagctggcagataataatgataatttcgcgtttaccgcacctacaactatccaacgtattcacacgggaaaatataaagacaggctaatcatgccgatttatagcggcaattgggaagtccgtttgatttttagtgatgatgatggagagacttggaaagttgggcagaaatggagcggtttagattttggtgacgcaaatctccagactaatgaaaccaatatcactatcgatattgatggttcagtaatagcgcattgtagaaccgaaaagaatgatgaatctaaccgctacttgtacattgtaaagtctagcgacggtggcgaaacagtagattttgtaggtagaaacttgaatttccaagtttctaattgtgctgtggggatgctgcaaactgcacaaaaatttggtgaaggaattcctaaaattttggtaagccggccaactagtttgactcacttttctcgaaatcacttcatgatttcagcatcttacgatgggttaaggacatctcaatacgattacaagccatatgcagataatgtgaacgttggctatacacatttgttggcccttgatgatcagaatttcgttttgacaatggaaaagggcacagaaatcaataacggtaataactatatttcaatcgctttctttaatattgctgaggtaatgaaaaatgggcagagcttataa

SEQ ID NO: 60949 - DNA, 324 bp, Acinetobacter baumannii
atgaaaatatatatattcgcctttttggtggtttttccaagcttagtgtttgcgaaggaaagatcgattgatgaaagatgtagtggttatgcggatactgtaaccaaattgcttgtaaataggtatgaccatgaaactcaagaagatcaattggagctaatcaatgaaattgatgataaggcttatagagaaaacttaattggtatgcttaagcatacttatactttgcctttatattctggtgaaaaagatattaagatccagtttttaaatcaatatattgcgtcatatagactttgtattaagcaatatgtcgacaagtaa

SEQ ID NO: 60950 - DNA, 183 bp, Acinetobacter baumannii
atgagacgaggctctctttttcttggtcgccgcattgagcaagctattggtaatttggcggcagtttatatcaggagtcattcaaaaaatcctgagcaagtaaatgcgcttagtttcatgccacatgaagcacaagaagaacttggtctttttgaaaatttagaaaaaattgcgagcgaatag

SEQ ID NO: 60951 - DNA, 489 bp, Acinetobacter baumannii
atggaaaacgaaattcaaggcttagagccagtcctgcaaaagatgagggtaattggagatccgaaaactgttcgccgtattgcacgtaaagcaatgcgccaagcaatgaatgttgttaaaaatgaagcgcgcgagaaagttaagaggttagatgatccacgaacaccagaaaaaatctggaaagaaatcgttgttcaaaacggacgtagcagaaatcccaattatttagttatgcgggtgggtgtaagaggtggtgcacaaatcccatacacaaataatgctaaaaataggagatctggtcgagtgggtaaaacctatcaagctgatggtcgcgttttttattggcgattcttagagttgggcacaagtaagcagccagctacgccatttttaaggcctgctctgtatgaaaacattgaacaggtgacagataaattcgttcaagttttcaaatttgaactcgatgtcattctaggggcatctttatga

SEQ ID NO: 60952 - DNA, 216 bp, Acinetobacter baumannii
atgaataaaactaatccagagagaagaccaacaccgccaccgccaacagttcggacccctccaataaaatgggacgaagcaagtagtgcaacacctgagcaaatgaaccagatcagagaactaaccttgaagaaagttttttactcagttcttttaatttcaatccctattgtgctttggaagcttgattcgataattttggcaattaaagcatga

SEQ ID NO: 60953 - DNA, 495 bp, Acinetobacter baumannii
atgagtaaattaaaagaatacttaaaaaataattacgagataatgaggttagatgaaccgggtagaagcggtaaatattccacatttcagaaaaaagacgggatgtatactcaatcagttttattagactgtgatctggaaggtacgctaaaagagatacaagtaagcatatctgatggggaaaaccgtcacactagactttatatgccagaatttgttgagcacatgattcagcatgaagtatcagatgagcggattttagctgagttaagcgaaagggttaaatcagaatttaagaaacaatatacaaccgatctggttaaaagatttggtggtgttgatagggttaaagaggcttcatggaaaatggcaatggacgatgtttattgctgggagcttgataagtgggtaacgcaaggttactggaaagctaatatgagagatactcatacaggtgtaactctaagagatttagttatagccgcaagaatttaa

SEQ ID NO: 60954 - DNA, 288 bp, Acinetobacter baumannii
atggaaattgaatggattgagaaacaacaaagagagctggagaaacgctttaatccagaacttcacaaactaaatgagtgggcaagacaagtggagttagacgaactgcacaagcaactatcaaccccgaaaatttgtaccgcagatattacaccaattaacaaaagagcattgccgcaagagctttggaaagaccgaaaaatcaaagagcttgaacaggagaataaagaacttagacgcaagttagcaatgcacatattgacgcatagcaaaggaaaaacagcatga

SEQ ID NO: 60955 - DNA, 198 bp, Acinetobacter baumannii
atgaaagtaagaacaatagagagtcaaacgactcgcccatgctgcactcaaccgcagccagcagattttcagcatagctggcgcgatcacttctggccgaactttaaacacaccatgcttgtgtttgcaatcatgtttgctggttatctgttttttgttggcttagttgctttgtatgcaattgtgcgaggtggctaa

SEQ ID NO: 60956 - DNA, 792 bp, Acinetobacter baumannii
atgacaaatctaaatttatcagctttagccgaaaatcttgctgagcaatgcaaacgctttgaagagtcgcctgaatatcaggagatgttaaaaacacgtgttgagaagctttacaaggatgcaattgacgatgtgttccgctggggcgatttcccaaaccgtgtaaaagaagccattaagggtgcaatgcctgcaaacctcgatgattttgttgatttggcaaaatataacagcttggttgtaagcactcttaagtcaacatgggaaagctcaggcattgaaaataatgcagtgcagcaaatacaggccgcttcaatgaaagttattgaagatatgaaagtacctgaatatgtacttatgtctgaactttttgaggcatttattgatgctaatgcagaagaagctgcgcaagaaaattgggaaaaaccaaatatcttagtgaaggaatctggaaactcatatctaagcgaatattggcaaataggctttgaggcacaagagaaagaaacccacagctatcgaccttctaaaacacatgggtttgagtttgagaactgcttgaatatctgtgcaatttacacagattaccgcaataaaacattcaagatgcatggtgaatttaagtgctatgaactttatgcaggtcaagttcgtgggatcgtgcttggtaaaaaaataatagaccctcataccaaattcgagaaattaatgtgcgctctcttttatgggaactcatttttggtttgggacaattttgatcccgaagatctttactaccctaaccaagattaa

SEQ ID NO: 60957 - DNA, 432 bp, Acinetobacter baumannii
atggaacttaaatttacagcaatgaccgcccaagtcactatcgagtctcttgttcatttgattaaaaattcaaatattaattttgactcaattaatgtggttgttactaacacaaatggtggcttccagagtccagaaatgccaattaaacagttagtaaaaattgttcttggtgatatgcatgaaattatcagcaccgatcagcaattagattccctgaatttaaaaagcggtgagcaaacatttaagtatggctgtagagatcttttgctgagatctctgcatagctcaaaaattctcagaacctcacaaaattgggttcatgtgaaaaatatgcttggtgtcggaagaactgtagcaatcctaatttgtgaagagcttggtgtagatcctgacggaacaaagtttgttaaagcaaatatagggggctaa

SEQ ID NO: 60958 - DNA, 375 bp, Acinetobacter baumannii
atgaaagacttgattaacaaaattcatgagcaaaacgtaaaagctggttggtggactgatctcgctacaggtgaaagtcttacttcaaaaaatggcgagccagcaaaacgaaatgtgcctgaaatgctttgccttattcattctgaaatttcagaagcaatggaaggtcatcgtaaaaatctaatggatgacaaattaccccacagatcaatgcttgaagttgaacttgcagatgctgttatccgtatttgcgatatggctggtggcttaggtctggatctggacggcgctattcatgaaaaacttgaatataacaagcaacgtgcagaccacaaaatcgaaaaccgattacttgctaatggcaagaaattttaa

SEQ ID NO: 60959 - DNA, 1017 bp, Acinetobacter baumannii
atggctaaaattttagttacaggtggtgcaggttatattggttcacacacttgtgtagagctcttagaagcaggtcatgaagttattgtatttgataatctttcaaatagttcaaaagaatctttaaatagagttcaagagatcactcaaaaaggtttaacttttgtagagggtgatattcggaattctggtgagcttgaccaagtgtttcaagaccatgcaattgatgcggttattcattttgcaggtttaaaagcagtaggtgaaagtcaggaaaaaccgcttatttattttgataataatattgcaggcagtattcaactggttaagtccatggaaaaggcaggcgtttatcgcttggtgtttagctcgtctgcaactgtatacggtgagtttaatccatcaccttatcaggaagatatgcctcttactatgcccaataataattatggctataccaaattagtgattgagcagatgttgcagaaattggcagaagctgatcagcgctggtctattgcactgctacgttattttaatccagttggtgcgcataaaagcgggcgtattggggaggacccacaagggataccaaataatctaatgccttatgtaactcaggttgctgttggtcgtcgtgataagctttcaatctttggtaaagattatccaactcaagatggtacctgtgaaagagacttcatccatgtagtagatttggctaaagcgcatgaattggccgtgttgaatcgtctaagtaatacgggatgtcgagcttggaatattgggaccggacaaccgatttctgtacttcaaattaaagagacttttgagcaggtcaatcatgtcgagattgtgacagagtttgcggatcgtagggcaggggacttggctagtttctatgctgatgcttctcgggctaaaatagaattaggatggaagccttactataacttggaagatatgcttaaggatagctggaattggcaaaagcagaatcctaatggctacaattag

SEQ ID NO: 60960 - DNA, 1827 bp, Acinetobacter baumannii
atgaaaccagaattacacactgaattattgaaaacaattgaagagttaaaaaaattaattgagcaaattaatttggagagcttaataaattttgtaaatatgagacaacatgattttaatcatggaagatctaaagtattaagttcacctcttcaacaaggtacatatttactaggtttagcatcttcacaaaaagaacctgaaaatcctatcgattttagtaaagatatagatcaaaagatttgtaatttattaaatagaattttcaatttttatgcccttaattattttgatgtagataagaatgatgaaaatgataaaaaaaccaaagtagtcgtaatgtcagcttttattcattatttctttacaggtaaaacattagattcacatcagattaaagaatggattttattttggtttaaagattattctcacatagttaaagaaaattataaatttacagttgaagatttaattgatttttcatttcttttagaagaaggggtacaaaagaattgggaggaaggtcgacaagaaatagaatttttagacttatatagacaaagatttttagaaaaatgtgaagaagatattgttaattttcctatagaagttgagaaaataagaagtgacaaagaatttcaagagagaacgaaaaatttttttgaaaattctttaaaagttttttcagttgaaaaatcaagaatattacaaaaaatgagtggtgataaagttgaaagtatactgtcgaccttttctttaaaaagaggtcaggccgaagagataacttatattactgataagaatcctgtttcttttaaatctttatttattgaaaaagatagaatttactatctttcaaataactcattttttatatcaataattaattttttagagaatttcttatataaacaagttaagacttcacaaaaaataatacaggatagggataaaaaattagaaacccgaaccactatattatttaaagaaatttgtagtcctgaagccattttttatgaaagtgtttttgagaatgctaactctagaaatgagcatgacttagtaatttttgacaagggagaattattgattgttgaggctaaagcttcaccaccaaaagaaccaatgagggatgctgataaagcttttattaaaattagagatcactttaaaagtagttcaggcttacaaaaggcatttgaacaagcaaatggtttaaaaaagtacatcttaaaagagaagaaattagatttattcaataaaaaggggaaaaaactcgataccatttctttagagcaaataaaaaaaatccatactatatgtgttactcgagatgattttggtgctctaggatgcaatttaaattacttattagataaatcaacggatgatacttatccttgggttatagatattgcaaacttagatagtatagttaaagcttggaagcatcttgatttaaaaaatattgatttttatgattttttatcacaaagaacacagctgcataataaagttttgagcatggatgaattagaatatgtgggagcatttttgaaatataaaggtggtttgcaaggctttattgatgccaaagcagattacattccattagcaatggaagagggggatatttttgatgaaatctatttttgttctttagaaggaaaaaaatttgaattaaagaaaattcctcttagtttatatcgtgtaagacgtgaagatatttttggtgtcacaaaggatcaaaaaaataaaaaaagtaaattgagatcaaaatcaaaaatgcaaaaaaagtcgagaagtgccaatcgtaagaaataa

SEQ ID NO: 60961 - DNA, 141 bp, Acinetobacter baumannii
atgagcttatctcaaaaagaaattgcggtacgttttttagagcttgctgccgctggcgaggtcgatgaagcctacggcaattacaccgcccaaactttaagcatcacaatccttattatgctggtgataagatttctttaa

SEQ ID NO: 60962 - DNA, 189 bp, Acinetobacter baumannii
atgaatattagtgacctaatgaattatcacgattgtaaaaataaaaaagagctttctaaaaaaactggttattcgacagtgactttatggaagtgggagaacaatggaataccagctagaactcaagcttttttacaggtcaaaaccaaagggaagcttaaagcagaccttgaagtagtaaccgtttag

SEQ ID NO: 60963 - DNA, 465 bp, Acinetobacter baumannii
atgccttgggagtttgaagatcttaacccagaagcttttagggaatttaataggaaattatatgctcatagatttgatcttgattatgaaagttatagtgtagataacgatattgacttacatttgagtaattattattcaagttgtgaaactaagaagttaattccatccaattgtttcttcaaactcgttgaatatatgttagtagtacttgaatctaggagctttacatctttattttctaattgtatggaattttataatactcaatatagtaatgaatatttaaccttttttttaaatttatttagcacatctaaaagtgaagtggcgagggataatttgagaatgtatatcacagaaatttttgatgataagcgttactgggcaaataatgaactttttgatgatagtctacttttcgaagaaaatttacagcaattacaaataataagggcaatgtaa

SEQ ID NO: 60964 - DNA, 363 bp, Acinetobacter baumannii
atgaaaagtcatgatcatttgcttgatagacaatatgacgaggaaaactacaactgtgttcattttgctcatgaagctgcattggatctatatggaatagaccgggtggaagcacttgaattttttatgaagcctattaaagaaaaggtatttctaccatcaaggttaaaacttttaaatccactgcccatgcccaaggaaggctgcatagtcgcctttcactcgagataccgaaacaagcccccacatgtggggctttttcgtttgggtcgtgttctacatttgatggaaggcggagttacttttttatccgaagaagtgatcaaggcaatgggttttagtcgggtcagttactatgattaa

SEQ ID NO: 60965 - DNA, 387 bp, Acinetobacter baumannii
atgagcttaattaactcaacctttgttatcgcagtccatgatgaaatactaaaagagactggtgttggtagagaaggttgtcatttagaaaagttagagagtgtgttgagccgaatagatcagcagatgtactacaacaatgtagatgatttgtttgaaattgcagcttggtatggtatagctcttgcaaaaggacatgcttttgttgatggcaataaaagaacgggtcttgctgtaatgttaacctttctagaaattcagggggtaactattaaagatcataccggcttagatgatttaatggttgatattgtagaagatcaagatgaacatgagaaattagctcaaagagtctctgattttctctatgagctttctgaaatttaa

SEQ ID NO: 60966 - DNA, 180 bp, Acinetobacter baumannii
atgatcaagagattaaaagattttaaagttgaagatcgtaaagctcgtgattccttagcagggcaagttttaccaattcgttttaataatgatgatgcaacaaaacgtgttgtaatgcacagtgcaaaacgagtaatacgtcagcataaagatgaaattcaagagcttgcatataaatga

SEQ ID NO: 60967 - DNA, 1086 bp, Acinetobacter baumannii
atgaacgtccagttgtcacaacaagcacttcttgatgcattagtatcacatcaagcttatctttatcggctgtcttcaactgaaatcaataatctcttaacacagtttgattctctctctagtgagatgctttcaaagttaagagatttattagacgatctgagtgatgctgaaaagactgcattgatggcagggcaatacacaacgccagctttaaaagaagtaagaacactagttcagacttggcaggtaagtgtagcttctggattgcttgagagcttcacagtgagcgcaacggcacttgctgtgtacgaagcttcgtatcaggctaaaacgctcgctaatcgcaaaatagagccaaacggcaagacactattcaacaaggcaaagaaaacgcctttgagtggtggtgtgttgcttgattatctgtttgagaagattgcgaatgatgcaaaagttcgtgtagagcaaactattcgagatggcttgtctaaaggtcagactaatcagcagattgttcagcggattagaggtaagaaagcgcttaattaccaagatggtttgcttgatcagagtagaagccagatttctaccatggttcgtactgctcgaagtcatgtatctaacgtagcattgaatgaaacgtatcaatccattggtgttggatatgtaaagttcattgcaacgcttgatagtcgcacttctaaaatttgtatgggttactcggacaaagtttataagaaagatgaacctcatcctgtgccgccacttcatcctaattgtcgatcgatcttaattcctgtctctgatggctcagggaaaacgattggtatgcgtccatttaacaataaagtgaatggtgaaggtgagataggcgtggtggattcaaatacaacttttaaaggttggtttgataaacaagatgcagattttcaaaagtcttggcttggcccagcacgatacaaactatttaaagagggtaaatactctctagataagtttattgatccgctcacaggtcagccattcacacttactgagctcaaaaagcttgatgaagaaatgtttaagaggttgggattatga

SEQ ID NO: 60968 - DNA, 822 bp, Acinetobacter baumannii
gtgcaacgagtaggtggtaatgttcttagaattgggacgccaaagggttataaccactgctatgacacttggatggatggacaagatggtcgagagcctgatcataaaagctggatttatacatcattacaaggcgggaacatcccagaaagcgaaatagatgtagctcgtcgtaagatggacccaaagacttttcggcaagaatacgaagcaagttttgaaacttatcaaggtgtaatttattactgctttgagcgcacctttaactacacagaaaggattgtaaaagaaggtgatgttcttcatgtcggcatggactttaacgtgcagaaaatggcggcagttgtctacgttcgagatggtgaagagctttatgcagtaggtgagtttaaggacctattcgacacaccagcgatgattgaagcaattaaagctaaatatcaggaccacgaaataatcgtttatccagatgcttctggggataaccgcaaatcaagtaatgctagtgaaactgatattgcactacttaagaaagctgggttcaaggttcaagttaatagtagaaaccctgccgtgaaagatcgcatcaactcaatgaatggacggttatgcaacacaatgggcgaaagacgtctatatgtgaatcttaagcaatgtccagagtttgcacgaagccttgagcgacaaatctatgatgatcatggtcagccagataaaaaagcaggctttgaccatttaaatgacgctggtacttatccagttgcttatatgttcccaatcactatggttgcgaagaaactagatataggaatggtttactaa

SEQ ID NO: 60969 - DNA, 447 bp, Acinetobacter baumannii
atgtggcagcaattaatcacgtggctgaaacaattaagttttttagtcaaaaaagaattcttaaccatttttagtgatcctgcaaatagggctattctatttgtacccgccctgatgcaagcacttttatttggctatgcggctacttatgacgttaaccatgtagattatgcaattttagatcagagcaacgggcagatttcacatgagctgatctcgaagctcgatggctctggtatttttaagcgtgttgcaacactggaatataccgaacaaatcaaacagggcattgataaccgtcaggcattgctcataattacgatccctaatgatttcgagagtaaattaaacaataaccaaagcgctcctatacaggtcattgttgatggtagaaattcatctacagctatggttgcaggatcatatctaaataaaattattggttag

SEQ ID NO: 60970 - DNA, 270 bp, Acinetobacter baumannii
atgaaggaaggtctgtataatattgaggatttgatcccggatatacttaaagatcatgaggattttgataagagttggatattgttagcaaatttgtatacttcgatatatttcatatgtgttagtttaggtattattgtgggtaagcaagcttcttctcaagtattagatatttataaacgaaaatatccaaaaaacagaaaatatgaaaagcgacgtgaggacttaaacatcttaatagataaacttctttatgatgacggagagtga

SEQ ID NO: 60971 - DNA, 732 bp, Acinetobacter baumannii
atgccagacgaaatcaaagttgatttggaaaatcctgaaattaaagcagctattcaagccgccgttgatgaagctgttaaaggtcttaaagataagaatgcagaacttatcaaagataaaaaagagttgaaagatgaattaggttcattgaaatcaaaagttgacgggttggatctcgatgcaatcaaggtcttacttgataaatcaaatcaggatgaagaatccaaacttattgcagaaggcaaaattgaagaagttattcagaaacgcaccgagaagatgcgtgaagagcatgaaaaagttcttaaggctgagaaagagcgagctgacaaggcagagtcttatgcaaataaattccgtcagtcagtaattcaaggtcaaatcgttcaagcagccgttgaaatgggtgctttgagcgaagcaacagctgatatcgcatttttagctcaatcacagttctcattagatgaaaacggcaaggccgttgcaatcgatgcaaacggggaagttgtgattggaaaagatgggtctaacccagtaactcctaaggaatgggttgagggcttgcgtgaaaccaaaccttactactggcctaaagcaaatggttccggttcagcgggatcagggactgcaactaagaaatggtcagactatacagaagctgagcgagcagcattagctcgtgagaatccagcagcattcaatcaattattgcaaacaaaaggtaaataa

SEQ ID NO: 60972 - DNA, 972 bp, Acinetobacter baumannii
atgccatctacccagttacaagatatttttgttggtgactattacaaaactttagatccagtaaattcacctgaaaaaactgcggtctaccagtccggtattgtcactaaaaatgatgccttggatgaaatagcaaataacggacaaggaacttctacaatttcttattggcaagatctagatgctaatgaggaagctaatatcactaccgacaatccagaccagaaaggtaaagttggtaaagccactcaaggccaaatgcaagctcgtactctttatctaaacaaaccatatggtgtagctgatttaacgactgaactagccaacagtgagccaatgcaacacattcgtaaccgttatggtaagtattgggaacgccaatggcagcgctatttattagccgcagcgcgaggaattattgcatctaatattgcaaataattctggcgatatggttattgatgcaggggcaacaatgacggctgctgcaatgcaagatgctgcatttacagcaggtgatgctgctgatcaatttgcagctattggggtgcattcaactgttatgaagcagatggtgcagaaagatctaattcaatacatccaagactctcaaggtaatgtcattttaactacataccttggtaaaccaatctttatggatgatggtctaacttatggcacaaaccaatatctaacaatgttctttggtactggtgcatttggatatggtgaaggcacaccaactaatccagttggtcttcaacgtgatgagcttggcggtaatggtggtggtactgaaattatcgtagagcgcaaaacatatattttgcaacctgctggtttttcttggaaaggtgaaacagatccaaataaaacacccactattgctgaatatgctaatgccgcaaattgggggcgtgtattcgatcgcaaacttgttccatttgctgcagttatttcgggcacaccttaa

SEQ ID NO: 60973 - DNA, 510 bp, Acinetobacter baumannii
atgaaagtcatttatacaaatacaattcctgaaaatcgtgaacacaatgcatgttatcggacttcatttttaggagttattggagaagcttcatttgtacatgtagatgatgattttcctaatgcagatgaaattcgtaatgcatattcacatttaaacgggtcagtagaaccaaattttaatgtaggctcgcttgttcctgttgagcaatttgatgcggtggtggcgaaattaacagaatcagaacaagcaatattgtctgctgaggaacagcttgcaactgtgaagggcgaatttattgcttttcaaaatgatcctgaagcaatgaaagcacgtattgctgaacttgaatctggcaaaggaacaactgatccattagatggtcctacaccaggtgattatgaaaactggaaagtagatcaaatcaaggcttatctgacagataagaatattgattttaaacaatctgcttctaaaccagaattaattgcactcattccaaaggaataa

SEQ ID NO: 60974 - DNA, 654 bp, Acinetobacter baumannii
atggcaagtagaaaattagaagataaaatcgaacttacaatcttttggttaggtttattctgtttaacttatttggttttaggatttattctcaagtcagatctaactaaaccattggattcatctattttttatgaggtatttagagattctttaacacttacagcttactttttggcacctatagcagctttaatactatttactgattggcggatacagcatgcttcaataaataatgaaaaaaatagcaaagaaattttagacgttgcttctaatctacttccctatattaatacctattatttagcagttgagaacgacgaacaacttttaaaatttagagaacaatattttgctttatattttgatttaaaaagaaaaattttattaattaactcaattgatcctaaggcagaagaatttcttaaaaaaatagaaaagttagatacagtaattcttgaaaattggtcgtgtttagaggggctatatcaacttaataaactctataaatctgtaccagaaggaaatccagcaagtgaaatattaaaacaaagttatgggattaaaataaatgaagctgaaattagaaaatctgagtgtttaagaaactatttggaaattcaaacaaagctgtcggtacttcatgtttaa

SEQ ID NO: 60975 - DNA, 699 bp, Acinetobacter baumannii
atgcttgcttcattttttaagcaagatggtttttttatggatatagagtggataaagattttaatttctggaatatctacgatttttttaccagtttttttatggtggttaaacagaaaaagtaatgaaagcagtaaaccaaagttgcattctaatattgatatagatttagaatcagcaaaagaatttgaaaaaattaaaaaagatagttcgatatcaaggttggctaaggatagattttctaaaaagctatttaataattcctctataaactttgatgaggctacttattttactcttttcaaagatgccgataagcttgtcagtatatatgtattatataaagatagaatccgattggtatatgattcaaaaggtaatgttagccatttagaaccaaaggcacacaaaagacaaagagtttattttttcctttcttatattgtatttctaagcttggcagttactccttatatattttttggagaatataaagcttatatcctgaagtactattatgcgcaaaactatgtggtcgctgtggagtttattctaggccctttattttgcctaatgattggtatattgagcttaaatgaaggtggcaagctaagtagtgttattcgttttattgataatttgaaaaaggaagcaattaaagtagaaaccaatgagaaagatgaggcgttatcgaattaa

SEQ ID NO: 60976 - DNA, 399 bp, Acinetobacter baumannii; identical to SEQ ID NO: 58646

SEQ ID NO: 60977 - DNA, 363 bp, Acinetobacter baumannii; identical to SEQ ID NO: 56958

SEQ ID NO: 60978 - DNA, 213 bp, Acinetobacter baumannii
atgcatgaaaaacaagtaagtggtctttttaaatttactatcaaaaactcagaagtcttaaaagtacttgaattctgtgaagattattctattaatgctgcaaaacttttccgaggaccatatggtgcagcgaagtatgcaacagagtcaatatctgccgctaaatttgcgagtaaacataatcttcaaatcagaggttgtatccctatttga

SEQ ID NO: 60979 - DNA, 381 bp, Acinetobacter baumannii
atgtctcaatcagatttagtcaggtttcctgccagattagaccccaaaatacataatgatttacttacttatgtaaagcagcaaggcgggtcaattaatactgctattaataatttattgcagtttgcgcttaaatacgggcttcaaggtgaaggcaacttacttgatggctacctaccaaattcaaaatctaacctaagtaaagctgaatacattattgatcaatttattcagaatgaaatctcgtctgaatttgatgaccttacaaatggtcagaaatatcaggattatttaacgaccaaaattgaagagcttgaaccgtatgaaaaaaaacttttagcagagttagcaagttcattagctaataaaaaagcaccctag

SEQ ID NO: 60980 - DNA, 759 bp, Acinetobacter baumannii
atggttcaatttaaatcatcagctggaaattcaaatatttttattgtaaaccgttctgaattgaaaggtagatgggaaccattattttattcagaaaagtatcaacaagttatagataaaatacattcaagcccttggattgttaaaactgtaaaacaacttgcaaagcgtattgctgatggaccttttggaagtgatttaaaagtagatgaatatcaagtatcaggtattcctcttctcagggtgtctaatattcgtactggtgaaattgatggtaaattagtttatatttctgtcgaaaaaaatgagaagttaaaacggagtaaagtatatccttacgatgttgtattgacaaaagcaggggctattctaggttactcagcagtttttcctccgcatttaggtgaaggtaatattacctcacatctagtaactataagttgttctgaagaaattaatccatattacttatctttattttttaaatctgaaatggggcaatctcagatttatcaatggggtaataagtctactcgtcccgaacttaatacgggagaggtaaagaaaattttagtacctgtccctcctttaaatattcaaaaagaaatcgtagaaaaaagcactaatgctttggaaataaggaatattaaattagctaaagctaaagaaaaattagcgtctatcgatgcttatttactagatactttagggactgtctcttatacacatctgacgctgccgacgactccttacgtgtag

SEQ ID NO: 60981 - DNA, 1206 bp, Acinetobacter baumannii
atggcaaacaactttgatttcgaagcagctttaaaacaattacagtcaggacaactcctcactggtgaaaacggtatcctgacaccactgatcaaacagctgacagaagcagctttaaatgctgaaattgaaaactatttggaagaaaatcctaaaccatccaatcgtaggaatggttactctggcaagaccgtaaaatcatcctccggttcatttgagctggaaacacctcgggatcgcactggtgattttgagccccaactcatcaagaaaaaccaaaccaaactctctgaagagatcgacagtaaagttatttcgctatttgcactgggcatgagctaccgtgatattcaaaaacatgttgccgatatgtatggattagatatttctgaaggtgccattaccaatattacagacaagctaatccccgaattacgtgcctggcaacagcgtccgcttgatgctgtctattcatttgtttggctggatgccattcattataagatcaaggatgaggggcgctatgtcaacaaagcagtttataccgtacttggattaaataccgagggccataaggagctactaggcctgtacctatcagaaagtgaaggtgccaattactggctcagtgtactgacagatctgcaaaaccgtggcatccaagacattcttattgcttgtgtggatgggcttaaaggcttccctgaagcaattgctgccatatttccgcagacagaagtgcagttatgcattattcaccaaatccgcaatagcttgcgttatgtggcctgtaaggatcaaaaagcctttatggctgatctgaagcctgtttaccgggcagataccaagcaggccgctgaaatggcgctagatgagctggaagccaaatggaatgataaatacgagaaagtcattcgttcatggcgtgaaaaatggcatttactgagtgcctatttcaaatatccgaaagcggttaggaagccaatttataccaccaatgcggttgaagcggtacatcgccaattcagaaaactgaccaaaaccaagggggcttttccgaatgagaatagcctactgaaattgctgtatattggcattcaacaggcttctgaaaaatggacaatgccggtgacaaattgggggcaaaccatcacacagttatcgatttactttggaggtagactcgatgatataattaaactctag

SEQ ID NO: 60982 - DNA, 225 bp, Acinetobacter baumannii
gtgattgaagcaatttatatttccataggtaagattcatcgaaatgtacctaaactaatttgggataacatggccacagaaatgcgccaaaaatttaattgtgacgtgatcttcaatgttgctgaagctgaagatacgactatgcgtatggatggtgatttaacttttgatgaaatgtttgaacctcaagaaatatttagtaagtacatggaaccaatgcattaa

SEQ ID NO: 60983 - DNA, 1185 bp, Acinetobacter baumannii
atgaatatattttatggggaaaatccgtcctcagcaagcttaaagagcctcgaaaatagccagtcccttggtataaagacgaaatctcatgtaatgcttacgccacaaggctttcagcgtgtgcatgattatctattacaagaccaatctagaaaacttcttcctaaagaacgtgtatctaaatgtagacgtctccggatcgataaaactaagactagaactgttatgtacaacgagcatcgagagaaggctcattatggcaatgttcaaatctgcggttctatttggtcatgtcctgtttgtgccaagcaaatcacacagaaaagacgtaatgaattaggtaagggcatagagtcgtggaaaacggttcataatggctctgtatatctccttacgcttacttttagccattcacctgaccaatccctcaaaagtaatttagagggccttaaacgcgcaatgaagcgtttttatgagacaactcgagttcaggctatttttaaaaaactatctgtttttcacaaaataaaaggcctagaagttacatacggtcagaatggttggcatccccatcatcatgtacttcttttagctgaacatcatgatttacgttttaaagattacacttctgaattaacggagttatggattaaagcctgtattaaatcaggattaaatgctccatcgatgcgccacggtttagatcttcgaaatggctcttatgctgaccaatatgtgtctaagtggggccttgaagatgaactttcgaaagggcatgtgaaaaaaggtcgcaatggtggttttaccccttttgatcttttaaatttttctattgaagataatgaaatttatggaaaaaaaccttctaaacttttccaagaatttgccatttctatgaagggtgctcgccaactagtttggtctcgaggtcttaaaaaacttttaggtattgaagaaaaaagtgacgaggaacttgcagtagaaactgacaaagcttccattactttgaatcgtgttgaagatctcgtttttgaacttttatgtcgttatcaattgcgtcatcaatatcttgaagcaattaaacatgattatgagactggctcttttggttctggattagcagatcaacttattgagcaagtagtgaattatgaaattaaacaaatgcagcaggtattttcgtga

SEQ ID NO: 60984 - DNA, 216 bp, Acinetobacter baumannii
atgcaccactggtgcatgaatatttgggcgcaatatcagcgtggcgggggtcggtgggatgtgcggagcgcgtcctgccgcccgcgcgatgctgatatgagagcagatatttattttcagcctgaaaatgaaaaaacagagcgggtgtctacccgcgaactgacacaaaacgatttaaaaccttccctctctgattacaagctccctttagcctaa

SEQ ID NO: 60985 - DNA, 561 bp, Acinetobacter baumannii; identical to SEQ ID NO: 47218

SEQ ID NO: 60986 - DNA, 765 bp, Acinetobacter baumannii
atgaacattaaagcactcttacttataacaagcactatttttatttcagcctgctcaccttatatagtgactgctaatccaaatcacagcacttcaaaatctgatgaaaaagcagagaaaattaaaaatttatttaacgaagcacacactacgggtgttttagttatccaacaaggccaaactcaacaaagctatggtaatgatcttgctcgtgcttcgaccgagtatgtacctgcttcgaccttcaaaatgcttaatgctttgatcggccttgagcaccataaggcaaccaccacagaaatatttaagtgggacgggcaaaaaaggctgttcccagaatgggaaaaggacatgaccctaggtgatgctatgaaagcttccgctattccggtttatcaagatttagctcgtcgtattggacttgaactcatgtctaaggaagtgaagcgtgttggttatggcaatgcagatatcggtacccaagtcgataatttttggctggtgggtcctttaaaaattacgcctcagcaagaggcacaatttgcttacaagctagctaataaaacgcttccatttagccaaaaagtccaagatgaagtgcaatccatgctattcatagaagaaaagaatggaaataaaatatacgcaaaaagtggttggggatgggatgtagacccacaagtaggctggttaactggatgggttgttcagcctcaagggaatattgtagcgttctcccttaacttagaaatgaaaaaaggatga

SEQ ID NO: 60987 - DNA, 597 bp, Acinetobacter baumannii
gtgtttagtgatagatttgaacaactcgttcaagctttacgtattttgcctagcgttggaccgaagtcggcccaacgtatggctttacatcttttgatgaaaaatcgtgaaggtgcatttgctttagcacatgctctacatgaagcatcaagttatattcatgaatgtagtgtttgccactctttaacagagcacgaaatttgtgatatttgcgcttcaacagaaagagatgatcaattgctttgtgtagttgagtctccggcagatgttatggcaatcgagcaaagtggtagttttcgtggcaaataccatgtgttgggtggacacctttctccattagatggaatcgggccagaagaaataggcattccttatctaatccaacgtttaagccaaggtacgatcgaagaagtcattttggcaactaatgctactgtggaaggtcaggcgacagcgcattatttggttgaagcgacgaagcatttacctattcacatgacacgtattgctcaaggcgtgccacaaggtggtgagcttgaatatgtggatagtcataccttaagtcaggctgttcataaccgtatgcgtatgaaataa

SEQ ID NO: 60988 - DNA, 132 bp, Acinetobacter baumannii
atggccatggctgctgatgtcaccattgcccaggtttctgaagtggttgagctgggtggattagacccggaacacatcattaccccaggtatctttgtacaacatgttgtacaagtacagcccgcacagtaa

SEQ ID NO: 60989 - DNA, 654 bp, Acinetobacter baumannii
atgagctaccagaaactcagccgtgaccagattgcaaagcgtgtggcacaagatattccagatggtgcctatgtgaacttgggtattggtttaccgaccaagattgccagctacttacctgctgataaagatgtctttctacattctgaaaatggcctgttggcttttggcccaccaccagcggcaggtgaagaagaccctgaactgattaatgcgggtaaagagttcgtgaccatgcttgaaggtggcagctttttccaccatggcgactcatttgcgatgatgcgtggtggtcaccttgatattgccgtgcttggtgcatttcaggttgctgcgaatggtgacttggcgaactggcacacgggtgcaccggatgcgattcctgctgttggtggtgcgatggatttggcggttggtgccaagaaagtatttatcactacagaccatgtgaccaagcaaggtgagccgaagattgtggctgagctgacttatccagtgacgggtaagcactgtgttgaccgtatttacactgacctgtgtgtgattgatgtgactaaagacggtttaaaggtgattgagaaggtggatgggctgagttttgaggagttacaggctttaaccggtgcaactttgattgatgcgactcaagggtaa

SEQ ID NO: 60990 - DNA, 123 bp, Acinetobacter baumannii
atgctttctacaccacctgcaattaccaagttcgcttcgccggctttaatggcacgggcagcaatggcaatggcatcgagtgatgaaccgcataaacggttaatggtggttgcaggcacctga

SEQ ID NO: 60991 - DNA, 132 bp, Acinetobacter baumannii; identical to SEQ ID NO: 60988

SEQ ID NO: 60992 - DNA, 132 bp, Acinetobacter baumannii; identical to SEQ ID NO: 60988

SEQ ID NO: 60993 - DNA, 132 bp, Acinetobacter baumannii; identical to SEQ ID NO: 60988

SEQ ID NO: 60994 - DNA, 654 bp, Acinetobacter baumannii
atgagctaccagaaactcagccgtgaccagattgcacaacgtgtggcacaagatattccggatggtgcctatgtcaacttgggtattggcttaccgaccaagattgccagctacttacctgccgataaagatgtcttcctacattctgaaaatggcctgttggcttttggcccaccgccagctgcgggtgaagaagaccctgaactgattaatgcgggtaaagagtttgtgaccatgcttgaaggcggcagctttttccaccatggagactcttttgccatgatgcgtggtggtcatcttgatattgcggtgcttggggcatttcaggttgctgcgaatggtgacttagccaactggcacacgggtgcaccggatgcgattcctgctgttggtggtgcgatggatttggcggttggtgccaagaaagtatttatcactacagaccatgtgaccaagcaaggtgagccgaagattgtgtctgagctgacttatccggtgacgggtaagcactgtgttgaccgtatttacaccgatctttgtgtgattgacgtgaccaaagatggtttaaaggtgattgagaaagttgaagggcttagttttgatgagttacaggctttaacgggtgcaactttgattgatgcgactcaagggtaa

SEQ ID NO: 60995 - DNA, 1233 bp, Acinetobacter baumannii; identical to SEQ ID NO: 53395

SEQ ID NO: 60996 - DNA, 1281 bp, Acinetobacter baumannii
atgacctttgaggatatttccgcagcaaccgctctttatcgccctggtccgatggattcaggactgcttgatgactatgtggccgttagacaaggattgaaaaacgttgagtatgatcatccaaacatgatcgatgctttgaaagacactttaggggtcattatctatcaagaacaggtaatgaaagtgtcggtcgactttgctggctttaccaatgcagaagcagacagtttgcgtaaagcaatgggtaagaaagacaaagacaaaatggccgaaatgcgtcaaaagttcgtagacggcgcagtagccaaatcaggtgtagagccagatttcgcaggtgaaatctttgacaagatcgaagcgtttgccggatatggctttaacaagtctcactcggtcgagtattcaatcatttcggtttggtgcgcatatattcgcgttcattaccctgctgaatactttgccgcaagtctcagcgtggttgatacagaagataagctcactggacttgtgaaagatgcgcgtgaatgcggcattgagattcttcctcctgatattaattattcagccgatcgttataagattaaatccaatactgaaatcttggcgcctttcaatgcagtcaaaggtatttcagaaacgattgccaaagcgattgtgaaattgagagagaagaatcgggcttggaaagtcgttcgctacaagaagtcgagaaagacaggtgaaaccacaccgatctatggtcctgatggttcagttccaccaaaaaaacgttttgatagctttgacgagttcgagaaagcagcatctcaaccaaactcgaaagtgaataaaacaatcgttgaaaatctcagagcaattggggcgtttgcaagcattgaacctagtgagccttcagcgaaagacctctcacgacgaaaggatcaaatgaggctattaccaggattaattattgattctgtaaaagcagatagatacacagatacctcagagccattcctgcgagcttcgttggtcgagcatatgcgcgattgcaagcaatgtaacggttgcgaccttgctggacaggttcatccagatattcgtttgggtaaaaagatgcgatttatggtcgtggctgactgcccaacttgggaagaggaaaagaaaggaaaacttcttgaaggcgagacggcccaatatgtgaaagctgcaattaaagataatgaattagcagtagcggacggttattacacaacgctcgtcaaagccaaaaaagggactgttctaaattttgtgtaa

SEQ ID NO: 60997 - DNA, 663 bp, Acinetobacter baumannii; identical to SEQ ID NO: 53396

SEQ ID NO: 60998 - DNA, 363 bp, Acinetobacter baumannii
atgaaaagtcatgatcatttgcttgatagacaatatgacgaggaaaactacaactgtgttcattttgctcatgaagctgcattggatctatatggaatagaccgggcggaagcacttgaattttttatgaagcctattaaagaaaaggtatttctaccatcaagattaaaacttttaaatccactgcccatgcccaaggaaggctgcatagtcgcctttcactcgagataccgaaacaagcccccacatgtggggctttttcgtttggggcgtattttgcatttgcaggaatcaggcgtttcatggatgccaattcaagtcgttcaagcatttggatttaatcgtgtgagtttctatgattaa

SEQ ID NO: 60999 - DNA, 309 bp, Acinetobacter baumannii
atgctacaagctattattagaaaatctccagattgggcatatgaacatgaatggcgagtgatacatccattcggtacattaactaaggctcagtgcttacccacacctaagccaagtgcaattcttcttggaagtaattttttcaaagaattgaataagagtagtgtttctttagcattggaattaactgaatattgtgaaaaagaacaaatacctgtgcaaatgacaaaaaactcctttcaaaaatatcaattagtacgtgaatctattagttatagtgagatatataaacgacttaattccgtataa

SEQ ID NO: 61000 - DNA, 285 bp, Acinetobacter baumannii
ttggctgaaggcaaagaaacccgtcatattgatggtaaagattacgtgcttgagtatccaatcaaggctgactttgccctgattaaagcctacaagggcgaccgctggggcaatctggtttaccgtaaatctgcacgtaactttggcccgatcatggccatggctgctgatgtcaccattgcccaggtttctgaagtggttgaactgggtggattagatccggaacatatcattaccccaggtatctttgtacagcacgttgtacaagtacagcccgcacagtaa

SEQ ID NO: 61001 - DNA, 132 bp, Acinetobacter baumannii; identical to SEQ ID NO: 60988

SEQ ID NO: 61002 - DNA, 372 bp, Acinetobacter baumannii
atgaatgagttcattagaattcatccatttactaaaaatatatcaaaatattatcaagattctgcacttatgtgcatgacaagtagatttgaagcttttcctatggttctattggaagctatgaataattctttacctgtccttgtgagcgacttccctacaggagctagagaaattttaggtgaaggaaatacacaaattgtatcggactatacacccgaggcatttgctaaattattaggctctttttgtttagatgaagatttgcggaaaactttatcaaagcaaaattcagagttaatacgtaaatattatcctgaacagattatacaatcatggaaagaactactagagcatacgtccaaagaataa

SEQ ID NO: 61003 - DNA, 426 bp, Acinetobacter baumannii
atgtcattgattagaacacgtaaaaaaattgtttcctctgcaatcgcctcatcgctctcgatgatagcaacaactgcgatggcgcaagaagcagtttcgcaattaccaactatccatactaaagcgactcaagaagaatctttaaaggttgatcaatcagcaaactctaaatttgttgctccccttctagatactcctaaatcagtatcagttatctcaaaacaacttatagaagataccaaagtaacaactttagcagatgcattgcgtactgttcctggcattactttaggtgcaggtgaaggcggtaatccgaatggtgatcgacctttcatccgtggttatagttcagaaagctcatgtatattgatggtatccgcaactctacctcacaaaaccgtgaaatgtttgcggtcgagcaagtag

SEQ ID NO: 61004 - DNA, 636 bp, Acinetobacter baumannii
gtggccattcaagaaattcgtcacccacttattcgtcataaattaggtttattacgtcgtgctgacatcagtaccaagaatttccgtgagcttgctcaggaagtgactatgttattgacatatgaagcgacgaaagacttaccagttgtggattgtgagattgaaggttgggctggcaatgttactactcagcgtatcgcgggtaaaaaaataacgattgtaccgattttgcgtgcaggtatcggtatgcttgatggtgtgcttaacctaattccaagtgcaaaagtaagtgtgttagggcttgagcgtgatgaagcaactctagaagtacgtacttactataaaaagttagtttctgatgtcgctaaccgtattgccatgatcattgatccaatgttggcaacaggtaattctttagttgctgctattgatgtattaaaggcaagtggatgtaaagatatccgtgttatggtgttagttgcagcacctgaaggaatcgcgaaagtagaggcagcacatcctgatattcagctttatactgcatctattgacaatggcttaaatgaacatggttatattgttccaggtttaggcgatgctggtgacaagatttttggtagtgttcaaaaagactaa

SEQ ID NO: 61005 - DNA, 1131 bp, Acinetobacter baumannii
ttgattgcgttatggggtcataagggttcaaacggtcgttcacgtgtttacgctgcaaccaagttcttcttatatacgcaaatcgctggtttagtaatgttaatcggtatccttggccttgtggtttatggttacatgatgactggtatgatcggttttgattacaactatttattagctgtagcgaatcgtttacctgctggcttcgcgtatggtttcatgatctgcttctttattggttttgcagtgaagttaccagttttcccattgcatggctggttaccggatgcccatgctcaagcacctacagcgggttctgtagacttggcgggtatcttgattaaaacagcagcgtacggtttgcttcgttttgtaattccattcttcccggcagcttctgcacagtttgcagatattgcaattattttcggtttgattggtattttctacggcgcgtggtgtgcttaccagcaaactgacatgaaacgtttacttgcgtatacgtcgatttcacatatgggcttcgttttacttgctatttatgcaggtaatattttgaccttccaaggtctaatgatcatgatgttggcacatggtttgtcatcagctgcattgttcattatgtctggtcaaatctacgagcgcttacatacacgtgatttacgtttgatgggtggtcttcgtggtcagctccagtatttaccgttcttcttaatgttcttcgtcgcagctcttgttggtgtgccaggtttaggtaactttattggtgaattcctgattttgatgggttcatttaataaatatcctgtattcacgatcattgcttctatcagccttgtatttgcaggtttgtatggtttgatcttgattcaccgtgctttgtttggtgaaccaaactctgaacaaaagcaacactacactagtccattaaaagacttatctgctcgtgaagttagtattttgatgatttgtgcgattggtctcgtttggcttggtatctatccacaaacattcttggatgtatctcattcaagcatgcagtggttggtcaatagttatgtaccagtacaagaagtcgttgaaactgttcagcaaacagctactcaacttgaccatgtggagatccaataa

SEQ ID NO: 61006 - DNA, 1497 bp, Acinetobacter baumannii
atgaacttcacagtatcattttctacgcttatgcctttagcaccagtgatgattgttgctttgacagcagtcgtcgtcatgctgttaatttcaattaagcgtaaccataatttaatcgcaacaacctctgttgtcggtttaaaccttgctgcactttatatcttattagaattatttggcggtaaatttgtgccggcaaatgtgatgggcatgtttatggttgatccatttaccatgttctatcaattcatgattttagttgcatcattggcttgctgtactttgtctcatgcatatattgagacttataaagacaaccgcgaagaactctatcttttgttacttgcttctgtagcaggtgcaatgttgatggttgcaagttcacactatgcatcattcttcattagccttgagttaatgtcgattcctgtatacggcttacttgcttatacatatcaacgtagtcagtcgcttgaagcagggattaagtatcttgtgctttctgcaacagcttctgcaatgttgttgatggggatggcgtatatctatgcttacactggttcgctttcattctatgattctgtacaagctttatttggtgcaatcaaacagccaatggtgttattaggtttagcacttattattttcgctgttgcattcaaattgtcgcttgcaccgttccataaatggacaccagatgtatatgcaggtgcaccggctccaatggcaacgttcttggcgactgctgctaaagttgcaacaattggtttgttcgtacgttatttgcttgcttctggcgcaatcatggtgaactcgctagtgactgttttgacaatcattgcggtattgtcaattttagtcggtaacttgcttgctgttcgtcaggtcaacttaaagcgtattttgggttattcatctattgctcactttggttatttgttaattgctttaatcagcatgacatatgcaagcttgggcagcgtaactgtgtatgtggtgacttatgtattaacgactattggtgcttttggtgcagtagcgttaatgtctagcccatataacaacgtagatgaagcgcaaagccttgcagactaccgtggtttgttctggcgccgtccagtacttacagcaacattaacagtcatgatgttatctttggctggtattccattaacagcaggcttcattggtaagttcttggttgttatggctgctgtaacaactcaacactggttcttagctgcaatgattattgtgggtagtggtattggtttgtattactacttacgtgtgatggttgttatgtatatgactccacctgaaactcctcgtattgatgctgatgcacattggggacaaaaagtgggtggtttaatggtattggctgctgctgcattagttattattttgggtgtttatccagatccaatgattaatttggcattaaaagcagaaattttatctccattacatttcatgctttcacagcaacaataa

SEQ ID NO: 61007 - DNA, 636 bp, Acinetobacter baumannii; identical to SEQ ID NO: 61004

SEQ ID NO: 61008 - DNA, 294 bp, Acinetobacter baumannii
atgaagcaagagttttatactggaagggtaaaacaatataacgccgataaaggatttggttttatttcgacgactgaaggagatattttctttcatatttctgattttcctgcatccgaaggtgaaccgaaaagaaatgaaaaagtgagatttcttgctgcagataatcgaggaaaatttaaagctgttaagattgagcgtattgatcctaatcctgcgaagactaagaaaactaaaattgctgatcacaataaagcgatcacaagtgagttattgtctaatttccgccgctaa

SEQ ID NO: 61009 - DNA, 888 bp, Acinetobacter baumannii
atgcggatgacattacgccagttggctgtttttgtagcagtcgcccaagaaggaaccgttactaaagccagtgatgcggtcagactgacgcaaagtgcagcaagtatggctttagccgatttagaagacggcttaggtgctcctttatttgatcgtttaggtaagcgcttgcagctaaatgatcttggacgttttctgcttccccaagcattagaaattttaggccgctgtgaagcctttgaacaagcagccaagggtgagttacagagtattgaccttcgtatcggggctactttaaccatcagtgattatctcatgccagatttaatggctaacttcttacaacgtcatccacaagcacatttacaacttcaagttggtaacacacgccaaatgattgaagctgtaaatcagtttcagcttgatttagctttaattgaagggtcttgtcacttacctcaactccaatgtattcactggcgtgacgatgagctagcagtgtgctgctcacctgaccacccgttaacacgtttaaatcgcccacttacccctcaagattttcatgacgtagaatggatattacgtgaagaaggttcaggtactcgtgaagtctttgataatgcaattttgcaagatttaccagatgcaaacattcgtttgacgcttggacataacgaagcgatcttaaaaatagtggctggtggtttaggaatgtcgtgtatttcaaagttagcgattgaacctttaagtgaaaaaggtcaacttgttattttagataccccattttggcaacttacccgccctctttatatgctagtgcaccgccaaaaatatcaaggtccgggccttaaagcatttttaaaattttgcgatgaagatcaggcttaa

SEQ ID NO: 61010 - DNA, 762 bp, Acinetobacter baumannii; identical to SEQ ID NO: 50984

SEQ ID NO: 61011 - DNA, 423 bp, Acinetobacter baumannii; identical to SEQ ID NO: 43000

SEQ ID NO: 61012 - DNA, 228 bp, Acinetobacter baumannii; identical to SEQ ID NO: 51104

SEQ ID NO: 61013 - DNA, 1677 bp, Acinetobacter baumannii
atgaatgaattttttaatgggcctcgcggcgctcagtttgatgcgatgtattactgggatcagtttcatcctattttagctgcaattgtcatcttactggtaggctggatcatcgctttattggtggcggcaggtgtaaaaaaacttctgcaaaaagtaaataccaatgcgaaattatcttcagcgactggacgtacacccaatatagaaggtctgatctccaaagtcgtattctggtttattctgattctcgccgttgttgctgctttaaatgtgctcaacattagtggagtgagcggtccatttagcaacatggttaatcaggtactcgtctatataccaaatattattgctgctgtagtggtgggttttattggctggatcgttgctcgactggtgcgggcgggggtgaccaatgttttatcccgaactcaacttgatgataagttaagcagcgaagtgggtgtagggggaattagccagaatattggtgaaattctttactggcttgtattgttacttttccttccgattgttctttcaatcttaggattaacaggcttactgattccggttcaaaatatggtaaatgatgctgtagcattcttaccaaatatctttattgctggcgttatcgtttttgttggttatatcttggcaaaaattgtacgcggtattgttgaaggattaattaatagcttaggtgtgcaatctcaagcggaaaaaattggtcttttcaaaaattcaaatgtaggcaaattcttaggttcatttgtttttgccatcatcattattacgacattgattgtagcatttgaagctttaggtattgagactatttctcagccagcaacagcaatgctcaatgaaattttacaagctattccaaacattattgctgctggtttaattttactggttgcttatattgtttcacgttttgttggtcgcttggttgctgagttaattgcaggaactggtgttgatgaaattccagcaaaattagatgtacaacgctttttaggtcaaactaaagtttctaatgccgttggttggctaatcgtgttctttaccatgttgtttgcagtttctgaagctgctgaccgtcttggtttcgatcagattagtggtctaatcgcaatgtttatccatttcggtgcaaacattctattgggcgctgtaatcttggtgattggtttctggcttgcaaatgttgtggcgaacgttgttcaacgcggtgaatataatagttcgcgttggttaggtagtttggttcgtgtcttgattattggtttagtccttgcacttggtttaagagcgatgggtattgccgattcgatcgtaaaccttgcgttcggcttaacgctaggcgcagttgcagttgctttcgctcttgcatttggtttgggggggcgtcaaccagcagaaagacttttatctgatttactggataaagctaagaaagaggcaagtcaaccaaatcctttatatcaaccgcctactaataataagacaacaggtagttcgactacggtttcaactccgtcaacgactacaactgcaccatcaacaacagtttcatctgatgcaaaaccagctgattctgcacaagtaaatccatcacaaccaccagtaaataaaccgtttggttctactggcgaaaatgatgaaatttag

SEQ ID NO: 61014 - DNA, 171 bp, Acinetobacter baumannii; identical to SEQ ID NO: 43003

SEQ ID NO: 61015 - DNA, 1200 bp, Acinetobacter baumannii
atgtctaacagtcatgtcgatgtcattgtcttaggtgcaggtgcttctggactcatgttggctgcacatgctgctaaacggggacgttcggtcttaattttagaaaaagccaataaaattggtaaaaagattttaatgtcaggcggtgggaaatgtaactttaccaacctctatgtagaacctgaaaactatatttctcataatccgcactttgttatttctgccctatcacgctatagcaactgggactttattggtctggtctgtgattatggaattgcctatgaagaacgtaaacacgggcaattatttacgctaaacggcgctaaagaaattttagagatgttggtgagtgagtgtaataaaacaaacaatgtcgaaatccagacccattgtgaggttggacaagtcgatccattagaacaaggtggtttttcagtacacaccaatcagggccgttttagctgtgaatcattagtggttgctacaggtggattatccatcccaactttaggtggctctggttttggctatgaattggcacaaaaatttggacatacagttttcccaacccgtgctggtttagtaccatttactttttcagatcatattaaagaagtcactacacgcctaagtggtaatgctttagatgtgactctaactaactcgaagaatagctttactgaagcattattatttacgcatcgtggtttgagtggtccaagttctttacagctttcaaactattggaatacaggtgaaagttttaaaatcgactttttcccgagccaagatttagcaacttatttaaaagataaaaagaaagcccaacctaaagttttactgcgtactcttctgaacgaatttacggcaaaaagtatcgtacaagagttacaacaacttatatggccagagcagagcgagacagcaattggtaatatcagtgatgcacagctagatcatattgccgagcagctacatggttttattgttaaaccatcaggcacagaaggatatcgtactgctgaagttaccttaggtggaattgatacaactgaagtttcatctaaaacactcgaaagcaaaaagcagaaaggactatactttattggagaagtacttgatgtgactggccacttaggaggctataacttccaatgggcttggtcttcggcttatgcagcagcacaatatgtttaa

SEQ ID NO: 61016 - DNA, 882 bp, Acinetobacter baumannii
atgtttgatcacattgcccaacctatctcctatcagcacgttgaactatccttccctgttcatctcgacattaaacgtttagatttagttcatcctcaaatttcgggtaataagtttttcaaattaaaatacaatttgcttgctgcaaaagaacaaggtttatcaagcattttgacttttggtggggcttactcaaatcatattgctgcaacagcttatgcagctcatctttttggtttaaaaagtataggaattattcgtggtgaagagttagctggtaaatcacttaatcccaccttggcaaaagctcaaagtttaggaatgcagctacattttgtctctcgccatgaatatcgcttacgagatgaagcaaattaccttaaacaattacagcaacaatttccgcagacctatatcattcccgaaggtggttccaatgaactggcagttcaaggttgtcaggaaatcctgagccaatatgacttagagcaatatgatgtgatttgctgtgcagtcggaactggcggaacgatttcaggtctgattgaaagaagtgcagcacatcagaaagtcttaggattttcggctttaaaaggtaatttcttacaacaagagattaggcaatggactaaaaaacaaaattggtctttgacagatgtatactgctggggcggttatgcgaaaacctcacctgaactattcgcatttattgaaaattttgaagagcaatatacggtcccccttgaaccgatttataccggaaaaatgatgtttggtctgtttgatcttataaaaaacaattattttccagcgaatacacgcattttggcaattcattccggtggtttacaagccgatattagaaatagacctcacgcataa

SEQ ID NO: 61017 - DNA, 993 bp, Acinetobacter baumannii
gtgcttattatcggtattttagtgattttgtgggcatggagaattgggccttttgccacaagtgtgcagcaaactgacaatagttatgttaaaggtaaaactaccattttatcctcgcaaattaatggctatgttaaagatgtattggtaaaagactttgaccatgttaaaaagggtcaagtattaatgcatattgatgccaccacttatgaccaaaaagtagcacaagcggcttcaggggtagaacaggccaaaaatactttagccaatcaaactcagtcaattgctcaaaaacaagcagatattgtggctgcgcaggctaaagtagaacaagtcagggctcaatatgaactttctttagcacagcttagacgctatcaacagctagggaatagtggagcagcttctaaatctgagcaagataaagccgctgctgatgccgaaaataatcttgcagcccttaaacaggcagaggccaatgttctagttgccaaagaagcacttaaaacagctcaagtcgcagaagcaggcttagaagcacaagtttccagtgctaaagcacagttagaccaagctcaaaccaccaaagactatagtgttattgttgctccaatggatggacaacttggtgaagtaaaccctcgtgttgggcaatatgtggccgcaggatcacagttactctatctgattccacagcaaacttgggtgattgccaactttaaagaaacccaaattgccaatatgcgaattggacaaaaagcgtggtttacagtcgatgcaatgaaacataaaaaatttacaggtcatgttgaacaaatctctccggccgcgggttccgagttcagtgtactaaaaccggataatgcaacaggaaactttaccaaagtcgttcaacggattgccgtgcgtattaccattgacccaaatcaggaaggaatggaacacttacgccctggtatgtcagtgattacttctgtcgacacaagctcttaa

SEQ ID NO: 61018 - DNA, 597 bp, Acinetobacter baumannii; identical to SEQ ID NO: 49205

SEQ ID NO: 61019 - DNA, 1425 bp, Acinetobacter baumannii
atggaacaaattatatccaacacaatagagcaaattattaaagataaaaacatagctctgacccataaaaatattcagatatatatctatcagaaaatgttggaacacgatattcaagaaaacccaccatcaagacgaactattcaacgtaggcttaaacaatatgatccgtataaacttattaaagcaactgaaggaacaagaatagcaaatcaaacacttaaagcagcaggacgaaagatgaaaagtccattcattttagcaattgtagaaatagatacccatattctagacattatcattattgattcaacaaccaatctcccccttggccgtccttacctaagctgtgcgattgatgtacacacccgagctattgttggttattacatcagtatgcttcctcctagcgcaacaaccaccttagctttattaaagaatatgcttctacgaccatctcagaatttacctggaggtattccctccttaattgttccagataatggagtcgagtttaaaaatacggcactaagccatatctgcaatcatttgaaaatcacaatacagcctgcacaaaataggaacccagataataaaccacatattgaacgttttttcggtacgcttacatttggactaattcaacaattacaaggtacaacattttctaatcccgaagctcgcggcgactatgactcaagaaaacatgcaagtgttaccctagaaaatttgaaatcatatgttgatgaatggattcataatatatatcactgctcaatccactcaatgacgggacgagcaccaatgctattttgggaagatgcttctcaaagttgtccaccattaaccatatcaactgatgaagtagatattattgcccgtcgcccaatcagtagaaaaattcataaaggacaagtcaaatttgaatatttgacctacttttcgcatgcgttagcaacccttgaagcaaatggcttaactgacgttattgttatgattgatgagctcaatttagagcacgtatatatcaaacactcatcaattgatgaagtaatacgagcggactcaacagagcctgattacaccaagaatctctctctgcaagaacatcttgaaattcgcaaggaacttaaactggtatctcaagcagataagcaaagattaggaaaacatcgcgtatggtacgctcgatggaagttatacgaacgcattcaaaaagatgcttgttctaaaaacaagaagttaaagcagttaaaactagagcttcctcaaacacttaagaacctcttagaccaagatatccatacagtgtcccaaccaatagacccgtcagcttcaacatttatctcctcttctgaaatggatcttctaaatcaatcaaaccttgatgatgattttggaacattggagtttgatgatgaataa

SEQ ID NO: 61020 - DNA, 951 bp, Acinetobacter baumannii; identical to SEQ ID NO: 45771

SEQ ID NO: 61021 - DNA, 243 bp, Acinetobacter baumannii; identical to SEQ ID NO: 46178

SEQ ID NO: 61022 - DNA, 204 bp, Acinetobacter baumannii; identical to SEQ ID NO: 46177

SEQ ID NO: 61023 - DNA, 504 bp, Acinetobacter baumannii
atggctaaacgctacttacccttctacaataatgctagatttatcgcactagtgttagtcggtctgtttgctatattttcaataatttttaaatatttagagttaaatattacaataaatctggttcaattttcatttgtactgcttctccctttaagtcaaatttatttggcttataaaggtatgctcgatgcattaaagcttgatggtttaaatcagtcagaacgagataggttgacttcaactgtggacataagaagtaagtcatctttatatgtggctatgctttttattattcttgtttttagtatgtatatacttaatttattaggcttactttcagctaagcatcttttagctctaatactttctgttggactcacctcaatttttagcttcttcttagcttggtctgacttaagagaaatctctttgcttgaaaaaacattaaaagatcgcaaagaatcaagagaggcaaaagcaaaagtattgagcaataagtaa

SEQ ID NO: 61024 - DNA, 1008 bp, Acinetobacter baumannii; identical to SEQ ID NO: 46193

SEQ ID NO: 61025 - DNA, 363 bp, Acinetobacter baumannii; identical to SEQ ID NO: 46158

SEQ ID NO: 61026 - DNA, 405 bp, Acinetobacter baumannii
atggttaataccgaatatgttccagagtggtacatcacaccttttcagcatgtgcaatacacgcttgctagaaatcagcttcacatggatttgttatttgaagatatggatgaagctgatcaatttttggatatgggagcagatgcacaggttagtactttttctgatggtgcatatgcgattgtccaaatcggggatacgtcagataaggatcaaattcaagtttatggattgcttttacatgaagctgttcatatttggcaaatagtaaaacggcgaatgggtgagcgagagcccagtgtggaatttgaagcttattcaattcaggcaatcgctcaagacctatttgaaatgttcgaagctagtgaggtaagtcatgggatggaaggggaaaaagccgactag

SEQ ID NO: 61027 - DNA, 369 bp, Acinetobacter baumannii
atgggatggaaggggaaaaagccgactagttttagtcttgatgtgtctaaagcagcagaagcgcatgtaaagaatattgttatggatactgtgcaatctttagttaatttaagtccagtcgatactggtgcataccgtgcttcacatattgtttcgattggatctgctgatttcggcgtgcgtggacctgaaacaaacgccgtgcaggatgccgctattcaagctgtaaagattaaattgggtaatttggtctatatccagaacaataaagcttatggaccgcgtttagaaaacggttggtctgatcaagcaccacaaggtatttatggcctcacatttaactttatttctcaaaagtacggtggctaa

SEQ ID NO: 61028 - DNA, 444 bp, Acinetobacter baumannii
atggcctcacatttaactttatttctcaaaagtacggtggctaatatggcaatgactttagagcaggcgaggcaagctattattgatcgcatgcaaagctttacaggtattacgcaagacagaatccagtatccaaatttaccaggctttaatgtacctaaagatggtgtttggtgccgcttaacgattgcaggtggtcccagttttacttctggcattgcagataagccatgtactcgccgtaccggtaatatcatgattcaatgctttgcacgtcccaattcaggaataattgaaatcacaaaattgagtgatgcattacttgctcattttgaatatttcacaatcgaacacttagaatgtttgaatggccaatctatttatgcgggtaaagatgctgacttcattcaatacaatgtatcaataagttttttagttaactaa

SEQ ID NO: 61029 - DNA, 354 bp, Acinetobacter baumannii
atgagcaattttgtatttaagcgtggtgacactttcaacttaaatcttcagctagttgatatggatgaagccctgcaatatccacctgatgatgttcgccgtgccattgatctatcaggctacacattcacatcgcaagttaaatcgttggcggatggagcagtggtagctacattgacttgtgcagcattaagccagagcacacaaaagggttggcttaatgtgaaatctggagcaagcacagctgcttggcctgttggtttgtatcaaatggatattaaagcggtagtaagcggcaacactcaacacaccgaaactttgactttccaagtgattgacggagtaacagcataa

SEQ ID NO: 61030 - DNA, 210 bp, Acinetobacter baumannii; identical to SEQ ID NO: 60933

SEQ ID NO: 61031 - DNA, 666 bp, Acinetobacter baumannii
atgaagattatctatacacgcattgcagcagcggctgcattagagacaggcattattgctaaccctgactattatgaaaacccaaatttgaaagcaaaagaggtaattatttacggtaattatccaaagattcaagaggattatgaatctttggaagttccagttgaagttcgtaagttggaagagccacaaaaaacgactttggccacggtaaatgtcgaggtaggagtcgcccctgaacttcaaactgtgattgatgatgcaaaagctgagtgtgaaaaggtagttgaagaaaacactcagcttaagcagaaaattgccatcttagagcaggccggcggcaaccagtcagagttgttatctgagaattcacgattaaaagatgcagcagtcttagcagataaagctctcaaagatgctgaagctcaagtggtcggtataaaaactgaatttgaagcttttaaaaacgatattcctgcaatgcaggcacgtattgctgaattggaagctggaaaagcggaagaaaatccagctacagaaacggcagctaatgattttgaaaattggtcaaatgatcaattaaaagagtatttggctagtgagaacattggctacaagccatctgcaacaaaagcagaactccttaaattgatcccaaaggaataa

SEQ ID NO: 61032 - DNA, 1605 bp, Acinetobacter baumannii
atgctgtttaacttcaggaatatcattccagatagttacaagcatgatctaacctttggcgtgatggatgactacgatggactgatctatgaatacacggatccgaccgacgatagtcgtatcaatatctatttgccagacaaaggagcaaagaacccgaaagaagtgaaatccgttggggtacgaaacaagtggcaagctcattttaatgcgtaccggatctggaacaagcttcggtttcaacgtaaatccatcacctttgatgcggcgcctgagtctgaattgcttgtgctacgtgaccgtattgctgtagcagattatcgcaatggtattcatcaaagcggggaagtggtacagcaagagggtttaatcctcaccttaagccatgatgtagatttcattgcaggcaagagctatgtgatctatctgcaaatgggggatggtaccgtggacctaattcctattacaccgggttcagccaagaacaaagttgttttagggcgtttaccgaacggggccttaaagcttagtcccgatgactttgtgaatactatctacacggtagttaatgacgataccaaaggctcattaccttatctggttgcaaaaagagaaccagctgaccagttctctaatacaattactgcaattaattacgatgaacgttattacctcaatgacaaggacttcattgatgtaccggtagatgattcaccgatttatattcgatatgaccagcttgatattaatctggcacgtttgtatcagatgcaaagaggtgatttaccaacgactggcgaaatcagttttgtagttgaagcaggtgcattggtttcaagttcaagttcttatcgaccggaaaccagatttgtctataaattcgactacaactctagtcctccaaaacgagagtatatcgttccagctgcatcagaattacctgctattgatactggtgagtttccacctgatctggttgtgaatctgacgattaaaggtgctgtagttggacgtggtggagatggcgggttgccacatttggcatttggtgcatggtctaccgatccggattacaactttacaaaaacccgtcgtgatggttttcagggagcacccggtctattaaaccggcacagtaaactaaacctgattattgatggtggaactctggctcgaggcggatctggtggcggcgcaacaccaagtggtatttatactggattatcgtatggagttcagggtattcccggtggagctggagcaccttttggtcgggttatgaccggacaacctattactaacgattcacaagactggcgttggtactttaatggtgactttatggttgtcaaagtaaccgatgctgaagctactgtgcctggtaaaggttatcgaacccaaaatgaccgttatggatcgccattgtccggtgatggtggaagctggggtcaactaggtaccgagtccaccaatgatggaacatggaactggcaataccatggcacaactgaaggccagccggggccgggtggacctgcaattgttggggtggcaccacttacaactcaattgatcaatggagggaaaattctacaaacactttaa

SEQ ID NO: 61033 - DNA, 666 bp, Acinetobacter baumannii
atgaagattatctatacacgcattgcagcagctgctgcattagagacgggcattattgctaaccctgactattatgaaaacccaaatttgaaagcaaaagaggtaattatttacggaaattatccaaagattcaaaaggattacgaatctttagaagttccagttgaagttcgtaagttggaagagccacaaaaaacgactttggccacggtaaatgtcgaggtaggagtcgcccctgaacttcaaactgtgattgatgatgcaaaagctgagtgtgaaaaggtagttgaagaaaacactcagcttaagcagaaaattgccatcttagagcaggccggcggcaaccagtcagagttgttatctgagaattcacgattaaaagatgcagcagtcttagcagataaagctctcaaagatgctgaagctcaagtggtcggtataaaaactgaatttgaagcttttaaaaacgatattcccgcaatgcaagcacgtattgttgaattggaagctggaaaatcggcagaaaacccagctacagaaacggcagctaatgattttgaaaactggtcaaatgatcaattaaaagagtatttggctagtaaaaatattggttacaagccgtcagcaacaaaagcagaacttcttaaattaatccctaaggaataa

SEQ ID NO: 61034 - DNA, 369 bp, Acinetobacter baumannii
atgggcttacgtgacgaaattcaggcagagattgctgaagcatttaatgatgatttagcggacgccgttcatatttttacttgtgagaggatctcaaaaactaactgggatcctaaaactgaaacgtatgttgaagttaaagaaaactattccggccgtggtgttctgtttggctcttacagtcaatatgagatccaaacacttggagtattggcaacggataagaaggcgaccgtgcttcaaaatgaagtaactatgactccaaaaattgatgatgagtgggaaactgtcctaggttcatttagagttattaatattcagcaagatcctgccagtacaatctggaaatgtcagcttcgaaaagtgtag

SEQ ID NO: 61035 - DNA, 408 bp, Acinetobacter baumannii; identical to SEQ ID NO: 51640

SEQ ID NO: 61036 - DNA, 369 bp, Acinetobacter baumannii
atggggtggaaggggaaaaagccgactagttttagtcttgatgtgtctaaagcggcagaagaccatgtgaagaatattgtcatggatactgtgcaatccttagttaatttaagtcccgtcgatactggagcataccgtgcttcacatattgtttcggttggatctggtgactatgacatacgtgtacctgaaactaacccaattcaagatgctgctattcaagctgtaaagattaaattgggcaatttggtctacatacagaataaccagccttatgctgagcgcttagaaaacggctggtctgatcaagcgccacaaggtatttatggcctcacttttaattttatttctcaaaagtacggtggctaa

SEQ ID NO: 61037 - DNA, 444 bp, Acinetobacter baumannii
atggcctcacttttaattttatttctcaaaagtacggtggctaaaatggcaatgactttagagcagactaggcaagctattattgatcgcatgcaaagctttacaggtattgctcaggaacggattcagtatccaaatgcaccaggctttactgtaccaacaaaaggtgtatggtgccgcttaacgattgcaggcggtccgagttttacttcaggtattgcagataagccatgtactcgccgtaccggtaatatcatggttcaatgctttgcacgtcccaattcaggaataattgaaatcacaaaattgagtgatgcattacttgctcattttgaatatttcacaatcgaacacttagaatgtttgaatggccaatctatttatgcgggtaaagatgctgacttcattcaatacaatgtatcaataagttttttagttaactaa

SEQ ID NO: 61038 - DNA, 1344 bp, Acinetobacter baumannii
atggatttacaagaacttactcatagccatgcctttgaaatcgttttacaatccattgcagactgcgatcgtttagtagcagcattaaaagaaaattttcaggtcatccaatatcaagatcatatccgccgcccgttaccaggtggtaatcagtcactaatgatcaagcttaagggtgaaaaaaccacgttatcgctcactattcaaactgagttgatgcgtaaagctgcacgtttcggtgtcgtactcggcgaaaatgctccacaaacttgccgctctgccattcaagcttccatgcagaacctaaatacactcattgatggtgaatgcgctaaaacgacttttaatgacttacttgattatttgcatcaagaaaaaatttgggtttacacaccacacggccagttacatgaattaccacaaggcgccacagtagttgattttgcctactcagctagtcttttcttaggcaaccatgcggtaggtgcaaaagttgatggtgaaattaagccactttctacaccattagttagtgggcaggttattgagattattactgacgttttagcaacgccaaatccagattggctgagctttattaatactcaaaaagctcgccgtgctttacagcacgtactcaaagaccaagatattgaagaacaacgtttagttggtgcccaagcactttcacgagctttgaaactctttaatcgttctattaacgacctttcagatgcagattggttagatcttttacaatggcgtcatattgataataaagatgcattatttgagcaaattgctgttggagatttacttcctcaacttgtagctaaccatttgtttgcaaatgacaagcatcctcgagcagaaaattcagatcgactaattcaaggaactgaaggcattgatgttaaatatgcccactgttgtaatcctattttaggcgatccaattcaaggccatttaacacgacgtggtttaattgtgcaccgtattcgttgtcataatttgcttcatgaacaacatttacacccagaaaacattatgccgcttcaatggaaagcagatgacgtagatgatgtacgttttactgcttaccttgcgatttatatggcaatgaatgatgaacaggtatcagacctcatctaccaatgtcgtaaaaataatgctggggtagaaatggtacattccaacgaacagcgtactttcgtcaatattgtagtaaacaaccgtaaacatattgcaaaagtcattcgtgatttacgaatgcactatggcttcccacgtattgagcgtctagacgcccctgctccacaaatggaaatttccaaagtcagctaa

SEQ ID NO: 61039 - DNA, 294 bp, Acinetobacter baumannii
ttggaaagtgagtatgacttacttactcgcaataaacgcagtgtttggcaggtttctaccaaaccatataagggtgctcatttcgcaacattcccaatggatttaattgagccatgcgtattagcaggatctcgagtcaatgatgttgtatttgatccattcatgggatccggaacaacagcagctgtagcactaatgcataaccgtcaatatttagggagtgaattgaaccctcaatattacgaattgcagcaagaacgcttagagaaagtattaaaagagagggccgcatga

SEQ ID NO: 61040 - DNA, 918 bp, Acinetobacter baumannii; identical to SEQ ID NO: 45767

SEQ ID NO: 61041 - DNA, 933 bp, Acinetobacter baumannii
atgatcatctacaaccaactggcccaaacagcgtatttagaacgtttacaagacaatttgaatgtctttaatgaagcttccaatggtgcgattatttatcgtaatgaaatcattcaaggtgacttcaataaaaatgcattctacaaagttggtggtagcattaaacatcgcgatgtgaactctaatgcaaaagtaactccggaaaaaatcggtgcaggtgagtctgtaggtgtaaaaattccatataaatatggtccttatgcatcaactgaagaggcatttaagcgccgtgctcgtacaccagaagaatttgctatggttgttggttacgatcttgcagatgcattggttgcaggccgattagagtacagtttagcttctttaaaagctgctatttctagtaatcccgatatggttgcgaaaggaagtatcgttgttgatggccgcaaagcattaactcgtggtatgcgaaagtttggtgataagtttggccgaattggcttatgggtgatgaactcagatacatatttcgatattgtcgatgatgctatcactaagcaaatttacggtgaatctgaaatcgttatctatggtggtttaccaggaaccttaggaaagccggtattggtgacggatgctgtaggtgataacgatgcttttggcttgcagtatggtgctgtaacagtaactgaatcacaagtaccgggcttccgagcttatgacatcaatgatgaagaaaacttagcaatcggtatgcgtgctgaaggtgcatttaacctagatattcttggttatagttgggatacatcgaaaggtgaaaatcctgatcttacattacttggttcaagtgctaactggattaaatatgcaaccagcaacaaaatgacagcaggtaccttacttgatttatcaggtacagcgacaactggttaa

SEQ ID NO: 61042 - DNA, 735 bp, Acinetobacter baumannii
atgaaattgaacagttataattttttgttaggtttggcgtttgcttcatctgttgctgctcctgccgctcaagcagaaattgtaattcatggcacccgtgtaatttatccgtcggatgctagagaagttacgctacaagttagcaataacggttcaaagccagcacttgtccaagcttggattgatgaaggtgatccaaaaagtactccggatcaatcaaaagttccttttatgattgctcctccaatttctcgtgttgaagcgacaaaaagtcagacgctccgtattactgcccttccaaatgcttctcaatttaaccagaagcaagaaactgttttgtggttaaacgttttggatattccaccaagacctacctcaaaaaatgcagatacgacacctgataacttcttacaacttgcaattcgttcccggatcaaattcttctatcgtccggcttcaattaaagaagatgcgaatttagcagcagataagcttcaatgggttaaatctggtcagaatttaacggtaaaaaatccaactcctttccacattacgatgacttctgtttatcaaaaggttggagataaaaaagttgatttattgcctcaagggctaatggttaagcctttttctgaagcttctattcagcttaagaatagcaatcttcaggatatgagttttattaatgtcaacgactatggtggtcgagtcgaacaccaaataaaacttcagtaa

SEQ ID NO: 61043 - DNA, 918 bp, Acinetobacter baumannii; identical to SEQ ID NO: 53226

SEQ ID NO: 61044 - DNA, 759 bp, Acinetobacter baumannii
gtgaactccaatgcaaaagtaactccggaaaaaatcggtgcaggtgagtcggtaggtgtaaaagttccatataaatatggtccttatgcatctactgaagaggcatttaaacgccgtgctcgtacaccagaagaatttgctatggttgttggttacgatcttgctgatgcattggttgcaggccgtttagagtacagtttagcttctttaaaagcggccatttctagcaatccggacatggttgcaaaaggtagtatcgtagttgatggccgcaaagcattaactcgtggtatgcgtaagtttggtgataagtttggccgtattggtttatgggtgatgaactcagatacatatttcgatattgtcgatgatgcaatcactaagcaaatttatggtgaatctgaaatcgttatctatggtggtttacccggtacattaggtaagccagtcttggtgacggatgctgtaggggaaaacgatgcttttggcttgcagtatggtgctgtaactgtaactgaatcacaagtaccgggctttcgagcttatgacatcaatgatgaagaaaacttagcaatcggtatgcgtgctgaaggtgcatttaacttagatattcttggttatagttgggatacatcgaaaggtgaaaatcctgaccttacattacttggttcaagcgctaactggatcaaatatgcaaccagcaacaaaatgacagcaggtaccttacttgatttatcgggtacagcgacaactggttaa

SEQ ID NO: 61045 - DNA, 219 bp, Acinetobacter baumannii
atgtcatgtatgctgactttagaagaaatcgaaattaaacggcaagaactggaaagacatcttgaagatgttatgtctgttgagttgagcaaatggcaatctgaaaacaagctatgtgtttccgatgtgaatatacgcttggccaatgtgaatagtcttggtggaactaaacataatgtagttactggagtaagtgttgatttagattacaaaccttaa

SEQ ID NO: 61046 - DNA, 867 bp, Acinetobacter baumannii
atggcttattggaaatcttttggtctatcaaaactagctacacaaaaacaagtagatattaggactcaattagaagttgtagattctttaattgatattattaatcgagatacagcatcaagatcagatagaaaaaagaattttgagtatataactgcgaaagtcttcaagcttaatgaatgtaaaaattcaattgtagaagcgaacttactaagtaaatctacacctacacctacacctacacctacacctacacctacacctacacctacacctacacctacacctacacctacacctacactgagtaatgttttaaaggaaataaagcaattagtagatagaaacataccttattcgcaaactggtgcaagaggtgctggaagtaataaaaatgctacctcagtaattactgctaatgatttaaaaggattagactgttcagaaactgttgcaatatatcttttaaagttaggtgttactgataaattctattctatacatactggtgttatgctcactgaaaatgattttagaaaggctatacgttcaaataaaattgagtatgttgttggaagtaaagatcttaattttatccctcaaattggggatatatttgtttggcgtaatggtggtgggcactgtggtatagtgtatgatgttgatagacaaaatgataccgttactattttagaggctataggtgacgttggaagtgctgatgaaaattttaatataaataatgggggcgaaaaaaaagtagggtgtacgcgaacagctgtatatagaagatctggaaaagctttagcccagcatagaggatgggtgggatattttaggccaattattagtggaaaaaaaatatga

SEQ ID NO: 61047 - DNA, 444 bp, Acinetobacter baumannii; identical to SEQ ID NO: 61037

SEQ ID NO: 61048 - DNA, 156 bp, Acinetobacter baumannii
atgtgtataagagacagcttttatcgtggacgagagttatttattaatcatgctggggatttaccgcaattaatgaatgaaaaggaaatacaagattttcatattactcaagaacaaagcttacaacatgatgttggcgtagaactagacagataa

SEQ ID NO: 61049 - DNA, 444 bp, Acinetobacter baumannii
atggcctcacatttaactttatttctcaaaagtacggtggctaatatggcaatgactttagagcagactaggcaagctattattgatcgcatgcaaagctttacaggtattgctcaggaacggattcagtatccaaatgcaccaggctttactgtaccaacaaaaggtgtatggtgccgcttaacgattgcaggcggtccgagttttacttcaggtattgcagataagccatgtactcgccgtaccggtaatatcatggttcaatgctttgcacgtcccaattcaggaataattgaaatcacaaaattgagtgatgcattacttgctcattttgaatatttcacaatcgaacacttagaatgtttgaatggccaatctatttatgcgggtaaagatgctgacttcattcaatacaatgtatcaataagttttttagttaactaa

SEQ ID NO: 61050 - DNA, 162 bp, Acinetobacter baumannii
atgttacgtgcggggatgattcgtaaattggcatctgatttatatataaaagggcaagaaaaaaagattgtgtttttattttctaaagttataatcgaccatgtacagacaggtctgtatattctagtttgggatgataatttaaaaaatgtcaaactctaa

SEQ ID NO: 61051 - DNA, 402 bp, Acinetobacter baumannii
ttggctggccatattagtcaagtagaacatctactaacttccttaccgcaaactactcagcaagaaattattgattgctggacgaaccatcagccctcagaaagagccacaacttggctattacctgctgatcaacacatcccctcatggattaaaggcgagcatcctcttgttgcggtacgtgtaacgacacatcctttatgtgtcgctttatgcaatgcttttcatggttttattgtatcgacgagcgccaaccctagtggacaagaacctgcacattctttacaagatgcctgccaatactttggttcacaattaaactatctcaatggtgatttaggccaaagccaacagccaagccgcatcattaacgccttaactggtgaagtgatacgtccttaa

SEQ ID NO: 61052 - DNA, 354 bp, Acinetobacter baumannii
atgcaaagctttacaggtattgctcaggaacggattcagtatccaaatgcaccaggctttactgtaccaacaaaaggtgtatggtgccgcttaacgattgcaggcggtccgagttttacttcaggtattgcagataagccatgtactcgccgtaccggtaatatcatggttcaatgctttgcacgtcccaattcaggaataattgaaatcacaaaattgagtgatgcattacttgctcattttgaatatttcacaatcgaacacttagaatgtttgaatggccaatctatttatgcgggtaaagatgctgacttcattcaatacaatgtatcaataagttttttagttaactaa

SEQ ID NO: 61053 - DNA, 414 bp, Acinetobacter baumannii
atgcaagttttaatggctttggcatacctctttacagggcatgatatgggcttacgtgacgaaattcaggcagacattgctgaagcatttaataatgatttagcagatgccgttcatacctttacatgtgagcggatctcaaaaactaattgggatcctaaaactgaaacttctattgaggttaaagaaaactattctggtcgtggcgttctgtttggctcatacagtcaatatgagattcaaacgcttggagtactggccaccgataagaaagctaccgtgcttcaaaatgaagtgtccatgacacctaaaattgatgatgaatggctaacagctttaggctcatttcgagttatccatattcaacaagatcctgccagtacaatctggaaatgtcagcttcgaaaagtgtag

SEQ ID NO: 61054 - DNA, 441 bp, Acinetobacter baumannii; identical to SEQ ID NO: 49901

SEQ ID NO: 61055 - DNA, 288 bp, Acinetobacter baumannii
atgactcgtatgccacgctcaccacaagagtgggcagttggtttgatctgtacggttgtatcaagtttggctggcggctcattcattattgtgaagtggggacttcatgaatgggttactgatgtatgggggatgattgctctaggtgggttcttctttgtttgtggtttacccggttgggctttagtccgttggatttttaattttatagataaacaggaaggtaaaacgatcgttgaagtgatcaaagagtttaagaaagccagaaaagacattgaaaacagctaa

SEQ ID NO: 61056 - DNA, 414 bp, Acinetobacter baumannii
atgcaagttttaatggctttggcataccactttacagggcatgatatgggcttacgtgacgaaattcaggcagatattgctgaagcatttaatgaggatctggcggatgcggtccaaacatttacatgtgacagggttgttagtaccaactggaaccctaaaacaaacacctctgaaaatgtcattgagcattatgaggggcgtggcgttctgtttggctcatacaatcaatatgaaatacaaactctcggagtactggccacagataaaaaggcaactgtgctgcagaatgaagttaccaaagagccgatgattgatgacgaatggagtacggcgcaaggtacatatcgcatcatgcatatcaaacaagatccaatcagtgcaagctggaaatgtcagcttcgaaaagtgtag

SEQ ID NO: 61057 - DNA, 498 bp, Acinetobacter baumannii; identical to SEQ ID NO: 49192

SEQ ID NO: 61058 - DNA, 354 bp, Acinetobacter baumannii; identical to SEQ ID NO: 61052

SEQ ID NO: 61059 - DNA, 408 bp, Acinetobacter baumannii
atgcttggtttcaaagaaagtatttttcagtcatgtttagctttaggaagaatcaaagaaagccaaaccgacctaattcactacaaccacctagatctagaactagccttaggtcctaaaactgttgcagaagcaagagctgttgttggtcattattttggccgtattctagaatatgaacaaactaactccctaccattgctcaaaaccctagctgtatttttaaaatatgatggcaattggaaggtaaccgcttctaaattagatattcatcggcagacactagtctatagattgaaagttatagaagaattaactggcataaagcccacaacaagcttaggtattacacggttttggatagctttagaagcagcaaaaaccataggattgttacaggattcttaa

SEQ ID NO: 61060 - DNA, 273 bp, Acinetobacter baumannii
gtggttgcatacgatccgaacggcgaaaagatttattcacgtgtccgcccgggtgaacttgcaaatgttgatgaagctttagagtcattggttggtggataccagcataaagacttgattcttaaaggtggtaaaggaactggtggcggttttcaaggtgggggcaaaggtggagcacctaccggaatgaaacgcagcgaaatgtctgtttctcagaaagctgactacatcaaagaacatggcaatgatgccttcctaaaactaccgaactaa

SEQ ID NO: 61061 - DNA, 216 bp, Acinetobacter baumannii; identical to SEQ ID NO: 42270

SEQ ID NO: 61062 - DNA, 306 bp, Acinetobacter baumannii
atgtctgtgtattggcgagatcctttgtttgatggatcaatggctatagtgactaatttacctagtaagccacgtctttctaacataatttttgcagcgccaaattcaatttccccatttaacaaatcatcgaataaagcctcaccttcttctcgaattccgtcacggtctatcatttcacgttctagctcaatactaagtaagccagctaatatgcggggtaaaaatgtctcatcaaaaaaacgtgactctttattaataatatttagagtagtttgggttctacccggtattttcacactatag

SEQ ID NO: 61063 - DNA, 393 bp, Acinetobacter baumannii
atgactttagagcaaacaaggcaagctattattgatcgtatgcaaagctttagaggtattactcaagacagaatccagtatccaaatttaccaggctttacggtgcctaaggaaggtttgtggtgtcgcttaacgattgcgggcggtccaagttttatttcaggcattgctgataatccttgtacacgccgtaccggtaatattatggtccaatgctttgctcgtcccaattcaggaataatggaaatcacaaaactgagtgatgctttgcttgcccattttgaatattactcaatcgatcatctagaatgtttgcaaggacaatcaatttttgtcggccaagatgctgatttcattcagtataatgtgaccattgggtataaggtgaattga

SEQ ID NO: 61064 - DNA, 369 bp, Acinetobacter baumannii; identical to SEQ ID NO: 61034

SEQ ID NO: 61065 - DNA, 132 bp, Acinetobacter baumannii
gtggctgcacgagatccgcagattcaaccgaagctaatggggtatgtgagaaaacgccgctatgaattagagaatcctacacctactcaacaagaatctacccctgattatttattagtggacggtttctaa

SEQ ID NO: 61066 - DNA, 369 bp, Acinetobacter baumannii; identical to SEQ ID NO: 61034

SEQ ID NO: 61067 - DNA, 174 bp, Acinetobacter baumannii; identical to SEQ ID NO: 51116

SEQ ID NO: 61068 - DNA, 1218 bp, Acinetobacter baumannii; identical to SEQ ID NO: 53167

SEQ ID NO: 61069 - DNA, 366 bp, Acinetobacter baumannii
atgaatttagattattttggtttcggtgttactagatttattattgtttttttgataggaagttttttttctctattacttcgctttgtttttagttttgatagtaatagtgctatagaagttggtacttatttaacttatatactttttatttatttgggatatatttatactagaaagtctactggcttaagatatttaaactccttctttttgtcatttttagtgattttaatatttattataatttgcattgcttttggttattttgatttaaatagtgcattacgttctttactattgtatttgcttttaatgcaatttggttcattaatatttcttattaaaactaagtttatgaaataa

SEQ ID NO: 61070 - DNA, 183 bp, Acinetobacter baumannii
atgaaaaatattcaaacgacagcgttgaaccgtacaacgttgatgtttcctttagctttagtgctatttgaatttgcggtttatattggtaatgacctgattcagccagccatgttggcaattactgaagatttcggtgtaagtgcaacttgggcgccgtcttcaatgtcatttttttattag

SEQ ID NO: 61071 - DNA, 435 bp, Acinetobacter baumannii
atgaatcctcaatttttatgtcataagcttttttcagctaaattatatttagtaacagctgcaaatcacttaggacgtcctaagttttcccttgaagataactctcttccattaatgaattatactgatgatagttacatggggaaaaaagttaataaatttcttcaagataatcaatccacttattttagtacgaccttcgtttcatcaatgagtatcttattaaaagatatgattaaagggggatatggcgttgggtggttaccagattatagtattcaggaagaattaaagaaaaatgaactaatagttattcctttgaaagaatcagttttatcagttgatatttatctatacagaagcagttctagattaaatgcagcttcagaaggattatggagctttattaaagcaattgattgggcaattgtttaa

SEQ ID NO: 61072 - DNA, 1296 bp, Acinetobacter baumannii
atgaaaaaggaaaccaccgtacgttatgtattcatagctatttttcttggtgcaataattggatttatttgtcacaacttatcgtccactccagaacaggcaaaggaaatctcctcttatttcaatcttttgacggatatttttctaagattgattaaaatgataattgcaccattaattttttcaacaattgtagttggcatagtgtccatgggacgctcatcttctattggaaaaattacattcaaagctatggcttggttcatctcagcttccttgatttctctcggactaggaatgctatttgcaaatgtttttcaacctggggcaggattaaacttaacaattgatcatgcttctaatgcattgccaacttcaatcaatacagaaggatttacactaagtggttttattacccatctttttccacgaagctttgcggaagcgatggcaaacaatgaaattttacagatattaatattttcaattttttttggtaaagctttgagttttgtgaactcacaatacacatctctaatttttaaaattgttgaagaactcagcaatattatgtttaagattacagaatatgtaatgaaattcgcaccagtagctgctttctcagctattgcatccgctattactatacaaggtataagtgttttcgctaattatgcgacatttcttggttcatttttcttagcattaataatattgttattcattttattctctttttcttatcttttcttaaagaaagatacattcactttggctaaactcatccgcgaaccagttatgcttgcctttgtaactacaagtagtgaatcagcatatcctaaaactatggatgcattaaataagtttggggttcctaagcaagtaactagctttgttcttccattaggttattcatttaatctggatggctcaatgatgtatgctgcttttgctattttatttattgctcaagcttataatattgacttgagtattatgcaacaagttttaattcttctaactcttatgattacaagtaaaggcattgctggggtatcaaaagcttccattgttgtagttgcagcaacattaagcttatttaaattacctgaagctggtttactactaattttagcaattgatcaatttttagatatgggacgtacagctacaaatgtagtgggaaatagtattgctacagcagttatcgctagaaccacacagttaggtgaacttccagaagaaattaacacaaatacagaaattattattagtactgagcaaccaacttcttaa

SEQ ID NO: 61073 - DNA, 702 bp, Acinetobacter baumannii
atgaataagccaatcggaattttaggtggtatggggcctcaagccactgttgatgccatgaataagattataaagaataccatggctaaatgtgatcaagagcatattccagttattacagtttctattccagacatccctgacagaacagaatctattttaaatcataatgataaacctttgaagaaaatgactgaatacttaaagatcttagaaaatgcaaatgtgggatgtattattatcccatgtaatactgctcacttttggtttgatcaattacaaaaacgtacccatacaaaaatgataagtatcattgagtctactgttaagcacattgaaaaaactgatactaaagaagtctgtatcctggcaacctctgccactatctcaactcaactttatcaaaataaatttgctcaaaataatatcaactactcaataccctctcctagtgttcaacaaaaaataatggaaagtatttataaatacaaagcagcaaaatatgaggaatcaaaagaattaatcaatcaaattattaatttatatgacttaaattcagatataaaatttttacttgcatgcacggaacttcctctaattttagaagattggattaaaagccatcctaacttattcatagatgcgactgatctcttaattcgtaatgccattaattggtatcaatatgagcaaaaaatataa

SEQ ID NO: 61074 - DNA, 225 bp, Acinetobacter baumannii; identical to SEQ ID NO: 46522

SEQ ID NO: 61075 - DNA, 747 bp, Acinetobacter baumannii
atgatattacctcttattaatactttccaagaaccatatatagtctggcatgaacgagagccaacgcttgaggaacaattagagagaataaattcaggtaattttcatccattagatacagtgaaaatgggggttaaggctgagattttaactccaatagatgctgctcaatatatggctatggaggggacagataatcgtttagaaagattgatagatgatattttacattcttcagtggaatgtaaaatttggcaaaatttaatgccatctataacccctgaaccattaatccattacaaacaatactatccaaaatttgatactgccttggtcgataattgtataaaacaaattggggtattacctgcagtaggtcagcatttatttagaggtggattttggccagatggtttgactactgtagtaactgatcaacctttatcaacttcgttttgccctcaagtagctttacggaatgctgagtggaaaggaaaagcttatgatgaagggaaaatagatatattcgttattcgtgttgtggaccctaaaaccaatatatatttttataatcttaatgagattttaggaaatgaaaaggaggtactttttgcttctggtgcaacactacgcttaataagtagaaaattaataagggatgattttctggtgaataaaggaattggtgtatgtgaaatcgtttcaaaaaaagttccaatttatgtattggaaattgagatctcatag

SEQ ID NO: 61076 - DNA, 195 bp, Acinetobacter baumannii
atgggaatctatttaacacatcctttgctaatactagcaatgaaaaagatcataccaagccatttttttgaacaataccctacttcctcatttgtttttattttagtcctaacaatctcattatgtttttctctctgtttctttatatcaaaatttagcttttccacttttattattacattgccaaaaaaataa

SEQ ID NO: 61077 - DNA, 825 bp, Acinetobacter baumannii
atggctaattttatctctaatgctttcatgatccctaacgacttaattgacaagggttacatgaagaaaatgaaaggttcggctttgccatgttatgtgcttattgtgcgtaatacgcgcggctggaataaaacaaccgattcaatgagtatctctcaatttgttgagcaaactgggtataacaaagatactgttttaaagggtctaaatacgcttgaagaattgggtgtaattgctaagaaatcgtctaaaaatcgtgcgtcagaatacaccctaactgacagtattattgctgtcgattttttagatagcgaaaaattagatagcgaaattttagatagtgaaaacggctctggtagcgaaaaattagatagcgaaatggggtctggtgtcgaaaatttagataagttgctatctaaaaattcgacacacaataacaatataaaaacaaatacaaaaacaaaggggaatttttcagaagaatttgaaattttctggaatgcatatccgacttgcaaacgtaaatcagataaatctggaacctttaaaacttttgaaaaatacactcgtgtaatttcacttgaaaaactcatcgcaattttgaatgcattcaagttggattctcagtggatcaaaaacgatggtgaatatatcccagcaccttcggcttggttgaacaaaaaacactgggaaaatgatttctggttgaaagctgctggtttagttgagcaacaaccacaatcagcagtaacacctgaatacgcaaatccacaacgccgtcacatcccaacaatgccaaaacgctttaaggggatgaacgcatga

SEQ ID NO: 61078 - DNA, 2100 bp, Acinetobacter baumannii
atgaatatcccacctcgaccatttaagttgtctgtaatcgcctgcgcgatttgttatgccaatctcacctatgcccaagatgcacaggtacaagctttgcaaacaattcaagtcaaagcatcaaatgcagagcagtcttctgaacagaccaaggcatataatgttaaaaactcaagtagtgcaaccaagcttaatattgaggctaaggaaacaccccaaaccattaatgtcgttactcgtcagcaaattgaagattttggccttaccagtactcgtgatgttttaagtaatacaccaggtgtgacagtaactggattagaaacaaaccgaacaacttatactgctcgtggttttgatatttcaaatattttggttgacggaatcggtatccctcaagttgatagctacaattataataatagtgatgcagatagctatttctatgatcgcattgaaattgtaaaaggtgctgatgctctaacaaatgctctaggtgatcctggggctacaattaactatatccgtaaacgccctaccaaagaatttcaagcaaatgctggggtgagctatggttcatgggatacgcagcgctatgaagctgatatctcaggttctcttacacaagatgggcgagtacgaggacgtctcgtaggttatgagaaagtcggagattcttatcttgaccgctattcagaagaaaaaaacggatttcaaggaattttagaagctgacgttacagacactacaaatatttcagcaggatattcaaaaactcgtcaatacgctaatggttcgcaatggggtgcactacccttagttaactcaaaaggagaaccattaaattattcacgcaactataattatgcaccatcatggacatactacgattgggaaattgataattattttgccaatattgaacaaaatttatggggagactggaagctaaggttaggttataaccttaaaaaatcagaggttaaagataaaatgctttatctcaatggttctccttctgctacagacaatacatctggtatttcactattaccagaaatttataatcaaaaatttaaagaaacgacagcaaatgcagatattcaaggtacgtttaatttattagggcagcaacacgaagcaaatattggttataactggtcaaagtataatgcacaaagtgtttattcgtatggtagtagtttaggcgttattactacagacttaccaagctggacacctgaagaaccgacttggggagactttacctatgctgacccagaagaaagaataatgaagtctgtttacggtgccacacgtcttcatttaggtgaggatctgaaatttatcttaggtgctaactatactgaaatcgaaactttggattataaaaagaataaagtttccccgtatgcgggtattacatataactttactcctgaatacacaggttatatgagttatacctctatttttaggccacaaacggttatcgatctttctactaaacaaactgctgtaccagtagagggtgaaagttatgaagtaggtgtaaaaagctcttggttagatggtgctttaactggaaatatcgctatctttagaacagacgaagataactttgcactaaacccattatgggatccgctctataataaatactcgtcaccaataggaacgattagatcgcaaggggttgaagttggattaactggaaaattaactgataacttagatttagtttttggtttctcaacatttagtctaaaaaatatggaatcaggtgaaagaggtagaccaaatatcccaactcaaacacttaacgttttagcttcttatactgttccccaaattccaaaattgaaagttggtgcaagcattaaatggcaagatgatatacatgacacctcttattcaactgtaaaacaagatgcttacgcattgcttaatgttatggccagctatgatttaaacgaacatgtaatgttccaagtgaatggcaataatctaacaaatgaaaagtatttgacaggtttatctggtggtcagggttactatggtgccccagccaactatacagttgctgtaaagtttaaatattaa

SEQ ID NO: 61079 - DNA, 153 bp, Acinetobacter baumannii
atgcagttcaaaattatcgcagcccaagatctagatagaaatcaacgtcatcagattgctgagttatgtttttctgcttttgatgaagatccttggagtcaatatacttttatgcaaggtgaaaactgcttatgtagagtatgtgaccactga

SEQ ID NO: 61080 - DNA, 366 bp, Acinetobacter baumannii
atgacttgggatgtattacattttaggaatttagaagaggcctcaacttttaaacttaataaagaggcgaggtattttttcccagcaatattgacttttgatgtaggttttcaagaaataatcgagaattttaaagttaagggattagtttataataatcttggtgatatcttcccattttataaaaaagaaatcagtgatattgaaggtttaacagaagaggaaattctaatactcagtaagcgttatttctcagatgaggcaaaaatattacggtatatggagttggaacagacaaaaacacagatcgagcaaaacgtagaaattttggaatttgagcttttagaagcagcaaatatttcttaa

SEQ ID NO: 61081 - DNA, 150 bp, Acinetobacter baumannii
atggagcattttaaaccaatagtggagcttataaaagtgtctattgaaaagtatggcttatggcaaacaatagttgcatttattcttttgttttccgtgccaatcttaatgtggaagttggatgtaattattgcttctataaaagcatga

SEQ ID NO: 61082 - DNA, 912 bp, Acinetobacter baumannii
atgagtaccaagacttctcaaacctcctcccttaactattatgtaggctttttctcaatcatattagctgctttcttttggggaacagcaggcaccgcagctgcctttacaaaaaacttaagccctatagctatctcgaccatttccgcaggtggaggcggtttgattcatgctttattaagtttaagagctattcgtctgaatactaagaaactacttgatcataaaacccaaattgctatcgcaatggtagtttcaattctttgccctttttctttttattcatcagtttctatggctggggtctcaattggtacagtagtctcaattggttttgctcccatattttccgtccttttagaatggatgtttgataaacgtaaattatcattaaaatggttattcagttttattttaggtttatctggaattattttactaactcatactggtcaaataactcatgaacaaaataatatctcacaatttgaacgatttatcggagtattatttggacttttagcaagttttagctatgcgaccaactcttggattattaaaaacttaatgaataaaggagtagattcaagagcatctatgggagttatatttggaataagtgcaatattattattacccaccctctttattactgcaccaaatttatttaattacccacaaaatatttgggttgcattatatataccttttgtacctatgtttttaggatttttattttttagctttggtttaaaaagagttcctgctagtcaagctatgacactagcattacttgagattccagttgctgcactattagctgtttttctagtaggagaaaatcttaatacaataaattattttggtttatttttaatttttttatgcgttatatttttaacaagaaaataa

SEQ ID NO: 61083 - DNA, 732 bp, Acinetobacter baumannii
atgctttctagtgttttattcgttagttatgagctgtgcttttcatttgctatcgctttatctaataattctcaacaagctattgaggttagtattgtccattacttatggcctagttttacagtacttgcatttgttgcttttaaagaaattaaatttaacccatttattgtagtaggattggctgtttcactttttggaattatttttatacaagctggaagtggagaactgactatatctggtttaatagaaaattttaatagtaatcctttaagttatattcttgctttgtctggtgcaattatttggtcattatattgtgtcgtaactaaaaaaatgagtagaggatataacccaatttcaatactttttttatctgtttcaattattttatggatcaaattaggagctagtcatgagttgattatgccctctattaacttaaatataatttgtatactattgttagcttctggagctatgggttttggctatgcggcttggaatattgggattttaaacggtaatattgcaattatggttgttgcttcttatttcacccctgttatttcatcagtaattgctatgttcgttttaaatgcaaaactttctgctactttttggcaaggaacagcaatggtaacgataggttctttaatttgctggatttcaacaaattggatcgcaatcagacctctattaggaagattaattaaaaacaacctttaa

SEQ ID NO: 61084 - DNA, 132 bp, Acinetobacter baumannii
atgtccagaaatttagcaacacttattgggcttagtgctattttaatgtgggcatctttagtaggagttataaagtatataagtctattaatggattctagtttggctatcactttcctaaaaactatttga

SEQ ID NO: 61085 - DNA, 789 bp, Acinetobacter baumannii
atgtcgttaaatattgaagcaattgcagatcgattaatcgaagctcgaaaaactaatacacccgttgataaagtatttccaactgaagatggattaagtgtggctcttgctattcaggtccaacaagaaattattcgtaaggaagttgaggaaggcgggcgtattgctggttttaaacttggcaatattgcagctgctatgcaaaataaatttggtgtagaccaaccagactttggctatttaatggaaagacttttccattttgagcgtgtacctgtatcaccagataattttatttcgccctatgtcgaattagaaccagcctttgtattaaaacatgatttacaaggttcacaagtgactgttgctgatgttatttctgctacagactatgttcttccagctctagagattattgattcccgtgtcaaagactggaaaattggtatctatgacactttagctgattgtggttcagtcggtggagttattttgggtgctcaaccacggcagctgagtgaactagacttaacgaatactgctggtgaaattctaattaacggaaaagttgttgctcaaggtaatacgggagatatttatggtaatcctgtgtctgcaatagcttgggtgtgtcgccgtgttgctgagtttggaattggttttaagaaaggcgatattattcttgctggtagttgtttagcagcagttgagatgacaccaaatacagcaattactggacgttttgctaactggggcgaagtctcttttgaataccgtaacggtaaataa

SEQ ID NO: 61086 - DNA, 939 bp, Acinetobacter baumannii
atgacgactaatcaaattattggaccggctgatcaaagaaaattgtttagcttattacctactggtgttgccgcaattacaggtgttacggaagatgaaatgccgattggtttagtggttggaacttttcaatcgctgtcattagaaccagcattagtaaccttctgtgtagataaatcttcaagcacatggcctgcattacgtgcaaaaggaaagttcactgcgaatatcctatcaactgagcaaatggatgtatgtaaagctttaggacgcaaaggggaggataaattcaaaggattatcttacgaaaatagcccgattggtacaccacgtattcataagtcagtcgcttgggttgattgccaagtattatcggaagtgattgctggcgaccattttatgattgtaggtgcaataaaatcttatcagtttgggcatggtgatgctttagcttttagcggcggtaagttgtcagaatgtgtaccgttacaagcgcctgaaattaaaaatgaaaatgatgtgaatctagctgcacgtattactgatgtgtggtcgaaagcatggggtgagggtgatgtcgatgcttttgcaagtatcgtaagtccagactatgttcgctatgccaaagacagtgaaaagtttaccttggcagatattcagcaacagatccaagattcacatgccgcatttactaatttcaaagttgaaatattacatactgttgaagaagaaggaatgattgctttgcattggagaactgttgcaaaacatactggtgcttttatgggggttcctgcgactcaacgtaatgtcacagtatttggttcatcatttatgaagcataaaaatggcttgattactcaagaatgggttgtatgggatcctcgtgagttattggcttcgattgatatctggcacttaggtaataaagcagtttaa

SEQ ID NO: 61087 - DNA, 1374 bp, Acinetobacter baumannii
atgaccaaacaaattaaattttttgctttcgattttgcagcaccagcacatttatctgctggtctatggcgccatccagaagatcgaggtagtgaatataagtcagtaaaatattgggttgaatatgctaaattattagaaagtgcttgttttgatggtattttctttgcaaataatgatggttatcacgataaatataaaggaagcgttgatgcagcactaagagatgttgctcaaatacctgcaaatgaacctgcatatattatttctgccatggcagcagcaacaaagtatttaggttttggtgttacttcttctacagcgtatgaccaaccttataatttagctcgtaaatttgcgactttagatcacttaactgatggtcgtgttgcttggaatttggttacgtcatattcggatagtgctgctcgaaacttaggaaatggtacacaacgtgaacatgatgaccgttatggacatgcagaagagtttattgatgttgcattaaaactttgggaaggttcttgggaagaaaatgcagtcgtaatggatcgtgaaaattgtacatatattgaacctactcgtgtacatgaaattcatcatgaaggtgagcactttaaggtgcctggtatttttgtatgtgaaccttctgctcagcgtactcctgttattttccaagcaggtggttctccacgtggagtagcatttgctgctgcgactgcagaagcagtattcttaaatgcttcaacaaaagaagcattaaaaaaacaagttgataatctgcgtgaacaagcaattgcagctggtcgaaatcctgaccacatagcaactgtgcaaatgattaccgtcattgcaggtcggactgatgaagaagcacaacaacgttatgaagagtataaaaagctagttagctacgaaggagctatggctcgttatagtggttggattaacttagatatgtcgcaatttgatcctgatgtaccactaaaagatgttaaaaccaatgcaagtcaaacaatggttaacttcttctcaaaaatggatcctagtaaagaatggacaccacgtgatattgccgaatatatcgctattggtggaacttctcctgtaattgttggagggcctgaaacagttgtgaaggagttacaagcttgggttgaagaaactggtgtaagtggttttaacatggcacatgccattaaatatcaagatattaagaactttattgattttgctgtaccagagttacagaagcgcggcttgatgcgtacagaatacgacggtccaacattacgtgaaaatctattcggtaaaggtctggctcgtttagctgatgaccatccaggcgttaaatatcgtaaaaattcagcttaa

SEQ ID NO: 61088 - DNA, 1461 bp, Acinetobacter baumannii
atggcaactgttactacaactcaagaagtttttgaaaacgtcagtgcagcgcaatctgcatatgaagcatcacgacaagtttcaccaaaaaagagagcagaatggttagatgccattgcaagaggattgggacatcatgctgatgaactgattgaaatagctcaaaaagaaaccaatttagatgttgctcgcttacaaggcgaaatgaagagaacaatttttcaattacaactatttgctaaagaaattcagtacggaccacatttcgaagcaacaattgaccatgctgatcaaaactggggcatgggaccacgtcctgatattcgtcgtgtaaatgttcccttaggtgtggtcggcgtattcggtgcctctaacttcccgtttgcctttagtgtaatgggtggtgatagcgcttcagctcttgcagcaggttgtgctgtggtacacaaagtacatgatgggcatttaacactcggcttacgcacaggtgaagttgtcattgaagctttgaaaaaagctggagcaccagatggtttattctcggttattcatggtcgtgttggcgcagaagctttagtagaccatccattagtacaagcgattggttttactggttcacttgcaggtggccgagctttatttgatcgtgcagcacgtcgtgaaaagccaattccattctttggtgagctaggcagcattaacccagtttttgtaaccgaaaaggcatgggcaacacgtcaaaatgatattttgacgggctacgcaaatgcagcaacgatgggtatggggcaattctgtaccaagccaggtttattatttgttcctcaatttgaagcagctgaaattgtttcagttctgcaaaaagaattttcaactaagaaatttgctccattacttactcctaacttaagaaaaggttttgaagcttcattatctcaagttcgagctttaaacaatgttgaagttttagttgaaggaaataacgctgaagcaccatcacctactatcttaatgacaaatgttgaagcgattagaacgaatcctgaaattcttgaactcgaaatgtttggtcctgcaagtgttatcgtccaataccagtctgagaaagatttgactgacatggttgccttacttgagggacaattgacttgtacattacaagctgaaaatgatgaagctttaggcgatttaattgatgtgattcacgaaaaatgtggtcgtgttttatggaatggttggccaacaggtgtaactgtttcatatgctcaacaccatggtggtccttacccatcaactacttcatcagctaaaacttctgttggaataggtgctattggccgctttatgcgagcagttgcttatcaaacatttcctgatgcgatgttaccccctccacttcaagaaagtaatccatggaaaatcattcgtcgcattgatggtcgttggattgaggctcaataa

SEQ ID NO: 61089 - DNA, 579 bp, Acinetobacter baumannii
atgtcttattttaatttttgtggcagttgtggacagaaaacctcttggattattcccgctggtgatcataacttgagacaagtttgtacttcatgtcatcaaattcactataccaatccaaagatcgtaagcggtgccttagtgacttgggaagataaagttttattgtgtagacgtgctattgaaccacgttacggttactggactttacctgctggatatatggaactaggtgaaacgatggagcaaggtgctacaagagaaacatgggaagaagctgaagctaaaatcgaaattgaaaaactcttttgtatgtataactttccacaaattgggcatgtatatgtcttatttaaagctcaattaatcaatggagttttcggaaacggttcagaaacgattgaatcccgcttattttcagaagatgaaattccttggtctgaactcgcattttcaagtatcagcgaaacattaaaacattattttcatgatcgaaaaaaaggaatgcttgaatttcatttagaaactttgaatccgcaaatgtctcatgcttttttagaaagtgctattcccgtataa

SEQ ID NO: 61090 - DNA, 807 bp, Acinetobacter baumannii
atgtctaagcaagatgagctcaatgaagaattaaatgaaaaagacgcagagacacctgaactgatcaataaatcagtaattaaagcaacagtcttgcttagtaagcttggtctacaccctcaaggaattactgtaactgagttagcccaagaagtaagaatgtctagacctacgacttttcgcttgttatatagccttgaacaaactggttttgtggagcggtatgacaataaatataagcttgggtggaaaattgcaagattgggcaaattagctgatcctcacagtggagtcatctctctaatccaagatactttgcaagcattagctgatgatttaaatgaattaattagttatgcagttgtaaatggcgaagcagactttgatattattttagaagtttctggttctcgttggtatgctttgcaaggtggaattaaccaagatttacctagacatgcgagtgtaactggcaaaattgttcttgctgaattaagtgatgaacaagttgaaagtttattaccatcaaaactaccggctgtagcaagcagaacaataactgatcgtgcagaattcattcgtcatcttcaacaaattcgcgttcaagagtttgcgattattgatgatgagttagaagatgggttatttgcagtaggtattggggtacgtgatcattcaggtaaattaattggagtgttaggagctgcgggtcctaaacaaagagtactttcccgatctttggtacacattgtaaatgagctacaaaagacagctaaagaaattgtcgaaaaaatagctcaactataa

SEQ ID NO: 61091 - DNA, 1317 bp, Acinetobacter baumannii
atgggcccaataggaaatacgggtaataaggttgcaacaaagcggagttttattcataaattaacttggttaatggcaggcggcatgtttgtcgacggctttgtactgggttatatcggcatggtaatgccagcaattactaaggatttaagtttaactttaacttggcaaggcctcattggtgcggctgcattatttggaacacttattggagcgccattaggtgggtggttttctgatcggattggtcgccgtagaatgtttacatttgacttattcttgttcctaatctgttcagttgcacaattttttgtctccgacccatatactttatttgttgtacgtttcctaatgggggcggcaataggaattgaatatgcagtaggttggccattacttgcggaatttgctccagcacgtatacgtggaaaactattatgtttaactgaaattgcttggtatttcggttatttagtctcttatgcaatgggatttttcttaacaacactttgggatacgcactggaatattattttaggactcagtacgattcctacgcttattgtatttattatgcgtttaggtacacctgaatcacctcgttggttaatgagtaaaggacgaactgaagaagctaaggcaatcgcagctaaatatatgggtgaagaagaacaggaggatgtgttaaatcagaagcatgatttgacaaaaaataatgctggtttcttagacttgttcaaatcaagaaatttaaaaggcactatcttttttgtcactatgtttgttggttcagcaactccatacttcgcaattggtttctttgttcccactgtccttgaaaaattaggtgtgaaagatggttttgctggtggcttattcctcaatatgttggcagttattggaacaatcgtctgtgcctttttgattgaaaaagtcagtcgtcgcaagatgtctattattccatttgctattacgactgtagctttacttgtaattgccttagttagtaactccactattattatgctttgtttccttattttttcattcgcaaatgcgattactggaacaattcttgccgtttatcctggagaagtatttactcaagatgtaagtagtttaggtacgggttttggtacatcaatgtctcgcgtcgctgcttgtattgggaccttccttgttccaaccattattgctggttatggcgtacaggtagtaatttgggcaaccgttgcgatctcattatttgcgacatttattgcttttaccttgtgtcctgaaactaaaggtaaaaaattgagcgaaattttccattaa

SEQ ID NO: 61092 - DNA, 4872 bp, Acinetobacter baumannii; identical to SEQ ID NO: 46701

SEQ ID NO: 61093 - DNA, 3147 bp, Acinetobacter baumannii
atgttgaacagtattcatcaagttttagatagtttgggtattagcccgcagaaacgtgctattcatgttcaatttacgtcttcgatattgaatgcccaagtatttctgcaaagaattgatggtgtacatgcactcaatgatggtttaaaagctgaacttttatgcctatcgacaaatgcaacgattcaacttaaatcttttattggcgttcaggctgctgtagatattgtgacggagcgaggtgagttaactcgcgttacaggcattattactcatgctcaacagggccaatcagatggaagtctaactttatataagctgaccttagaagatccaaccgcattatggaaatatcgccgtaattcacgtgtatttatgaataaaagcgtggttgagatatgggaaatattatttaaagaatggcaaactaaaaatccgctatttgctgcaagtttaagtttagatttaagcggtctaacacaaacttatgatgtgcgtccttttgtgatgcaacataacgaaagtgactggaatttccttacacgcttacttcgtagtgaaaatatcagttggctcattgatgaagctcagcatattgttccaagtaccgagacacctattcaagctcagaaactcaggttaattgatgccaatagtcaatatcagcctttagaccgtaaaacgattcgttaccaccgtagtagtgcggtcgaacaatatgacagtatgactcgcttaactgctgagcgttcccttcaacccaatgttatgcatatacaacgttggcaagcagaaatattagatcaagaagaagggattggaagtgttcaaagtaagcatcagcatagtgaacattatgacaatgctacacttggcttggagcaagcttggaactattcgcctgcatggattggtgacttaaagggtgaggatggggttactaaatctggaaatcaacaagttgaacgattaaaccagaacctcaacaattattatgaagcacaggctaagcggtttattgcacaaacaacagttcgtgatgcctatgtgggctactatttcgaattaaatgaacatccagaaatagatcagcatgaaagcacagatagaagctttttgattatctctaaaagttttttcaatcagaacaacttacctaaagacctgaatgatcgaatcaatggtttattggcgcaaagtaactgggcaatacaaaaccccgagaacagtgatgaacgtcaagcgaatcaactgattttacaacgtcgtcatattccaacaacaccagcttataacccgcaaattcatagtccagtcactcatccacaacgcgcaaaagtggtgggacctgaaggtgaagaaatctatgtagatgagtgggggcgtattaaagtccgcttcctatttacgcgtagtgatgaccatagccatgatggtggagcaggaaccaacaacaatgacaccgattcagcttggattgacgttctaacgccgtgggctggagaaggttatggtgtacggtttttaccgcgtatcggtgagattgttgttattgacttctttaatggcgatatagaccgaccatttgtaatgggtcgaattcatgaggcacagcgccaaccaaccaaatttgataacaaaggtaagcttcctgatactaaaaagctcagtggtatccgttctaaagaagtgtcaggtggtgggtttgggcaactcagatttgatgatacaccgggacaaattagtacccagctacaaagcagtcatggtgcaagccagttaaatatggggaaattgagccatcctaaagataaagcggaaagtgaagaccgcggagaaggttttgaactgcgtacggatcaatggggagcattacgcgcggggcaaggtttattggtatccacccataaacaggataatgccaaaggcgaacacctcgatgccgaagtggcgaaaaagcaacttgaaggtagtcaaactaacagtaaggcactgagtgacattgctaaaaaccagaaaaccgatgaaatagaatcgattgaacagttaaaagattttgcctcacaaattcagcagcaaatcgctaaatttgaaaaagctttacttcttttgagttcaccggatggtatagctctaagtagttcagaagatattcacatctcggctgatgcacaaattaatcagattgctggagacagcattaatataagtactcaaaagaatgtgattgcccatgcccaaaataggctcagcctttttgctgctcagagcgggctaaaagcagtagctgcgcaaggtaaggtagaaatacaagcccagtctgatgctttagatgtgcttgctaataaaggtattacgatttcttcgacagaagactgcattgaaattagtagtcctaaagaaattgtaattactggtgcaagttcacaaattaccttaaatggttcaggaatctttccgaaaactggtgggaaattccaagtcaatgctggacagcatgtgttccaaggcggcgcatcggcaagtgttaaatctagtttgccaccaccaccaaaacgtgcacaaggtgtacttgagcttttgcacgactattcacatggagcttttgttaaaggagctggttataccgtaactgataatttgggcaaagtcgttaatggaaagctagacgataaaggatttgctcgtgtttcaggtttggcaacgggctcagtgaaggttctttttgatccagatccgcgtaatccttgggatgaggcaagtgattttaaacgcaaggtagagtggccaaatcaaaatgacgtagaaggtagcattggtattgaatctggcagtaaagggttaactgaaacattgaaaaatgactttaaaaagttgagtcaacttgcgagcaatgtgaaatctgtgcagcagaagattgaatcggttaaaaaaatcaaagatcaaggtgctaaagcattattgccaatggcgatggaacaggttttaggggggagtgatggatctaagttaagtcaatcatttgttagtcaaaatagctttatgccttcaagtcagcagagtaacccactcagaagattggctcaagcaagctctgacaaaacagcaataacaaaaatccaatcaccttttgaaacgtttgtataa

SEQ ID NO: 61094 - DNA, 534 bp, Acinetobacter baumannii
atgaccgacatcctagatctttcaaactggacagtattagatgccaagcatggtgatgaactgattattgaggctgaatacacacggtatcctgatgcttgcccaaaatgtaatagctcaatctataagcatggaactaaaacagttgcataccgtgatgccccagttcgaggtaaaccagttgtcatccacgccattttaaggcgttttagatgtcgtgattgtcgtttcacctttactcaacctaccaatgcaatgcatccagaaatgcgcatgacatggcgctttgactttcatattgtgaaattgcgtttgctcattgaaattgaaggtagtccctggtctggtgggcgtggtggaaaactgtcaaataaagcatggagtcttgatcgatatgatcatgctgaagagatgggttacaaaatagagcgctttcatccagattctattttgtcgggatatgtcatcaactggataaaaagtgaattagcgagaattgaagatggatcagatcagaccatttcctccaactga

SEQ ID NO: 61095 - DNA, 789 bp, Acinetobacter baumannii
atgacaagtttaacacaattcactttccacaatgaatacaacgtccgcatcattgatctaaatggtgagctttggtttgtagcttccgatgttgcaagcgcattagattaccgtatggcaagtgacatgactcgctttttagatgacgatgaaaagggtacgcacaatctgcgtaccccctctggaagtcaggatttaacgattatcaatgaatctggactttactcagcaatccttaaaagccgtaagccagaagcgaagaaattcaagaaatgggtgacttctgaggttcttccatcaatccgtaaaacaggtaaatacgaagcacctaagcctattaccccacgcaactacatcaacaataatgacatgttaaacattaagcgtttaatttggtgctgtgcaggtcatttagatcagaagcaatctgtcagtagtgctatttggtattcacttcgtaatgtgactggtgtgccgagtcctgcgaaatttgaagttgagcacttaccagtactggcacaagagtttaatcgtattcttagtatcattgagccgtatctaaaagctcgttacgcatgtgaggaagcgttaattaaacgtctacttcgggaccgtgaagatgctcaatcattattgaccaaattgcttgatgaaatgaaagaatctacatcggaattcaatacagctttacagaaacaattaccaatggtttttcagggtgattgtttaaatctggttgaacgtaaaccatgtggtattgatcaccacgaatttaatcgttgggcttaa

SEQ ID NO: 61096 - DNA, 273 bp, Acinetobacter baumannii
atgttttttgatatattgaatgttcttgataatttggcattaaaaatgaaaataagtgactacgttaaagctactgttaatgaaaatggctttggattctctggcgttagtaaaagtgatcagctggaccactatttaagtagtactgactatgacagaacttcatatgaatttaatcatgctcgaatgattttgatatatgaagcaaatctcgatcaagaagttaaagagaagattaataaagcattccagaaaacactaactggagaataa

SEQ ID NO: 61097 - DNA, 297 bp, Acinetobacter baumannii
atgaatttaaatgtagtttgctttggcggtcgatttgatggtaaagaaatatcacgttcaaaaatcgatcatgtacaaaaaagtatcgatttaagaatcgagagaaaacctgggtttcaaactcaggttaatatttctaacaatcctgaaaccgaaaaatatgttctaagagtagttagatttcggagtgagtttaaggatgttttgattaagaaaaatgactctattgaagaccatgtcgaagctattaagcaaaaatgggaagatttagaattaattggattcgatttagattaa

SEQ ID NO: 61098 - DNA, 336 bp, Acinetobacter baumannii
atgaaagcaactaaattgattagagataaaggactgcaatacgcgaaggaaatcgtagattcagccccttctaacgcaactgaatggaatgagggttatgagttccaatgtggtcaaagtgtagaaatcagcccagcagatcgtgagaagtattttgtagacctttctgaactcaagcgtctggtggagtctttgggttatgtaagcagatggggcggcattgaaagatgcaagaagctttactttgaagctccattcaaaagagacaagcacataaaagatttaaagcgatacatccgcgattacgaatcaatatacggaggcggggatgagtaa

SEQ ID NO: 61099 - DNA, 198 bp, Acinetobacter baumannii
atggaacggttaaaaatcaatggtcgtaaacctgcaccagtacaaaagcttaaggctaaggaaaaagagcctgagcttacaaaggaattagggccagatccttttgacaatccgcacgaatacgtcgagatgtgccgccgggagggcatgccaattcctagaaatattcagcaattgattgatggggtgaatgtatga

SEQ ID NO: 61100 - DNA, 204 bp, Acinetobacter baumannii; identical to SEQ ID NO: 46668

SEQ ID NO: 61101 - DNA, 408 bp, Acinetobacter baumannii; identical to SEQ ID NO: 46148

SEQ ID NO: 61102 - DNA, 318 bp, Acinetobacter baumannii
atgaaatttaaaatattattattaagttttattgccaccagttgctatgctaatgaaagtacagctgacccagatatttgtaatatcgtaaaaaaggttgcttataacgtgatggaagcacgacagcaaaaagtaccagcacaagatttacaacaaattgccgatgggttagcagatgaaaaagccaagcagctttatcaagacttaattagctcagcttatgctgccaaagtatttaagacaagtttctttaaacgccaagcaattgaagattttcaagcagggtggtatgaggaatgtttacgtagaaatgaataa

SEQ ID NO: 61103 - DNA, 342 bp, Acinetobacter baumannii
atgaagttaaaaattttaacaatgatgttatgtgtggcattgctcagcggatgtacgaaacaggcagaatctgaggcacctcaaattgattataaagctcaatttgaagagtcggaccgaaaaattggtgaatttttagatcagttagataatccaaatacccctcaagaagttaaagttaaaattttatgtcatgactatcctgaggtgtataaaaaacaatacatgcctgcattaataaaagtttcaccaaaaccgtatactgaagaaaaattattgtcagatttgaaaagtgcaactgactactataaagggactttggggataaaatgcaatgaataa

SEQ ID NO: 61104 - DNA, 585 bp, Acinetobacter baumannii
atgaatgaattaagttttattagaaaaaatttaagatctagaagacgagctttaacccaatttgagcaaaaacaggctcagcttaatgttttacattacctaaatcaccttcctatttttcattcatcaaaaaaaatcggtttatatctgcatgcttttggtgaaatccataccgatcttcttatcaaattatgttttaaaaagaacaaacaagtttatttacccatgatttgttcgatgaaccaacgtttagtatgggtaaaaataaataaaaaccaatatttaagtcgtcgtttttcccatcacccattgggaatgaaagaacctatggcgactcgcggaaaacatgtatcacagcttgatttgctacttatgccacttttagcttgcgatcactatgggacacgtattggtatgggtggtggttattatgatcgtacattggcaagtgctaaacataagccctaccgtttaggattggcacatcaatttcaatttattgaacacactttagaacgtcaaagttgggatcaaccgttagatggtttactgactccacagcacttttattattttaaaagatga

SEQ ID NO: 61105 - DNA, 2874 bp, Acinetobacter baumannii
atgtttattaaaagtattttatcttcgattactagtattatcccacttcctgaaaatagtaacacaagcagtaatttaggtaacggctctggtgacggcctacttaatggaatatcttccggaaatggtgaacacaactatggtattggcaatggtattgccgatgacgcaagcattaccgccccaattaccattcccctcaacctctctggtaactcaattactctcataggcaattcatcttcaagttcggtgaatagctctccaaccaccacttcaaataacgttaatgacaacgatgtaacaaataatggtaacggctctaccattggtagcggtacaggcaatggctctggtgacgggcttttaaatggcgccgcttctggtaatggtgaacacaactatggaatcggtaatggtattgccgatgacgcaagcattactgccccactttcaattccaattaaccttgcgggtaactctattaccctaattggtgactcatcttctagttcggtcaacaactctgcaaccaatacatcaaataccgtgaatgataacgacaccacctataacggcaatggctcaggtggtggtaatggttcgggcgatggcttgttaaatggaattggctctggcaatggcgagcaaaactacggtatcggaaatgggattgcggatgacgcaagtattacagccccaattacgcttcctattaacttgtctggtaactcaattactctaattggcaattcatctgcaagttctgttaattcctcgccaactacaacgtcaaatactgtgaatgacaacgacaccacctataacggtaatggtactggtgatagcggcgtgagcgctctgggcggttctggcaatggttcaggtgatggcgcaggtaatggtatcgcttctggcaatggtgaacataactatggtattggcaatggtaacggcgacgatgttgatattactgctccgattaccggcgttctaaacatttcagggaactcatttactctcattggtaattcttcatcaagttctgtcaataccgcaccaacaaccacatcaaatacagtgaacgacaatgacaccattgataatggtaatagcggcggcacaggtagtggttcaggcaatggctctggtgatggtttacttaatggcgctgcttctggcaatggcgagcataactacggcattggcaacggaaatggtgatgatgtagatattaccgcaccaattacaggtgtttttaatttctctggtaactctttctcaatcattggcaattcatcttctagttcaattaatactgctccaactacaacgaccaatacagttaatgacaatgacgtaactgataatggaaatgatggaggcggacttgttggtggaagttctggaaatggctctggtgacggactgttaaacggcgctgcttctggcaatggcgaacacaactacggtattggtaacggaaacggtgatgatgcagatttcaccttccctcttactggtgtacttaacttttccggcaactcgctttcaggctttggcagttcatctagtgactcggtaaatgttgcaccaaccacagcaaccaataccgtcaatgataatgacaccattgataatgccaacacaggcagccttggtgatggttcgggcaatggctctggtgacggacttctaaatggtgcagcgtctggtaatggcgagcataactatggcattggtaacggaaacggtgacgatgcagactttacgcttccatttactggcggtttaaatattttgggcaatgctttatctggtataggtggttcttcgaccgactctattaatatttcaccgacaactacttcaaacacagtcaatgacaatgacactaccaacaacggcaacacttcaggtggtgtgattggttctggcgactcaggcaacggttctggtgatggcttattaaatggtatttcatcaggtaacggtgaacataattatggcattggcaacggtaatggcgatgatgttgacgttgtggcccctatcacgacaccaattaatgtattaggcaattctttctcatttattggtggtgaaggtacaggcgatatcttaggtccgattacaggcgttattggtggtattggcggtgatggagatatcttaagcccgattactggcattatcggtggcataggcggcatcggtggtgatctaggcgataacccacttacaggtattattcaaagcggtattgacgttctacaaaatttagaaagcctaaaaacaggtttgattaatacaggtattgatacgattgccggaacaattattggtgtgttccctgatgcagagcaccctgtcggtgattttgcagaccttggaaagctacttttcgagacttcacgcgatagtgttaacggtacgcttgaggctatttctgaccttgcaggcgctgaccttgagggtgcaagtggctcgattactggtgtaattgatacccttattaccaatggctcaacggcatctaccattattcagcatattgtaggtgatgacctagtcactgaaaacggtggcctattgggttcaatcaccacgattattggtggcgttgatagtggcgacggtggtttactgggtggcctagatggcttaattaacattaactatggcgactcagacaatagtaactctgtagatgtagaagatattttaggaaatattcttggctcggtaggttcaaatcaaggtattgctgttggtgaacctgatccaacgggcggtagtttgattcatacgatttcacttaacacagtaaatcagttaactgaccaacttttacatgctttaccgactgtctaa

SEQ ID NO: 61106 - DNA, 735 bp, Acinetobacter baumannii; identical to SEQ ID NO: 46936

SEQ ID NO: 61107 - DNA, 744 bp, Acinetobacter baumannii
ttgatttatccttacattgattttcattgccatttagatttatatgatgatccacatgctatagctaaagcatgtggagattctaaaagttatatattatctgtaacaacaacgcctaaagcgtggtttggcacagataaattaactcgtcatagtgcaagaataaaaacagctttaggtttacatcctcagctagctcatgagcgttacgaggaacttagtctatttgattcattagttagtcaaactagatacattggtgaaattggactagatggttctcctaatttcagaaatcatgcagaaatacaaaagaaggttttccttcatatattaaaaaaaataaacagcgaatcacctaaaattttaacaatacatagtcttaaggcgacaaaaccagttatagaactcttaaatgcaaattttgataacggtataccagttctacattggtttacaggtaatctttctgaattaagagaggctttgaaagctggatgttggttttcaataaatgagcgaatgttaaaaacagaaaaaggacgacagctagtgaagcacatacctaaaaatatgattcttactgaaactgatggcccatttattgtgaaaacaggtgctcctttactaccaggtgaggttcaatctactcttaatgaacttgcagatatatggggagttgatccaaatgaagcaactgctcaaatttacgaaaactttaagaatcttcttataaataattaa

SEQ ID NO: 61108 - DNA, 297 bp, Acinetobacter baumannii; identical to SEQ ID NO: 46745

SEQ ID NO: 61109 - DNA, 720 bp, Acinetobacter baumannii
atgagcaaaattccattaagtataattacctttttcagtttgactttagttggttgtcaacaaatgcaggaagctgcaaattcaactgtaaaaactatttctaaaggagttcaagcttatgatgggtgggtgagtaatggtacagttaaggtttggaacgatatgcgggatgaaaatattcgcaataagttcttagtactttcttcacaaggcaataataacgtcatcactctaaactcagctttattaaaggataagtacaaattagagaaacgaactttcgatgccatctttctagaaaaatatattactcaccaagctaatttttcagaagtaaaccgtagaattaataatggtatctatgtttcagaaaaggacttggctgcacaactttttattgagcaggcattagctagaggtaatgaagttcgtttatataagaaagatgtaaatacatcactgaataataatttgagacaagcgattacagcctataatggtgcatctaatcgttatgatgtagatccagctctaattgaatttgataaaaagggtagtccagttgcgattatgactcgttcttggcaaaccatctcagcaattggagtcgatagtcgtatatacaccaatgtttactttggtgcagatatgatgcgttggtttgaaaataattataccaatcgttacttggaaaataatttgattcgaacatatcgttaa

SEQ ID NO: 61110 - DNA, 213 bp, Acinetobacter baumannii
atgcaagatttatctataaaagttggacaattaattcgtaaaaaacgtaaagagaaagaaatcagtcaggaaaaattggcattactctgcaatatagatcgcagttatctaggccgaattgaaagaggtgaggtcaatattacgatattaaaactgtacgaaatctctaatattttaggtgctgatcctaaagagtttttacctgataattaa

SEQ ID NO: 61111 - DNA, 258 bp, Acinetobacter baumannii
atggcgcatagaggccagataggtgaaaaagtaaaagaagcaagaaaaagcaaaggctatacacagcagaaactatctgaattaactagaattaataaaacaaccatatctgaaattgagaacggtcgttttactggttcttttgatatctttgaacgtctattggatgaagttggattacagtttgaggtcgtgcaaaagaagcatattttacctgattgggatgaaattgaagcgctatttacagagaaggattag

SEQ ID NO: 61112 - DNA, 675 bp, Acinetobacter baumannii
atgtttacacattacctatcccattctaaaggacatatttttgtcgtaggtgatatccacggttgttattctcttctaatgcaaaaattagatgaacacaattttgactttgataatgatttacttatatcagtgggtgatctaatagataaaggtcccgaaaatatcgattgtctaactcttatcaaccaaccatggttcactatgattcgggggaatcatgaggaaatgtgtatcttaggaaaaactgatcttagaattcgggatatacacttaaggaatggtggtgaatggttctactcattaccacaaaataaacaattagaaatttctgccaccttttctcaacttccaattcttatagagctaaaaacctttagcaaaaaaattggctttgttcatgcagatatagattgcaatgattgggagttattcaagaaagacgttgagcaaggtaattatcaaatatctggactacagtcatgttatcaaaaagcgctatggggccgagatcgtattcgtaactattgtgaagatcatgaaactgtccgaaataaagatgaagtctatctaggacatacaatcgtaaaagcccctatccagctagacaattgtttttatatcgatatcggctcgttttggagcaaagatctgtttataaaaaaactcacttga

SEQ ID NO: 61113 - DNA, 252 bp, Acinetobacter baumannii
  misc_feature (224)..(233): n is a, c, g, or t
atgaataaatcaatggtgtatgcctatactggtgttgtaatcacaatgctgttttggggctcggcatttaatgcgatgtcttatgtgattcaatatatgccacctctttcagcagcagctgaacgttttacaattgcaagccttggtctatttattctttttgcagctataggaaagctacgttgggccgcattacggcaaaatttagctatctatcttattannnnnnnnnncttattattggaattatag

SEQ ID NO: 61114 - DNA, 2322 bp, Acinetobacter baumannii
ttggatgacgattttaaaaaacataagcaaaacttagttgaagaattgcaaagtctgtctgtagaaaagtcttttaatgaagatcctctaatttatgctcgtgtagaactacaaagttctgcatgggcaaaaagccataggccgactactcaaatgtttcctacaaataaaatacgtactatgagtggaaacgaattagggagtttaattgtagaacttaagaaatcagatattgctgcaatacaagaaaaggtattgtcagcagaagatgaaactaattgggttataaatgagaaaactaagaagttagaatctaaaccacgaagaatcagaagtgaagtgggtgcaattactcatattcaactttattctagttcagataggcgtaaattttctattgaacaagctatgaaatggcttaacgatcctagaacaggaaattcttattacatcgaaacttttttttctgaaaaagcatgggacaaaaataatgaccatgaacgtgcagagttagcacaaaagatgatggcagattttcataaaaaattgaaatcgttaaaagtcccaattgaagttagtatggttaataccgagtggacgcctaatgctttgttagtaataaaaatgataagagaaggtggagcttccatacaagatcatcaagcattaattaactttttagatcaacaacagatagttagaacaataatactacccccaattctacagtcagcaaatagccttggtaaggctgaatatcctatatcattagtatctcctgaattagataatttacctgttgttggaataattgatacaggagtagctgatgttagtaatttgacaagctggaaagtaggcggagctgattttttggatgaggaggatcaagaactctctcatggaacttttattgctgggttgattgctggtggaagtgatttaaactctaccaatgagttaaatgaaaaaagttgtaagttttatgatttaggtcttcatccagcacatacagcttatgcaagctattatccacgtggttttttagattttttagagcaattagatgaggaaatttctattgctgtaaaatctggggttagaatttttaatatgagtttaagcgttgagcttcctgtagaagataatagctacagcctatttgcgaacgttttagatcaaatatcagataaatacgatattatttttgttttaccaacaggaaatctgacagaggttactcttagaaaaccatggccatctacagatgatgattgcttaaaacttttagcagaatatagacatcaaggtaaagacaaagtctatcaaccagctgagagtctacgatctataacagtcggtgctgtagatcctatatgtccattaggccatttgagaccttcaagatatacaagaaaaggacccggaccatcttatggggtaaaaccagatgtagtgcacgtaggtgggcggtatgaagcaaactcaggtttgttttcaataagtaataatggcgaattatttcaggattgtggtactagttttgcatctccattggttgcgaaaacattagccgcattagatcattcaattgaaggacgcattgaacgtgaagccttgtctgctttattgattcataatgctagaataccttcatggttagagtctaaaaaactttcaaagattgctaaagattttgttggagcagggttgcctcaaaactcttctcaaagtctgatggtatatgataatgaaattacaatggtttttagtgggatgttatctcaaagacagaaaatgatttttgatttttcttggcccgcttgcttggtaaacgatgctggaaaatgtcgaggaaaagctaagcttaccacagtatatagacctcctattaatagagataatggagctgagtttgttttagttaatatagactcttggttaagacaagaagatatccatccaacaactaagaagattacttttaaaaataggttggtttcagagaactcggattatggtttggaaaaagagagaataacagaaggcgttaagtggtggcctgttaataaagctgaaaaaatttttcctcgtggtataggttcatcatcacaatggagattagtgattgagccattagctagaagtggatatgtaattgaagaacctatacctttctccgtagtgcttacaattagtgatcatacaaatacagagaatgtatttaatgctgtaagaagccaattccaagctagtggtgtgcagatttcagatattagaactgctctacaatcacgattaagacctaatactcggggttaa

SEQ ID NO: 61115 - DNA, 186 bp, Acinetobacter baumannii
atggaaagtatgaattatgcaaatgccaaagcacaactttcacggttaatggatcaagccctttatggacagccagttgaaataaccagaaaaaatcgtgagcctgtggtaatcattagtaaagcgtcttatgaggcttataaaaaagcagatttttataaccgctttcctgaagattcgaaataa

SEQ ID NO: 61116 - DNA, 741 bp, Acinetobacter baumannii
atgactcgttttgaagggaaagttgctcttgttacaggcggtagtactggtatcggtaaagcgatttctaaacgtttaagtgatgaaggtgcaaccgtatttacggtgcagcgtcatgaagacaaattgtttaatagcattgttgcagacttatcaaacccaactatcccgaccaaggtgattcgtgaagtcatttaccgtgctgggcgaatcgatctattggttaataatgcaggaatgatgaaagagttttcagttgagaatatgccgttacatgtttggcagcatcatcttaatttaaacctcactgccccatttctattaattcaagaagcacttccttatttacgtagttcgcaaggcaacattattaatatcgggtcaattgaaggattggcagcaaacccgctacatgcagcgtattgctcgactaaggcggggcttgctggtttaacacgtgcagtagcagttgaccatgggcatgaaaaaattcgatgtaatcttattgcaccgggatggattgataccgaattaaatactgactttattaacagccaaccagacccagaaagttttcgaaatcaagtcgggaaaattcatccattggctcgtacaggttcgccagatgaggtagcaagtttggttgcctttttagcctcagatgaagcttcttttattacgggacaaacctatgtagttgatggcggaagaatggctaaattatctcttccttcaaattaa

SEQ ID NO: 61117 - DNA, 1785 bp, Acinetobacter baumannii
atgaacttgaaattaaaattttttaagctcgccattttaagtctggctattacatcagttccttgtgcttacgcaattacgccagcgcaaccaaacaaaattttgcatgttgcctatgaggccccagatgatggtttcgatatggtcaaaaccaccaatttctatagtgctagtattgctgaggcaatttttgagcctttactcaaatatgactatctagcgcgtccattacagttagtacccaatactgtagaaagcctgcccaaagtggaacaagacggtaaagtttatatatttaagattaagccgggtatctattttaccaatgatccagcttttaaaggtaaacgccgtgagttggtagctgaagactacgtctatacaattaaacgcattttagaccctaaaaatagagcgccttctgtttcttttattgatggtaagttacaaggtgccgatacagttgtagctcaagcaaagaaaactggaaaatttgattatgctgctccgattgctggagttaaagctcttgatcgatacactctacaatttactttgactcgccaagactttaattttccttatattcttgcctatattacttttggtgctgttgctaaagaggttgttgactattacggtgaccgtattggtatgcatcccgtaggtactggtccttatatgttaagtaaatatgtaccgagaagtaaggtcgagttagttgctaatcctgattatcgtggttttgtctggaattttaagtcaacaggaacaccttgggataaccaacttgttaaggaaatgtctggaaagaaaatgccacaagttggcaaggtggtggtcagtattattgaagaagagcagtcacgatggttagcttttcagtctggacaactagactttgataaactcacagcgaatgctgttcctcaagctttagatggaaatcagcttaaagcttcttttaagaagagaggaattaagcactatccaaataaggatcctgagattacctatactatgatgaatatgcgggatccagtgatcggtggttttagcccagaaaaaatagcgcttcgtagagcaattactctgtcatacaatcaaaaagaaagcatacaacaagcttataaaagtcaggctgttagatcacaaatgtttatacctgaaggtgtaaacggatataaccctaaatataaaagtagcgtaggatataatccgctgttagcaaataaactacttgattattatggttataaaaaagcggctgatggctatcggaccttaccaaatggcaaacctttaattttaaaaatcaatacagaaaatagctcagcatcggttattcattcagaactctggaaaaaaaatctagatgcgattggcattcgagctgactttaaggtaagtaactttgcagataacttaaaagccgctactcaatgtaaatatatgatctggagcggtgcatggattgctgactatcctgaaggagataattttgcacaattactatatggaccaaatgctgggcagggaaaccatgcttgttatcagtctaaaacctatgatgctctttatactcaggccattcatttaccacctcaacaacggctcccatattacgaaaaacttaaccgtcagatagaagctgataatccttggattattcatgtaacacgaattcgtaattggttagtacagcctcaagttcaggggtttaaagctcacccaatgatgaatacaaactggcaatatcttgatatgacccctattaaaaaataa

SEQ ID NO: 61118 - DNA, 276 bp, Acinetobacter baumannii
  misc_feature (204)..(211): n is a, c, g, or t
atgtcaaaacaacctaatttagataatctagaaagtcatatccaagaatctttaaatggaataaagcttttatataaaaatagatgtttctctcaagctaaatattgtacatatattctcattgatcaattagcatggttaattagtgtttcagaaacccaagtaaatatttattttaaaaattggttgaataagtattttatnnnnnnnnaaggagtatcgtcggcagcgtcagatgtgtataagagacagttattaaacattatccagaaataa

SEQ ID NO: 61119 - DNA, 507 bp, Acinetobacter baumannii
atggataacgaatatgccaaattctttttcaatcgaaaagtagatgtttatcaactggaatgtattgaactctcacacccttcttttatgaatacttaccgggtggtacgtaatgatgaccgtggagtgtatgttcagcacaatgaaggcgcggggcaagtattttacgaatacctaccaatgacaattcaaagatccggaatgctcggtgatctggaccagactttgaccgtttcaatatctgggcttggtgatattttgccggatgagtttgaacgggtaattgaggggcaatattctaatgtaaagccgaccgtaaattaccgcctttatagttcagataacttgaatacaccaatgttttatctactaggtctacaactctccagtgttgccatgaatcataaagctgtgacattcaaggctgaatcaccaagattaaatactgcgaagactggagatatctttgcactggatcgttttagtggtttgaagggggctatatga

SEQ ID NO: 61120 - DNA, 816 bp, Acinetobacter baumannii
atggttgatacaaccaattattttaaacggaaattaaaagcaaaagagcaacagcttggtttatgggtaggtttagctgatgcagatggttattgtgcagaaattgccgcaaatgcaggatacgactggttattaatagatggtgaacatgcacctaattctgttcgtaccattttaactcaactgcaaagtgttgctgcatatccaagtcaacctatagttcgtccagtaataggagatgttagcttaatcaaacagcttctcgatattggtgcacaaactcttttgattccgatgattgaaacagcagagcaagcagagttaatggtgaaagcaacacgttatccacctgatggaattcgtggtgtgggagcagttttagcccgtgcttcacgttgggataatgttccaaactatatacatacagccgatcaagaaatctgtctattgcttcaaattgaatcaagaaaaggacttgaaaatttagatgctattttacaagtagaaggcgtcgacggcatatttattggacctgcggatttatctgccgagctcggtcatcggggaaatccagggcatgaagaagtacaaaatattattgtagatatggttaagaaaattcatgcctcaggtaaagctgctggaattttcaccgcaaatgagcaactcattcgtaaatatatgtctttagatgttgagtttattggcattggcgtagatacatgcttactaatggattcaatgaaacaattgttggctaagtttaaagagccacaagctgtagtagtgacttcatctacgggtggctataagtaa

SEQ ID NO: 61121 - DNA, 732 bp, Acinetobacter baumannii
atgcgttatagaattcattatattgatgtgcaaaatgccctacaaaactatatctggattttagaagatactgagactcatgaagctgttgcagttgatccaacagaggctgagttagtcacccacttttgccaagaacatcaattaactctaaaacagatttggcttacccattggcataaagaccatatcggcggtgttgctgatttaacggctaacacgcctatggcggtatatggcccaagagatgaactaagtaaaatccctggcattactcatcccttacaacacgatgatcatctaaaatttaatgatttaaaagtagagattattgcaacaccaggtcataccttaggtcatattgtatattttattgaagagcttaatgccctcttttgtggagataccttatttgcaatgggatgcgggcgactatttgaaggtacagcagaacagatgtaccactcactaaatcgtcttgctgcactacccactgcaaccaaagtgtattgcacacatgaatatacactttctaatgcggaatttgccttgagtgtagaacctgaaaaccacgcactgcaagaccgtgccgaacaagtccgtatacttcgtcaagaaggtaaaattaccttgccaagtagtattgaacttgaactagcaacaaatccttttttacgtgctgaaagtgtagatgagttcgctcacttacgtagcttaaaagacaatttttaa

SEQ ID NO: 61122 - DNA, 192 bp, Acinetobacter baumannii
atgaaaacagcaaatcaaatacgcaaggaatttgaatcacgaggtaagagtattgctgagtggtcaagagaaaataatttttctgagcatcttgtatatcaagtcttactctctaatcgaataccacgacgcggtaaaagccatgacatcgcagtaaaactcggattaaaagaaggagaaactaatgagtaa

SEQ ID NO: 61123 - DNA, 396 bp, Acinetobacter baumannii
atgggttttaaaccaaatgttcgcaggaatatcaagattgagaaaaatctgtttgaacaaattaaatgtgcttttcactcccctccttcgctttccaatcaactagttggtatcagaaatatttaccacggtagttttggcaaacggacagcaattcttccaagtataaaaaataatggggcaatatcccttgaaagtcagcttgaacttggacatgcaatcgaactcgagagactttcatctatctatgcataccgcacccaagcaataaaaattgaactgggaaataatagtcacgcatttccagattttttaatatggaataatctctgtctcttatacacatctcagagcccacgagacgctacgctatctcgtatgccgtcttctgcttga

SEQ ID NO: 61124 - DNA, 171 bp, Acinetobacter baumannii
atgagtttagtcaaagaagcaataaaatttgctcttgaagaaggcaataacacattaaaaattcaacatttttcgttggcgtgggaaacagatattactgcttatgtacgattatctgagcgaaaccctttcgaaatgcaaatcaaagaactaaacaattttatgaactaa

SEQ ID NO: 61125 - DNA, 276 bp, Acinetobacter baumannii
atggctccggtttttttatcacaaacttctgaaagagttcatacaacgcaatctacaaatcgttttgaatttgcaaaagcattaatgactaatcgcattgcgctccggacagcaaaaatcctatcagtttcaccagaacaaaagggaatacttatagcagaaattaaagagattcagtctcaaatttttgatatttatcgaagtcacggtcaaattgagatgactattcggaaacaactgtttgaacttagaaaagatcgagcagcatatgaatga

SEQ ID NO: 61126 - DNA, 381 bp, Acinetobacter baumannii
atgagctttatcactgaacaagaagcgatagaacatgttgaaggctttgatgctttatctgctagtgataaggctcaataccttcagatgtcagaagcttatctattagcacgtaacgttaagccttacgaggatgctacccaagtacctgaacctttaaaaatggcctcctatcaaatcatcaagggcattattaaaggtgatctatatcaagggcaagaacaggcactaaaacgtaagaaagtcaaagctgatacggttgagaccgaaaaggaatatcaggacggatcagtaaagcttagtgcgattgagcaattcattcttgatttgattaagccttacagcaaacgaaaagctgtattttttgtcaggaaaatctaa

SEQ ID NO: 61127 - DNA, 381 bp, Acinetobacter baumannii
atgagctttatcactgaacaagaagcgatagaacatgttgaaggctttgatgctttatctgctagtgataaggctcaataccttcagatgtcagaagcttatctattagcacgtaacgttaagccttacgaggatgctacccaagtacctgaacctttaaaaacagcctcatatcaaatcatcaaggggattatcaagggtgatctatatcaaggacaggaacaggtactaaaacgcaagaaagtcaaagctgatacggttgaaactgaaaaagaatatcaggacggatcagtaaagcttagtgcgattgagcaattcattcttgatttgattaagccttacagcaaacgaaaagctgtattttttgtcaggaaaatctaa

SEQ ID NO: 61128 - DNA, 381 bp, Acinetobacter baumannii
atgagctttatcactgaacaagaagcgatagaacatgttgaaggctttgatgctttatctgctagtgataaggctcaataccttcagatgtcagaagcttatctattagcacgtaacgttaagccttacgaggatgctacccaagtacctgaacctttaaaaacagcctcatatcaaatcatcaaggggattatcaagggtgatctatatcaaggacaggaacaggtactaaaacgcaagaaagtcaaagctgatacggttgaaactgaaaaagaatatcaggacggatcagtaaagcttagtgcaatcgagcaattcattcttgatttgataaaaccgtattgcaaacggaaatccgtcttttttgtcaggaaaatctaa

SEQ ID NO: 61129 - DNA, 219 bp, Acinetobacter baumannii
atgtcatgtatgctgactttagaagaaatcgaaattaaacggcaagaactggaaagacatcttgaagatgttatgtctgttgaacttaagaagtggcaaagcgaaaataagctttgtgtttccgatgtgaatatacgtttggccaatgtgaatagtcttggtggaactaaacataatgtagttactggagtaagtgttgatttagattacaaaccttaa

SEQ ID NO: 61130 - DNA, 219 bp, Acinetobacter baumannii; identical to SEQ ID NO: 46621

SEQ ID NO: 61131 - DNA, 219 bp, Acinetobacter baumannii; identical to SEQ ID NO: 46621

SEQ ID NO: 61132 - DNA, 207 bp, Acinetobacter baumannii
atgaaagcacgtattgctgaacttgaatcaggtgaaggtagtcaaacacctgaagatgaccaaaaaccaagtgatactcaaccacaaccaattaactatgcaggcctcaaagtagatgagttgcgtgcggtcttgactgaaaatggcattgcatttgaagcaggtgctaaaaaagaagaacttttagcattaattccaaaggaataa

SEQ ID NO: 61133 - DNA, 207 bp, Acinetobacter baumannii
atgaaagcacgtattgctgaacttgaatcaggtgaaggtagtcaaacacctgaagatgaccaaaaaccaagtgatactcaaccacaaccaattaactatgctggtctaaaagtagatgagcttcgagctgtactaactgaaaaaggcattgcatttgaagcaggtgctaaaaaagatgaacttttagcattaattccaaaggaataa

SEQ ID NO: 61134 - DNA, 207 bp, Acinetobacter baumannii
atgaaagcacgtattgctgaacttgaatcaggtgaaggtggtcaaacacctgaaaatgaccaaaaaccaagtgatactcaaccacaaccaattaactatgcaggcctcaaagtagatgagttgcgtgcggtcttgactgaaaatggcattgcatttgaagcaggtgctaaaaaagaagaacttttagcattaattccaaaggaataa

SEQ ID NO: 61135 - DNA, 399 bp, Acinetobacter baumannii; identical to SEQ ID NO: 49486

SEQ ID NO: 61136 - DNA, 1482 bp, Acinetobacter baumannii; identical to SEQ ID NO: 52692

SEQ ID NO: 61137 - DNA, 351 bp, Acinetobacter baumannii
atggctggtggtacacgtattgtaattaatgataaaggtattcgtttgataacagggggtaagtttgaagttaaagctggtcaacatatctttaatgatggacagcgagttaaagcggatgtgaaatataaattaattaataataaaaacaatacttatatttcaggaacgctagatgaacatggtcgaactcaacgtataaatacatctactaatgaaggctacgatatgctcattggcccagatgaggactggactgtttcagtcgaatctggcaatgaagatgaggaatatgattatacatgtaaatgtggctcacacgaaaattatgaacacgaggatgagatttaa

SEQ ID NO: 61138 - DNA, 129 bp, Acinetobacter baumannii; identical to SEQ ID NO: 59764

SEQ ID NO: 61139 - DNA, 468 bp, Acinetobacter baumannii
atgtccgtatggctggccatgcttattggtgctggtattggtattattatcacgacgctcattttatcaaatacccgtaatggccgaatcaaggctgaatacgagcaatatattgccgagttggagcttgagcatcaacaagcccttgcccaagcacaaaagagaagtgtgaatacgagccgcgccgtattaaaaggaaaaatggcagaacaatttgcgccagtcttgccggagtttcagtatttgccaagtgatgccaagtttatgggcgacccagttgattatattattttcgatggctataccgattttcgagatggagacggaactgctgatgatattcaaattattttgctggatgtaaaaagtggaggggcacgtttaacaaaggggcagcaagcaattgctcaggcaattaaggaagggaaagttcgttttgaaactttaagaatagattttgaagattaa

SEQ ID NO: 61140 - DNA, 612 bp, Acinetobacter baumannii
atgaggaatgacggccgcgcgcgtccggcccgccacccggtcaaagatcggcatccctttgttcgcggaaaagccgtctcatcccttcgtcccgctcggcgaccagacggccggcgcgcgcagcgaaggtcaggggcggccatcggccggcgcttgcgccttgcccttgaccgcagtgagcacgctggcaggctggcggcgaagcggagacaggccggcatggcattatgtcgtcctgctgctggcgggggcgctttccgtctgcataggaccgggcgtcgccgtcgcgcaatccgcatcggtcgagcgcccggccgccgcccatccgtatgcggcgcacatcgtcgaggcgtcgcagcggttcggcatccccgagcactggattcgtgccgtgctgcgcgccgaaagcgcgggcgatgtgcgcgccatatcgtcggccggggcgatgggattgatgcaggtgatgcccgacacatgggcgggcctgcgcgtccgccatggcctcggccgcgatccctacgacccgcgcgacaacatccttgcaggcacggcctatctgcgcgagatgttcgaccgctacggcaatgtcggcgcgatgcttacggcctataa

SEQ ID NO: 61141 - DNA, 462 bp, Acinetobacter baumannii
atgaccgcatttcgggcaggagaaggtcgaggatatctccgccggatcgagcgagacgcacgcatcccacaaggtgacagagctgcggcaaccggggcagcgcagcttatcgctccagatcagatgacgaagggagcctttcgcgcaggagggatcgcgcgcttcatacatccagccgtcttcgctctccccggccgccagtacatcttcggcggccttcctgaacgcgacaggatcgggcggattggtcagggtccggccgacgaacgagccgagcgcacccagttcatagagaacggcattgcgggcaccccattgcacatcaagaccaaggcggaccgcttcggcgcgcaattcctcggttggccgttcacaaagcagcgcggcgaggccggtcgtaccactgcctccgaacccgtcaaacacggtatcgccggggttggtatgggcggcgatatatag

SEQ ID NO: 61142 - DNA, 462 bp, Acinetobacter baumannii
atggagataggtcagcgtcgcgccgtcatccatccaacggcactcgggcatgaagccgtcgagcaaggccagcacgcggtcggtgcggtcgatgaaggcgcgcagcagctcccacgggtccacgcccgctttctcgcggccctcatagagccatgtttctgctcgggcggcttcctcggccgggggcagatagaggagagtcaggaaatagccggacacgaaatgcgcgtccgcttcctcgaagccggccttgcgctcggcatcgaccagcgccgacgcgggatcgggaaatgtgctgtctggataggtcgcggcctcactgcgctgtgcctcgacgaagatgctccagccggagccgaggcggcgcacggcattgttgatgcgtccggcgacggcaaccagctcggccgcgacggcggaatccagatcgggaccgcgaaacttcgcggtgcgctggaatga

SEQ ID NO: 61143 - DNA, 252 bp, Acinetobacter baumannii
atgagaaagagcagtataagtaactgctcgcatatccatgggctgagtagaaagccagatttcatcaatgtgaatcttattgtgagcaccttggggaattctgccaaagcgattgctcctgataccttccgtttcagcccaatcgctatgttcgcatcaggcgtcgttattgattatgccttatacggaactccagaattagccctcgttgcgaacaacaaagcagaaatcctgcagttccgcggacgctga

SEQ ID NO: 61144 - DNA, 957 bp, Acinetobacter baumannii
atgactacgacagttaattccgacatgatcatctacaaccaactggcccaaacagcgtatttagaacgtttacaagacaatttgaatgtctttaatgaagcttccaatggtgcgattatttatcgtaatgaaatcattcaaggtgacttcaataaaaatgcattctacaaagttggtggtagcattaaacatcgcgatgtgaactctaatgcaaaagtaactccggaaaaaatcggtgcaggtgagtctgtaggtgtaaaaattccatataaatatggtccttatgcatcaactgaagaggcatttaagcgccgtgctcgtacaccagaagaatttgctatggttgttggttacgatcttgcagatgcattggttgcaggccgattagagtacagtttagcttctttaaaagctgctatttctagtaatcccgatatggttgcgaaaggaagtatcgttgttgatggccgcaaagcattaactcgtggtatgcgaaagtttggtgataagtttggccgaattggcttatgggtgatgaactcagatacatatttcgatattgtcgatgatgctatcactaagcaaatttacggtgaatctgaaatcgttatctatggtggtttaccaggaaccttaggaaagccggtattggtgacggatgctgtaggtgataacgatgcttttggcttgcagtatggtgctgtaacagtaactgaatcacaagtaccgggcttccgagcttatgacatcaatgatgaagaaaacttagcaatcggtatgcgtgctgaaggtgcatttaacctagatattcttggttatagttgggatacatcgaaaggtgaaaatcctgatcttacattacttggttcaagtgctaactggattaaatatgcaaccagcaacaaaatgacagcaggtaccttacttgatttatcaggtacagcgacaactggttaa

SEQ ID NO: 61145 - DNA, 225 bp, Acinetobacter baumannii
atgaagagattaaaagtcgttattaaagatcagtttgaccaagaaagtattgctttagcaaaggttaggcctgcgaacgatcagaaattagagctgtataaaagtgtagagcatatcgaaattgatgacgatattattctaccgaatatggatttactctatgaaaatccaaaagatggaaaaatttataaattagttggcccgtttaatgaagatgaattatag

SEQ ID NO: 61146 - DNA, 603 bp, Acinetobacter baumannii; identical to SEQ ID NO: 45120

SEQ ID NO: 61147 - DNA, 1527 bp, Acinetobacter baumannii
atggctttaagtgcttggggctttactgatttaccttcttatacagataaatatgatcctaatgagaaagatatagtgataaagacaaataattggttgaatgatgaggcagcagaggaaaaaactcagcaaggtctcactgcctttgtagctcttgatgacgcatttatgagtattgcatcacggatttatttaattagaaatgccaaggaaacgattgatttacaatactacatttggaccaatgattttgtggggaaccttattttacatgagctgctcaaggcagcggatcgtggcatcaaagttcgcttattaattgatgatcaaaacggtataaagcttgatggcatattaagaagccttttacagcataccaactttgaaattagattatttaatccttataaatttcgttacttacgtatcttcgattatctcttccgatttaaaaaagtaaatcatcgtatgcacaataagctcattattgcagatgcatcgattgcagtaacaggcggtagaaatattagtagtgaatattttgaagcaagtagtaagtttcaatttacagatatggatattttattttacgggcatgcagtgcgacatgcccaagctgtatttgctgatttttgggaaagtaccctaagtgtaaatgcaactgacattatcggaacttgtgctgagcaccatttaaaagctttaagagagcactatgaacaactccatcacgaagaccatagcctcactgaagataagctttacgatgcgcagagttatttaaaagagcttttagagcataaccctattcaatggtctaaggaccattttgttgctgactctccgaagaaaatactgggcactgcaactgaacatgaaatgctttatggccaagtcttgtctattatgggtaaacctaagcaacacttagaattagcttcagcttattttgtacctacccaacaaggcacttattacttaaagcaactacgagttgaaggtataaaagtccgcgctttaacaaattcttttgctgcaaacgatgttgcgatcgtacatgccttttatagccaataccgtgtagaaatgcttaagaatggtattgaactgtatgagtttaaacctgttctggaacgacgacgtagaacgtggtacgaaatcgtaacaggcagcgttataccagcaaaaggaaaaaataagtcgagcttgcatgccaagttttttgatgtagatggcaaagtctttataggatcatttaactttgacccccgctctacctatttaaacaccgaagtaggtttggtgattgagtccagtcaattacaaactcagatttctgttatgttagatcaacatttacctcaagtagcttatcaacttaagctaaatagccaaggccaaattacttggctagattaccaagcaaacggacaagtcattgaatatgataaagacccgggaactagccgttttcagagaacaatgattaaagctgtctcttatttgccaattgagtggatgatgtaa

SEQ ID NO: 61148 - DNA, 591 bp, Acinetobacter baumannii
atgctgccgcgtgatcttcttgacctgcgtgaaaaagctcttggtcttgccgcccttcggcgtgtcggatcggatacggccgggcttcggacggaagcggttttcgtcgtcggcgctcatgggcgcggctccagcgaaaaccgccgaaaacagaccgatattggcctatggtgccgctcgaaaccctgcaaagcaaaggctttgcgcgaaatcgcggcacgcggcccctcaaaaccatggtgccggaaccggccacctaaccagtgtgcagacaacaataatttccagaagcggcccgacatggtgccgtcttctttaatcttgccctccgccctttctgccttttctgcccctcctatcgggaatccagccgggcaaaaacctgcccgaccggatgccgaaaccaaagcggccgagcgcgtgaacgccgccctcatggcgttcccccgtcgctggcgctcgccacgaaaatactgccgtcctgcggctccgcacgggcggggtcgcgcgccggaacggcagcgcggccgtcgcctgtttgcacctcggacggcggcgcggcggcagctcgcgtgtcgtccgggcgcatga

SEQ ID NO: 61149 - DNA, 189 bp, Acinetobacter baumannii
atgcgcgcgggcacggccgcccttccacgcggcccggacgctgcgctgcttgacaatcacgcggcggctgccgggctggcgatgatgccaatggccggagatattgcgggcgcgcacgaagctcgcgccccggccgcgcttcacacccttgccgctggcgaccacggcgcgggaccggcccggcgatga

SEQ ID NO: 61150 - DNA, 558 bp, Acinetobacter baumannii
atgcttatcaatcaggcccgcaaccttgcgagcctgccgcatagctcgctccagcagctccagcagaacgtccagcgcacgcagcagcttctcgggcaggcccaaaatctcgcgttcgaggtcggccagatcgaccaagcgttccagagccaatacggcaacgtctcgctatcggcgaccgacgcccaactggtcgccgacgcgcgcggccgctgggaaaatacggtcggcggcttacaggacgcgatgcgcgttcaggcaggggcggtcggcaacatcgacagcaaccgcgccgagatggcggccctggtcggccagagccaaggtgcgaccggggcattgcaggcaacgcaggccggcaaccagctccttgccctccagtcgcagcagctttccgatctgatcgcggtcatctcggcgaacggccgcgccgacgcgctgaccgaagccgagcgcgcgaccgccgccgaacagggccgcatccggcgagagcggttcctgacgcccggcaccggctaccagcccggcaacgcgcagatgttcaacaacggcaactga

SEQ ID NO: 61151 - DNA, 267 bp, Acinetobacter baumannii
atggacggcaagatgctggcccggcttggggccgtggtgctcgttgcgattgccttgacagtgaccgcaatcgacatggcgcggaaggacgaaccttccgcgccgccccctgcgccggccttccaaaccccggccgatccgctgcgcgaaaccctgcgccgttgccagcaacttggcgaggcggcggcgagcgatacggattgcctcgccgcatgggcagcatcccgcgaccgcttcctcggccgtgaccgcagcgaggcgcgctga

SEQ ID NO: 61152 - DNA, 537 bp, Acinetobacter baumannii
atgaaaaaatttatttttattgtggctagttctctttttaatattgcagcagcacaagcagctgatggtacgatcactattaatggtttagtaactgataatacgtgtacgattgatactggtgataaaaatctcactgtaaatttaccaacagtatcatctcaatctttgaaaaatgcgggcgatgttgctggtcgtacaccttttcaaatcaatttaacgaattgtgcttcagttggtaaagtcgcgacttattttgaaccaggcgcaacagttgattttaatactggtcgactattgaaccaagctacctctggtgcagctgccaatgtcaacatccaattattgggtagcaacaatgcagtaattcctgtaattgcgaaaggtgcttctggtgcacaagataactcacaatgggtaaatgtttctgctggggggaatgccgatcttaattattatgctgaatattatgcaactggagcatctacagcaggtactgtaacgtcacaagtgaaatacacgattatttatcaataa

SEQ ID NO: 61153 - DNA, 312 bp, Acinetobacter baumannii
atggctttaaaagtcggaattattaaaagctcggacgtatcaaaatggtgcgaatacaaaggtgctgatggagaggtacaggcagaatttaaagtccgtggtatcgcttataagccttttcaggtagctattgaacgagcaggaaatcagatctcgtctaaaggctatgatgtgatggtcaaagatgaaaatgccaagctttaccacgagcttttaatggatgcatgtgctgcccacttaattgaagactggaaaggtgtggtatttgccgaaatcgtagacggtaaaacggttgaatctgaaaagccctaa

SEQ ID NO: 61154 - DNA, 552 bp, Acinetobacter baumannii
atgggcttttttatttctaaaatttcagaggttgctatggctttaaaagtcggaattattaaaagctcggacgtatcaaaatggtgcgaatacaaaggtgctgatggagaggtacaggcagaatttaaagtccgtggtatcgcttataagccttttcaggtagctattgaacgagcaggaaatcagatctcgtctaaaggctatgatgtgatggtcaaagatgaaaatgccaagctttaccacgagcttttattagatgcatgtgctgcccacttaattgaagactggaaaggtgtggtatttgccgaaatcgtagacggtaaaacggttgaatctgaaaagccctatacacctgagaatgcctcaaagcttcttaatcttggtgatattggtatttcaatctggctattcattaaagaacaggcccagaagattcaggaagaagccgacaaggacaaggctttaattctgggaaagtcatcgagctctacaaataccaaaaaacgtatgcgtcgaaaacgccgcacgaaatcgagcaaatcaagttcttag

SEQ ID NO: 61155 - DNA, 312 bp, Acinetobacter baumannii
gtgttttcttgtatgtgtttaacattaactgaagctaaacaaaaacttagagcatctgctagagatactagcagaatcaagttaaccacacatgcaaaagaaagaatgaaagaacgctgtatctctatgaagcaaattatttgctgttttgagcatggagatattactgaggggccgtacccaaatactcgtggtgattgtcagttaaatgtttctgttcgcactgcaggcgaatacataacaacagctgttgcaatcaagcagagcgagaacggtgaattctcagtagtagtcactacatttagagagtag

SEQ ID NO: 61156 - DNA, 258 bp, Acinetobacter baumannii
atgagtcatactctttttgcacgttcttacagcggttatcggctggctttaatgactcagctacttgaaaacgtgccatctcgtgcacccagactgtctccgtggcttcgtcatagctacaaaaccccgcttcacaggctctttgaagccccttacaagccccttcaaagcccaagccagtttcatgagcaatatatagaaggggtatgtaatacaagccaagcatgttcgcgtgagggcttgtcattaaatacatag

SEQ ID NO: 61157 - DNA, 807 bp, Acinetobacter baumannii
atgaggacgatcacccgcacccacacaatcgcggccgtgctgctttcggctactatgctcgcaggctgcgccaccaaccggacgccgcaattcagctacgacgccagcgtgccgccgctgccgaccgtgcaggcggcggcaacagacaatacgccccggccgctgcatgtgcccccggcatggaccgtggcgcgcggcggcaccgccgcaggcacgccgaccggccgcgtcgagaacgccaacgccgccgcccgcgtcgagccgcgccgggaaggctactacaacgcgatccagatttatccgtggtcggaaggcgcgctctatcaggtctatgccgcagtcgggcagatcacgacgatcgcgctggagccgggcgaaagcctgacaggcgcgggaccgattgcggcgggcgacaccgcccgctggatcatcggcgacaccgagagcggtagcggtgcaaatcgccgtgtccatatccttgtgaagccgacacggccggacatttccaccaaccttgtcatcaccaccgaccgacgcacctacatgatcgaactgcgcgcgcgggaatcgctctacatgcccgccgtggcatgggcctatcccgcgccgccagcaggccagcgccagaccgtcccggccgggccaatcatccccgccgaggctgcacggaactatcgctatggcttgcaggtgcagggcgacagcccgccatggcggccggtttcggtgttcgacgatggacgccgcgtctatgtcgtcttcccggccgggatggtctggcgctggcctgctggcggcgcgggatag

SEQ ID NO: 61158 - DNA, 312 bp, Acinetobacter baumannii; identical to SEQ ID NO: 61155

SEQ ID NO: 61159 - DNA, 222 bp, Acinetobacter baumannii
ttgattaataacaccacagctaaccagactgctctttacttagagaaaaatttaaaaccattatttaatgaaggttttgaaaaaactgaagatactctcgaattaattacatttttaaaagataatgcatcacaagatgtgattgatcaatttattgatgatatcgactttcattgtagagtaatttttttcattattgagagaataaactatgaaagataa

SEQ ID NO: 61160 - DNA, 312 bp, Acinetobacter baumannii; identical to SEQ ID NO: 61155

SEQ ID NO: 61161 - DNA, 432 bp, Acinetobacter baumannii
atggaagggattcatctgctgtatctcgaaataaataagatatttagcttatcatgtcagcctatttgcaacagtgcccaaaaaattcctccaattgaaatctatttcttcataaagcagactttcttaataaccaccatcaaatcttacacctcacatcaggcatctgaatcaatcattacagctttgtcccacaataaagacagtgaaatttctgattttatctatatttataagttttatcggacaaaacatagtgaaaataaggtgactttcggtagtggaaatttaagactaatcaaccaaggacaaactttggaaggcttctattggactactgcaaatacatgcggtgaaatcgagttaaatttgatagaacgtaattgtgaaagcatagactcctatcaactagcaaagcaacatgataaataa

SEQ ID NO: 61162 - DNA, 432 bp, Acinetobacter baumannii; identical to SEQ ID NO: 61161

SEQ ID NO: 61163 - DNA, 312 bp, Acinetobacter baumannii
gtgttttcttgtatgtgtttaacattaactgaagctaaacaaaaacttagagcatctgctagagatactagcaaaatcaagttaactgcacatgcaaaagaaagaatgaaagaacgctgtatctctatgaagcaaattatttgctgttttgagcatggagatattactgaggggccgtacccaaatactcgtggtaattgccagctaaatgtttctgttcgcactgcaggcgaatacataacaacagctgttgcaatcaagcagagcgagaacggtgaattctcagtagtagtcactacatttagagagtag

SEQ ID NO: 61164 - DNA, 312 bp, Acinetobacter baumannii
gtgttttcttgtatgtgtttaacattaactgaagctaaacaaaaacttagagcatttgctagagatactagcaaaatcaagttaactgcacatgcaaaagaaagaatgaaagaacgctgtatctctatgaagcaaattatttgctgttttgagcatggagatattactgaggggccgtacccaaatactcgtggtaattgccagctaaatgtttctgttcgcactgcaggcgaatacataacaacagctgttgcaatcaagcagagcgagaacggtgaattctcagtagtagtcactacatttagagagtag

SEQ ID NO: 61165 - DNA, 312 bp, Acinetobacter baumannii; identical to SEQ ID NO: 52853

SEQ ID NO: 61166 - DNA, 312 bp, Acinetobacter baumannii
gtgtttgcttgtatgtgtttaacattaactgaagctaaacaaaaacttagagcatctgctagagatactagcagaatcaagttaaccacacatgcaaaagaaagaatgaaagaacgctgtatctctatgaagcaaattatttgctgttttgagcatggagatattactgaggggccgtacccaaatactcgtggtgattgtcagttaaatgtttctgttcgcactgcaggcgaatacataacaacagctgttgcaatcaagcagagcgagaacggtgaattctcagtagtagtcactacatttagagagtag

SEQ ID NO: 61167 - DNA, 324 bp, Acinetobacter baumannii; identical to SEQ ID NO: 52850

SEQ ID NO: 61168 - DNA, 207 bp, Acinetobacter baumannii
atgagtaaatgccaacactgtgcagttgaagagttaataaattcttacggcggttttgcagaagttaagactctttgtgaaaaattacgaggcaaatataaccatagtggcttatctaatactgattacaacgagttacttcaattagagaaggcacttgaccaagcgaagaagtttaatgcggagggcgcaaaaaatggacagtag

SEQ ID NO: 61169 - DNA, 324 bp, Acinetobacter baumannii; identical to SEQ ID NO: 52850

SEQ ID NO: 61170 - DNA, 207 bp, Acinetobacter baumannii; identical to SEQ ID NO: 61168

SEQ ID NO: 61171 - DNA, 324 bp, Acinetobacter baumannii
atggacagtagatggattgaagcgcaacgccgtgaaatggaaaagcttatttcaccagagctaatcaagtcgagggatttagcacgtcaaagttacttcgatcatatggaaaaagaaatggctgaccacgtatcacgctcaattgaaccactcagcggtaaaaagcaaagcactctggttgaactaagtgagtcaattgaaaaactggctcagaagtataaacaagatgctcattcatccagccttttaggtgatcaggataaagcgcgagtttataactgctttgctaatcaattggaccatttgctgaaaggtggtgcttga

SEQ ID NO: 61172 - DNA, 180 bp, Acinetobacter baumannii
atgaataaaccattagaaacttttgatatagacgcagcaaaggctcgctacgaaaaattacgaggccgatataaccggagtgggctatctaatactgattacaacgagctacttcaattagaaaaggcacttgaccaagcgaagaagtttaatgcggagggcgcaaaaaatggacagtag

SEQ ID NO: 61173 - DNA, 300 bp, Acinetobacter baumannii
atgtgtttaacattaactgaagctaaacaaaaacttagagcatttgctagagatactagcaaaatcaagttaactgcacatgcaaaagaaagaatgaaagaacgctgtatctctatgaagcaaattatttgctgttttgagcatggagatattactgaggggccgtacccaaatactcgtggtgattgtcagttaaatgtttctgttcgcactgcaggcgaatacataacaacagctgttgcaatcaagcagagcgagaacggtgaattctcagtagtagtcactacatttagagagtag

SEQ ID NO: 61174 - DNA, 150 bp, Acinetobacter baumannii
atgacacagcgattagaactacatcaggtagagcagttaacagcttgtaagatatcactattacttggattaaatgccgagcagaattatattgagcaatttttccggtttagtcagagatggatccgtaaatttgaacaactcctataa

SEQ ID NO: 61175 - DNA, 207 bp, Acinetobacter baumannii
atgaaagaacgctgtatctctatgaagcaaattatttgctgttttgagcatggagatattactgaggggccgtacccaaatactcgtggtgattgtcagttaaatgtttctgttcgcactgcaggcgaatacataacaacagctgttgcaatcaagcagagcgagaacggtgaattctcagtagtagtcactacatttagagagtag

SEQ ID NO: 61176 - DNA, 216 bp, Acinetobacter baumannii; identical to SEQ ID NO: 50944

SEQ ID NO: 61177 - DNA, 207 bp, Acinetobacter baumannii; identical to SEQ ID NO: 61175

SEQ ID NO: 61178 - DNA, 882 bp, Acinetobacter baumannii
atgagtcaatttgttctgggtttggatattggttactccaacctgaaaatggcaatggggtataaaggtgaggaagctcgcacagtcgtcatgccggtgggggcaggtccattggaactgatgccacaacagttaactggcggtgcagggacctgcattcaggttgtgattgatggagagaaatgggttgcaggcgtcgagcctgaccgattgcaaggatgggagcgtgagcttcacggcgactatccttcgaccaatccatacaaggctcttttctacgctgcactcctgatgtccgagcagaaggagatcgatgtgctggtgactggcctgcctgttagtcagtacatggacgtagagcgcagagaggcgttgaaatctcggcttgagggtgaacaccagatcacgccaaaacgatcggtagcggttaagtctgtcgtggttgtacctcaacctgccggtgcttacatggatgttgtaagttcaaccaaagatgaagacctcctggagattatccagggaggaaaaaccgttgtaattgaccctgggttcttttctgtagactgggtagctcttgaagagggagaggtccgctatcactcatctggcaccagcctcaaggcgatgtcggtgttgctacaggaaacggaccggctaattcaggaagaccacggcggtgcccctggcatcgaaaagatcgagaaagctattcgtgccggtaaggccgaaatcttcctctacggtgaaaaggtatcgatcaaagactacttcaagaaagcctcaaccaaagtcgctcaaaacgccttgatccctatgcggaagtcaatgcgtgaggacgggatggatgctggcgtactgcttcccgtcgccaatctcagttga

SEQ ID NO: 61179 - DNA, 273 bp, Acinetobacter baumannii; identical to SEQ ID NO: 34916

SEQ ID NO: 61180 - DNA, 453 bp, Acinetobacter baumannii; identical to SEQ ID NO: 34917

SEQ ID NO: 61181 - DNA, 603 bp, Acinetobacter baumannii; identical to SEQ ID NO: 25057

SEQ ID NO: 61182 - DNA, 330 bp, Acinetobacter baumannii
atgagtaaatccaatcgagaaaacaactttcgattagtaagctttgctgaaattgattccctacaaccttcaattaaaattgatactggcagattggatactatatctatagagatgataggcaaaataagtgttgaagtgggtaatacatcaaatcgaacactttccctatgtatagatcaatatttgatagatagagataaagggaatctacatctatggcaagaaattaatggtgagcttcatcgtgttgttgatgaaggtggatttattattattgctaaagatcaggtagaacatttcaaatctgtagtgaactttgagttctaa

SEQ ID NO: 61183 - DNA, 174 bp, Acinetobacter baumannii
gtgaaacgtaaagatttgatgaagttcctaagtcaactaggggctgagtttaaagaaggaggtaaacataccaaggtttacttaaacgataaacaaagcacaatccccagacacacggaaatcgacgacttcttggtaaagggaataaaaaaacaattaggaatcgagagttag

SEQ ID NO: 61184 - DNA, 399 bp, Acinetobacter baumannii
atgtcaaaagtaaaagtaaagctcttgaaaacatttatgcatgatcgacaagttcgtgtaactggtgaagttattgaggtttcaccaactaaggccgaagaattgtcgcgtctaaatcttgtaaaaattattgaaaaagatgagtcaccaaatggtgacacgtcggtcaccataaataaagaagagacacctgcaagtgacacctctggtgatgaacaagcttcagaagagacacctgcaagtgacacctctggtgatgaacaagcttcggaagagacacctgcaactgatacctctggtgaagaacaaacttcagaagaaacacctgcacaagaagctggtgaagaagaagtaaaagcaaaatcaaaacgtactcgttctgctgctgcaaaggaataa

SEQ ID NO: 61185 - DNA, 231 bp, Acinetobacter baumannii
atgacgatgacaaatgctgaattagagaatgaactcaatgctcttaaaactcaactaacagctcttcaaggaactgttggtgcaaaggctgatgccacagcagttaatgcactaacttcacgagttactatggctgaaggaaagattactagtcaaggtaattcaatcactactttgagtaatgatttatcagctgttaaaacacgcgtaactgcattagaaaataaataa

SEQ ID NO: 61186 - DNA, 213 bp, Acinetobacter baumannii
atgcaaccacttcgagttacatataagcaagcttgtgaattattagcaatcaaaagagatgcgcttcgaaaacttacgctaaaggatcccactttccctaaaccatataagtacgggaaagcccagcaagcccctgtctattttgattatgcagatttagtgcagtggcataactctcaaaaaacaaagcacgtagatgaaaaaggtaagtag

SEQ ID NO: 61187 - DNA, 465 bp, Acinetobacter baumannii
atgacaacagatattcatacatggcgcagcctaatctgccaagaccttatcaaagcgggtttaacaaactcaaaagatatcgttgcacaagcttcaaatatcgaagtttatgtatttggtgataccaaaacggcagaagcaaagccagagattaaaaacgcagaagttaaaacttctaaccctgcaaaaactcaaacggttaaagaaaccaaagcagaaaaggttgaagaattaaaacctgttgaaactgcaccagttgaagaaccaaaagacgaagttgttgaagaaacaactaaatcagaaatcactaaaaaagaagtgaaagacgcttgtttagaagtagtcaaagaagaccgcgctgcacttgaaaaaatcttaagtgatgtaggcgctttaaccgttgcaaccatccctgcggacaaatacgcagatgtaatcgcagcttgcgaaaaagcacttgcataa

SEQ ID NO: 61188 - DNA, 2298 bp, Acinetobacter baumannii
atgcgtatcccacaatttaatcgacaagtttcggacaatagtgttccaaatgtacaagtcagtggcggcatgtcagcaggcgaagccgctagcttagttggtaataaaaccgatagtttagttggtgcccttaattctggtttgaacgcgtaccaagcataccaagatgaagcggaccgcgtacgggttattgatgcccaaaacaaactcgctgaattaaaactccatttgcaaaacaatgatgtcgatgggtacggcaacaaaaaaggggtagatgttgtaagttttgatgatggcaacggtggagggtttgtagattactatacaaaagcctatcaagacggtattgggcaaattgcaaatactttaggtaatagccgtcaacgtgccttgtttaaagaaatgtctgaacgtgatgcagttcagttcaaaggatcattacaaaattactttgtacgtgaaaatgacgtttatcaacaaagcgtatattcatcttctgcagaacgttttatccgtgaaataaacgagaaccctggtgacttcactaagattgatgaaagccgtgctaatctcaaagcgtctttaggtaaattaatgaaccttgaaggaaaggcagcgactgaagcagaaaacatttatcttaaaaatgtctcagtggcccacatcacaaacattagcgcctttgtcgaaaatggtgatttaaaagcagcacttgcctataaaaataaatataaagacgagatttcattagcagatagctttaaggtagatcagcgtattcatcaaaaacttgaagatcagcaagtcgaatctttagttaatatggccacaactggaacacaagaaggcagcaaccctgctttaaatgttcccccacaagcatcagcaaaaattgctcaggagcttaaaagtcttacacccgatcagatgaaaaacatcaaatacaatgatcagcggttagatgtatacaccgtccacgccggtagggaacgggggttagaaaattttactaccctagtgctagggcttcgactcgctggtgagaaatcaaataactgggagatttctaaggcgggtgcacgttcagtaatgcaatttataccttcaacttgggagggtacaccagggcaaaaaaatgggtacaagtgggatcgacttacaggtaaagaaagggatcttaacaatcctgcagatgtgattgatgcgagctatgactatgtttctgatatcagtaagcaatataaaacaaaagacccaatggtgatcgcagcccactataatggaggggacaaagcagcaagagcagttttaaaaggacaacaaccccctaaaccagaaacacaaaaataccttcagcgacttgataattggatggtaaacggttttggagattatgctaaaaaacctgcaaaaactcgtgagcaagcttatgaagagattcaaaacagtaatgtatctgttaatgttaaacaaaaagttttaacttatacagataggtactttaacgggcaagataaggttaaaggtgaaaaacaaaatcaagtctacgattactattttaagggtattaattcaggtcaatttacatacgaacaaatacctgctgtagatattaattctttagaacctaaccaaattaagagccttgaagctgttagtaactctaaatataaaaaggatattaagacggacccaaccatctatagcatgatcatgttgaataaagatgagttgtttaaagggaaaccgcaatcagtgctacatcaatatgctgataaattatcgccgacagattatcgtgcagttactaagatgtatattgatgtaaacaacccaacaaaaggagataaaaaaggcgattttgttgaggtgagtccgaaaaccgtttctgattatttaaatccttatttacctatgcttggtattacaaataagacaaataagaatcagatcgatcattatgctgcggtgcaagcagatgtaactcaaacattgcgtgaagctgaagcacgaaaaggtagcaaactaaccaaggatgaatttagtcgagctgttcttaaaacagtaggtttgaaggctagtgagagaaatgttagacatgtttttggtattgaacttccgggtacggaatccctgaaccaaaaaccgatatacaccgttaagaacaaagaagatattgcccctaattaccaaaagaaaattgatgacttatttaaaaaacaagggcgtgatctatcaaaagtaactttggcggagtatcttaatgcttattattcaatgatgagaagggggttttaa

SEQ ID NO: 61189 - DNA, 672 bp, Acinetobacter baumannii
atgagaattttaatattttttgtatttagccttttattgatacaagcatctcatgccgagtggattaaagtattcaaaaacgacgccgaaatatattttttagatgacgattcggtagacctagactttaaaagagatatagggaaagtatgggtcaagtcacaaattgcagttaaaaaacctacaaatagcacagttacccagaaacgctcttattttgaaatttcttgtaaagaaaggactctaaaggtgctagcgagtacctcttataatagaaatcagaaaattataagtacttttgaatctatatccccaaaaagcataagcattattcctgaaaccgttggggatgctttttatcaaatcgtttgtaccagactaatgtctgctgtgaaagacgatcctcgacggattttactagagagtttatcctctgtcgattcctgttttaagagagaagcggctattcaaaagcaattgatttttaatgaagaaaaattaaaagcgaagatcaaacttgaatgtaaaaatgaaattaaggatgcagctttaaaggcgtataaacttgctgaatattctaaaaacagcgaactaagtattaaggacgaggacgctttgtttgaaaaaactacgcagctttttgaagatcgtattgaagaagcaataaaatga

SEQ ID NO: 61190 - DNA, 186 bp, Acinetobacter baumannii
atgaaaaaattagagaagttatttctatcgggattgttgggttttccctttttagtcgctatctggtacgcagcgaataaaggttacatttatgctttatacggatacgttgctttatttttaatggcgatacttctgattgctacagtgataattttacttctaccttcaaaaaagaaggaatag

SEQ ID NO: 61191 - DNA, 903 bp, Acinetobacter baumannii
atgtggtcagccattttaaaatatgaaaaccctatcactttaggttcaattgtaattcgccaagataacgaagggcgtttttgtcttaatgatttacataaaacatcaggtaatgaagctaaacacgctccgaaattgtttttacgcaaccaacagacacaagagttaattagtgaaatagaccgaggtacaaatgtgtacctcggtcaaaaaatatccgaaggcggaaatcctccctcggtcaaaagtaaagcgataaatgttatccgcggcgggttattgcaaggcacctatgcagtcaaagaactggtctatgcatacgcaatgtggattagcccttcattccatctacaagttattcgtgcatacgatgaaatgatcgttaagcaattggagaaggcccgtaataattctatgggaatgctccatattcctgaacctatttcacctgatacaaatcgatatactgtagttaaaagagacggcgttaccactttacgagatgcgaaggatgtatcttttgttaatgctgctcatgtttctgatttacgtcgtgaccttggcacggttattcgtgcattagaggagttgcgttatcgaacaaaaattgtggatggcgagttgggcgctaacgagttggcattgcctttaatttgtgaattgagcgaaaatggtcagcaatttgagcgcacagtttcagacgatgaaattgcaaacatgaccccatcacaaagcaaagccatggtacgtgataaagttgcaatcgctatatctatgcttaaaacaacgtatcatcctgatgatattaatcgtatgtgtaaagagttcggcatccatcgagatacggcaaaacgtattttgagtaagctgtatcaacaggcaacaatgttggcaggttcttaa

SEQ ID NO: 61192 - DNA, 2331 bp, Acinetobacter baumannii
atgacagttcaagttaccgaccggctcagtcaactttatgttggtaatggggttaatacacggtttgattttacttttaggatttttgatcaagaagacgagacaggtgtagctgtacgtattaaagttggaaacgagtttgaatttcttgatgagactaaatacaccgtcaccattaaccccgataatctaggtgggtatgtaaattttcttgatgcgcctgatgcacaaacatacttctatatcgcaggtaaaacacccgtagatcagttattagatataactaactatgataatttttatcctgatgcaattgaaagagcattagataaacttacagccattctacaagagtggaaacacttagttgattttgaatctcaagcacgaattttagctgatacagattatgatgaattggcaagaatacgagaagaaagcttaaaagcttatattgatggaattgccagtgctattacaggaaagcctgtacttggcttgcctgcagaatatgtagttgacggggatgagacccaaaaggttatcaatacccaagcccaatattctgtatcaactttctcagatttaagagcattaaaatacaaagctagtaaacacaaaaaaggtgtttttgtttgtcagcgaagtgatgattataaatttggtgaagggctatttgtaccagatttgactgatacaactacggctgatgatgatggaacaatactagtcggattgaatggcgttcgatggaagagaaaatggaatgctcatgcggatccttgttggttcggtgctgattataaaggtttagtagattgctcaccgcaagttcaaaaagcaattgatgtttcatatggtcgtgtgtggttcggcaatgctgaacgaaattttaaaatgatgacacctgttggcttgccaacaaatagtatcgttggcgatatgctcatggaaatttgcggggcaggcgcacgtatttgggtgtattcggatacaggaatttttacatctaaaagatcaattggttatgaaacatctaatagtgatttatatacagcagttatagagtttggtagaggtctgcgttttcagggggatggaacaagcccttcagtcgtgattaatggtgatcgtctttataacgttaatatgaagggtgggcgttacttaagaaatacagcattagtgaaagcaactattccacgtcgttcagaaaacactggctatttgcaatcagtaactattgaaggcaatcatttagccctttgccgcaaaattattgactctaagcgtggctttaatattaattttaatcgcaactttggcgaatcttgctatggcggtttatatattgatggtgagggtgcgccagctgttaacgtagtccgttgtgagggtaatctatgggaatcagggggggtatttgcaaaacttggtgcaacttatgcgggcacttttataggcaattattttgaaggtaatacggctggagatgttcctatattaaaatgtatgattgaacttggtaaaaccggttcaactcaatattcgagtggtgttacatttatcggaaatcagtttggtgcatcagcaatttacaaaactgatccggattattgtgatgtaaaatttttatcagctctttcaggcactggacttgataatttgaccccacctgtatttattggcaactggacaaatggctatcgcatgtggtcagaaggccaagtgcttacccagtttggtaatacttttagtggtggcagtgcgcgtagacatggtgccccaaaactacatacagaagcacgagtaacctttgatctttcaagaaaagattttgtaagttcaacatctttaacaggtggggttcatgtaatttgtgagttagaaacctctatgctagaagcgataactgctcaggcaaatagagcatgtagtgctgatttgaatatttttatgcaaatgaaaacttcaaataatattgtcctaggttctgcactcgcaaaagtaagtttgttagcacaaggtgctgaaggtattagtgtaggcgcagttaatagtgtttatgttggtgccactctgacagcgtttacacagttagagaatggattaatcgatagtgttaataatatttcattgtttaaacatttcacgaatccagtgctttcattgcagcgagtgggcactaagtatcaattgaaattatctggatacgcacctctaactggaactatttatggtgatactgttaaggtttcttctaatagtattatgacgatttattcattaaatagtggcggatcgctttcaggtcaaatttctttttcataa

SEQ ID NO: 61193 - DNA, 372 bp, Acinetobacter baumannii
atgaacgaccctttatcagctaaatccatcccttggatattaaaaatttgggcagcagtgatgggcgggattcttgctctcatgttaagtggcgatatcaataccgatggaatgattaaaatcaaccgtagtgtcattttaaaactatttataagcatcactataagtctgtatggcggttcagcctttattgaatactttgaattaagtcgttactcacatatggcacagggctttgtgatgctaatttttgccgtctttgggatgttgctcatagggatatggtatcaagcaattcaactgtggaagggtaaaaccatgggtgaattaatttttgaagttaaagaagcattcaaggctatattcaagtag

SEQ ID NO: 61194 - DNA, 2580 bp, Acinetobacter baumannii
atggattttttagcagatgacgaattatcgttaaatcaggatgaccctcgctacaaacctaaaagccaacgtggggcattaagtgacggcgcactgggtactatttctggtgtggctatggggactattgaggcggccactgctccagattccctgatccgtggtgataagaaagcggctgccttaagagcacagaacttagagatttttaaacctgatgatcttgggagtgtgggtgagtttacctacggcctaaccaaagactttacccgtattggctggaacgccgtcactacactaggtactggtggtgtacctggcttagcattgaattctgggctattcgggtaccagacctttgaagcagagaaatcagacttactgaataaaggggcagatataaatacggcccgaaccggtggagctattaaaggggtcaccgatgctctggggtttgctattcctactcatggggtcgctaaaaatgtggtggcagatgccgtaggaacaacgattttatctacagctgcagggtcagccggtgactatgtcgaaggttcttatttagaaaacagcggaaataagaaagttgcccaatatggagaggcgttaaaggaaaatgccttaagtcctactaccatggcaactaatggaggtatggccctgctgctaaacctatgggcgaataaagggaaattacgaccagaacaagtcaaagatcatagtaatgtggatgctatgaatgatgctgctcacatccaggcgaatatcgagcatgcagaaagtgtaaacccattcagtcctacaaatcctaaagaagccaattcgcactttgatgcattggatagtgctatggaaagtgcactgaatgatgagctggtcagcttaaaggcacctgtgaccggtacacctaaagcggtggctaaggctcctactgtcgactcaagtgaaaaggcgaaagcagcgccgtctatactgaaaaatccagtactggaaagtaagccatgggcgaaagcaattgctcaggaggcttcaagccgtggcattaatccggttgatgcattggttttatcccatattgaaaacggcggaacattcgatccaaccattcagcctaaggacaggaaggggaaattactatcctctgctactggtttattccaaaccattgatagtacgtttgctgcaatgggtggaaagaataagtttgatggcaatgaacagattaaagctggtctgaattactacgagcataatgccaagatcttccgtaaaaactttagccgcgatcctaatggcttggaactttactatctacatttcttcggtgaaggtggtggaccagtctttttgaaagctaaagacaatgaactttttgttgatgtggccacacgttggagcaagggaactgataagaaaagtgctcgccaagtagcggaaggaattacagcagcccatcagttcaatggcatgactgtggggcaggtaaaagcgaagtaccaaaagcgctggaatgaggttgccaagcagtatgaaggggtgggaagtcattctgatggtgaggctatagtgataagggggagtaaatctgaattccctgaatttgaatccgatatcgctgcaccacctgcctataaatctcaaaccgacgctgaagttgaagcaatgccatttgtactgactacagatgaacatagcatcaaatcactccaggaggagtttgaagccctatcctctccattgaccaaagaggatctggagtacttacaggctacggcgcattaccaatattcagaaggtggtgcctatcgggcgccgtatgtagagcctcaggtagatctttctggtccaggtaatagtgctacccgcacattggatactttggattctgaccttcagtacgtgatgccagaacaacagcgcgttatcttggcagatactgagacaaatactctcgatatcaatgcacgtcaaccagagcaggatatacagcaaggctcaattgctgcaggagtagataattggactccaaccagatcgcagaactacctgaaacgagagcagtcactggatgatggtcgggttattcaagagctgcataacaaggcatccaatacaatattccagcgtgaaatcaatcaggatggctctatcagccctgtgaaggctactcgaaacggaagtgatctgtttgctcacccggggaacgggaaggctaatcgtcctgaactaaccgcagtccagcataaggcagctcaggcactggagcgagaattctggaagcctggtaaatcgaaggttgatggtgcaccagacttaaccaaagccagtaagggagagtacggctcatttaccgagactcctgacggacgtgaagcggtttcaattctggaagcggatccagacatggaagtgacatttacccgtttagacgagaacggaaacgaggagattgtgacaatgtcctcccgggatctactggactatgtcaaagaacaagaagaaatagcaaaagatgaaattcaagcggtcaaggcattggcaagctgtgcattaaaatttgggagtgaagcagcatga

SEQ ID NO: 61195 - DNA, 585 bp, Acinetobacter baumannii
atgaaaagaattatcacgggtttcactttatttgttttgggactagctgcgaatgcagggcagacaaatcatggtattgaattacctgagggataccaaaagcaatatgttgatccaattaaaaaacaagcttatttcatcgatgaagatcaagtaaaaggcaagcccagcataatcttcagctttgtgccagatacaaccaagaaagaggacatttggtttacaacttgtcagcatacttttgacaaagggcttcagatatttacttgctttactcaacaaggtcagtttggcataggtagtagtgctgatgggcatgatgttgtttttagattcgagaagcctaaggaaatagctgttacccaaatcaattataagatcgataataaaaaaattatgactttgcctgtaagtgcaatccctcagggtgtgtctgcagagacttttattaggcaattaaaggaagccagcgtattgagtttttcttggaaagaaggttctcagtacaaagcagaaaaaattaatctgaatggtttggaagaatcattgttattcgctaagaaaatgatcgaattgaataattag

SEQ ID NO: 61196 - DNA, 465 bp, Acinetobacter baumannii
atgagagcattagggataagggttgaacccaaaaaagtaacatttgtagtaattgattacattgaaaatgaggcagatatattgaatgtcgaggcaattaaaataccggtctcattagattttcctgcaaaattaaaatatgtaagaaatactgtgctagatattattcgagaatatggtatagaggttgcgggtataagaattgctgaatctaattctgataatgtaaatattaatcgcttacatattgaaggagttatacaggaagctttttcaagtagttcagtacaaagctattttactggccagctaatgtctatttctaggaaattaaatattagtaaagaggaatataagacccttgtgaaaccaggctcgcattttccacgaattaatagatggtcactatgtaccaataatgaaatcaaagaggcagctttagtcggatatggagcactgcaatga

SEQ ID NO: 61197 - DNA, 1038 bp, Acinetobacter baumannii
atgatttatccgtgtcaaaaagctcaagtttcttttgaatatatttctgaaataggacaagagggtagaaactctaaagtttattttgctaaagatagtaatttggatggtgagatagtaattaaggagattttaaaatcttcttttgaggataatagtttatattttgacgaggcgagaaaactctataaaagttctcatccgaatgtcgttcaagtttcttatgcttgtgaagatgatacgaatatatacatagctatgcctttctataagaatggttcattaaaaaagttagttcatactaggaatttaactgttcgggaaataattaaatatgctactgaatttctaagtggattacataatattcattcaaagaatttaattcatatggatattaaaccagataatattttactttctgataggaatgaggctttactgtctgattttggtttatcccagcatcttaatcttgatggtcttactgaggcagataaagcgtatcctaaaattctgccgcctgagtattttacggaagatcaagtcgtagatcgaacatatgatatttatcaagcaggtttggttttatatatgttatgcacaggaattaagaattttgatgaacaattcttctcttattggccagatcaaaatgcattggttaaggctattacttcaggcaagtttcctataagaaatgctcatcccccacatattcctaaaaaaatagttgcaattattaataagtgtttgcagctacaacctagtaatcgtgctagatcagcattagaaattataaatgctttagcggatatagacggaaatatacttgattggcaatattcattcgatgaaaccaaacaaatgcgtatctgggaaaaaacggtagatggtaagcgatttaaattacaagtacttactgaccattcatcaattgccacaaaagaagctaatgacagggaaactaagattagtgcatactgcaaaaaacggattgatgtagaagatatccgtaattttttggaaaagcactaa

SEQ ID NO: 61198 - DNA, 162 bp, Acinetobacter baumannii
atgagcactaagagagttaacagagccatgctttcaagagagaaattgttaccttcaactaatcagtctcaaatcacatttctttctgatgaagttcttagaaaaaagatcaaagacttagacctctttggatctaaacatatttctttattgaagaaatga

SEQ ID NO: 61199 - DNA, 1065 bp, Acinetobacter baumannii
atgagtaatattaaagatattaaaaatccagctcctttctatacattgaaggatgcagccaaagaattaaaccgagccttagaagttgattactatgatgcaaagaagctattaaatatggccttggtatatgacctgcaactctacatttttgtaagaggctgggaaggttatgcagcttacggcgaagaaatgtcagaagcctgggaagagtatgcagatgtagataaacatggggggtatacacagctgcatttcgatatggatgccacattagaggccattattacggcaagacttaatttagctttacgtgaaggatgtctgcttgaggtaaaactagaattaattaatgaattaattttaagaaaaaatattattgctgatggcagctcaggtatctttttcagcaatattctagatattcaggattcttttacaggaaatcccaaaaacctttttttagaagtctttaaaccatggccttctcatgaactgatacacgagctcggtaaatgtacactttctgcagatgttattgcttctgtagaaaacattaatattgcttggattcagcttttaaaggaaaacaggttttttcaccataatgctgttacacctccccctgtaatcgatactacaattgaaaaagaaggagagcctgctgttttccaagcaatatctagaacagatcttctaataacccattatcaactttctagaattattgaaggctctttaaagcttagaggcagaaaagttgaaacgattgaaactttaattgaaaaacaagttcaaaagcctcgtggaataagcccagccagagaacgagctaaattagcagcaaaaactctagctaattatctatggagtcaagatagggataacaaaattaaaattaaagaaatggctattacagtttatgcggagctaagccagaccgaacaccgtattgaattacctgatcaggccatatcattaaaagactggattaaagaagtagctcctccttattctagagagcctggaaggaccaaagaaaaatatatatcaagtgaaacttaa

SEQ ID NO: 61200 - DNA, 657 bp, Acinetobacter baumannii
gtgaaatatcctaaattatgtcctttaacggcggcaattgttatctccggtttttctagctttgccaatgctcaattaggacaaaacctagctgttgatattcgctccttatccatggggaatgcagtaactgcagaccctcctggtattagtgcagttcattttaaccctgcagctttagcaaaaattgatgggttgcaaacagatgtacaggggattcttgcaaactttgatattcaaagagaattctcagcaccgcctggatataacgtttttggttattcagatgacccgattgtttgtaatgatggcccagaagtttcagccaatatttgtacagattttaaagactccgttcatggtgacgtggagtacgcgagcctgtatgtacctattcttaaaaaaatggtagatctcggagctggttatccactagttgcccctacagcaggaattgcctataagccaccaggatcaaaagtaacctatgcaacagccgtgtatgcaccgttggttgcaggttttggagctgaaaatggaaaccctggtaactacatgggtcagcaagttgctgttgagcggatcacctatttatcaccatcttttggttatcaggtaaatgatcatttatcgattggtgcttctgtagggatgtaa

SEQ ID NO: 61201 - DNA, 207 bp, Acinetobacter baumannii
atgaatcaaagaattgaaaagtacaagtttagccaagctgcaatagacagcttcaaaggcttcttaggtggctcggtgctatctatggtcatcggtgtttttatcgtagtccctttccttcgttcatgtgccgacgaacaagcagcaaacgaactcaaagcaaaacagaacatgtatgtgcgtgttcaggttgagggggtgaagtga

SEQ ID NO: 61202 - DNA, 393 bp, Acinetobacter baumannii
atgtcaaatgaattaaaagacccagcattgattagcagtgctgaggcaaagcttgcgtgggctaatggagttgatattcaaatcaagaatgtaaattgtgtcaactggtatgacttagatgagagcaaatacaatcttgatatttttgataatgttcgtgttgatttccgcctcaaaccccaaaccatcaagattgaacttgaaatccctgctccattccaaccaaaagaaggagaacagtgctgttatatcagcgatgagtcaatagatggctatcacactgttagttacaacagtgagaaatacagtggaatgcacttcggactatatcgcccctctgatattgaaaaagtagttgctttattccgtagtgcttttgggggtgcatcatga

SEQ ID NO: 61203 - DNA, 381 bp, Acinetobacter baumannii
atgaatatgttagcccttaaacccgagctactatgcccttctttcccttacttagatatgtctacagacattcaagttgaaggtgaaacggtttatttcgatctaacttacggctgcaatgttcttaactgccaaatcaaagctgaaacgacttacgacactcgtgaagtaactgatcaattcagtggctgtgcccgtgatcaagattatgaagtgcttgtggtagacacaaaaactcatgctgtagtgactgataaagacggcattgagtcaccaattggcttacgtttcaagctaacagacgcacaagtgaacagcttaaacgagcagcttaaatactacgccgaagagttggcagatgaagaagcgggagtggtgtga

SEQ ID NO: 61204 - DNA, 597 bp, Acinetobacter baumannii
atgggaactagacacttaatttgtgtacagcacaacaatgaatacaaagttgcaaaatacggtcaatgggatggttatccaagtggtcaaggtgttggaatattggaattcctaaagggaggatttaacaaagctctttttattcagaagctggacaacatctttgaacccacagatgagcaagttaaagcttggtacagagaagctggcaatactcgtgatgatggttatgtcgactttgaagtatctaaacgtttttcagctaaatatccttctttttcacgtgatgctggatcagatattttgggaattatccaaaattctgaatcacctattccgatgcgcaaatatcttgaatttgctgctgaatcgctattttgcgaatgggcgtatgtaattgacctagataaaaacacttttgaagtttttcagggcttcaataaaacccctttagatagaagtgaaaggtttgcatccgttacttccccagatagtaacgaaggttactaccaagtgaaattcttagagtcatttgatttagataatttgccatctgaagaagactttattgctcagttagaacgcgaagaggattag

SEQ ID NO: 61205 - DNA, 747 bp, Acinetobacter baumannii
atgaatgcgccagttaaaacagaaaaccatttgagtgttcagcaagaatctccaatcgataaaactttatcaatgattgaacgtattgctttagatccaagctcagatgttgcaaagctagaaaaaatgattgaactgcaagaacgcgtaatgaaaacccaagctaagcaagcttatgacaatgcgatggttctagctcagtcagaaatgccaccaatcgataagtttaagaaaggacataacagcaattacgcaccacttgatcacatcatgtcgattgttttcccagtgttgaagcgcaacaacttatttgtacgctggacttctgatcctaaagaaaatggctcgttatgtgtgacatgtatttgctctcatgtaggtggtcatagcgaaacatcttcaatggatgtgaaagaggatcgaggcggcagcaagtcagatattcaaggtatgggttcggcgttcacttatgcaaagcgatataccctttctgccctacttggtcttgtgttgacggatgatacagacggagcgcgcatcaatcttaaagttactgatgctcaggcaacaatgctacgcaacaaattgaagttctttaagccagaagctttagaagccttcaaagcaaaaattggttgtgaagttgaagaattgccccgtggtgactttgattactggtgttcatacatcgacaaccaaattaataagctaatggcaaatcaaggagaaaagaatgcaaatccttga

SEQ ID NO: 61206 - DNA, 612 bp, Acinetobacter baumannii
atgcaaatccttgattgtgagcaaggttcaagagagtggttagaagcgcgagcgggtctaatcacctgttcggagcttgaagcagttttctctaaaggcaaaggaaaagagctatttggtaaggctgctatcacatacatgtatgagttgattggtgagcaaatcactggtgagcctaaggaaaacttctcaggttttcatacagagcgtgggcatgctcatgaaccagtagcaattgaactttatgaaatgcagacaggtcatgaagtcggtaaatgtggattcattatcggtgagaagttcggatatagccctgacggtttagtgggtgcaaacggtttgacagaagttaaatccaagttgccaaagctacaagcccaaattctttatgaaggggttttaccaccagagcactactaccaatgcatgggcggtatttcagcagcggaacgtgaatggattgatttcataagttactgtccttcaatgcctttgtttgtaaagcgtctataccgagacgagaaagtaataacagaaattaataaccgtgttgatcaattcttagaagaactggacaagcggaaacaggtgattttgggagcagcagcatga

SEQ ID NO: 61207 - DNA, 264 bp, Acinetobacter baumannii
atgaaaaaaatcgaattaaacacaattagcggtacttctgaccagatcgcagaagagatttttaagaaaattattgggcctatggttgatgaaatgaatagccaagataaagactcagcaaagattttcaccttctcagtaatgtggcttggtatggctttatatgctgctcagttcgagccacacaatgctaagaaaacaatccaattcagtgttgatcagttcatggcaacgttcgacaaattcaataaaagaccgagctaa

SEQ ID NO: 61208 - DNA, 360 bp, Acinetobacter baumannii; identical to SEQ ID NO: 60465

SEQ ID NO: 61209 - DNA, 360 bp, Acinetobacter baumannii
gtgcttcgtggtgtagagcattcgtgcccgcatcacctcgaaggagtaaccgcgcccttcacggttcttgtccttggccagtcggttgatggactccgtgtaagcgttggtgacgggcatgtccgtctcgaagtaggtcatggtctcttcgcgccagtttcccactgccctgaccagatcgctccagacttccttttggcccttcgggatggtggctatccactcgtccagggcggcttctgcctggagccgtgtggtggcgtcccagatgccgtagaagcgctccttgtgctcgtaggcggccagcagttgcgggaacgcgcctgtccaggtctccatgatgaggcgctcccggtctga

SEQ ID NO: 61210 - DNA, 258 bp, Acinetobacter baumannii
atgctttttaataatttttatactgataatgatttaaaattttactccaaaacactcctttctagaggctgggtaattttacctaattttttatctagtaatctagttgccaatttagctgaagaagctattttaattaaaaaagacttagaattgggtattcaatcaaactctataacagatgaagaaggcaattttttagtaattaattcactatttgctaagagtgaattcctttttgatttatctagatattaa

SEQ ID NO: 61211 - DNA, 525 bp, Acinetobacter baumannii
atgttatctaatgtccgagaacagtggttctctaacatccgtggggatgtacttgccggattagtcgtcggtcttgcactcatccctgaagccatcgcattttcaattattgcaggtgtagatcctaaagttggtctatacgcatccttctgtattgccgtcgtgatttctttcgttggtggtcgtcctgccatgatttcagcagccactggtgcaatggcgctgcttatggtcacattggtcaaagagcatgggcttgaatatctgctggcagcaacaattttgacaggcgtgattcaaatattggcaggctatttaaagctcgccaagttaatgcggtttgtatcaaaatctgtggttattggattcgtaaatgcgttagcgatcttaattttcatggctcaattgcctgaactgattaatgtgacctggcatgtatatgcttttgttgctttaggtttagcaattatttatctattccctctggttcccaaattaggaaaattacggcactgttgcaaatag

SEQ ID NO: 61212 - DNA, 960 bp, Acinetobacter baumannii
gtgccaaaattactcccttctccactagtctgcatcattgcaatcacattattggcaatcgctttaggaattgatgtacggaccgtgggcgatatggggtctttacctgacacacttccaatgttcttgattccagatattcctttgaatattgaaacattgatgattattttgccttattcagtcgcactggcggctgtaggtttacttgaatcgatgatgacagcaactatcgtggatgaaatgacagatacgccaagtgataaatatcaggaatgtaagggacaagggattgcgaatattgcttctggctttatgggtggcatggctggctgtgcgatgattggtcaatctatgattaacgtaaaatcaggtggccttacacgcttatcaacattctctgcgggtatttttcttcttattcttgttgtatttatcagtgactggctcaaagtgattccaatggctgcattggtagcggtaatgatcatggtctctatcagtacctttgaatggagttctgtcactcagttaaaagataatcctaagagcagtaatatcgttatgattgcgactgtgattgtagttgttgctacgcataacctggctttgggtgtgttaacaggcgtattactttcagccttgttcctggcgaataaacttgaaaatgatatccaggtaacagcatcttttgaaggaacagcccgtttatatgatttgagaggtcagatcttctttagttcttctgaaaaattcatgcaaggttttgactttaaagaggatgtaaaggatgtgattattgatttgacccattctcacatttgggatgtaacatcagtcgccatgcttgattctgttgtaaataaatttcaaaagaatggtgtgaatgtcactgtgcgtggcttaaatgaagccagctctattatgattgataagtatggaacacatgccagaatctaa

SEQ ID NO: 61213 - DNA, 318 bp, Acinetobacter baumannii
gtgctgaatgcccactttttacaaggagcgcgaccagtgatttttgatgtaagagcgacctttgaagtggcactccagacggacacccacctggtacttatcgatctggatcagggagcatcagttacgaacgatgctgatgcagtgatcgcctggttggccgcaaacctcgaaggtggaattggaaaacgtaaggtgtactaccgggacaccgatggacgctttgatgagctcaaggttaatgccggtgcttttgccggatttgcaccttgtagcgaaggccagcagaccaccttggctgggatgctcggccagtaa

SEQ ID NO: 61214 - DNA, 288 bp, Acinetobacter baumannii; identical to SEQ ID NO: 25055

SEQ ID NO: 61215 - DNA, 537 bp, Acinetobacter baumannii; identical to SEQ ID NO: 25054

SEQ ID NO: 61216 - DNA, 1011 bp, Acinetobacter baumannii; identical to SEQ ID NO: 25053

SEQ ID NO: 61217 - DNA, 870 bp, Acinetobacter baumannii
atgaatgatgaagaactcgaacttgccagagccgaagccatgaaagccgataggtgcttttcaaaaggacggctcagggacgaatttcggatgaagcctaagccaggagtagagccagtttcgttctacaaaaacgggtatggtggccaatttggagtgtaccggatagcagattgccaaccaatgcggagaaggggttgttcaccggcatcacaaaagcaaataagggcgcaatccatcctttcggtcaaggcaagaatgcgtagcaacctggcaaaggcctctgtcatggcacaaaggtgggtcgctctggaacctctggttctcgataccgagacgaccggacttggtgaaagagaccaggtgatcgagctggctgttactgacatcagaggcgcggttctcctctgcaccagattacggccaaccgtggaaatagaccctcaggcaatgggtgttcatggcatcaccgagactgagctgtcgaatgagcctacgtggactcaagttgcgccagctctcgcccggcttttgtcgggccgtcatctggtgatatttaactccagtttcgacagtaggatgttgaggcaaacagccagtgcatttggagaccaactctcttggtggcaagagcagaactgtctgtgcgcgatgaagctggcggctgatgcctttggctcaaccaaccggcacggcacaatctcacttgcggatgccacctgcgaggcaggtgtgagctggaaaggtcgagcccattcagcagcgaccgacgctattgccaccgccgacttggtgacagagatagccaaagtccaacgtgacctcgtggtccagctccaggagcttcaaagcaaaggtaatttggaatga

SEQ ID NO: 61218 - DNA, 483 bp, Acinetobacter baumannii
atgacagaacaatcctacggcgaaagtctcaaatttttctcagactggcagaaggaccccgcgaaacgcaccggcctgaatgtgcaacacacgctaaccagaggtgaatatcctacggtcagcatcgagattgcgccgatcagggcatcggggtccagcccagactggaaaagcaagatcacggtgcagctcactcgcggcgaactgacggcgttttgcagcgttctctttggtttgcgtagcaaggctgagggttcctatcacggcgacgcgaagaataagagctttgcggtttacaacaacggcaaggccggtgttgcgatcatccttagtgagcgaggaaaccagctccagaatttcatcaatgatgacgaccgaatggagctcgcagtcttcgcagttcgccagctttccaacgcatggaaagttaccccttctgggggtcgtctcagaattcggaaaataaagcacgctaaggcgtag

SEQ ID NO: 61219 - DNA, 456 bp, Acinetobacter baumannii; identical to SEQ ID NO: 25798

SEQ ID NO: 61220 - DNA, 534 bp, Acinetobacter baumannii; identical to SEQ ID NO: 46224

SEQ ID NO: 61221 - DNA, 210 bp, Acinetobacter baumannii
atgattaaaggaaatattgttgaagacacatgctcaacaaaaagtaatgagatagaatgtaacgaagtcaacagtttgaatattaaacttgatagtgaatatttaaataaagatagtctctataaattagctcaacatacagagaagatggacactagcattgaaagtctaggttctaatcgaaagattatacttatcaattatcattaa

SEQ ID NO: 61222 - DNA, 342 bp, Acinetobacter baumannii
atgaaaaaaaacatttttattattacgggattattcttatctttatcgagcactatttatgccgctacaattcgtctttcgcctgtaacggtggaaattttaagtaatcaaagtgcttcttcgattagtttatataaccagtcaaatgaaagtaccgatttacaggtgcgtgtatttgagtggagtcaaaacaatggacaggatcaattaacccctacggatgaaattgcggttagtccaccttttttaaaattacaacctaatgactcttataatttacgtgtagtgagggttaatccaacgccagtttctggcgaaaaaaacttatcgtattattattga

SEQ ID NO: 61223 - DNA, 195 bp, Acinetobacter baumannii
atgatcaaattaaatttccgtttagcagaatttagtgacatcccaacactagtagagttgattaatcagtcatatagagaacaacaaggtagaagctggactactgaagttgaatatgtaaaagggcaacgtattaataatcaaaagttgttacatgtattggtcttacatttcaaagcaatacagttgagatag

SEQ ID NO: 61224 - DNA, 1281 bp, Acinetobacter baumannii
atgaacacttctctttttccatcaatgaccttggatttagaaggtatgtttaaaccaatctcactgtatatagggttgagatatactcgcgctcgacgcagtaatcattttatttcttttattgcattggtttcgatggtcggtttgacacttggtgtcgctgtactaattacggtactttctgtaatgaacggtttcgaccgcgaattaaaaaatcgtgttttgggaatggtaccgcaagcgacagtttcatcgacgcaaatccttacggattggcctgaactggttaaacgagttgaaaatcatccccacgtgacaggagttgcaccttttacccaattgcaaggtatgttaactgctcaagggcaagtggcaggtattatggtgacgggtattgaccctaaatatgaaaagaatgtctctatcattcaaaatcatattgttgccggtagtctcgactcacttaaaaaaggtgaattcggtatcgtacttggtaaagacatggccgattcgcttggcttacgtctaaacgatagcgtgacattggttttacctgaagcgactccatctccagctggtgttgtacctcgttttaaacgctttaaagtggtgggtattttcagtgtaggtgctgaagttgactcgatggttggatacattgctttatatgatgcttcaactttattgcgtttacctgatggcgctcaaggcgttcgtctaaaattagatgacatttttgccgctcctcaagttgccgatgacattgtgaaaaatttaccaagcaatttctacgcaaccaactggacttatacacatggcaacttatttaatgccatccaaatggaaaaaacattagttggtttattgcttgtactgattattgttgttgctgcatttaacattgtttcatctttagtcatggtcgtgactgacaaaaaatcagacattgcaattttacgtactttaggtgcatcgccatctatgattactaaaatctttatggtgcaaggtacggttattggtgtgatcggtacagttgcgggtacggttttaggggtaattctggcacttacgatcagcgatattatttcttggtttaataatgttctcggacttaatctgttcgatgcctattttgtacattacttaccttcttacttaagatggcaagacgtgacaattattgtgattgtttctttactcttaagtttcttggcaactatttatccggcgcttcgtgcagccaaagttcaacctgccgaggcattgcgttatgagtaa

SEQ ID NO: 61225 - DNA, 876 bp, Acinetobacter baumannii
atgaaaaaaatctttgtattaactctactggtatcttcaacatctatttttgctacttcccccccgcttacaccacaaaatttagaaaaatataagggtaatcaagaaaataagatgtcacgtttgagagtaagtctggctgtttctagcaataatgatcagggtgagattaatatctctaatttcactttatgttcaacaattacttgctggaaagctgaggttaataaacctgtacctattgtaaatagtagtaccacaagaggtcagctagtagctgacgttttaattccaatgaatgagcaacttaaacagatcttttttgaaccaacgacaggaaagcagtcgattgaaggcaatttaaagttcgaaaaagtagtcaaaattgagcctgaatatcaaggccacactttgtatattgttttagataaggttagtaaaggaagcggtgtatttcgctactttccagtcgctagtagtgcgttgccttttaatcctgaattaaaatactatctaattgatccaaaattcaatcaaacaattaatctaaatagtaaaagtatgattacgtttccagcaaatttcttgcctgagcctcaattattttttattgctgagcataatgtaggtaaaaaatttccaatgctcgatatatatccttacctcaagggcagaggtgatcttaaaattaagttagctgaagtaaataaagggagtaacagtcatcctcaaaaccaagttatttcctcaataagatattctgaaattacttcttctaatactcgtgtaattaatggatcggatactcccaatacagcagttttagaaaaaaagtcattatggctcaggctgctgaatattctaaatttagaataa

SEQ ID NO: 61226 - DNA, 534 bp, Acinetobacter baumannii
atgattaaaattagcttagatacaaatgctgtattagacttttgttacagaaattatccagaacaaatatttaaggaaatatggagttctttagaaagctccagactagccaaccaagttaagttttatatgtgtgaagctgttttgcatgaaattgaacaaaagattgcagactatgaatatgatgaatcaatatttcatgcctttcttgatcgtttctgcgttcatcaaatcaagccaaatgaacacggagcatcaatccttggtttaaaacaagagttattaaaatataatgcatcaaaaaattcacaccacgtaacaaaagataattacgctgatcttgatgttgttagtttggctcatcattatggttcagatgcttgtgttataacgtgcgagcaaagaaatccttttttaaactgggatgctaaatcacaaggccacaacatgaaagttcccaatatttgtgaaaaactaaatattgaatgtggtaactggtcttatttattttcaaaacttggatttttgttttaa

SEQ ID NO: 61227 - DNA, 1074 bp, Acinetobacter baumannii
atgactgacatgaatgtgtcagcgagtgcactcgccgatttaactaagatatctcaaagcaaaattaataaggccttggatgaagttgaagtatttaagctgagccaattagaaactatttcaaaagttttatttgtgccaacagtgtatctaacaactgataattttatctatgagcgtaatacgcctgaaataatagaatttagaaatcatatagatatcccagaagatagatataaagaaaatgctttagtgcaggaattttgccaagttagagataactttatatctatattaagttctctgaatgaagagcctaaagctttcgatttgaagcttagcggaactaatgcagaagaagatgctcaagcaataattgactattttggtttttacacacacagcaaaaaaatcaagaattcagatgattactttaatgcttggagagacattgtagagctcatggatgtagtagttatagatagagggcgtgataaatttggctcggatggtatgtgtttgtattttgatgcggtacccattattgccatttttagctcaggacaatctcaatctagaaagctatttactttggttcatgaaattgtccatttgggattaggtagtagtgtctttgatgggcgattactagaatctgacaatagtcttgaaaaatattgtgatcaagttacagggtatgttttagccccaaaaaatattgtggctgattgctttaatgaaaatttaaccatcgaagagaatgttattcttattcgaaaacaaacaaaagcaagcaaggcagctattgccattcagttaaaaatacttggattaataaatcaagatcagcttgctgattatttagattacatcaaacccaaagaaaatggtggggggttcggttctaagaaggaaaatatggtcttaaagtattttggctacaactttgttgaaaaagttatgagtgcaatgtggcaagagcgcatatcatccaataccgccaaaaatattcttggattccataagacatcaaaaccgtcagcctttaaagaattacagcaaaaggtcttctaa

SEQ ID NO: 61228 - DNA, 732 bp, Acinetobacter baumannii
atgcgttatagaattcattatattgatgtgcaaaatgccctacaaaactatatctggattttagaagatactgagactcatgaagctgttgcagttgatccaacagaggctgagttagtcacccacttttgccaagaacatcaattaactctaaaacagatttggcttacccattggcataaagaccatatcggcggtgttgctgatttaacggctaacacgcctatggcggtatatggcccaagagatgaactaagtaaaatccctggcattactcatcccttacaacacgatgatcatctaaaatttaatgatttaaaagtagagattattgcaacaccaggccataccttaggtcatattgtatattttattgaagagcttaatgccctcttttgtggagataccttatttgcaatgggatgcgggcgactatttgaaggtacagcagaacagatgtaccactcactaaatcgtcttgctgcactacccactgcaacaaaagtgtattgcacacatgaatatacactttctaatgcggaatttgccttaagtgtagaacctgaaaaccacgcactgcaagaacgtgctgaacaagtccgcatgcttcgtcaagaaggtaaaattaccttgccaagtagtattgaacttgaactagcaacaaatccctttttacgtgctgaaagtgtagatgagttcgctcacttacgtagcttaaaagacaatttttaa

SEQ ID NO: 61229 - DNA, 252 bp, Acinetobacter baumannii
gtgaaagcaataaaacgagttaaagcattccaaaacatttttgacattttgttattcgctacacatgcaacacaacctttcacgatgaaggatttgcatgactatgtgctagatgcgcccaacaacactatccagtgctatgtgcaggaattaattaaaagcggctacttggaaaaggactcatacgcaacttacaaagcaactcagtttgcaaaggacttgctgaatgttaaaggggagctgaaagcatga

SEQ ID NO: 61230 - DNA, 894 bp, Acinetobacter baumannii
atgaaaaagaaccctcatgttctttcagtagaaagcgatacaatagtaaatattgatgcaactactcaaagtaatccagattggggactagatcgtatagaccagaaagctttaccattaaattcggcttattcttatttacagaccggttcaggtactacggcttatatcgtggatactggtatattatctagtcaccaagagttttcaggacgtgtgttaagcggttataccgcaatatctgatggcaatggtacaaccgactgtaatggacatgggacccatgttgctggaacagtaggtggtacgacctatggtgttgccaaaagtgtcaatttagttcctatccggattttggggtgtgacgggtcaggagcctcaagtaatgttattgctggtttagactggatattgaaaaatggtaaaaaacctgcagttgtaaatatgtctttaggtggggcgacaagttcttctttagatagtgcagtggaaaatttatataataatggttatgttatggtcgtagccgctggcaattcaaatacagatgcatgtacatcttctccagcaagagtaagtaaggccattacagtggctgcgacagataataccgatactcgggcaagctattctaattatggaagctgtgttgatatttttgcaccgggtagccaaattaattcttcttggattggaagtaatacagctaccaagatattaaatggtacttcaatggcaaccccgcatgttgctggtgtagttgctgaaatgcttcaaagtacacctacggcttcacctcaaacgatctctaccaatcttttaaatcaagcgagcagtaacgtagtaaaaaacccttcaggtagtccaaaccgcttgttatataaatctccttaa

SEQ ID NO: 61231 - DNA, 384 bp, Acinetobacter baumannii
atgaaaaagaaccctcatgttctttcagtagaaagcgatacaatagtaaatattgatgcaactactcaaagtaatccagattggggactagatcgtatagaccagaaagctttaccattaaattcggcttattcttatttacagaccggttcaggtactacggcttatatcgtggatactggtatattatctagtcaccaagagttttcaggacgtgtgttaagcggttataccgcaatatctgatggcaatggtacaaccgactgtaatggacatgggacccatgttgctggaacagtaggtggtacgacctatggtgttgccaaaagtgtcaatttagttcctatccggattttgggatgtcacttcggttgcaatgcttga

SEQ ID NO: 61232 - DNA, 321 bp, Acinetobacter baumannii
atgggcgatgtgggcggcgcggatcatgatcttggacggcacacagccgacattgacgcaggtgccgccgatggtgccgcgctcgatcagcgtgacctgcgcgccttgctcgacggccttcagtgctgccgccattgccgcgccaccgctaccaatgacgacgacctgcaacgggcgttcgttgccactgggcttatcagcggcccctatccagccgcgcatcttgtcgagcaggccggcgcggttgtccgtcggtggcgcatcggcaagcgttgcctcgtagcccagtccggccacggcggtagtcagcgcatccgatga

SEQ ID NO: 61233 - DNA, 429 bp, Acinetobacter baumannii; identical to SEQ ID NO: 60511

SEQ ID NO: 61234 - DNA, 882 bp, Acinetobacter baumannii
atgtccattgaagaatttatcatttttgtctatgtaatcatagaagaactttatcccattgttgttactcagcccctgagaactcgtggttttccgcctgctgttactgatgcagaaatcatcactatgcaaatagtaggtgaatttcttggtttagatacagacaaaaatatttggatgtatttcaaaaacaattggttagaatggtttccaaaattaggatcttatcccaatttctgtaaacattgtgcaaacctgtggcatgtcagtcaatccattatggcacagctcattcagcgttatggttcagataacattcactttattgatggcttcccactccctgtctgtagttataccagagcgagaaagcataaaaactttaaagaatacgcaggttttagttattgtgctgcaaaacaagaaaaatattatggtttcaaagctcatatcgtcattaatctttcaggcatgatttcgggttatacctttgcacctgctcattgtgatgagcgagatgttgcacctgaaattacgaatgatatttacggtttactgggagcagataagggctatttaagaccagaattgaaacgatattatgaatatcagggtattgatttacaaacaccctttagaaaaaacatgatagatttcagacctaaagagacactgcaaatactgatgaaagccagaagaaagattgaaacagtgattggtcaattaacagatcgctttcacattcagaaagtgagggcaaaagatctatggcatttaacccaccgcataactcgtaaaattctgtcgcatacaatttgtgtggtgctaaataaaaagcttggtcattcaccaattcaattcgaaaatcttattttaagttga

SEQ ID NO: 61235 - DNA, 600 bp, Acinetobacter baumannii
atgatagctaaattagaggactcaaaattagtgaaagaaattaagctgaaagagatacgtgatcaatgtatagctttacaaaaagcgatggatgcttcaagaaaatcgaaggtagatgatgtctggttgcattcaagttttaaaacttttatgcgtaaatataatgagatattagcgaaagctcaggaagtaattaatattagagctcccgtagacgtgtataatttagaaaaagttccttcagcttttgataccgtcacgattgaacaaagaatttattttgatgaagtctatactaatcttttaattttaaaagcatttgttgaaactacgggtggtttggatgaagttgaagcagataatattcttaattttttaaaagcaaatcttcgaatggttttagaggttaaaatctgtaatcgatcaggaaaattagcagaaataattgatgagatgaatgccgatatagttgcttatagcagtggatatgaatttatttattttctaatttatgaccttggttatataagggatgaagatgaaattataaaaggattagaaatatcagataatattaaatgttttattgtgaaacattaa

SEQ ID NO: 61236 - DNA, 465 bp, Acinetobacter baumannii
atggaaattatggatttatcaaaagctgtacagctagctattgtttttagtggcgtctttttatggataggaatgttaactggagtatggaaatattggcaaattcgccgttccaaattaagccgcgcacattattatgtagatattgcacatagaagcagtttgctttatgcagcagccacacttattctggttgtattgagctatttcacgattttaaatgaagatattgctttatggtgtgtattggcaaatatactgttttttagtttctcaattttagtttatatcatccacggatttttgcaggatacgaccaatcagtttaaacaacctcataggttagggcatttcagtttacctacatggttgatgacgtttatgatgttcgctttaattattactgagctattagcaactgctattttagtgatggggacaattttattgtttttaagcaaataa

SEQ ID NO: 61237 - DNA, 216 bp, Acinetobacter baumannii
atggacaattcaaaacgaccaatcaaccagattattgctcgtatcaatgatgctgctaaacatggtgaagctttggtgctaacagccgaagaagtgaagatcctctctaaggatattggtgataaagtctttattccagtccttacaaatgaacaagtagtgcagttggtaaaagaaggaaagcttggaaaaccaatgtttccagaagctgagtaa

SEQ ID NO: 61238 - DNA, 162 bp, Acinetobacter baumannii; identical to SEQ ID NO: 49400

SEQ ID NO: 61239 - DNA, 162 bp, Acinetobacter baumannii
atgtctgctgaaactgtgcctgtacctggcaatgaagtgttgcctgcagggtcagtcgctgttgcagtcactgtatcgccatccaccaggttacctgggtttggtactgaccagctaccatctgttccagctaccactgttgcagttgtgccatcaggataa

SEQ ID NO: 61240 - DNA, 162 bp, Acinetobacter baumannii; identical to SEQ ID NO: 49400

SEQ ID NO: 61241 - DNA, 519 bp, Acinetobacter baumannii
atggctaaaggttttgcaattcacaatgctattactgatcatggtggagttattccatctacgcaatcgagaagttctcaaatgggaaacctatttgttagagctggtgatggtcatatgtgtcctaaatgcaggtgttggtctgtagttattaaaagtcatgaccatgtgatttttgatggtaaaccagtggcgtatgcgggtgataagttatcatgcggagcgactattcaaccacaacagtctcatgttgtaggagagagtggtagtccttattctggaaaggatagtaatactcaaagccaaaaatatgatgagcaattgaaaattacttttaatgatgaaacagatgaattacttaaatattttgattgtcgggtcaaaattggtgaaaatttcagaaatgcaaacttagatatcactggtaaaacaaataggttttatactgaaggaaaggaacctattactgaaattgagttaatattaaaagataatattatttactttgatgaactgtag

SEQ ID NO: 61242 - DNA, 477 bp, Acinetobacter baumannii
atgcagcttgcttacgagcaagctgaattagcagccaagcagggggaaattcctgtaggagctgtaatcgtgagccaaaataagttaattggagctggttttaatgctccaattggtttatgtgatcctacagctcatgcagaaattcaagctattcgtgcggcttgtgagtcattgaaaaattatcgtttacctgaagatgcgactttgtatgttacgcttgagccgtgcacaatgtgtgtgggagcattagtacatgcaagaattaaacatgtcgtatttggaacaacagaacctaaagctggctcactcgtgagtgcacgtcaattattagaaaatggttattacaaccataaatttacttttgagcatggatgtttacatgaaaaatgtgctcaacagttaagtcttttttttaagcaaagacgtgaacaaaagaaacaagagaaacaacaaaaaacgtccttaaatgattaa

SEQ ID NO: 61243 - DNA, 1176 bp, Acinetobacter baumannii
ttggcaaaccgaaaacttaaaataggcattgtagttggagaagtttctggagatacgctcggcgtaaaactcatgcgtagttttcgtgagcagggaatcgatgctgagtttgagggaatcggtggccctcaaatgattgcggaaggttttaacagttattacccaatggaaactctgtctgtgatgggcattgttgaggtattaaaagacttaaaaaaactattcgccgtacgtgatggcttaattaatcaatggactcagcatccagttgatatttttattggtattgatgcaccagactttaacctcagactttcgaaaagtatcaaagaaaagaatctaccaataaaaacagttcaatatgtgagtccatcagtttgggcatggcgccaagggcgagtacatggcatcaaacaaagtatagatttagtactttgcttatttccttttgaaaaagttttttatgaacaatatgaagttccagcggcatttgtaggccatccattagctaaacaattaccgcttgagaaccctattcaaattgctaaacaagaattgggtattgatgaaaatcaaaaacatattgctttgttgcctggtagccgcaaaggtgaagtagaaaggcttcttcctatgctattgggggcagccaatattttgcatacaaaatatccagatattcaatttctaataccggcaattaatgatgcgcgcaaacagcagattgagcagggggttgaacaattagcaccgcagttaaaagcaaaaattcatattttagaaaatacggatagcgaatcgaaaattggtcgtatggtcatgaacgcgagtgacattattgctttagcgtctggaacggcgacattagaagcaatgctcatgcatagaccaatggtcactttctataaactgcattggctaacttatttaattgctaaattcttggtgaaaataccttattactctttgccaaatatcatcgcgggtaaaaaagtaattgaagagctgattcaggcagatgcaacacctgaaaatttagcggctgaaatagaaaaactaatgaatgttgaaactgctcaaattcaagtaatgcaacatttaactatgcataaacagcttatttctggaaatacagaagatccagttcaagccattttgcaatgtttgaatagctaa

SEQ ID NO: 61244 - DNA, 222 bp, Acinetobacter baumannii; identical to SEQ ID NO: 56425

SEQ ID NO: 61245 - DNA, 612 bp, Acinetobacter baumannii
atgacgctgacagaaaaaacaggccatctggcatggtgtgcactggtcgcgctggcactggccagacaggagcagggagaactctctcccgcacaggaaaatctctttctcacccgctggctcgcggcagcactgaagcaacggcgattctcgcgcgatgtggcacaggatatcgggtggttactgaatcaggggcgtttgctgggtgtgagagctaagctggccgacaaactgggctatgtctggcgctcctgcagcggcgagttgactgaacagaacgacatgttccgcctgacgtatgcgctggaaacagcgaaagacatgggctggaattaccgcgtaatgagcgacagagaatgggccggacgatatgctttggtactcaatcctggagtaaacggtgtttatctcttacggacaaaccttgatgccgcttttgacgacaatggccaacagacaaatccgctgacagtacgtctgacagggaacgtaactgggataatgaaactgttaaatcgctgtggctggcaggctgagcctgagtctgatgcctccctgccccaccagttttcactgatggcccggcagggagtgccaggaaagggggattag

SEQ ID NO: 61246 - DNA, 282 bp, Acinetobacter baumannii
atgcgcgttgccgaaagcatcatcctcgatgccctcactcgcggaggatgcatcaaaaccttttaccgcatatcctcacggcaggctgctgaatcggccacgcggatacctgaggggtatattctggagtcgcccggcgagcgggaagatattgtgctctcgcgcgcggactttcatgcgctggagaagctgctggagcagaaggaaacctgggagcaggtggtcggtgtgacctgttttggtggggcaacatggcagctgagaccgactgtacagagctga

SEQ ID NO: 61247 - DNA, 858 bp, Acinetobacter baumannii
gtgactgatatccttcaaaaccactattcacaggttaaaaacccgaacccggttttcacgccgcgagaagggaaaaagaccctgccgttctgccgtaagctgatggcgaaagccgaaggcttcacgtcccgttttgatttttccattcatgtggcgtttttgcgttcgctgggtaagcggcacaggatgccaccactgttgcgccggcgtgcaattgacgcgctactgcaggcaatgtgttttcactatgatccgctggccaatcgcgtgcagcgctcgattaccaatatggccatcgagtgtggactggccaccgagtcaaggagcggcaacctgtcagtcagccgtgccacgcgggcgctgaagtttttggcggagctggggctcatcacctatcagacggaatatgacccgcagatcggctgtaacatcccgaccgatatcaccttcaccccggctctgttttccgcgcttgacgtttctgaggtggctgtggtggccgcgcgccgcagccgtgtggagtgggaaaacctgcagcgcaaaaagcagaaactgaaaccgctggagatggacgagctgatcgcaaaagcgtggcggttcgtgcgtgagcgttttcgcagctatcaggctgagcgtaaatctcacggccggaagcgggatactgcacggcgggatgcatcacggcagcgtcatgacatcgagacgcgcgtgcgtcagcaactgacccgcgaatacgccaccggccgcttcaggggcgataaagaagcgctgaagcgtgaggttgagcgccgtgtgcaggagcgcatgctgctgtcgcgcggaaacaactacacgcggctggccactgcccccctataa

SEQ ID NO: 61248 - DNA, 198 bp, Acinetobacter baumannii
atgactgaaaaaattattgctctcgtagattatgaaaatattggtacacttgaaagtgtccgtctgtcccgttatgaacgccttattttatttaccgggcctctattgatgaaaatgtgtcatgacgatgggttaacacaggctgaagtactgtcccggttgatccaccgcgaagcattagccagaaacatagcttaa

SEQ ID NO: 61249 - DNA, 594 bp, Acinetobacter baumannii
atgagtgaagaaaaacgccctgtactgagcctgaaacgaaaaccggcggagaacagtacgacctccgcagaggcgacccctgctcctggtgtggtgcgccgaaagaaggtcgtggtggtctcgtccccgccggcctggaaggcaaaaaaagagaaacttgagaaggttaaacaagcggccgaagccgccgcgcgcaacgctgcgccggtgccggttaaagcggtaaagacgccacctccggtgcattatcttcgcctgctgccgccggaacaggccatcatgaccctgaaggcattctggccacagctgttcgacggaaactcaccccgtctgctggcaacgggtatgcgcgaacagctgttcgccgacattgtgaaccgcgacctgccgctgtcgcataaacaggtcattaagtgcctgaagagtctgacccggtctgcgggctatctgtcccggatgaaggtgggggcctcccgctatgatctgcaggggaatgccgtcgcgaccgtcactgcagaggaagcgcagtacgccagtgagcgcatgatgaaggagctgctgcgggctgaacgaaagatgagtcagaccctttaa

SEQ ID NO: 61250 - DNA, 726 bp, Acinetobacter baumannii
atgagagcacaatacacatttccaggcgcgacagacagctggcttcagcgcctgctgacctggacaccgggacaaacggatatgattaaaacggtcgcactggtactgatggtgactgaccacaccggcttactgctggccggaaacaatgaagtgatgcgcctgctgggacgtggttgttttccgctgttcggtctggcatggggaatgaatctggcccggcacgcggaaatacgccagtctcaactgaacagcctgtggggctgggcgctggtcgcccaggtgtcgtttatgcttattggatacccgtggtataccgggaatattctgtttgcctttgccgttacgggccaggtcctgcggtgggtcagccagccgtcctggtattacaccctcccggcggctggactgctggtcacctggatacccctgtcaaccggcagctacggcatggccggagtgggcatgctcaccgccagctggctgctttgtcgcgcacagcatgcaccggaacggctgggatacggggtgctgtgggccctcatggtgttgctgatgaatatgcatgacgtgagtgaatcagtggccgggctggcgattgcgctgctgacgctgatggtgtgctcatctgccggagaacgtgtgaaacgcttctggccgcggcagttcttcgtgatgttctatgccgtgcacctggcggtactcggtattgtcgtctcgatgtaa

SEQ ID NO: 61251 - DNA, 2037 bp, Acinetobacter baumannii
atggtggggctggccgatatggcaaaagcccactccctcatcgccgccggcggtggacgggcggtgcccagcggggataccgaccagctgccgcccatcgcgtcgggccagccgttcaggctgacgcagcagcgcagcgccgccgacgttgccatcatgaaagagattgtacgccagatgcctgagctgcgaccggcggtctacagcctgattgagcgggatgtgcaccgcgccctgaccaccatcgagcaggtcacgccggagcaggtgccgagaaaagaaggcgcatgggcgccgggcagttctgtggtggaattcacgccaaagcaggaaaaggcgatagaaaaggcgctgagcgaggggaaaaccctgccggaaggtcagcccgcgacactctacgaggcgctggtgaaggactataccggacggaccccggaggcacagtcgcagacgctggtgatcacccatctgaataaggaccggcgggcgctgaacagtctgatccatgacgcacggcgggagaacggggaaaccggcaaagaggaaatcaccctgccggtgctggtcacgagtaacatccgtgacggtgaactgcgcaaactgtcgacctggacggctcacaaggaggcggtggcgctggttgataacgtataccaccgtatcagcaaagtggataaggataatcagctgatcaccctgacagacagtgaaggaaaggagcgatttatctcaccccgggaggcatcggcagaaggcgtcacgctctatcgtcaggaaaagatcaccgtgtctcagggggaccgaatgcgcttcagcaaaagtgacccggagcgcggctatgtggccaacagtatctgggaagtgcagtctgtttcgggtgacagtgtcacgctgtctgatggcaaactcacccgtacgctgaccccgaaggcggagcaggcacagcagcatatcgacctcgcctacgccatcaccgcccacggcgcccagggggccagcgagccgtatgccatcgcgctggaaggggtggccggtggccgggaacagatggccagctttgagtctgcctatgtggctttatcccgcatgaaacagcatgttcaggtctacaccgacagccgtgagggctggataaaggccatcaagcattcacctgagaaagcgacggcgcacgatattcttgaaccccgtaacgaccgggcggtgaaaaccgccgatctgctgttcgggcgggcaaggccactggatgaaaccgccgcgggccgggcagccctgcagcagtccggtctggcacagggaagttcaccgggaaaattcatttctccggggaaaaagtaccctcagccgcatgtggcgctgccggcatttgataaaaacgggaaagccgccggtatctggctcagcccgctgaccgatcgggacggacggctggaggctatcggcggagggggacgaattatgggcaatgaagacgcccggttcgtggcgctgcagaacagccgcaacggagaaagcctgctggccgggaatatgggggagggcgtcagaatggcccgcgacaatcccgatacgggggtggtggtgcggctggccggtgatgaccgcccctggaaccccggggccatgaccggtgggcgggtatgggctgaacctgcgccggtggctccggtaccgcaggccggggctgacattatcctcccgccagaggtactggcacagcgggcggctgaagaacagcagcgccgggaaatggaaaaacaggcggaacagactgcccgggaagtggccggggaggcgcgtaaagccggcgagccggcggaccgggtgaaagaggttatcggggacgtcattcgcggactggagcgtgaccggccgggtacggagaaaacgacgctaccggatgatcctcagttccggcgccaggaggcggcgattcagcaggtggcctcagaacgtctgcagcgtgagcgtctgcaggctgtggagcgtgacatggttcgtgaccttaaccgcgagaaaacactcgggggcgactga

SEQ ID NO: 61252 - DNA, 330 bp, Acinetobacter baumannii
atgcagtccattagtctcattattcaaatttttcttgtattagcatttggttattttctaggtcctaaactctcactaaatattcggcattttatttttaaaatcctaccttatttttcttatattttactaaccagtgtagctttagaactaacactcgcccttgatcaaattgataatccttctactatacttccacctgctctattaattgcattaaccacttctcttggttctttttttacttgcttattcgcctatacaatttttgataaagaaagtgattttaggaattcttcttacccaattacatacccatattccctttaa

SEQ ID NO: 61253 - DNA, 3999 bp, Acinetobacter baumannii
atgaaccagtttgtaacgaacacgaaaaatgtaattcgtggaaagtatcatccggaatttttgcagaatgaagtcttagccgatatttttgctcatactgcacaaactcttcctgataaaacggctttaattgaagcagataaaacgctgagttatggtgagctgtatcagcaagccttaattatggctcaacatctggctttaaaaggggtaaagccaggtcatattgtagggctatggctgccgcgtggtattgagcttttaaaagctcaactggccatttgtttaagcggtgcagcttggcttccttttgatatggatacgcccgcggaccgtattgcggtatgtcttgaagatgccgaagcggtgggaatgattactacagatgaatggtatgaacatttagctgaagtgccacaaacaaaatggaccaacaccgagctgcaaaaaccactaagcgaaagtgtaagtttagcaaaaaccactccagatcaacctgcctatattatttatacctcgggttcgacaggtaaacccaaagggattgtgattactcaaaaaaatatttgtcactttttacgtagtgaaaatagtattttgggtattcaagagcaagacaaggtctatcaaggcttttcagtcgcttttgatatgtcgtttgaagagatttggctttcttatttggtaggtgcaacgttgtggattgcaccgaagtcacttgtcagtgatcctgagcggttatgccaaaccttaaaacaggaacaaattacagtactgcacgctgttccaacattacttgccttatttcctgaagatgtacctaatttaagaattattaatttaggtggggaaatgtgtccggattcactggttgaccgttgggcattacctcatcatcaaatgtttaacacctatggaccaaccgaaaccacggtttctgcaagtcttgagttattagaacgcggcaaacctgtcaccattggcaagcccttaccaaactacggtatgttggtcattaactctgaaagagagttgctcgagcaaggtgaaacaggggagttatgtatttttggtccaagtgtggcacaaggctatttaggacgacctgatttaaccgcagataagtttattgagaacccttgggcaatgagtatagaggaagaattactctaccgtactggggatttggctaaaattgatgagtttggtcaagtacactgtttaggtcgtgccgatgaccaagttaaaatccgtggtttccgtgtagagcttggcgagatcgaagctgcgctttgcgatattgacggaattggtacggcagccgttattcttcgtcctgaagacggcattgatcaacttattgcgtttattgcaccagaaattgatgcaaagcaagctatagaaattaaagaactacgtcataacttgagtcagcgattaccgccttatatggtgccaaatcgttttgagattattgaagaagttccacgtctattatctgggaaaattgaccgtaaagctttaaaagcaagaccgctcacgagtgtggtagatcgcagtgaatctgaccagccacagaacccagccgaagaaatcctatttgaaattttgaatcgcttgttcccgaacatgccgattaaactcgattcagatttctttgatgatttaggcgggcattcactactcgccgctgttttaatttcaaatctgcgtgagcatgcggaatatagccatctgaccattcaaaacttatatcaagcgagaagagtaggcgcgattgctgcactcatgttagagcagcctgagcctactttatttgatagccaaattggacaagataaccctcgtaatcagacttataaatggttatgtggtattgcccagctcgttactattccggttttaatctcgattaatattttgcagtggttagcgccattctttacctatcactactttaccggtggaactcgcgacagtattccgtatgcgattgcgttgtctttattggtgtatgtcagtgttattattagcagttttgtactgtcgattacggtaaaacgactattaatgttaggaattggtgcagggcgttatccattatggggattaacctatttccgttggtggctagcggaccgtattagtaatatttcacctgtttatcttttatctggttcgactttacttaacttatatttgaaagcacttggcgcaaaaatcggtcacgacgttaccattagttctgtacatattcgtatgccatctttactgactattgaagatggggtgagtattggttctcaggtgaatttagaaaatgccaaagttgaacatggtcatttggtattaggttcaattcaccttaaacaagacagttatgtaggttcgtatgctgtattagaagaaaatacagtgttagaaaaacaggcccatgtaaatgccttaacttcaattgaatatgacacggttgtacctgagggcgaaatttgggatggaacacctgctcagaaaatagggcatatagatgagcaagctaaattgccagagcgtcctaaactatcgtttatacgtaaaattgctgaatatggatactatggcgttagcgcattaattattgcctgtcttttctttattccaatttttccaagcttccttttggtcgactggttagatgtaaatgtatttaatattaacccgaacaaccatttgcaaatcgcgctttactatttcattttagcgattccggctagtgcaatgatgatgatgattactgcggtgatttcttcaggcctacgtaaaatcgcattgccgcgtcttgaaattggaacctatgcggttcatggcagcacgtattatcgtaaatggtttgccgcccaaattttagaaacgagcttacaaaccttacatggcttgtttgccaccatttatgcgcctacatggttccgtatgctgggagcaaaagtgggtaaaaataccgaaatttctaccgcaaccggcgtcattccagaaatgctgactttgggtgaagaaagctttattgccgatgcggtaatgctgggtgatgaagagattaaaggcggttggatgtctttaaaagcaaccaaaatcggtaaccgtagttttgtgggaaatagtgcttatattgctgatgggacagtgttaccagacaatgttttaattggcgtgcaatcaaaaacaccagataaccgtgaaatgtatgacggacaaacttggtttggttctccggcgttgctgttacctgcacgtgaagctgctgaaaaatatcctgaccatttaacctttaaaccaagtattaagcgccgtttaatgcgtggttttattgaagggcttcgtattgtattgccggccgcacttgcgattggggtgggttatatgatcgtgctagacgttattgatgtgattaataactacaatattgagacaggactggttgcattaacgctcgcagggctgctttatggtgttggctgtttccttattgttgcgctattaaagtggattttgattggtcgctatcaaccgcgttcggcacctatgtggaccatgtttgtatggttaagtgaagggattaccagcttatatgaatcagttgcgattcctaacttcttaaactacttaagaggaacgccaatgttgccattcttcttgcgtattttaggggttcgtattggtaaagacgtttatatggatacggctgatattaccgagtttgactgtgtcagcattggtgaccgtgccgagtttaatagcttttcaggcccgcaaactcacttgtttgaagaccgcattatgaaaattgggcaagtaaatgttggcaatgatgtagtggtcaatgcgcgcagtattattttatataacgcaaacgtgagcaatcatgctgtgttaggtccattaacactggtcatgaaaggtgaaaatattccggctaaatctgcgtggattggttcaccggctgtgccttgggttcataaataa

SEQ ID NO: 61254 - DNA, 462 bp, Acinetobacter baumannii; identical to SEQ ID NO: 49741

SEQ ID NO: 61255 - DNA, 1971 bp, Acinetobacter baumannii
  misc_feature (14)..(23): n is a, c, g, or t
atgaccttaaaacnnnnnnnnnnccttaaaacagtagataaaaaacaaatcaacaaatctaatgggcgaaagcccgctatagaaattaatagtcatgaagacttatcaaaaattataaatcctactgttcctgagcgtgatgaaaggggccgttttgtatctaatccaaatgaaccccaaaaccaatcatcgattcgtaaagttgcccaaacgatatctacggcgattaaaggagtaatgccgaactcaacacaaggtgtagatcctacagttgacgcaatcaatgaagttggtcatttactttcacctgtacgccgtgcagcaggattagctttgcggccattaactggattgatgcgtagtaaaaagagaaatgagccattacctcgtgaacaagagaaccataaccgcaaacaaataaagttattgcagcgtattgccgataatttggcgtctaagggtggtttgttaggttctctagggaaattgcttacttccgtgttatctgctggtggtgggcttctaggtggtgctctaggcaaaggaaagaaaggtgtagggaaattaggaaagggcttaggtaaatttcttaagtttggccgtggtctacccgtaataggtgcattggctgctggtgcatcattattagattggaatgaacaaagcacacaagaaaagggcggtactgtaggtagtcttgctgggggcgttattggtggcacggtaggatcaatattaggcccagctggtactttgattggtggtatggctggttcatggataggtaataaacttggtaccgcagttgcgccgtattttaaagagtggacagattcattaatagctgcagatgtaccaggtattattaatactgcttggaaaggatttgtaagttatgcttctaatgcttttgatcaggcaaaaaacactgcttcaaaagttgtagacggagttaaagatactgctggtgataccttagatttcattaaagataaatttaaccgatttaatccatttcatgatggtgttccaacatggggcattgggcaaggagtttataagccgggttttggtgcaaataaaaatgtacctgcttatggttcaactgtttctccaattggtgaaaaaactaaggaaaagcaacttgcagtttacaatgcaatgaagagagctggttttaatgataattgggctgctggtttaactgcttctgttggtagggaaaatgactaccaagataaatatctgtttggtaaacaccaggataaagctggtggtacgaatatgggtatgatctcttggcaaggagcccgtaaagaccggcttacggcatatatgaaggaaaggggattacttgatgcaaacggtaatatggtacggagccaagcagctttagatgcacaaggtgcatttatgaagcatgaaatcgaaacgaatcctgaatatgcttcggttaaagcttatatgcagaataacccaaatgcatcaaaagaagatattgcccgagttctcggcacaaaatatgtaagatgggcgtatgggcaaacaaagcttcgcaatgggcagtcatttgattatagaccgcatttagaaaaggaatataaatacagagctaacattgataaaaccgttcaggaacagaaaactaatctacctaaagaaaataccccagctgtatcagatttgaaatcaagtcatattgtggaaaatacaagagctaaagttgctagtgttttaagcacccaaaaagctatcgttccccaagctactacaaaagcaaaaccttcattaaataatcaaaatagattattaactaatgtcacgccgtttaagcaacctttaaatactcctaacccacaggaagttgttgttgtaaatcagaataatggtaacatcgggcagaatgttagtgatcgtttccttgctcatgctctaactggcggcattggaatggggaaattagacgtttag

SEQ ID NO: 61256 - DNA, 1275 bp, Acinetobacter baumannii
ttgttatgggggccagataatcaaatttggttaaccgaacgtgcaactggcaaaattttaagagtaaatcctgaatctggtagcgcaaaaacagtatttcgggttcctgaaattgtgagtgatgctgatgggcaaaatggtttgttaggctttgcttttcatcctgactttaaacataacccttatatctatatttcaggcacttttaaaaatccaaaatctacagataaagagttacctaatcagacgattattcgtagatatacctataacaaaactacagatacatttgaaaagcctattgatttgattgcaggtttaccatcatcaaaagatcatcagtctggtcgtctcgtcattggtccagaccaaaaaatctactatacgattggtgaccaaggtcgtaatcagttagcttatctgttcttaccgaatcaggcacagcatactccgactcagcaagagctcaatagtaaagactaccatacatatatgggtaaagtattacgcttaaatctggacggaagtattcctaaagacaacccaagctttaacggagtagtgagtcatatctacactttagggcaccgtaatccacaaggtttagcttttgctccaaatggaaagcttttacaatctgagcaagggccaaattctgatgatgaaattaaccttgtattaaaaggtggtaactatggctggccaaatgtagctggttataaagatgacagtggttatgcctatgcaaactattcggcagcaaccaataaatcacaaattaaagatttagctcaaaacgggataaaagtagcaacaggtgttcctgtgactaaagagtctgaatggactggtaaaaactttgtgccacctttgaaaactttatatacggtacaagatacctataactataatgaccctacttgtggtgagatggcatatatttgttggccaacggttgcaccgtcatcggcatatgtatatacgggaggcaaaaaagcgattccagggtgggaaaatacattattggtcccatctttaaaacgtggggtgattttccgtattaaattggacccgacatatagcacgactttggatgatgctatcccaatgtttaaaagcaataaccgttatcgtgatgtcatcgctagtccagaaggtaataccttatatgtgctgactgatacagcgggaaatgtacaaaaagatgatggttcagtcactcatactttagagaatcccggttctctcattaaatttacatataacggtaagtaa

SEQ ID NO: 61257 - DNA, 543 bp, Acinetobacter baumannii
ttggttactgttgagacttctggcgaacttcgctccaaggggttcactgttgattcgaacggggtttacaaggcagcttcaccgattgcaagactatttgctgattcacttgaactcaatgaagatgcctcaaaacagccgattaactttgaaaagttaggtacaggtgactacctgataaaaggttctctcggatttgctaaagagggctggtacattgaaatgcctaaagatgcaaacggtaatgttcttgttgctgtgtcttatgagcagcatgaagatggggatattgcagtaaaaacctacaagaaaaaatttgatatcgaaacagcctcaattattcctgatttcgataatcctgtagatattccagaaactcgctggattgatattcgattgcatgaagaacccgaaccagagcctgaagaaccgttgagtgaaacaccattggagttccagcctactaacttatctcaggcagtagctgcagccatgattggtgtggaaccgccagaaatctcggatacagacgaaacactttaa

SEQ ID NO: 61258 - DNA, 333 bp, Acinetobacter baumannii; identical to SEQ ID NO: 46879

SEQ ID NO: 61259 - DNA, 738 bp, Acinetobacter baumannii; identical to SEQ ID NO: 56144

SEQ ID NO: 61260 - DNA, 528 bp, Acinetobacter baumannii
gtgaaatctaaactttgtattattttattgtctcttttaacggtagcatgtagccaagtccgccctcaaaaatatggaattactgaagctgatataacccaagcaaatgaagcatcactctatgcccagtttaatcagctttattacacaaaatccttatataaagcagcatacaatgaagttaacaaggtaactcaaactaatgatcagttgctaagttatgccacttttttaatgtatgcagtcaatacaacttacgcttctttagacataaagcttaatgatgatctagatttaatggcttctggcaaaaaaagcaagatgtcaattgatgctttagattcattatgtgtaagtaataaatacattgaaaaatatataaaacttaaagaaaaaagcggaagtgagatatcagctaaagcgaaagaactttcaaaagaggctttgatacttcaacccaaaattgaaaaaatcattatgaaaactgattcacctctaaatgatattgaatgtaaaaaattaatctaa

SEQ ID NO: 61261 - DNA, 390 bp, Acinetobacter baumannii
atggaaccagtttccacaagcggtttaacagcaattttaaaattttatggtgcagcaattatggtgactttagcagttgctttggttgctgccgttgtattaatgacacgaatgccacgatcgcctcaagaatgggcggtaggtttaatttgtactgttgtatcaagtcttgctggcggttcgctaattattatgaagtttagtttgcatgcttgggcaactgacacatggggatggtttgcaataggtggactgttctttgtatgtggattgcctggttgggcattaatcaggtgggtttttaatttcattgataagcaggaaggcaaaacgattgtcgaagtaatcaaggaaattaaaaaggccaagaatgatattacaggtagctaa

SEQ ID NO: 61262 - DNA, 1779 bp, Acinetobacter baumannii
atgatgcgaactcattactgtggctctttaactgaagcccaaatcgaccagaccgttacattatgcggttgggtacatcgtcgccgtgaccatggcggtgttattttccttgatatgcgtgaccgtgatggtctcgttcaagtggttattgacccagatactccagaagcatttgcaactgcagataaagcacgttctgaatatgtattaaaaattacaggtcgtgttcgtcgccgttatgaaggtactgaaaacccaaatatggtgagtggtcaaatcgaagttttaggcaaagaaatcgaagttcttgctgcatctgaaactccaccattcccattaaatgacgacacaattaatgtgtctgaagaacaccgtttaaaatatcgtttcttggacatccgtcgtccagaaatgttagagcgtttacgcttccgttctaaagtaaccaacttgattcgtaactatttagacgatcatggtttcttagacgttgaaactccgattttaactcgtgcaacccctgaaggtgcgcgtgactatttagtaccaagccgagtacaaaatggtagcttctatgcacttccacaatcaccacaattattcaaacaattgttgatggttggtggtattgatcgctactaccaaatcgcgaaatgtttccgtgatgaagacttacgtgctgaccgtcagcctgaatttactcaaatcgacattgaaacatcgttcttaaacgacgatgacattatggatttgatggaaggcatgactattaaattatttaacgacttgcttggcgtaaaatttgaaaaattccgccgtatgccatacagcgaagcaatgcgtgattatgcatctgacaaaccagacttgcgtattccgttaaaactcgttgatgttgcagacttaatgcaagaagttgagttcaaagtatttgcaggtccagctaaagaccctaaaggccgtattgcagcacttcgtgtaccgggtgcaggttcattaacacgtagtcagattgacgaatacactaaatttgtcggtatctacggtgcaaaaggcttagcgtacattaaagtcaatgaaatcgaaaaaggaattgaaggtcttcaatctcctatcgttaaattcatcgaaccaatcgtaatgcaattgcttgaacgtgttggcgctgaaaatggcgatatcgtattctttggtgcggacaaagctaaaattgtaaatgatgcaatgggtgcgcttcgtgtcaagatcggtcatgacttgaaccttgcgacttgtgagtgggctccactttgggttgttgacttcccaatgtttgaagaaactgacgatggcaaatggacttctgttcaccatccattcacattacctaaatctagcgtagaagacgtgaagagcaatccaggcgaagcactttctgttgcttacgacatggtattgaacggtactgaagttggtggtggttcacttcgtatttacacattagaaatgcaaaaagcgatttttgaagcgcttggtatttccgatgaagaagcagaagaaaaattcagcttcttactcaatgcgcttcgttacggtgcacctcctcatggtggtttggcatttggtcttgaccgtttagtaatgcttatgactggcgcgacttcaattcgtgatgttattgcgttccctaaaacaaaaactgctgaatgcccacttactcaagcaccggctcctgttgaagcaaaccagcttcgtgacttgggcatccgcttacgcgaacaacaaaagaaagaagcttaa

SEQ ID NO: 61263 - DNA, 765 bp, Acinetobacter baumannii
atgccttttacaatctcccatgcagttatcgcccctccacttgctaaattgagccgaaatacgttacccattgccgccttagcaattggcagtatgacgcccgatctttaccgcttatttacaatgcaatcaggtatgctgactcatcaatggaaggggcttttctaccctaaccttgcattagggctattattctctgccatttggtatttactttaccgacctgtggtttaccgtttttttggtatccaacacgatttaaaactagattcttttagacatttttttagcttttttattggaatcataattgctctactcattggtatagcaacacatctcatttgggatgggcttacccactcagactttagaacctttatatttcaagactttttatcgcaaactgttcacttgtttggccgcccttatccattgcatcgccttcttcaactcggttcttctgctctggcattaccttttttaggctggatgagtattcattactatcagcgccataaacagcattggaaagtaaattataaaattaaaatttttgcttggtgtttatttgctttatctacacttttaggcttattttcattttgggactatgcccgttatattccccatgaggtttggcattctgatacctattattttactggccgctctattaatgagtttatgcaaggttggttaagtacgtttagtttaggatgtctattattcttatttttagatcgacaacaaagaatgggctaa

SEQ ID NO: 61264 - DNA, 2058 bp, Acinetobacter baumannii
atgttgttctataaaaatattttgaccttatccattttggctgccatatccatacctgtatttgcagcagaaaatgaaaatattgagaagttagaaactatccgcatcaaggcgcacccccttgagcaaacttcaaaagattttgcagtcgcagatactgtagttgatcaaaagcatttaactgaaggggccgccactattggggatgcgctcaatagtgaggtggggatttatgcgaatcagtttggggctggttcaagtcgtccggtgatccgtggacaagatggaccacgtgttaaagttcttcaaaattcatctgaaaatgtggatgtctcaactttgtctcctgatcatgctgtaacagtagatccagttctcgcaaaacaagttgaagtgattcgtggaccctctactttattgtttggtgcgggaactgttggtggtttagtcaacgttattgataacaagatccctacacaaatgcctgaaaatggttatgaaagacaagttggcttacgttacaacactggaagtgatgaaaaactggcaagcgctggcgtaactgttggcttgggcagccaagttgcattacgtgttgaggggttaacacgtgatgcgaataactatattgcaccaaactatattcatgaaggtgaaaaagagcgccgtgtagacaatacctttgcacaaggtgattcagtgaacgtgggggtgtcttggatttatgatcgcggttatacgggtatttcgtatagtaaccgtcgagaccagtatggtttaccggggcatagccatgaatatgaaacctgtcatattcatgatctaagtttacattgtggagaccatgaccatgaagggcatagtgatgaagaagctcatgaccacgagcatgaacatggcggtccatggattgacttaaagtctgagcgttatgattttaaaaccgagttaaacgatccatttgcaggcttccaaaagttacgtgcccaagcgagctatacagattatcagcatgatgaaattgaagaagggacaatcgcgactcgattccaaaacaaaggttatgatgggcgtattgagttagtccataatcctattgctgattgggaaggggtaattggtacccagttaggccaacaaaaactaaatttaactggtgaagaagcatttatggcaccaaccactaccaaaaagtggagtgtttttgctttagaacataaacaatggaaagatgttcattttgaactttctgctcgtgcagatcagcaagaaatagatgtagatgataactctaaacaagattttgacggttctgctttttcctatgcaggtgctgccaactgggagtttgcgccaaattataagctttcatttgtagcatcacaccaagagcgtctacctcttgcacaagagttatatgcaaatggtgcccattttgcgaccaatacttatgagttaggaaatgatcaactcagtaaggaaaaatcaaataatgttgagttaggtttgcattttgataatgacaaactcgattatcatcttcatgtttaccataactggtttgatgactacatctatgcgcaaacccttgaccgttataaagacttccgtttagttcaatacactcaagataaagctcgtttctatggtgctgagggtgaaattggttatcaaattacgccaatgtacaagatcagtgcttttggcgattacgtgcgcggtaagattgatgccgagggcaatgctccacgtattccggctgggcgtttaggtactaaagttgatgcagattttggtgatggttttagtggttctgctgagtactatcatgtctttaatcaagataagattgcggcttatgaaaccgaaacagaaggctacaacatgctcaatttaggggtagcatactctggacaatatggtgtaaaaacagattatcgcgtttatttaaaagcgaataacttgttagatgacacggtttatcaacatgcgtcgttcttatcaaatatcccgcaagttggacgtaactttaccgtcggtgtagattttagtttctaa

SEQ ID NO: 61265 - DNA, 1464 bp, Acinetobacter baumannii
atgcgtatttttcagcgaattcatcaaaagttaaattggtcaggacgtcgttatatggcggtcatactttgcgttgttgctattgcatatcttgcatcggcaatttatcacacagtaaaaccattaccacaagggattaactttagtggcaagcttagacatgccgaagtcaaatttttagctgataaaacgtatattgatgcgaaagggcaacagcaggttgatcagcacatctttgatgaaatcttgaaaatgattgatgaggcaaaaaccacgattgtggtagatatgttcttgtttaattcagaagtgggtgactcaaaactcaagcaaagaccattgatgcaagagctcactgatgcactaattagtaaaaaaagacaaaaccgccaaattcaggttgttatgattaccgacccgattaattcggtatatggtggtctaagccctgaacactaccgtcaattacgccaagctggtgttgatgtcatcgaaacgaatctggcacctttacgtgcttctaacccattctggtcggggttttggtacatctgttgccaaaatattggcaataatccagagaaaggctggttacccaacccatttggcgatgaaaaaattacgctacgtagttatttgaacttatttaactttaaagcaaaccatcgtaaaactattgtcgttgataccgatgggggttggaagtcattggtgacctcagcaaatccgcatgatggtagttcgcgccattctaatgtggcattggtggtaaatggagccacagctgctgatgtactccaaaccgaagctgctgttgcgcaaatgtcaggaagtagttcaccatcacttatattaggcgattttgaaaaagacgttagcaagcctcaagttcaagtgctaactgaaggggcaatctatgaagctgtattaaaattaattaatacggctaaacctaaagaacatcttgatttaagtatgttctatttgtctgaacgtaagattattaaagctctaaaaagtgcccaagaacgtggcgttattgttcgtgttttactcgatccaaataaagatgcgtttggtagacaaaagaatggtatcccaaaccgtcaggtagcttcagagttacatgctgccggcattccaattcgttggtgtgatacccatggtgagcagaaccatagcaaaatgatcttaaaatataatgctcaacaagctgagttaattgtaggatctgccaattttacagcccgtaatttaaaaaattataaccttgaaacggatatgttggttgtaggcaaagttcaagatcaagtctttaaagacgctcagaattacttcaatacctcttggtcaaacctacaaggtagacagatgagcgtggactatgcgaagtatgccgatgagtctaaagtgaagtattggatttatcgttttatggaatggtcaggtttatcgactttttaa

SEQ ID NO: 61266 - DNA, 2169 bp, Acinetobacter baumannii
atgaatcgtcgcgaatttcttttaaattctacaaaaacaatgtttgggaccgctgctctggcgagtttcccgctgagtattcaaaaagcgttagcaattgacgccaaagttgaaagtggaactattcaagatgttaaacacattgtgattttgactcaggaaaaccgttcatttgataattattttggaacactcaaaggtgtacgtggtttcggtgaccgttttaccattcctatgacagaaggccgaaaggtttgggaacaatatgatgcgaataaaaagaaagtattgccataccatttagatagccgcttaggaaatgcccagcgtgtttcaggtacacctcactcatggtctgatggacaagcagcttgggacaacggtcgtatgagtgattgggtggcatataaaaaaccgcagtcgatgggctattacaaaaagcaagaagttgaatatcaatttgccttagcgaatgcttttacgatttgtgatgcctaccactgtgccatgcatgcaggaactaacccgaaccgtaaatttatctggacgggaaccaatggccctacaggtgcaggtgttgcgagtgtggtcaatgaatttgatgggattggaccatcaacagaaggttatgaatggacgacatatcctgagcgtttacagcaggctggcgtgacatggaaagtttatcaaaatatgccagataactttaccgataaccctttagctggtttcaagcaatatcgccgtgcaaatgagcaatctggtcaacctgtcagtaacgacacactaacgtgtccagcatatgatgaaaagattgatgcgactcaaccactttacaaaggtattgccaataccatgccggacggtggttttttaggaacttttaaagctgatattgcgcagggtaaattaccgcaagtgagttggttagttgctccggcaacttacagtgaacatccagggccatctagtcctgtacaaggcgcttggtatattcaggaagtattaaatgcattaactgaaaaccctcaagtgtggagccaaaccgttttattggtgaacttcgatgaaaatgacggtttctttgaccatgttccttcaccaagtgcaccttctaaagatataaagggtgttgtatatggaaaaaccactttaacggaccaacaagtgtcttatgagtactttaaccatccagcagtagcgacttcaaaatctcaacctaagccagatggtcgagtgtatggtccgggtgtacgcgttccaatgtatgtgatttcgccgtggagccgtggaggatgggtaaattctcaagtctttgatcatacttctattttacaattcttagaaaaacgttttggtgtgcaagaacctaacattagcccataccgccgtgctgtatgtggtgatttaacaacggcatttaattttaaaacaccgaatcttttgcctgttgctgaactagatgggaagaaaacaaaagccgaagccgatgcgattcgtgtcgctcaagctttattgccccaagttcctgttccgagccagcaacaatttcctcagcaggaaatgggaattcgaccatcgcgtgctttaccttatattttgcacactagtgccaaagtcgatgtcactcaaaaaacggttaaactgatgttctccaatacgggtaaacaggcagccgttttccatgtctataaccgtttggatcttaccgcaattccacgccgttatatggttgaggcgggtaaacagcttgatgacgtgtggaatactatcaatggacagtatgatttatgggtacttggaccaaatggttttcaccgtgcgtttaaaggtaatttaagtcaagctaatcagactcaagcattaccggaaattagagtatgtgtagaagaatgtgatgcgaatttatatttaaaagtgcgtcatgatggtaataagtcagtcaagctcactgtcaaggcaaatgcttatctgccaaacaagacatgggcgatagaaaccaatagttctgaaaaagaactggtttgggatatgtctgaatttggtggttggtatgactttacggtgacattagcggacgatgcgacgtttagtcgccgttttgcagggcgtatagaaactcaagaagattcaatttctgatccatatatgggttatttagagtcttaa

SEQ ID NO: 61267 - DNA, 717 bp, Acinetobacter baumannii
atgcgtattgaccaacgtgcattagaccaattacgtgaagtgaaaattacacgaaactacacccgttatgctgaaggttctgtgctggtcgaatttggtcacaccaaagtcctttgtactgcaagcattgataactcagtgccacgctttctaaaaggccaaggtcaaggctgggtaacagcagaatatggcatgttaccgcgctcaacacactcacgttgtgaccgtgaagctgctcgtggcaaacaaactggtcgtactcaagaaatccaacgtctgattggccgtagcctacgtgcgatggttgatttgaaaaagcttggtgaaaacacgattacgatcgactgcgatgtaattcaggctgatggtggtacacgtactgcttcaatcactggtgctgctgtagcattggttgatgcgatgaatgttttacttgcacagaaaaaaattaagcaagatccgcttaaaggcttagttgctgcaatttctgtaggtatgtatcaagatgaagtattacttgatctttgttatgaagaagactcgaactgtcaaactgacttaaatgtcgtgatgacacaagcaggcgagtttattgaaattcaaggtacagctgaagataaaccatttacccgtgctcaaagcaatgccatgttagaaatggccgaaaaaggaattgccgagctcattaaaaagcaacaagaagctttaggctggtaa

SEQ ID NO: 61268 - DNA, 1149 bp, Acinetobacter baumannii
atgaatatggcattagaattttctactgtttctaaatctgctcatttaacccctgagcaaattgaaaaatttggccgccgtgttgaacagattcgtcaagatgttatgcaaagtcttggtgagcaagatgcaaaatatatctacaaagtccgtaacttcgttcgctataccgaaatcgcatcacgtggcatgttgatgtttggtggctggattcctcctgtctggttattgggtacaggtttactgggtatttctaaaattgtagaaaacatggaacttggtcataacgttatgcatggtcagtttgattggttaaatgaaccaagcctgaacggcaatacttatgattgggataccattgcatcgggtgatgactggcgtgaaacacataactacgtgcaccatacttataccaatattgtaggtaaagaccatgatgtgggttatggccttttacgagtaagtgatcaacagaagtgggaacctcgtcacctatttaatattcttttggctctacagttaatgtttttctttgaatggtatgtaggtgtacaaaatctacatcttgaagatgcattagtttataaaaccaaaagctggaaacaggtgtggaaagatgcggctaaggtccgtaaaaaagcaacgcgccaaattttaaaagattatgtgtttttccctgtgatctctggtcctatgtttttaccggtttttgcaggcaatgtagttgcgaatattattcgtaacttgtggtcatctgctgtgatttttaatggtcactttactgaagatgcagaaacgtttgagccggataataccgacactgaaactaaggcagagtggtatttacgtcagattcgtggttcaagtaattttagtggtacagaatggcttcattttatgagtggtaatttaagccatcaaatcgaacaccatttattcccagatatgcctgccaaccgctataaagaagtagcaccgaaaattaaggcactctgtgcagaatacggcattaactacaatgaagctaatttcatgcgtcagttctggagtgtatgggtgcgtttagcaaaatgctcattaccaaaccacaccactgcaaaagtgatgcagacattagaaaaattaaaagcaaaattcaaatttgcctaa

SEQ ID NO: 61269 - DNA, 1026 bp, Acinetobacter baumannii
atgaacgcaacacttaactatcaaccacattgggttcgagaagatttcgttgattttgttttgcagaaaattaacgcgacttgggcttggaaaagggtacttgcagaagttaccgctgttcagtcgcttcataccgatatggtactgatcaagcttaaaccaaatcgtaattttaatttcgatcaagttcgagcgggacaaagcattctattgacgttgcttatcgatggcgtttaccaacaacgtagctattcgattattgaagtaaccactcaaggtgaaatcgctttaggtattaaagtacaaggcttggtgtctcgtgcagctcaactattacatgtgggcgagtgtgttgaaatttcacagccacaaggtgatttcactttgcatcaaggccagcagcctgcgattttaatcgcctcaggaagtggcgttactgcaatttattcactcttgcagcaagctttgaaacagcagcttgaacaaattcatctcatttattttaatcgtgcggaaatttttcatgctgaattaaaagctttggcagagcagtacccacagcttcaatatcatttttttaatactaccgagcaaaagcagcatttaactgaaagcctgctacaaaagcttgttcctgactttgagcagactgcaacctatgtgtgtggtcatcacggcatgatgcagcaggcaaatgaaatttatacccaaaaaggtgctcagtcgcagcttcatcaagagtatttccaaccacttcaagtgactggtacacatgcagcacagcctgttattttccgccgtgctcaacaggagtttttagctgaaacaaatttactgagcagtgcagagcaagccggtttacgcccacaacatggttgccgtatgggtgtttgtaataaatgcaattgtaccaaagtgagcggagttactcaaaacctgttaacaggtgaaattgaagaccaaccgaaccgtccaattaaactatgcgtgagccaggcattaagcccagtcacaattgatctataa

SEQ ID NO: 61270 - DNA, 639 bp, Acinetobacter baumannii
atgtcgatacgggatgaacgaaaacagcaaagtcgtcaggcacttctcgatgcagccttgcatctgagcacgtctgggcgttcgttcagtagtatcagtttgcgtgaagttgcacgtgaagtgggtttagtgccaacagcgttctatcgtcattttcaagacatggatgaactcgggaaagagttggttgaccaagttgccctacatttaaaaagtgttttacatcaactcggccagagttatttacagcacaagtctgcaaaaacccaaaccagtattgagctattcgtgcaggcagtgaatcatagccctaaacagtggcaatttatgattgctgagcgttggggtggttcagaaacggtccgtgcagcaattgctagagaaattgaatttttgattgaagatctcacaacagatctgactaaactcgaaaattttaaacatattcaaaaccctcaagacttaaatgtcttatctaccattttgaccaatatgtcatttacatgggcaatgacgtggctcaacctcgccaaacaatatcaaggtgagcaacttaaacagcaacaaactgcatttattgaaaatgcgtctacacaagttcgcttactgtttagaggtattgctaactgggaacggtaa

SEQ ID NO: 61271 - DNA, 648 bp, Acinetobacter baumannii
atgaatcttgatcgtcatacacagtttttgatgcgcaaagaaaaaattctaagcgttgcagaaaaattgttactagaaaacaatcaggaaattactctagatgaattagtggccgagctagatattgcaaaaggtacgctttataagcactttagaagtaaaaatgaacttctgcttgaattgattattcaaaatgaaaaacaaattttagaaatttctcaaaaatataatactgattttaaagagtatgcaccacgatacatgctccaccatttgctcacaccgggaaaaacgattttattgcatcaacttgaagaaaatctgacgatgacagagtctaagttgaagcatctttttgaagagctttatgaagttcgtcaacagcgtattctagcgattaaagacattacagaaagttatttaaaatcattaaactatgatatgtcgattcgtgactatttatcttatatctggtcactcacttacggtgcatcgttgcttttaaactcaacttattatcagcgttcgattggttctcgccaaaaattaattaatttatatattaatcaagcattatcactacctacccaaaccaccaattttgatgcgctcaattttcagattgaagacgagaattctcaaaattaa

SEQ ID NO: 61272 - DNA, 618 bp, Acinetobacter baumannii; identical to SEQ ID NO: 43566

SEQ ID NO: 61273 - DNA, 714 bp, Acinetobacter baumannii; identical to SEQ ID NO: 43565

SEQ ID NO: 61274 - DNA, 699 bp, Acinetobacter baumannii; identical to SEQ ID NO: 43564

SEQ ID NO: 61275 - DNA, 747 bp, Acinetobacter baumannii; identical to SEQ ID NO: 43563

SEQ ID NO: 61276 - DNA, 411 bp, Acinetobacter baumannii
atgaaaaagttgttcaccatcttagccctttgcatcactgtactgaccaccagtatggcaagctttgctgatcctccttttgaccgaggacatggcccgaaaggtcctaaaggcggacctcgtggtgaatggaatgatcgtgggcataaatttgaccgtgacgataatggtgatcgtgttcgcgatgaacgccgtatgcgtgaggaacgtggctttgagcgtctgaaacaacatcgttggcagccaggttatgtgatgccacagcactatcgtggtaatggttataaagtcgactataaagacaataacttacctaaacccgatcgtaaccagcagtggtacaaaattaacaatgactatattttagtcgacacggactctaacagtattgtgagtattcgcggtttctaa

SEQ ID NO: 61277 - DNA, 321 bp, Acinetobacter baumannii
atgaaaaagataacaacagcaattattctttcaatgagtggtttaatcgcaacaacagcaatggctgcgcctcacgaccattatcaccaccaaggatatgagacaaaaacagtcaaagttatccataaagatgatcatgcgaatatttggcgtgcaggccaagttgtaccgcatcaataccaacatccacgttatgtcattgactaccgctcacaccagaaattgactaagccaggtcgttatcaaaaatggtataaggtgaacggaaattatgtactcgtaaatgagcaaagccataaaattattaaagtaattcgttaa

SEQ ID NO: 61278 - DNA, 1356 bp, Acinetobacter baumannii
atgccaactaagtctttagagaaatcacataataatacccagcattatgtacattggttccgacattcagcaccctacatcaatgcgcatcgtgataaaacttttgttttaatgtttggcggtgaagcagtccgcgatcctaatttcgaacatattattcacgatattgccttattacattctcttggcatccgcttaatcttagtgcatggcgcacgtccacaaattaatcacaaccttaaagaaaaagggattgaaacccctttttatgataactgccgtattactacacgcgaatctttaagctgtgtcatgagtgctgtagggtctattcgattagaaatcgaagcattgttatctatgggtttagctaactctccaatgtatggcgctcgaatagatgtcgtatcaggtaattttgtaaccgctaaaccttatggtattcgtgaaggaatggattttcagcttacaggcgaagttcgttcaatagatacagacgcgattgaacgtcatcttgataacaataatattgttttacttggcccaacgggctattcaaccacaggtgaagtatttaatttaagagctgaagaagttgcaaccaaaactgcgacttatttaaaggcagataaattaatctttttaggtgagcaacaaggtttacctaacgaagatggacaattactgcgtgaattaagcccacaccagcttgattactatattcaacaataccaaaccacacacccaaccctaaccctacatttgcaagaagcaaaaaaagcatctttatcgggtgtacatcgtgtccatctaatttcttattcttatgatggcgcacttattgaagaactctttacgcgtgatggtgtgggtaccatgattaccgatgcgcattatgaagaagttcgtatggcacatattcaagatgtcggcgggttaatgaaccttttacgcccattagaagaagaaggcattttggtgtatcgctcacgtgagcgtttagaacaagaaattaaccagttcgctgtcattgaacgagacggtatgattttggcctgcgctgccctttatccgattccgactgagtttaatgaaacacgttcagcagaaattgcttgtgtggcagtacacccaagttatcgtaaatcgaaccgtggcagccaaattctgcaatttctcgaagaaaaggccaaacaacaaggcattcgtcaattgttcgttttaaccacccgtaccgcgcactggttcttagagcacggtttccatcaggtgagtgtggatgacttaccaaatgcccgtcaggcactttataactatcaaagaaattctttagtctttaaaaaattgcttccctag

SEQ ID NO: 61279 - DNA, 969 bp, Acinetobacter baumannii
atggcactttttaattccacttcatgggcaaaatattcagtcattgctgccagccttgcgggagtgatgatgctaggtggttgtgccaaaaaagaggagcacaccacgacaactttaaatatcggctatcagaaatatggcatccttcctattctaaaagcacgtggtgacttagaaaaagcgctcaaagatcaaggcgtacaagtgaaatgggtcgagtttcctgcgggacctcaattacttgaaggcctaaatgtaggaagtgtttcgttaggcgaagcaggcgaagcaccacctatttttgctcaagcagccaatccaaatttagtctatgtcgcaaatcaacctgctgcaccaaaagcagaagcgttattggtacaaaaagattctccaatccagtctattaaagacttaaaaggaaaacgtgtcgcactgaataaaggttcgaatgttcactaccttttattaaaagtcttagaagcaaatcacttgagcttaagtgatattcaacctgtttatttaccaccatcagatgcgcgtgctgcctttgaaaaaggagctgtcgacgcatgggtgatttgggatccgttctttgcagcagctgaacatcaaattcaggcccgcgttctggcaacaggtgaaaacttggtaagcaatcatcagttctacttagctgatcgtaaatttgcagaaaataatccaaaagttctgaacacggttgtacaaacgctaaaccagacaacccaatgggtcagcacacaccaagatgaggctgccaagctactcgaaaaacctacggcacttgaatttgatgtactcaaaacatccatttcacgtatgggttttggagttcagccaatatctgacaaggtagcccaagaacaacaatatgtagctgatgccttctacgcgcaaaagctcattcccaacaagctcaccattcaagaagccattttaaaactgaaataa

SEQ ID NO: 61280 - DNA, 984 bp, Acinetobacter baumannii
atgcaacatcagtcattatttaataagagtcagtggactcagttagttaagcgctttagcgcggtcgctgtattaggtttaacaatcgcagcacctgcttgggcaattgacccaacagtgaaagaacttcgtattggttttcaaaaaagttcgattaacttcgcgattgccaaacagcaaaaactatttgaacaagaatttccaaatgccaaaatcacttggaatgagttccccgctggccctcaaattttagaagccttagctgttggctcactcgatgttggcgttactggagacacgcccccggtctacgctcaagccgctggcaagcctttatattacattgcttatgaagcagccaaaccattggcctcagcaattttagttcccaaaaactcacaactaaaacagcttaaggacctaaaaggtaaacgtattgcgctacagaaaggttctagctcacattacctacttgtacaggccgtacgtaaagcaggcttaaaatggagcgacattaccccaatttggctcacacctgccgatgctcgcgctgcattccaaaaaggagctgttgatgcatgggcaatatgggatccgtactacgcttcagcacaactagaagaccaagctcgtgttcttgcatctggtaaaggcctaagcccgaactataccttttacttagccgctccaaattttgttaagcaatatccaaaagctgttccaggactcatcaaacagatcaatcaagctgacaaatgggtccaaagccatcaagcagaaactgcaagtgcgattggccaaagtacaggcctaaaacctgcgaccagtgacttatttattaaacgccgtccacgtccatcatcggcagctccacttaacagcaaagtcattgctgaacaacagcagcttgcagacatctttactcaacaaggcatcatccctaaaccaatcagtattaaacaagctgtttggggtgccaagtaa

SEQ ID NO: 61281 - DNA, 1176 bp, Acinetobacter baumannii
atgaaaattttctggtttattcctacccacggtgatagtcgctatttaggtacaagtaaaggcgctcgtcaggttgaccatgcctatatgaagcaaattgctgtggcagtagataacttgggttacgaaggtgtacttattccaacgggccgttcatgtgaagacccatggattacggcggcaagcctaatcgatgcaactcaacaccttaagtttttagttgcgttacgtccgggggtaacaacaccagcgttggcagctcgtatggctgcaacatttgaccgcttgtcgaatggtcgtgttctactcaacttagtgacaggtggcgatgaagcagaactacgtggtgatggtttatatgaagatcactcaacgcgttatcaaacagccaatgaatacgtaaaaatctggcgtgaaattttgacgcgttcacatacgggtgaagcttttacattccacggtgaacgcttacaagtagatgatgcaaagctactttacccacctgtacaaaagccttatccacctctttggttcggtggttcttcagatgttgctgttgaactcgcggctgagcaagtcgacacctacctgacttggggtgaaccacctgcagccgtgaaagaaaagatcgaacatgttcgtgccaaagctgaggctaagggccgtaaattaacttatggcattcgtttgcatgtcattgttcgtgaaaccaatgaacaagcatgggcagcagctaacgagcttatccaatatctggatgatgcaactattgctgcagcacagaaaaaatttgcacaaatggactcagtgggtcagcaacgtatggctgctctacacggcggtaatcgagacaaacttgaagtatctccaaatctttgggcaggtatcggtctagtccgcggtggtgcaggtacagcacttgtcggcgatcctgaaaccgttgctgcacgtattcaggaatatgcggatttaggtatcgatacctttattttctcaggctatccacaccttgaagagtcaatccgttttgcagagttagtattcccattattaccaatcgagacccgagctaaacttgctcaaccaaacttaaccggtccattcggtgaaatcattgccaacaactatgttccagacgagaagaaacaaaatagttccgtcaaggagcctgcatga

SEQ ID NO: 61282 - DNA, 798 bp, Acinetobacter baumannii
atgagcaaagatataaatattgtttcacgtggaacgaagcaagtcgggcagcgtctgctgccttggattttcccgattgttctattggttgtctggcaaattgcatcgagttcaggccttttagaaaatcgtattctgccggctcctacggctgtcgtttctgctttttggcatctactcattagcggcgagctttggcagcacgttaaagtcagtgcaggacgggccttactcggactatttattggtggtggtttaggtttgttattgggtctgctcaatgggtcttcgcgtttcgcctctaccctgctcgatacaaccttgcaaatgattcgtaacatcccagccttagcacttattccactggttatcttgtggttcggtattgatgaaacagccaaattatttttggtggcggtcggagtcttcttccctatttatatcaacacttatcacggtatccgttcagtcgatccacaattaattgagatgggtaaaagctatggtctttcacgttggcagctttacaaagaaattattctaccgggtgcgatgccctctattttagttggtttacgttttgctttaggtctggtttgggtgttgctcattgtagctgagactatttcagcacaagcaggtattggctatatgactatgaatgcacgagaatttttgcaaactgatgtggttctggtcggtatccttctttatgccctattaggcaaattagccgatgttctagcgcaacttttggaacgttatttactacgctggcatgccggttatcaaaaataa

SEQ ID NO: 61283 - DNA, 801 bp, Acinetobacter baumannii
atgacaaatctgaatttaaatattaatcagaatgacgtagagctcattccagaaaaccatccagagtcacaagaacctgtggtaggcgcagagattctgattgaacagctttataagttttatggtgaagttaaagttcttgaagatcttaaccttcatattcaaccgggcgaatttttagctattgttggtcgtagtggctgcggtaaaagtactttattgcgcttaattgcccaacttgaaaaagccagttttggagaaatcaaatttaaatctgcccgacatttgcgtgaaggtattactaacgatgacatacgggttatgtttcaagacccacggttacttccttggagaaatattcttcagaacgtgcaacttgggctaccaaaatcgcaacatgctttggcagaagaattattagaaaaagtaggtttaaaagaaaaagcgggacaatggccttcacagctctcaggtggtcaacgacaacgtactgccctagcccgtgcgttatctcatactccccgtattttattgttagatgaacctttgggtgcattagacgcgttaactcgtcttgagatgcaaagcttgattgaacgtttatggaaagagcaaggttttactgccattttagttacacacgatgtaagtgaagcagtgcaactggctgaccgcattatattgttagataaaggtcagattgctcaaagttttcaagttaatttgccgcgtccacggaaaaagagcattacttttgctcagcttgaacaacaagtactcgatgccgttttagccacttaa

SEQ ID NO: 61284 - DNA, 621 bp, Acinetobacter baumannii
atgcagcaaatggaacaaaagaagagtacccaaaagcgcaatcagcttcttgctgccgcccttgatgtgttttcactatatgggttcagtggcgcaagtctggatgaaattgcccaactcgctgacatgcataagtcgaatattttctattactatgaaaataaagagtctttatatgtggaagtgctgaccacagtattacaaaaatggctagctcccttacaaaccttagaagctgagttagaaccagccgaagccttgtctcactatttaattcaaaaaatcgaactttctcgtagccaaccaaaagcttcgcgactatttgctttagaaattattcaaggggcaccgcatattttgcctatactgaaaggacccttgaaaaagctatttaagcgcaaagctaaggttattcaaacttggcaagagcaaggaaaaatttcaccggatatcgacccggaacttttaattctcaatatttggggtcttacgcaaaattatgccgattttgcgactcaaatggaaatggtaactgggaaaacgcttcgtaaccgcagtatgttccagcgctcgattgagcatacggtacatatgatgctctacggcgtattacctcgctaa

SEQ ID NO: 61285 - DNA, 567 bp, Acinetobacter baumannii
atgaacactgataccgctttaattatggcacttcccaacgagtctaaaggtttattcgagcaagcaggtatcgaagtccattacagtggtattggtaagatcaacgctgcttttaaagcgtttgaagttattcaaaaaacagactgtaaaactttaattaacttaggtacagcaggaagttcatcttttaatcggcacgatttagtagaaataaaaacttttgtacaacgtgatatggacgtttcacctttaggatttgaagttggggtaacgccgttagatgaccacttggcggctgaaattcatctccaaacgcattttgcggatttaccaaaaggaatttgtgggacaggggactcatttgaaacgggtcagccgaaggtcgcttgtgatgtggtcgatatggaaggctatgcgttagcaaaagtttgccacaagttaggtgtacgtttaatttcggtgaaatatattactgatggggcagatgatacggcccatttggattgggaagaaaacttattattgggtgcacaaaagcttttagcactttatcaaaattatttctaa

SEQ ID NO: 61286 - DNA, 1134 bp, Acinetobacter baumannii
atgaaaagacccttttaccaattaaatcaaagtaaagatgttatacggcattttaccccaaattggtttacagcaactatgggtactggcgtggtcagtatgattttaattcagcttccatttgccaaatcatttttatttatgctggctacgctgttatggcaatttaatattgttctatttagtgttttttcagttctctatttattgcggtggttactcttcccgcatgaagcgaagcaaatatttaatcatccaaatatgagcttgtttttaggtgctataccgatggggcttgcaaccatactaaatggctttttaagcttcggaatcgggctttacggcgaagtggcagttcatatcgcccaagctttgtggtacatcgatgtctttttagcactggctattgcgtggatcgtaccattttgcatgtttagccgtcagaatcatcagctacataccatgactgcaatttggcttttacctgtagttgcttgtgaagtcgcagcaagttctgcgggcatgttggttgcacatttaccagcagatgtgcatagctttcatttattgttagcgggttacgtactttggggaatctctgttttacctgcatttgccattttaacgattttaatgttgcgtatggctttgcatcagttaccagaaaaagaagtcgcgatttctagctggctttctttaggtccgattgggacaggtgctttaggtctattgttgctaggtgagcaggcacaaagagtatttgtaaatattggctttcctgagttggcccatgtatttcaagccttgggtgttgtgggtagtctggtacttttaggctttgggttatggtggcttggccttgcgattttaacaacacttcgtcatgcaaagacaggtattccgtttaacttgggttggtggggtttaaccttcccatttggtgtgtttattttggctttatttaatttatgtcatcagattgaagttgtatttttacaatacgtcgctgtggcattcagtattttattattagtgatgtggagcgtggtaatgaagaaaaccttagccggagcatacagtggcaagctattcttctctccatgtttagtggctttacaacaaagaatgcagtaa

SEQ ID NO: 61287 - DNA, 519 bp, Acinetobacter baumannii; identical to SEQ ID NO: 61241

SEQ ID NO: 61288 - DNA, 381 bp, Acinetobacter baumannii
atgagtcaccattttttaggtatatcagtgtcggttttctcctttgagcaagaacagcaattctttcatgaaatcaaacaaatgcttgatcagcagacttttgagcgtttgattttgagccaatataaaggagagttgacacagctggaaaaaattactttccgtgttgtggagctacatggaaaaaaacaactttccgcgctatatcatcataccacccaagatgtgactaaaaattattcattcgaagatggcttagaacagattgcagtgctgattacgcaatgcaaacaagcgaatttattttccactcatcaagaaatccagcttaaaaaaataagaaaaaagccatgcttaatatgggtaaaaaacacagcgtga

SEQ ID NO: 61289 - DNA, 348 bp, Acinetobacter baumannii
ttgaatactttagatattcgtgttcctcatattcctctcatatcaaccggtttagtcctcaatcaactttcagtattggaaagagaacgtattttttcttgtatctatcaacttttaaaagtgtctcgagaaaagtttattaaaacggccaattctttaaatatgaatagagcttctttttgggataagagataccaattaccagaaattttacagcctattgaaaagcacttagataaagtttctcgaaattatcctttaataaaagcatccccagatatttctaaacctagtagtaaagaagcagtattgcgtagagttatgagattaaaaagaaaaatcacataa

SEQ ID NO: 61290 - DNA, 567 bp, Acinetobacter baumannii
gtgcttatttttcatggaaaacctgttcatggagctatcttcgatatggatgggacaatgtttgatactgaacggttgcggtttcaaacattgcaacaggcatctcaagaactcattgggcaggagttttcacacgaatatttaatgcaatgtttggggttaagtgcgactacagcggaaaagcttgcacaacgtttatacggagtagatgttccatatagggaaattcgaaaacgtgccgatgagatggaactagaacatattcgaaaacacggcgtacctattaaaaaaggtttagttcaagttttagagcgtttaagaaaatctggtttaagaatggctgtggctacttcaagccgtagagcaattgccgaagaatatttaattaatgcaaatgtttataaattttttgatgtcattacttgtggggatgaagtagaacaagggaagccacatccagaaatctttttaaaagcggctagtcaacttcatttagacgctaaccagtgtcttatgtttgaagattcggaaaatggtttaacttcagcacatacatcgaaaggttaa

SEQ ID NO: 61291 - DNA, 660 bp, Acinetobacter baumannii
atgccattaatcgagccagctttgtttgctacgaagggtttccgctacagcttagtcatttgtgtggcacaaacagtaggcttatttattggcatgttgctcattccactatggatacagcaccttctaaagttaagcccgctttggactggttttgcgctaatgagcagtgcagtagttaccggtatttgtagtcaacctgcaggaaaatatctagatcgttacggtgctgcaaaaatcatgtctcttggactaatgattaccgtggcttcttttcttttgcttgcttgggcacctgtacaaaatgtctggttcattgtgttttgtatgatattacatggcttaggaatgggactttcttatatgccatcgactacggcaggtttgaacagcttacgccagcagcaacagcatctagttactcaagcggccgctctaaataatttattccgacgtatttttgctgcagtggcagtcgttattgccgcgttatatcttcagctaagacaacaatcattgccgttaaatactcaagcaatatttacgtcatttcacactatgcaggaaatctttgtgtgttgtgcaattcttatactttgcactttgcctttcgcatggcgttttcctgaacagtacagaatcgaccaattaaagaaatag

SEQ ID NO: 61292 - DNA, 258 bp, Acinetobacter baumannii
atgctgcatggtttaaaaggcgcaccgcatattttagatattcgcaactgtggcttgattggtgctttgcagttagctcagcgtgatggcgatgccaccatccgaggctttgagcttggtatgaaactctggaaagaaggtttctatgtccgctttggaggcgacacgcttcagttcggtccaatgtttaatagtacagaagcagatattgaccgcttaatgaatgctgtgggcgatgtgctttatcaagtgaattaa

SEQ ID NO: 61293 - DNA, 222 bp, Acinetobacter baumannii; identical to SEQ ID NO: 56425

SEQ ID NO: 61294 - DNA, 432 bp, Acinetobacter baumannii
atgttatctgaagactatgaaaattttgtaattaaagccttactattatctcaagaaaacaactactctgaagctttaaagtcactctcacatcaagatgagccagcttatattcgaaaggttcgtaattttattattgaacatgctcatgaagaaatctgtgcagaagacttgcagcgtttggctggggtttcaaaatcaaaattgtatgatgaatttcaacaatactacggcaccagcccaatgtcgtatttgaaaaaatatcgtcttcaacaaatttacaaaatcttgagcactacaggagcagataaaaaggtttctatttcaaagcttgcgtatgactggggctttaaccatttaagccgtttttctcaagaatatcgtgaagagtttggagaaaacccaagtgagaccaaaggcaaaattttctga

SEQ ID NO: 61295 - DNA, 1011 bp, Acinetobacter baumannii
atgaaaagaatattattaacgggtgctctatttaccgcgggctttggtatgtatggtgaagcgaatgcttcatgtattatagttaattatcaaccaaatgatgttcgcatggcagtaggccgtgttgttgtacgtcctagtgatccagtgggtgctgttttaaggaaagcaactttccctatcagtagtagcggtacacaagcgatgtattgtgatagtagagatactgtagttgctcaattaacacaagcttatccattaagttccttaggcaatagcatctatacaaccaatattcctggcattggtattcgtttatatcgtgaagcagagaatagcagtaatttttctggttattacccttatgaacgtggcggtatttctggtactcgttatttggcatcaggttattttgttgtagaaatcattaaaattgctccacaaactggttctggaacattagtaccaggcagatatagtagttattacgtccgtggctttccaaatcagccgtttttaacaagtactgttgatgctaatgcaattaccattgcttcttcttcatgtgagattcaaggtaatattaataaagttgtacagttgcctacagtcacaaaggcaggttttaaaggcgttggctcaactcaaggcgaacaaaccttcgatatgaacatcttatgtaatgggggtatcaacccaacgggttacgaagagaaaaaccttattagtttaacttatgactttacccaagatggtacaaataatcaggtattggcaaatacggctgccgcatctgaaaaagctaatggtgtgggcgtacaattactctggaactatcaaaataaaaatcaagtcatcaaaaaaggtgacaaattagccttaggtaccttgtcttctaaccagacaattcaatataacgtaccgatgactgcccgctactatcaaacagcaacaaatgtgactgctggtaaagtgcgtgcaatggctactgtaactattgaatatgattaa

SEQ ID NO: 61296 - DNA, 240 bp, Acinetobacter baumannii
atgcgtaaattattatttaaaaataaagatgaagtgtatgttcaattatgcgctctgtttgctcaaatgaatgcagcactggtcggcctatgcgatatctttactgtcaatcaaatgacacacttaattgatgacatgttttactcagagcatattttcgaaaaactttctgtctattcagaatatatgcaaaccttattgcaaagtcagcatagtcttcacaaaaaacaaattgcttag

SEQ ID NO: 61297 - DNA, 546 bp, Acinetobacter baumannii
atgaaaaagtttttaggcaattctatcttcaaagcagttggttggacctatgatgcagatcctaccattcttgagaaaaaacaagttattatcggttttgaacatacttctaaccttgatgcgatcttatcaatcgctttgtttcaaatattagatttaaaaattcatacactaataaaaaaagaacttttcaaaggtccaatgaagcctattcttgaaaagctaggtggcattcccgtagaccgaaaagcaagcaaagatatcgtctctcaaatggtcgaaaaattccaaagtagcgatacatttaacctagtaattgcacctgaagcaacgcgtgccaaagatggatcggaacgcaaacctattcgtaccggtttttggcatattgctaaggcagcaaatgttccaattgtactgatgtatgcaaatgcaagaaccaaaaaaggcggtattttaggtaagatttatcctacggatttacagaaagatcttgaaacgattaaagaactttatgcgcaatatgatattgatgtgaaaattaactag

SEQ ID NO: 61298 - DNA, 666 bp, Acinetobacter baumannii
atgtgccaagcaccgtcttacggctttgctgtgccttttttctcccaaaagggcacaggctttttatctcatttagaaacaacaagaatttataacggtaaaactatgccaactttagaaatatcttccaaaaaattacaggttgttcaaaccgccatacaactctttaccacgcatgggttccataatgcaggggtagacctcattatcaaagaagccaaaataccgaaagccacgttttacaactacttccactccaaagaacgcctaattgaaatgtgcatcgcctttcaaaaaagcctactcaaagaagaagtgctctcgattatttactcaagccgttactacacccaaaaagataaactcaaagaaattattgttttacataccaatttaaacagtctgtaccatttgctgcttaaagcggtttttgaaataaaacggctgtacccgcaagcctatcgcatggcagttgaataccgaaaatggctacatcgggaactttttgacctgatttttagctgtgaaacccgtgcttttaaatttgatgcagatatggttttaaatcttatagatggcttgatgctacaggttttaagctctaacagtttggatgaacgggatgtggtgttggagaagttttgggggggagttaaagttatttag

SEQ ID NO: 61299 - DNA, 1080 bp, Acinetobacter baumannii
ttggttccttactatcattattttcaagaagggcatgttgaggcaaaaaaatattcttctcaaacaggtattatcaatattcttggagatacctattttggtgaaatgtataccgaaaagcgtaagtctagagggcaaacagatgccttacagcaatatggatatcattattcatttgaaaaaatacagccctttttaggtaaaaatgacatcaacatcgctaactttgaagcagtattttctttagaaaatcaatcgccgttaaaagataaaaagccatttgttttaaaagcagatgctaaaaaaacattagaagaatttaagcgcattcatctaaattatttggttttggcaaataaccatttgaaagattacggtgagcaaggattagcctatacattacaacagttggatcaggcgagtatttcttatattggcgctggactgaaccagaaagatgctcacaattactttgaaatcacttttgaggctaagcactatgcgatttttaatggttattggcatagagacacagcctatctggattatgacttttatgcgttaggatcaagaagtggagtagcttgcttaaatggcgttttacttgaacaaataatgcgttataagcaggctcatccagaacgcaaaattattgttatttgtcattggggtgtcgactttaagcctattacaaaagaccaaactaaactcgcgactattcttactcaagcaggagctgatctgatcattggtcatggtgctcatactatccagccaatccagatcatcaatcaaaagcctgttgtttttaatataggcaatgcagtctttaatagtgacggtgaatatgaacagcaaaatgctttgccatttggctgtatagctagacttgatttggcaaaagatatcattcgcctttaccccatgtacaccaataatttacaaacattttggcagccttatcctgtagatgcggaagatttctcaaaggccaatgcttacatgacatctttactgacccctgagaattacatggcatcccaagataaattagggagatatcttgaagttaaattttaa

SEQ ID NO: 61300 - DNA, 345 bp, Acinetobacter baumannii
atgtgtataagagacagctttttaatcgctggtatttttggtgtgtttaactttgatactgttgttaatgaaatgattggagcaaatttaccacttcctgaattatttgcttttgcaactatagccattcaacttataggatcaattctacttatttcaaattttgcagggcttacatggttgggtgcaggaacactagccattttcactttactttgtattcctattggacatcctttttggaaattagctgaaccacaaagaactcaggatttccaaattgtattagaacatattgctttaagtggagggcttctattagcagcaatagccaccaagaaataa

SEQ ID NO: 61301 - DNA, 1020 bp, Acinetobacter baumannii
atgctgccttttgcttctggcattccaaacctcactccagactggactcaagttacgggcttaggtacagcggcaacaagaggtgttggagtagaaagcggtaatgtagcagcttatggttcttatggtttatctaacttaggttatggtggatctccaacttcagaagccggaaatgatattgatgctggttataaagcagggggacaaaagactcgttttaagaatgcacccactagtatttatacaaatccctatatagctgcttatgcaccttctatcgtggttactcgtggagaatttacaggtacggagttatttttaccgtattacacctcaacccgtgccaataacatggcagtaattgcatggagttataacccatctactggaaatctcagtaaaaccgagcaaatcgtttatacaagtaagaacaatgttgtttatacaactgataacagcgcgaccagcggcaagttggttactgttgagacttctggcgaacttcgctccaaggggtttactgttgattcgaacggggtttacaaggcagcttcaccgattgcaagactatttgctgattcacttgaactcaatgaagatgcctcaaaacagccgattaactttgaaaagttaggtacaggtgactacctgataaaaggttctctcggatttgctaaagaaggctggtacattgaaatgcctaaagatgcaaacggtaatgttcttgttgctgtgtcttatgagcagcatgaagatggggatattgcagtaaaaacctacaagaaaaaatttgatatcgaaacagcctcaattattcctgatttcgataatcctgtagatattccagaaactcgctggattgatattcgattgcatgaagaactcgaaccagagcctgaagaaccgttgagtgaaacaccattggagttccagccgactaacttatctcaggcagtagctgcagccatgaatggtgtggaaccgccagaaatctcggatacagacgaaacactttaa

SEQ ID NO: 61302 - DNA, 240 bp, Acinetobacter baumannii
atgacgtgtaataatggtgaactattattggatatgtgtttaaaagatcacggtattgtttttcttccagagtttattgcagagccttattacaaagaaggtaagttacagaaatgtttggaagattataccagtcagccacttcacttatatgtcacatggccaaatcgtaagattttatcgaagaaagtaaaactatttattgattttttaacacatcaaatcattcccataaaataa

SEQ ID NO: 61303 - DNA, 543 bp, Acinetobacter baumannii
ttggttactgttgagacttctggcgaacttcgctccaaggggttcactgttgattcgaacggggtttacaaggcagcttcaccgattgcaagactatttgctgattcacttgaactcaatgaagatgcctcaaaacagccgattaactttgaaaagttaggtacaggtgactacctgataaaaggttctctcggatttgctaaagagggctggtacattgaaatgcctaaagatgctaacggtaatgttcttgttgctgtgtcatatgagcagcatgaagatggggatattgcagtaaaaacctacaagaaaaaatttgatatcgaaacagcctcaattattcctgatttcgataatcctgtagatattccagaaactcgctggattgatattcgattgcatgaagaacccgaaccagagcctgaagaaccgttgagtgaaacaccattggagttccagccgactaacttatctcaggcagtagctgcagccatgaatggtgtggaaccgccagaaatctcggatacagacgaaacactttaa

SEQ ID NO: 61304 - DNA, 1107 bp, Acinetobacter baumannii
gtgttagaactattcgacggacaacaacatgatatccaaacacaaatagaaaaaaatgaagttgaaaatagcttgtctgttcatcaggcagatatggcttactgggaaagaaaattttctaaattatcggctattcctgcgcttccgtggaaaacacccttacagcatttaccgacttcacattaccaacgtaacagtctggttatagaaaaagatcaatttaaacagttgtctaaaattggcgcaaaatattcactgtttaaaaactcagtcatcatggcgcttattttggaagtgctatctcattggaacactgaaaaatctctatgcgttgctgtccctacacttcccctctatgccggaccattttccaatagctctacgtttattgctgttgagtggaaaacttcagatcaatttgctgaacaagcaaaccgtttgcaaactgaagttttagagggtttacagcatctttccttttcaggcgttgatctcgctcgactattatttgaaaaagttggcactgctccagtattgccgattgtaattacaaatggtttgtcatggccggtattatctgaatctcatcctattcagcaactagatggccttactcaaacacctcaagttgcaattgatattcgctttagcacaagaaatgacggcgctttgattttcgatattgattatgcccaagaagcatttccacccaacatgattgacgatttcttggatgcactgcaattagcaatcaagcaaattattgattcagaaatattcagttttgatctcagcaattttttcagtgagcttcaaaataaacgaccatattttaaaaataatgagtccgatcattcatctataccacttgaaaataatgctaaacagcaaaatcaactactcgacatttatttagaagtgataggtcacacgccaaataaggaagtggacaactcaactcattttactcatctcgggctgcgtccacatcatttaaaggtcgtttcaaaacgtattaatgaaacatacgcgattcagctctcacctgttcaacttattcaatgtcgcaatattgctgatgtagagaaactactaacaccacattaa

SEQ ID NO: 61305 - DNA, 243 bp, Acinetobacter baumannii
  misc_feature (202)..(211): n is a, c, g, or t
atgccacttcttttagcagaacttaaggccaactctttactttctcagcgtttatttgaagttgactttctcgcaactttaagcggagaaatgttagttaccttgatttatcaccgtaagcttaatcaggaatgggaacaagcagctaaagcacttgctgaaaaattaaatattaaaattatgggccgtagccgcggccagnnnnnnnnnngaaaattgttattggcgatgactttgttgtag

SEQ ID NO: 61306 - DNA, 513 bp, Acinetobacter baumannii
atgctgcaatgggcatgtgatgcagctgaaggatcaaaaaaacacctattagaactttattgtggtaatggtaatttcacgcttccactctctttaaaatttgaaagagtacttgcgactgaacttgcaaaatcatcagtttatgcggcgcagtggaatatcgaacagaaccagattgataatattcaagtagctcgcctatcggctgaagagttcactcaagcctatcaaggtgaacgtgaattccgccgtctacaagaagcagatattgatattctaagctacgacttcggtacggtattcgttgatcctccacgcgcaggaattgacgatgaaactttaaaactattgcagggctttgaacgtattatctacatttcatgcaaccccgacactttatatgaaaatttaaaaacgctcactcaaactcatcgcgttactaagtttgctttatttgatcagttcccttatacgcatcatgtagagtctggtgtcttacttgagaagatttaa

SEQ ID NO: 61307 - DNA, 606 bp, Acinetobacter baumannii
atggctcaataccagacaaagcagttagaacctaggttgcatgcaggtgcaaagatgtttccgcgctgtcttttgagtcttaacatatttgatgagtttgggtttcggcctgggaccgacaaagacggttattatcaaggtaacccagaatatgcacattatcctttatttgaagatgtgcttgatgattttgaagtaacggaggaagagcgccagagttatcaaccaacagaaattgcacatcaggtgagagagtttctagaaaattcctataaagactataaagccgtttctgctttattagctgtagctgaagaagaagttattttgtacagtccacctttacgaaaagcaaccagtgctgtaggtatagcggtcgagggtggtggctattaccatgtgcatggagtatctgaagatgaaactgctgaggcagcagatgacgatcatgaagaagatctatggtttattttaatgcaagcttgtacagaagaagattacacttatttagaaaacctatgcctcgaatattgtgatttatgggaaaagttttgggatgttcaaatagaaaactcgaaatcaatcctgaaacaaaatttagcttaa

SEQ ID NO: 61308 - DNA, 690 bp, Acinetobacter baumannii
atgtttgaattcgccaagtcattctatgtgcgagatgatgttgccatttttgaagggcaggacattattgcacttggtaaacttttgcctttagtgtgcgagttttggtttagctctatgcaaactttaattgaacgggtacttgaaggaccatttcaagcaaagaagcttttattaccatacccagcgccagactatgcagaagaatatgaaaaagtgtttcgttgccccgttcagtttaatgctggggtgatgcaatggcattttgatttaaagtggctcgatgtaccttgcccaaatgccaacccgattactgcggacatgtgtaagtcgttttgtgagcggatgctaggcgttgctgaacttgaggagcctgagttggtgaaaacgattcgtttaatactattggatggaacggggctttttccatcagctcaagaaatggctgaacgtttacatatctcaaagcgtactttacaccggcgcttggcaggttttgatttaacctatcaagaattgttagatgagactcggcgccggcttgcggatgaatatttgcgagagacaactttaaccatagatgaaattgcggagagaattggcttttcagatacttctaattttagaaaagcctatcgccattggacaggtatttcaccaaatgagtatcgtgagaaattagttttataa

SEQ ID NO: 61309 - DNA, 369 bp, Acinetobacter baumannii
atgatgctatatggatatcacttctcaacaattgaaaataactgggaagacttaactccattaaatgagtttttacaaacatttgcagatgatgatggtgatgtctcccaaagagataaagaatcacttaaagaaatcattgctaaatccgatacagctttggccttagctaaagaaatgggttgggatggcagctatacaggctgtccttatttattttggttaccaagtaaaaatacacaatcctttgaatatggatttgtttttaaacaaacctcagataactcaacttttgtaatctcaccaattgaattggcttatctggcacaagatgagcaggtacaaactttaagtaagaatattgattaa

SEQ ID NO: 61310 - DNA, 255 bp, Acinetobacter baumannii
atggaactcactgagaatattaatccccatcaagggttaatcttccactcaattatgggcaacattaccaaaagtgatgatccaaatgtgattaccgatggtatcgttccttataaaagtgctcacttagaaggtgctaaatctgagaaagttctaccgggtggacactctattcagttaacaccacaagccgtattagaactacgtcgtattttacgagagcatttagttgaacatggtttgtataaaccatga

SEQ ID NO: 61311 - DNA, 225 bp, Acinetobacter baumannii
ttgcttaaaattcatgcagatatggttgggagtggaaatatttctcatagtttgtctcatcaatttgagttagatgccagtacggtagacttaattttccctgatgtatttaataatacttttacacaaaatcttaacattcaggagtatgcatttaatctaccagtattcctactcagtatctgtctcttatacacatctccgagcccacgagaccgaggctga

SEQ ID NO: 61312 - DNA, 1215 bp, Acinetobacter baumannii
atggatattttaaagacacaggttgcaattattggttctgggccagcagggttattgcttgggcaaattctatataaagctggcatcgatcatattattgttgagcaacgtagtgctgaatatgtggcttcacggattcgtgcaggaattttagaacaagtttcggtcgacttactgaaacaagcaggcgttgatcaaaacttaaaagaaaaaggattaccgcattcgggtattgaaatcttaaccaatggtgaaaagcatcgggttgatttggcagcacttacaggtggtaaacaagtgactgtatatggccagaccgaagtcaccaaagatttaatgtctgcgcgtgaagcagcacagctcacttcattttatgaagctcaaaatgtacaggtaaaagatttctacacggcaccaaaagttgagtttgagtaccaaggtaaagcttttcaaattcagtgtgactttatagcagggtgtgatggctaccatggtgtctgccgtgccagcgtgcctgaagataaaattaagacctttgaaaaagtttatccgtttggctggttaggggtgttggccgatgttccacctgtagccgatgaactcatttacgtacagtctgaacgtggatttgctttatgtagtatgcgctcagaaacacgtagccgttattatttacaagtccctttaacagatcacgtcgaagactggtcggatgaaaagttttgggatgagttaaaaaaccgcctagaccctgaaagccgtgaaaagttagtgacaggaccttctattgaaaaaagtatcgcgccgttacgtagctttgtgaccgagccaatgcgttttggaaaactatttttagcaggtgatgctgcgcatattgttccaccgactggagcaaaaggcttaaatctcgctgcctctgatattgcttatttatcaagtgcgcttgttgaatattatgttgaaggttccgagcaaggtataaatgaatactctgaaaaatgcctacaacgtgtatggaaagcggagcgtttttcttggtggatgactcatttattgcatcgttttgaaactgaaagtgagtttgatcataagattaaacaagccgagttgagttatgtactgggttcgattgcgggtaaaaccacattggctgaaaactatgtcggtttgccttatgagattaagcaaattgatagttttaagcacgccagctaa

SEQ ID NO: 61313 - DNA, 690 bp, Acinetobacter baumannii
gtgcaagataagaatgaaatgatagagaatattaaagcttttcttcaaaaaaaatgggtatatatttttttggcaatctatattgctgttgtactaatttactctatttgttttatccttagtgatggaaaaaacgtactgctaccttcaaatgaattaggtgattttcttgctggggttatttcaccaatagcttttctttttttaatactaggttacttgcaacagaaaaatgttattgctgaaaatactaaaatattaagtgagcaaatggaggagttaagactatctaaaaaattaatggttgaaaccaatcaaccccatttcacttttagtgattatgaaccagattacagggatggaagtgaattactaagtattcgtttcaaaattaaaaatgaaaatcaaaactgttattttcaaaagttagcattttttgaaaactcagaaaatgtaaacccattaggtgaaggactccgatatcttgcaagaggtgagtccctacagtgtcagattactattcaaaagccatttacttttttcccacctgaaataatatttgcagttatctattcagatatattcggaaataataaaaagaaattttatgttatccagtttctacccaatgatgtaactatctatacagcaccaattcatcggataacagaacattttaaagatgagtaa

SEQ ID NO: 61314 - DNA, 276 bp, Acinetobacter baumannii; identical to SEQ ID NO: 46521

SEQ ID NO: 61315 - DNA, 360 bp, Acinetobacter baumannii
atgacagatttgaataagttaagaagtgagtttgaggtaatacctgaaattaaagctcatttagatcatggaaatgttttttggagcgataagaatcaaacttacgcctccgaattccagtgtcttcacgcagtggcattttacgtaaatggagcttggtttatgtttcaagaaaaagccaaagctcaggcggtgccagataatcatattctgattccaaaggacaaagtaggagatttggtaactgagttagaaatggcatttgaggctaatccacatctgactattagcgacttactaccactacaacaagacttgaaggtaattcttgagacaagcgaatcgggagctgagggatga

SEQ ID NO: 61316 - DNA, 315 bp, Acinetobacter baumannii
atgatggaaattaaagaaacacggatttatcgcatcccttctcaaaacaatatagacccaattgacttgtttgtgacttggtacggtgaacacagatctcaaatagttattcgctgctgggataaagcttggacagcttactggggcggacattgggttgaggaagtagaaaggtttctattgatggataacattgattacttggttacttcactggcaagaacgcgagcacatcaagaacgtaattggctaaaaaatattatcaagtcaattcagcagtatttaaaagctcaaggctttaaggtggcagcatga

SEQ ID NO: 61317 - DNA, 2277 bp, Acinetobacter baumannii; identical to SEQ ID NO: 46341

SEQ ID NO: 61318 - DNA, 399 bp, Acinetobacter baumannii
atgtacaagttaaagctaaatcctcagaccagcggctatggcgtaacaccgggtgatgatgtgaaacgtcagcagatggacggcggtcgtggtcgctattacatcgatgtaaaacgtaatagccacattgttgatgtgaactggaatttaagtaaaaccgatttcaataaaatgatggcgttctggcgggtataccagaacaagccagcctcattttatgcggatctggtgattgatcagggaacacgtcagcaatatttatgtaacttcattcccaactcgttcaagaccaatgaagtgaatggcaacctttaccgggtaaatgcacagctcgaagttgttcaaaaccagcctaaccttaatgccgatatagcattaattaaagattgggaggtctaa

SEQ ID NO: 61319 - DNA, 552 bp, Acinetobacter baumannii
atgtcttctttacaaaaagaagtgaacgagattaaagagcaagaagacctacaggctaaattagatagcttatatgctcaaatccatgctttaaatgacaaagattttgcagctaagttaaacgctataaaatctcaagttgctactgtatttaaagaattaggatttacacttactaaaaaggacttacctgaaaagcaagaagaatacgtattctcgtactctaattttatttttaagttcgtttatccagatccttctcaaggatattttggctatcgctctgttattgaggtacatgtttctcaaaatactaaaaagcaagaatatcgcatgggaatttttgggaaaaagggcagccaactgaatgtagataaattgcctttagctgaacgtatacaagctcttgaagaatatctatctacatatacagctaagagttataatgtagcaactgtaaatatggtagcaaaacaacaagatttgttggtaactgatttggatcaatttactgatcatattgacgtaattttaaaagactttaaaaagtaa

SEQ ID NO: 61320 - DNA, 642 bp, Acinetobacter baumannii
atggatcagatcagaccatttcctccaactgattttatagaccaagcagatgaagaggaagcgatacgcatagtacctgcgcctgatttaaaaaactgggtagttgctaattacttaactattggtggacctctttataaccccgatcatgatcacatagctgagctgcttcacgataatgaagaatttttagcatttgcttgggcctcttctgcatataaaagcaagcaggcgatggtgctggggcaatgtgaaaaagtcatgttcaatgttggtggatggcgtaaggccagacaagagcaacagatgcgagactggttcggctttgtgccaacatacttaataactgtcgatgcttctttctgtgagcgtgcaaatgatacagagttctgttacttgcttgaacatgagctttatcacattggagtgatgagagacgaggacggagaaattgtttatagcgatagttctggtcttcctaagcactatcttgcaggtcatgacgttgaagagtttattggtgtaaccaaacggtggggggctagtcaaagcgttaaacgtattgttgaagctgcaaagaatccgccgtttgtttcgaatcttgatatttcaaaatgctgcggaaactgcgtaatcaactga

SEQ ID NO: 61321 - DNA, 522 bp, Acinetobacter baumannii; identical to SEQ ID NO: 46790

SEQ ID NO: 61322 - DNA, 489 bp, Acinetobacter baumannii; identical to SEQ ID NO: 50153

SEQ ID NO: 61323 - DNA, 288 bp, Acinetobacter baumannii; identical to SEQ ID NO: 57573

SEQ ID NO: 61324 - DNA, 1008 bp, Acinetobacter baumannii
atgaaaaaaatcgtacttgctatggctgccgcttctgttgttggtttttctgcttcagcgcaagcagcgagtaccgtgtgtgtattcgacctcttaggaaaagcaggcgactcatataaaatgatggaagaatgggctctagctgcaaaaggctggggtactgaaattaacttagttcctcgtcaggacgaggctgttgcagataatgattttaaagctggtaaatgtgatgccgtagcaatgacagctatgcgtgctcgccaatataacaaatttgccggatcaatcgactcgcttggtggcgttcctaataaccaaattgcacaacgtgctattacttatgtattagatgcacgtaatgctgcaaaaatgacaactaaccttggtggcaaaaaatacgaagttgctggtatctctccgttaggttcagcgttcattttcgtacgtgataaaaacatcaactcagttgaaaaagctgctggtaaaaaattcgccgtgttaggttatgacgatgcacaaaaaattatggtgcagcgcgtaggtgctcaggcagttctttctgatatttcaaactttgctgctaaatttaataatggtcaggtagatatggtaggtgcgcctgcttatgcttacaaaccattagaattgaacaaaggtttgggtgcaaacggtgtaatgtggaacttcccagtattacatgtaacggctgatttagtattgcgtgctgataaattcccagcaggctttggtcaaaagtctcgtgattggttcgtaaaacaattaccaaaaagctttgcaatgattaaccgtttagaagcacaaattccaggtaaatataaaatgaacctaagtgctgaagacaaactgaaatatcaaaaaatgttacgtgatggccgtatggatttaactaaacgcggtatttacgatgcaggtatgatgtctgtattgaaaaaagcacgttgttctgtagacaaagctaactttgaatgttcaatgcctggtgaataa

SEQ ID NO: 61325 - DNA, 513 bp, Acinetobacter baumannii
gtgaggacagttcgtagtcatgtggccaatcaagcatatctaaatagctttaaccagattggctttgaatacgtaagactggtagcaactttagacggaagaacttcaaaactttgtgcaactcttgatggttccgtatgggagattaacgatccagcaaagcgtgtaccgccgttgcatcctaattgccgaagtattttggtaccagtcgagaaagacggccaacttgttggcgaacgtccatttgtaatggatgaacgtcgagttaaagacatcccgaaagaagagcgtagccagttaatagggcagctagatgccaatactacgtttagagagttcttcaagaagacagatgatttctttcaaagagaatggttggggccgaaacgttacaagctctataaggaaggaaaatttgattttgataagttcttcgatccagaggggcggttatacatattggaccaacttcgaaagttggatgagcaaacctttaaggagttgggcttatga

SEQ ID NO: 61326 - DNA, 162 bp, Acinetobacter baumannii; identical to SEQ ID NO: 53079

SEQ ID NO: 61327 - DNA, 213 bp, Acinetobacter baumannii
atgaagcaaggggttattaaacaggttcgggaagaaatgcagggttatgacctgatgttattaaatcttgagttaaagcagcttgagattgaaaagttgagagaaggtggaggtgatgaagatccaacaccagtcaaggtaactattcaagttgtggatgcgagtaaaaaagatgccgaacatcaatccgacactgaatgtacctcaggctaa

SEQ ID NO: 61328 - DNA, 225 bp, Acinetobacter baumannii; identical to SEQ ID NO: 59225

SEQ ID NO: 61329 - DNA, 447 bp, Acinetobacter baumannii; identical to SEQ ID NO: 57549

SEQ ID NO: 61330 - DNA, 957 bp, Acinetobacter baumannii; identical to SEQ ID NO: 57395

SEQ ID NO: 61331 - DNA, 444 bp, Acinetobacter baumannii
atgcaaatgaatgccactcaatcacaagaccgcgaacggttcgtaaaattagggcaacacgatattcattatcactataaagatcaaacgctctatatcagcccaaaagagcaattaaaaccgtatccacaaaaactgacagatcggttaattcattttgcacaaaccaaacccgaccatatttttgcagcaaaacgcaatgctcaaggcgaatgggtcaaactgagttatgcagaagttctacaacgcgcatggcacattgctcaggctttgcatgaccgtaatttaagccaagaacgaccactcgttattttaagtggtaatgatcttgagcattttaacactctctatgggtgctatgctggcgggtgtgcctttctcggctatttcccctgcctactctcttatttctcaagacttcggcaaactcaaacatgtgtttga

SEQ ID NO: 61332 - DNA, 126 bp, Acinetobacter baumannii; identical to SEQ ID NO: 53492

SEQ ID NO: 61333 - DNA, 645 bp, Acinetobacter baumannii
atggtggacatgttgccgcaatttttctctgcaactttgaccacgctgaaaatttcaattatcagcattattttggcaattattgtagggctaatttgcagcattttaatcacatatcgcgtgcgggtgctaaatagaattgcccagttctatattgagttatctcgaaatacccctttattaattcaactgttctttttgtattacggtttgccaaagctcggtatcaaaattgatggtttcacttgcggtgtgatcggattgacctttttaggtggaagctatatggccgaagctttccgagcaggtttgcaatctgtggccaaagggcagattgactcagcaaaaagtattggtctacaaccgattcaaatttttagatatgtcatttttcctcaagcactggctatttcaattccggcaataggggcaaattgtctatttctgattaaagaaagttctgtggtcagtgcaattgctgttgttgagttgctttttgtcaccaaagacttaattggtatggactataaaaccaccgaagctttgttcttactcatcatggcttatctgattattttattgcccgtgtctattttaaccagctatctagagcacagaagtcggaaggtgagccatggaacttga

SEQ ID NO: 61334 - DNA, 399 bp, Acinetobacter baumannii; identical to SEQ ID NO: 57451

SEQ ID NO: 61335 - DNA, 273 bp, Acinetobacter baumannii; identical to SEQ ID NO: 53530

SEQ ID NO: 61336 - DNA, 147 bp, Acinetobacter baumannii; identical to SEQ ID NO: 48436

SEQ ID NO: 61337 - DNA, 645 bp, Acinetobacter baumannii; identical to SEQ ID NO: 47023

SEQ ID NO: 61338 - DNA, 1758 bp, Acinetobacter baumannii; identical to SEQ ID NO: 47019

SEQ ID NO: 61339 - DNA, 531 bp, Acinetobacter baumannii
atgatgtatagctatcaaggacagcatccaaaagccttacatgagccatgggatggctgggttgctccaactgcaacgcttattggacaagtagaactaggccgtcaggtcagtatttggtttggtgctgtagtgcgtgccgataattgtgtcgttcggattggtaatttttctaatattcaagaaaattcggtattacatactgatgcgggccttgagctaaatattggcgaatatgtcaccgttggacataaagtcatgttgcatggttgtacaattggcgataacagtttgattggtatgaacgccgtcattttaaatcgagctgtgattggtaagaactgtattattggtgctaatgctttaataccagaaggtaaagtgattccagataactcggtggtaatgggctcacctggcaaaattgtaaaaactttagatgaagaaggcgtagcaaaaatacgcttgagcgcactacattatgctgaacactttaaaagctatgccgatttgaaagaattctacttttaa

SEQ ID NO: 61340 - DNA, 927 bp, Acinetobacter baumannii
atgtcaactgcacccaataagcaatctgcgctaaaaaaaattacacgtggactcactgtaggtacagtcatcacaggtagcactttttttcatggaccacctgtcttagctttaggtttaacaaagctatttaaaaagtcttcaaaaattgatgaaaccaatattcaaattactaatagttggcttggtgtcaataattggctcattgatcatgttttacctaatttaaaatgggacattagcattgacgaaggccttgatctgaatatgcaaggtcgttatttaatgacttgtaaccatcaaagttgggttgataccacggtaaaccagtatttcgggttaacccgtatgccacttacccgcttttttaccaagtgggagctcatctttattcctttcgtgggtcaagcttttaaaatcttaggcttcccaatgatgaagcgtcatacaaaagagcaaatcgcgaaaaatcctgaactcaaagaccgcgatatgatggaagcacgtaaagcgtgtgaacagctcttaagtcaaccttttacattattaaattatttggaagggactcgttttactcaggaaaaacacgaccaacaaaaatcaccatataaacatttattaaaacctaaagcaggtggtttggctctggcgttaaatattttgggcgacaaaattgatgctttagttgatatgactattgtctatcctgatggcgtaccagggtatggcgatttctggctaggcgacgtttcaaaaattgcggtcaatcttcgaaaaattgaaataccagactgggttctcgggggcaattatgaagatgacccagtttaccgtgaacgttttcaacaatgggtacatgaactctggactgaaaaagatcagctcatcgagaaaatgaaagctcaatacgcgactacgaatctttaa

SEQ ID NO: 61341 - DNA, 306 bp, Acinetobacter baumannii; identical to SEQ ID NO: 53489

SEQ ID NO: 61342 - DNA, 1599 bp, Acinetobacter baumannii; identical to SEQ ID NO: 46980

SEQ ID NO: 61343 - DNA, 432 bp, Acinetobacter baumannii
atgacagctagtatcgcatataaagatttaatagaagaagcttttattgaaccaattagaagtgtaatggtaatagatgatgaatacccaacattaactaaccttatctctatattgcaaaatggtaaaagtcaaagctatagtccagctaacctagaaaggttgcaaaaaattatagagatgtgccatcaagaaaaggaatgggtggtagatgtatttgatggtaagaatccccatttagaagcagtcaaccatataccggaacgactaagacatagtgatctagttattttagattaccatttagatggtgataaaagccaagatgggagcaaagctcgttcgatattaaaaaaattggataataataaacactttaatcttgttatcgttcatactaatggattagatctgtctcttatacacatctga

SEQ ID NO: 61344 - DNA, 483 bp, Acinetobacter baumannii
gtgttgggtatttctgagttaaaaggagatttattaagaaatttaaaagcttatggttttactaaatatcatcaaaaactatttaagaatacagattatcagtttctaagtgaggatagaaatatacagaagatactaaacttttggaaggtaattaaagaaaggaatcttgcaattacgttggctgaaaaagagaagcatattataaatatctttatttggggacattctttagatatttctgatgaaatttatattaatgaagttttttcattaaatgatggaaaatactttaatactaacgtaataatttattattttgataaccatgcgaaatttaatttacttactaatcttttgcatattttaggtaaagaaaaagttgagctatggatgaaaaagggctggttgaaatttgaacctaatcctaatattgtagaacttaataatattgaacctgtggatttaactaaattgaaataa

SEQ ID NO: 61345 - DNA, 126 bp, Acinetobacter baumannii; identical to SEQ ID NO: 50996

SEQ ID NO: 61346 - DNA, 264 bp, Acinetobacter baumannii
atgaatgcgcttaaagaagaattgtggaaacaatacggatattggtgtcaagaaaaagatatgcagccttatattagtaaagaagactttaaagtaagtgaaaatttctatattaatcaatcaggcgggattacatttgattttcagctttacgaattggctccatatgctgcaggtcctgtgagtttagaactctatgatacagatcaactgataaaatcagattttttaccgccaatgcctactttaaaaactgaaatgtaa

SEQ ID NO: 61347 - DNA, 348 bp, Acinetobacter baumannii; identical to SEQ ID NO: 55311

SEQ ID NO: 61348 - DNA, 1755 bp, Acinetobacter baumannii
gtggataaaaaaaattggattcttcaaattcaggaggctcgcagaagtttcaataattcaacttggattcctcttagagcatcacagaccaacgaaaaaggctcagtcaaaaatataggttttgaaagtgagttttttggatgcggatcagttgcatttccaccagaacatgtagataaagcaaataacttaagttggagtgatataggtattagttcaattggtaaaccatatgcatataatgatggttattactcgccaattgataagtacgaacgtaatgatagagaacctataggtgtccatttaattttcgaatacccacaacctgttattggtgggaggaagtggatacttaatccagatttgatagttgctcttggcttaattaaggaagggcaaagttggataagacctgaggaaaattttgttgaagtagctcgtgaagtttttgatgaaaaaggtaatcatgtactaatagaaattaaaagagaattcttaattgattacttggctgcaagaaatttaacacttcgactctcatattatcgtcagagagtagaaaatgttgaatcattggctagtagtgcttatgcagatttaacaaattttaaagaacagcgaaacgatggaagatttgaattacttattcgcaatgtaaatgatatttttggaggtggatgggcatcttttagagtttggagaacagatgttgatgaaggtgaagatgcaccagtaatggggcctgaaaatgatgacaatacagaatatgaaacttcaaaaggtcataaaggtggatatcaaggtgtacgagtagaaggagagttttggagggatgaatggattcatcatcaaagaaaaagtatacgtgttcgtagagatcaaaatgatacattaccaaatttcattgtggaaactgatgggacaagaatgaatgctgcttcattaaacgatgaagatataggtcgttggctatggttccgttctagtgttgttaatgaattgcttagttatagaggattttttcttgaatggtatacggcagaaactggggctattcattcgacttctggatatagaatacattttggagtgaactcgtcagatttcattactgtatatgcttatgatatagcccgtttagaagcatgggagcaacatgtttgggttggccataacatagccccagatggaaaggtttcttctgaattgctaatgtcacaggttaaggcacaacctgcttctacacacgctgctgaaactatgttatttgaatgtactaagttgttagaagcggggttttataatgaatatggaattaagttattttcacaagatataagtgatacaaacttttttaaggatatctctcgtttttcgagtagggatcagacatcattattaagattagcaaaggaagttatacgttttttctctgagcgtttgaataaggaacaactccgtaagctttcaacgcgtaaagataaagagaagctcggttcaaataaacttcttgaaagtatcttagctgataaagttggaaacgataaagctcgtgagatttttggagtgattgctggagtctatgatatgcgaaatggtgatgcacatcagacgagttctaaaattggagatgctttgaaactggctagaattgatgaaaatagatcatatcttagacaaggtgaacaacttatttcaaattttggccagtctatttggtggataggtaaattactctttacggaatcatag

SEQ ID NO: 61349 - DNA, 261 bp, Acinetobacter baumannii
atgaccaaaaagacttacactttgaaaaaaaatcctaatacagatcagtttcacctttttgaaggtaaattgaatcctcctaattcagagagtaaatgtacatctgaaagtttttcaatttgtgaaaagatgaaatggatttctggatctaaggatatcacttgtgaagtggatgaatccattgtgcgtgttaaatgtgctcaattaggccgctctgtatgtggtatatgtgttagtcatttatatgctgatccagagtaa

SEQ ID NO: 61350 - DNA, 153 bp, Acinetobacter baumannii
atgtgtatttaccctgatatcatttcatggcctggagttatagtttttagctataagaatatagagtttaaggtattcattgttcctgaagtgatagccgaaactagtaaagtccagctatcacctattgaagagaagatgtttctcatctag

SEQ ID NO: 61351 - DNA, 258 bp, Acinetobacter baumannii
atgtcaactattaaaaaatcacgcgatgaaagtgaaattccttcaatggcagggcaggtgcttcgggcgagttttcttgaggtatctcgttatgcaagcgtactttatgcaaaagatggtgctgtcttaaaacaaacaccaaatgggcgaacagtgacgattaaacagttacctaaacgcgatcatgagttagctcaacgcgtgcttagtcaaggaactgtaaagcttaaaaagcgtaaagttgaggaagctgaataa

SEQ ID NO: 61352 - DNA, 756 bp, Acinetobacter baumannii
atgtttgctggaccaaatggatcaggtaaaagcacgatgattcatgggttggatcaacgattatctaaactttttttaaatgccgataatcttgagcgtgagcttaaaactaaccctattcttgatctggaacaatttgataaacgaattgatgctacccgattagttcacttcttgatggggttgcaaataaagcgtcgagagaatgatggtcaagaaatcattactccttgtcttttgaagactccgcaaattgatgggaacaaaatagatctgtcgggtaatctgattgattcttatcttgctgcccgaactctggattatattcgcaaagagctattggcgttgaaggtgagtttcacttttgagacggtgatgtctcataaaagtaaaatagaatttttacgcgatgcaaaagcattgggatatcggacctatttatattttgtaaccacagaagacccagatattaatgtggacagagttcggcaacgggtaagccagggtggtcatcctgttgaagaacaaaaaattagagagcgttattaccgaactatggaaatgctgattgatgcggtcgaagttgcagatcgagcatttctatttgataactcaagtgatgcaactcaccagaacgcatcttatattggagaaatcacaggtggagataccctgacttttaacccggattttgatggagagttacccgtctgggttgagaaatacttgttggtacatctggttgaaaatgactga

SEQ ID NO: 61353 - DNA, 381 bp, Acinetobacter baumannii
atgttagatagcaataccctggaacagctcttttttatagagaataagtttgatcaactcacccgatttatacagcaatcagaaacttgccctgctgactttgcaaagcttaggcatgagatggatgaggacgagtttttcgatcggatagcctttttggttgattgtgcggtgtttttctatgaaatgattttccatctgggggtcgacggtttcgagccttattatttgcataatttacggggtgaaccggatcatcttgaaattgcaaaggggatgctcttttatatgtttgatgcggtggttgagacaaagttctcctacttaatgaaattgcgttttgaagagtattatgaagaaagggaggattcaaggaattaa

SEQ ID NO: 61354 - DNA, 747 bp, Acinetobacter baumannii
atgaaaaaaattacttactccatttccttagccatattgttgactggctgcaatgaggtcaattctgccaaattaaactatcaagcacagtcttgtactgccgataactctgtcagttgtaatgatattcgggttagacgagcgatcgttgctacccaaatgggatatcaacaaatgattgatgaaaaaaataagtttgtatcagaacttggacagactcgatatgaacagttacttggtttaatgagacaaaagatcgaacatctcgaaaagcagcgccctaacctttatttacgatggtttcagggagattccagatattataaagatgtagattttggcgaccatattgatgctgaaattgagaagcttctcaatactcaacatgtagcttcatcaaattctactccagcagacctaattcaaaatggtgaatcaattcatgtcgcatcagaacaaaatcagacagatcatttttctgaaaagtatgaacacagctatactttcactgtaataaacccagttttagaaaaagatgatgcgttgcttttggataccgaagcaggccctatcaagtttgatatgcattacacatctgtggctcagaactttatgcttgaaaagttaaaacaaggggactgtatccagtttagtgctaaagatacccctgtcatgaatgatgatcatcaattgtattttgagacctacattactgacccacaaatagtgcaatgtacagcggcttaa

SEQ ID NO: 61355 - DNA, 231 bp, Acinetobacter baumannii
atgaatgcatttgtaggacagactttccaaatcaatcagcttataagtatcaaacaagcgatagaaatagtaggtgtgggacgttctaccatctacgagatgatggatgaggactcgccctattacgattcgacttttccaaagaaagttaaaattacccaaaaccgtatcggctggtcagcttacgaaatccatcagtggattgaaaataagttggcaagccgtgaatag

SEQ ID NO: 61356 - DNA, 519 bp, Acinetobacter baumannii
atggctagtttataccaaccatttttaactgagttacctaaaacagctcgtatccttgatgttggttgtggttcaggtcgtgatactttagtttttaaaaataaaggctataaagttgatgcaattgattattcgattgagcttgtaaagagagtgactcaacttactggtattcaagtaaagttaaagagcttctataaagtcaatgaactcgaggtttatgatggaatttggacatgtgcatctttattgcattgtgagcgtgatggcttaactgaagtctttggaaagttaatatcagccttaagatcaaatggtgtgctgtatatgtcatttaagtatggtgacagtgaccgagaaaaagatggaagggcttttacggatttagataaggctcaggcaaaagtattacttcagctctttgaggatgttgaacaaatcaagcaatggactacggtagataaacctcccgatcgtgatgaaaaatggctcaatttactttggaaaaaacatggataa

SEQ ID NO: 61357 - DNA, 465 bp, Acinetobacter baumannii
atggataatttaattcctacagtacaagcacaactcaaatttctaaagaatattcagctgattttacagtcaggaagttttagcagtacctataaatttgcgctattggttagccttagtcgattggctattgaaaaaggtgaaaacgcaggtggaagtctatcgcttgaatatacggatattgcagaaaagtttatcgagctgtattggaagcaggctgtgccgtatgtgtttaatgataaaggccagctcatcttaaatcagaacaatggtaaacaagtcgctattgttaatcgaatcattgaacttcggcagagttactcatcttttgggttattaagacgagactctctgatatggttaaatttagttaaagatgtcgctcgaactgtcaaagagatgccagtccgctatctacaaaacattaatggtcaaaattttgagtttttatatcagtttaattag

SEQ ID NO: 61358 - DNA, 258 bp, Acinetobacter baumannii
atgcgaaaaggcaattatgcagtcgatcgttttattccttgttcaatgtacccatcggatacagggcataattttgtattggcggattcaagctgtaattctcagaaaagtgatccacttgcatctgataagtttttgcataagtggaaagagcgaaatgaagatcaagatttgattattgtggatcgaatttctttattgggattcctaacagataaaaatcgttcgcataaggttgcgcagtgggcctatgcttag

SEQ ID NO: 61359 - DNA, 1842 bp, Acinetobacter baumannii
atggaaaatacaatccatactttacaaaatatttttaaaatttcaatttttagtattcctcaatatcagcgtgcctacgcttgggaaaaagataagcaactcccaacatatttagaagatttaaggcaacaagctttcgcgatggatcgaaatcaagataaaagttattttcttggtactttattgcttcaccaagttgatcctctttacaacgataaaaatattcatgttgtggatgggcagcaacgtttaacgacttcagttatatttattgcagcagctttaaattttttgagaaaaaataaagacaagatagatgatccaacgataaaactgaaatccttatacagaaattttatattcgatgatgatgatgaggtacataaatttaatactattcaggaagataatgctttctttagatcagcaattttgaagacgacaaagggtaacaccactgaagcatcaccttcatcgaagcgcttgaaagaagcttatgattttttcagtaatgaagtaaagccagatgaatggattaagttgttaaaggttctcatcaatgcaaaagtaatggtttattcagtacaagattcggctgatgcgacacttatctttgaattgcaaaatgatcgaggcaaaaggcttacagatttagaagctttgaaaagttatctaatgcacttaatttacctgcatgccaaaaatccgaatgatagcctagcgattgtgcagactcatttttcaaatatttatcgttttattgaaagacaattagaaaacaaactgattccaagtgaagattctattttgtcttatcatgctgttagctacttaagttggcaagcagacgaatggcgtcatcctaaggatctgatcaaaaagatcatccaaagaatggagcctgattcaattcaaaattgggttttagaatttgtatcaaatcttgaagagacttataaagtattcactaagcttttcgatagtcttgatacctatactgaatttacacatctactcatggtcaagaagatggcagtattttggccgattgtgattaaaacatttgttttagaccagacagcgaataaaaagcaattttgcttagtcatgcgtctaatggaggtatttgcagtaagaggttatgcgttgagcggaattcgttcagatgcaggcttatccacactttatgcaagtgcaagagatttcaaaggtaattataaagagttacaagatctactattttcgatgtcatcatggtggggcatggaaaataggtttactaatagtattgaaagccctactttctataatcaaaatagaattgatgcgacttatattctttggcgttatgaaaattatttacgctctcagacaggtcggaaagttgagcatttgtcgtggaagcactatttaaagcctaaagacaatgcttcaaaactaagcttggagcatattgctgctagaaataaccctatcagtaatacggtagttgagtgggatgaaggcgaacagaaacatttctatgaagttgctactcatcgaatcgggaatttagtgattgattccatctcagcaaattcatcaaaaggcgactatgatttttctgataaattagatgcattaagtactcattctacattccttagccaaggagagttaaagaagtacgctttaaaaaaagatgacatttactattggtcaattgattcgattaagaaccgccaaaaagatcttgtagcttttattaaagaaacttggaatcctgaaaaatattatcaatcaattgatagcattgaggaagatgagttacaaggtatggttacagagcatgaagatgtatga

SEQ ID NO: 61360 - DNA, 2880 bp, Acinetobacter baumannii
atgtcgaatatcaataaggctcaacaagaagctctaaataccttagatgggccagtccttattattgcaggccctggttcaggtaagacatttaccctcgttgaacgaattgtaaagttaattcaagtcaaaggtgtgcagcctgagtcaattttggttgtaacttttacagagaaagcagcaagagaattaacaacacgtatttcaaatcgactgcttgaattaaaaattgacctgaatttgaatgaaatgtatttaggcacatttcattctatttgcttaagaatattagaagaaaatcaactatttactcgtcttaagtgtagtttttcgttgtatgatcaatttgatcagcaatttctaatttataaaaagatgaaagtctttaccgagatagaggatttccatcttttaattaaagaggatcagtcgagatggaataaggctagccagctcctctcgcttttaaataaggtgacagaagaggcactcactcctgatgagttaacagaagccaacgatattgaagtttctgtacttggacattgcctgaaaaaatatcatgagttacttgaagaaaataacgctctagatttttcaacaatccaatatgaaactttaacacttttagaaaatcagccccaagtattagctgaccttcaagaaaaattaaagtacctcatggttgatgaatatcaagatacaaataccatccaagagcgtattttgaaattgctaatggggcaagcacagaacctctgtgtggtcggtgatgatgaccaaggtctatatcgttttcgtggtgcgactattcgaaatattttagagtttcctaaaaattttgattcaaatgcgtgtaagcagattcaactcacaacgaactatcgttcccatcctgatattgtgaatttctttggccaatggatgcaaagattggagtggggttcaggtgttaatcgcttccgctatgacaaaaatattcgtgctcgggatgatgagtttccaaatgttccttctgttttgaaagtcacagcagaaggccgtgaagcgtggtatgaagaaaattaccagtttttactctcattaaagaatgatggtttgactgattggaaccaagtagcatttttattccgctctgttcaaagtgaacgtgcggtagggcttgccaattatttagaagaaaaaggtattcctgtttattcaccccgatcgaaccagttctttgatcgtgaagagattaaattggttataggtctatttattttcttattccctaaatattttgagatccgtaagtggactgaaaatcttaacttgactatttgggattactacgatcaccaatgtgtgcctttaatggctcaggaaatgaggaaacctgagaacctagatctgttaaagtgggcacaggagcgagcgagagttcaccatcagttggtggataacacggactacgggtttactagtctattttatcaagccttacaattcccaatatttagtcgatatttcaccgatgaggctttaaatggtctagataaaggccgagcagcacgtaacttatcaaagttttcatcgctactcgctaagtttgaacacttgcattacgtaacagtcatttcaaaagagtttatcgataaaaatttgacagacttatttaaccaatacttcagattcctgaaagagggtggtattggtgagtatgaagatgactctgaatatgcgccaagtggctgtgtgtcttttttgacgattcaccaatctaagggcttggaatatccagtggtaatcacttgtagtttggaaggtgtacctcgtaagagtcatatccaactcgatgagactcttgagaataattattttaataagccaccatatgagccattcgacttaattaagaactttgatttttggcgtttgtactatacagcattttctcgggcgcaaaatttactggtcttatctgcggaaattaaaacggggcatggggcttcgccatctaaatattttaagccgattgtcgatggactcgtgaattggaggcaccctgagcttgatttatctctaattcaatttgctcaagtcaaagagatgaatttgaagcgagagtacgcttttacttcgcatattctcttatttgaagcatgtcctgaacaataccgattctttaaagaacttgagtttcatcctgttcgagcaggtgctcagatctttggtacgctggtgcatcaaacgattgaagatattcataaggcagtattacgtaacgaaagccatcttgtgactcatgagcagatacaaagttggttgaatactaactatatatatttgtctaagaaagaacgacagttcttggcgcctagtaccatcaaggccattgagaaacatgtgcttaactactacgatcgtgagaaacagcatttacatcgattgcaagaagctgaagttgagatttctttggtgaaggatcagtacatcttgaagggcagtattgatttaatccgtggggaacatggcacagttgagattattgattttaaatctgagcgtaagcctgatttagaaaaagaaaaatctagattggaaacgtatcaacgtcagcttcaactctatgcgcacttgttggaagagaagacaggacagacggtcagccgtatgcacttgtactacacgggtgaatcagatggctctccgtatgtcagctttgataaaaaaacagaacagattgagagaacggtgaaacagtttgatcaagtagtatcaagaattgaagctaaagattatgggatgacgtgtagacctgataagctttgccccaactgtgacatgcgtttttactgcgatcgtaaaaattggaattttgtgaaggaaagcctttaa

SEQ ID NO: 61361 - DNA, 384 bp, Acinetobacter baumannii
atgacgactgaaaataatactttagatttgcctgaagaaaaccctcaagagggtgtatttaagtttgagccgattaaaggctatccgatgttgaactggaaaggtaagcgtccttttacttcgactcgctattatccagcacaattaaaagaacaacatggtgaagcggttaatggttggctcaataagattttttggggggataaccttcaggttatgtcacatttgctacgtgagtttcgtggcaaagtggacttgatttatattgaccctccttttgactcgaatgcggattataagaaaaaaatcgtattaaatggtgaaaaagttaataatgatcaaaatgtttttgaagaaaaacggtgctatttatcttcattgtga

SEQ ID NO: 61362 - DNA, 1431 bp, Acinetobacter baumannii
atgatcaaaatgtttttgaagaaaaacggtgctatttatcttcattgtgactcaaaaaaatcacatcatctaagatgtattttggatgaagtttttggacaagaaaactttttgaatgatgtggtttggtgctattcagatgctgcaaatagtaaaaagtattggaatacaaagcacgatactattttgtattacaaaaaaggttctctttggacttttaattatgaaaaagtacttagagaacatactgaagaaaacattaaaaaatataaatatgaagatgaaataggaagataccgtttatttggtaagaatattcaaggtagccctattcaatggcatagagatgtgagtcctgagtgggaaaaaactaatcctgaattagtattcagacattatctaaaagaaggtagtttaccattagattggtggacaattaaccctgtaaaccaagctgctaaagaaagacaggcctatccaactcaaaaaccagagaaactattggaacagattttaattgcatcttccaatgaaggtgatttaatttttgattgttttatggggtcaggtacagctcaaaatgttgcaatgaaacttggtcgtaagtttattggggctgacattaacttaggtgcaattcaaaccacgactaagcgtttgattaaagttgcggaaggactgaaaaatactcagcctgaactagacaatgaaaaagtactttatactggttttgaagtttataacgttaaccactacgacgtatttagaaaccctgttcaagcaaaagaactgcttattcaagccttagatattcagccaattcctaacagtatctatgacggtgaaaaagatggccgtatggttaaactcatgccagtcaaccatattgcgactaaggcagatgtggccgatttaattcacggcgtagactacaaagcatttgaaaagcgtaaagaagaaaagccaaatcagcctgttgaaaagatcactttaatctgtatgggacatgagcctgatttagctgcatttgtagagcaatcaattggctacaaacttgatatccaagtggttgatatcttacgtgatcgttctgatctgcaatttaagcgtgactcagaagcactattcaaagttgaaaatggtcaattggtggtggataagttctatccaatgaacttactacaaaaactttcacaaaccaaagataccgtatctgattggcgtgagatggtcgaaagtatcatgattgattggaactatgatggtgcggtatttcaacctgcattaacagacattcctgccaaaaatgaacttgttcaaggtgcttatacaatccctgaagatgcaggtacgattcgtatcaagatcacagatctcctttcagagtcattagagcgtaatttgacggctgaggagatggcgaatggctaa

SEQ ID NO: 61363 - DNA, 2715 bp, Acinetobacter baumannii
atggctaaaaaaacaaattcttcagcggctttagattttgccttctttaattatctttgggctttctatgctgaaaacaaaggtgcgattagaaaaaattaccgtgatttgagtaaaaaaattcttgattacaatgatccgagtaatcgtcctgatgctttcttgcgaagacctcaatttgaagctttagaaacttacgtctttttaaaagagtttttgaacaacgcgaaagttgagaaaatttttgaggattggtacaactcaacaaatcaatttgaaaacagaagagccacaggatttggcgaagatgactcattgcagggcagtttgttactcggtgatgttatcgagcttaaaaattatcaagctgttttaaagaaaatgaaggataatagtcgaagttatcctaactacatctttgcgctgactatgggtacaggtaagaccttactcatggcgacgtgtattttttatgagttcttattggcaaataaatggccaaaggatgaaaaatactgtcataacgctttgatctttgcgcctgacaaaaccgtattacagtctcttcgagaaattgaatcctttgatatttcaaaagttgtgccgaaagagtatgtcggtatttttgatgcaaacttaaaattccacttcctagacgaagctggtacttcgctcagtacgatagatggatctaagttcaatttgatcgtatcaaatacacaaaaaattatcctgaagcgtcaacatgctgaaaagactgcaacacagcaactatttgaaaacagccaacctgattatggtgcgttcgcagatctttatggtgatctgggtttacctgccagtgaagatgatctaaaaaccaaccaacgttttgagaagttatcgcgcctacctcagctcggtatttttgtggatgaagcacaccattcatttggccaaactttgaaacaagacatgatgggtggtggtacgacaaagacggataatagtcttcgaagaacgattgatgagcttgctaagaacttgaatgaggtaggcacaagagtcgtggcatgtttcaactatacaggtacaccatatgtgggtaaggatgtcctgcctgaggtggtttatgcgtttaatttaaaaaatgcgattcaggaacattatttaaaaagtccagccgtacactcttatacgacgacacgtacagaagagtttgtaaagatcgctgttaaagatttcttagatgcgacacaaggtattaagcctgaagggttattgccgaagcttgccttctttgcgtcaacagttgaagagcttacagaagagttgaagcctgagttagaacgtcagttggcagaacatggtatatcagccgataagattctggtgaacgttggtaatgataaaattaccaagtcggatgatatccgtaactttaataaccttgatgttcctggaacagaagggtctgaaaaacagtttattttgcttgtaaacaaaggccgtgaaggatggaactgtcgctctttatttggtgtagcgatgtatcgttcaccaagatctaaagtttttgtacttcaagcaacgatgcgttgtttacgttctattggcaaacaacaacatacgggctcgatttatttaagcaaagagaactatgacatccttgatgctgagcttcaggctaactttagaatgacagcttcggattttaatgataatcaacctaagaccaagaatatgcttaatattcaggttcgagaagatgtcaaaatcaaacttaagcacgttaagcaaaccattaagttaaaagagaaagaatttgtaaaaggcacagcactagaactcgatccatcgaatgctgatgcttggaatgagttaactaaagattacaaaatcatccaagttactacgacaaaccttgaagccagagattttaattctgctcaatatagtaagacgacagatcggacgagtgagaaggtgaaagttgaatattcggctttgatgctggttgctgagatatctcgttatctcaacttgagccctattcgaatcgaaaccatgctcgagcagaccaaagaaggccttaagcaaattctagactgtgttaatgagtttaatgaattgctttatgatgtagttattccaagactcttcaaagcgatttacgatcaagaaattgaaaaagaaacgactgaaaaagaagttcagttaatcatacctccagcagttggtggtttatcattctatgaaattgcagaaggtaggggtggaacagcactctactcaacgacccaagaggaatggaaagacaaaagctttaacttggatacttatactttcgactctaatcccgaatatactttgttctgggacttattaaaagatgaagatgtagagaaaatctactttactggtatgttcacggataagtcaaaaactgagttctatttccaatacattgaccctgattcttatgcattaagaaactattatcctgattttcttgtgcaattgaaaaacggtcagtacatcattgtagaggttaaaggtgatcaccaatatgaagatccaatcgttaaagctaaagagaaggcaactaaagaatatgttggtatgagtaatatcgagtataagatgataaagggcacagatgcggcggcccatctttatcggcatttgattgctggagtaaatgttgctgaaaaagcaaataatcttcttagttaa

SEQ ID NO: 61364 - DNA, 297 bp, Acinetobacter baumannii
ttgaatgaagagtcaccattaacaggttcgagacagcattatgctccatcattacagtttccaatggaggcagtttttgaagcttatgttgaaaagcacttatcaatgcaattagagaaaggttttattttaaaggcacaggcacgaagccaatatttagttcaacacagtaatcaaaattggttccgattaaatccagatttactggttcaactaagaggtactacacatttagttttagatacaaaatggaagctattagattcatcaaagaagagtggacatgagaagtattaa

SEQ ID NO: 61365 - DNA, 249 bp, Acinetobacter baumannii
atgacaaatagtatccataccactgaaatgagtgctttgtgtgattggcttaaagagcaacgtattacacaaaaattaactatgcgggaattatcagaacgactagataagcctcattcatatgtacaaaaagttgagcaaggtgaacggcgtttagatgtcgtagaatatatttggtattgtacagctctaaagattgatcctcatattggtgtgcaacttgttttggcgatagtaaaggatcaataa

SEQ ID NO: 61366 - DNA, 633 bp, Acinetobacter baumannii
atgactttaatcttatgcccagagtgcaaaagagaaataagtgatcaagcaaaaacttgtcctcaatgtgggtttcctatagagaaaagctttaaacttaaatcttcaaattggcctccaactgttacgcctccccctctgccagacctaaatcatgataataaaaactttactagtgcaagttcaaaaactgaaaagaactttaacttttttaatttgttttggatttttcttttaatatttattatctcagtctttttctttaatagtagcttagaagataacacaacttctaaatcgtatagtactaataacaattcaaatgaaaaaacaaagacttctatttcaaataccaatgaggatattcaaggtgataaaaagctaacaaaagaagagaatagtgaaaatgaacatttaattgaaaaagatgcactaattgacgatcaactgaatgaagatcaagtaaaagttgcaattgcatttataagacttaatgactacaagtgtgacagtgtcagctcaatggcacaaactagagatgaaaagacaattcgagtaaattgcaataattacaaatacaaatactatataaatgatgaaggtggtaaatgggttatttctttaaataactga

SEQ ID NO: 61367 - DNA, 297 bp, Acinetobacter baumannii
atggcagatacacctaaaaccagagatcgtgtggaagttattcaatctttagaaagcatcaaagcactacaacctaaaattgttgtacctgctcatatggttgagggagctccacaaggtttagatgctgttaacttttcgattaactatttaaatagttatgaaaaagcagctaaagcaactaaaaatgctactgagctgagcaagctcatgcagaagcaatacccaacgcttcaaagtgttgatagcttagagctcggcgctaaagtggtaaaaggtgaaatgcagtggccataa

SEQ ID NO: 61368 - DNA, 258 bp, Acinetobacter baumannii
atggaacataatcaatatacattagagcagcttaagaaaatttataaattgcataaagatcaatttcaattccttgcagttcccgcaagacctaagaaatatgataaatggtgcataggctttcattgtccagttgcttcggggaatttagttagccctcaagatgatcaaatcaaatttaactcattagatttactactaaaatatcttaatgtgaatttcaaagttgctatgtttacggtggttgttgatgtttag

SEQ ID NO: 61369 - DNA, 1161 bp, Acinetobacter baumannii
atgctaacgcttattagtgcaacgccgggttctggaaaaacacttaaagctgttgaattgatttatgaatgtttgaacaatggttatgttgtttattcaaatatattgggtttaaaagtcccaggggttattcagatttccagccaagaagactggcgtgatctagatcattttagacgtcaaaatattgaaatgttgaaaacacccattgctgttttttatgatgaagcacatgaacatgcagcatttgcggaaaaagacttgttaaagaactatcaaatagaccgatctgattatgatttggatattgatatcatcaatttagatgactcactgacagcaacacaaaaaaagcaaagaattgatgagatcaatagaaaatataagacagcacttgatattaaaaaggaacaaattagagaaattggtactgccttatcaatgcacaggcactttggttttgatatttttttgataacacaaagccccaaaaagcttgctgctcatattcttgctgatgttgggacgcacttacatttacgacgagtttttaagatgaagagggcaacgatctatgagtttccagaagctcatgcaacggtatcaaaagctgtcagggatgatgcgattaacaagacaatttggaaatttccaaaacatttatttggtacttacacatcaacagaggttgatactcataaaacaaaaattcctatgaaaatcattgttggtcttgtattgatttttattgttatgcctgcttatgttgctaggtctctttggtatgatccactttttgggcataaacaagaagatgtaaaagtgattaatccatcatcaaaaagttcttctaaaaaggtacaacagcaaccacaaactcccaaaccaattacttccatagattctcaacaagaaaacttacaagaacatgaaaataaacgtatttccatgataattgaatcatcaactgattgttacgctaaaaattcctatggcgatattattgatattacggaagaacaatgtcgtctattatcaaaaaagaattctagaattcctctttctaaacttaaacggcaacaggaagcacagccagtcaatgttaatcatgctgaatcaacaccaaccaatatgaatgagaatgttatctatggaacataa

SEQ ID NO: 61370 - DNA, 1212 bp, Acinetobacter baumannii
atggctttattttatcgttatgttcatttgcttaggtgcattattactaaagtaatatcggtattacttgttcaagtcattctatgtttatcactgatattaccgtatgaagcctatgccaatagctcttcatcagtattaacaacatcatatttagggcgattacaaaatggatattataactttcaatttaagctcacaaatgcatctacaaatcttactaaaacagtaacaaaagctgtttccccacaatcattatctaaggttttgcgttatgtcgtttctaaacgtcttgctgcttttacaactcttgcctctattgctgctactacgggtattgaataccaggattcagaaactatttacactccaatccctggttctattgctgatcgcaatattggtatcaacacaagggatagtggttttgtccaagtcactaatttaaatcaagcgtgtgctgtagcttatcctgaattggctttccaatggtcacaattaaatcctgttggctatcagaattgtagatggaatggtacttcatatggcagtgttactatggatctatgccaagacacgattccgagcggttgtggctggactcgagacttatcacttgttttaaatcccaaccctatacaatcacaacccaaatctatacctgatactgttgctatagatttaatcatcccacaaaagccagaagaagcccctaaattagtcgaccctacactggttccatcgaatattttgcctacggaagtaacagaagcaattcatgaacttaataatagtttaagtcaagatgatatttatgttcctccatatgtaccaactgctccaactaatggtacggctacaggtggatatggcgatggtattttaaatttagattttccagctttttgctcttgggctgaacccatttgtaaactatcagattggtttatgaaagatgatattcctgaaaacgagcaatatcagattaatgagtttgattattcaaaactacctaataatccagctttttcattttcacaatcttgtccagcacctttatcaattcctcttgattttggaattgtttcatcatcgattgaaattagttatgaaccattttgtcagttctttgcaaaggcaagaccattcattattgctgctgcctatttgcacggtgcttttattatcagtggctttagaaaggaaacttag

SEQ ID NO: 61371 - DNA, 222 bp, Acinetobacter baumannii
atggaaactcaagttaaagaaaaaaacaaggctttacctgttgttttaggttctggacttatggtcgctgctggttccgcatttgcggagggtgatttagccgatggtgcaacaactgcaattagtggtggttctggaacattacaaaccgttggtattgccattattactgttgtagcaggtgtttgggtgatcaaacgtgtaattgctttgattcgttaa

SEQ ID NO: 61372 - DNA, 195 bp, Acinetobacter baumannii
atggctaaggtttataaaattcgagatgacgaagttgacagcatcaaagaagctttgatgaagttcgtcattgagaaaaaagtattaatgaaagaatcagacgtaattcatgctctgattaagtatcatctaaagaacctaaaggctgatgaggttatgaagtatcgagaagaagtcctcgacaaaattgattga

SEQ ID NO: 61373 - DNA, 237 bp, Acinetobacter baumannii
atgtctaataatgctaatttagcagcagttgcacatttaatttctagagaaaaatctattagtactggcacagatgcccatttagctgttgttgaagctttaggtgaggctggcggtattgcagcagttgcacatttaatttctagagaaaaatctattagtactggtacaaatgctcacttagctgttgtcaaagcattagggcgtgcaggaagaacgattcaaagaacagactaa

SEQ ID NO: 61374 - DNA, 2655 bp, Acinetobacter baumannii
atggcaactaagttaggaactttgacactagatttgctagtcaggacaggcaaatatactgaagcttttagaaatgccgaaaagactaccaaaagttctattgctaatatttccagctctattacaagtttaaaaggtgcatggggcgcagtaggtgcagcagcaagtattgcctctgggctaatggcttcaaaacttgttgctgtgcaacgtgaatttgacgttctaaatgctggcttaatcactgccactaagtcatctaaagatgcaaaaattgcattcgatgcactctcacaatttgcaaaagaaacaccatacgggttgtctcaagcagttgaggcctttaataaattagttaacttaggtcttacgccatccgagcaagcattaatgtcttatggcaataccgcgtcagcaatgggtaaagatttgatgcaacttattgaggctgtagcagatgcttccacatttgagtttgagcgccttaaagagtttggtatcaaatctaaacaagagggtgacaaggttaagttcacattccaaggtgtgacgactgaagttaaaaagaacgcgtctgatattgagcaatacctaattaaacttggggaaaatcaatttgctggcgcaatgtctgagcgaatgaacactttagatggtgatattgccggacttgaggattcttggaatagcttatggttatctgtatcacaatcaggagttggcgacctcattcgtgtaggcattcaaaatgctaccacttcaattgacgatttaaccgatgtggttaaatcaggagcaattgaaacagcacttgctggtatgggtaaagcattcaatatcttctctaatggtgtgcaagatgacactgatgacattggcattaactttagcgaattaggcaaacatctcattcaagtttggcagtctactgttaatgagctgaatgctattggcaatgctcttaatattggtaaatcttgggttcaaaaggccgcagtaggtgctgctgcgggatgggatatcataactgacccatttaataaacaaagttcaaatgcttctaaacaggcagcatatgaaagtagtttggcagcaattgatgctgagttggcgtcaaaaaaagatgcagttgctaaagcctttaaaaatgcagagaagcaagtagctgcttatacttcaagaactagagaggcaagagatgttttagctgattataaggttaaaacgcaagattctggtaaagaaacagaaaaggacgccaagaaaacccgtgaagcagccaaagcgcaggaggagttgaatagaaagcgtcgtgaagcagcccaactggcaaaagatatactctatgagtatggcactgagtttgcacgtattgaggcagatctcacaaacgaactaacacggtttagcaaagcatcactcccagcaagtgatgtgcctagactaatcgaagaagctaagcaaatcagtgctgcacgaaaacaagtctatcttcttgagtatcagcaagaccttgatgcatggaattggtcagaggagcagaaactagctaaaacctttgagatcgaaaaagcccgagtagacgcaaaagttggtatgtcaaaagaggaacgagctctccgcaaacagttattggatgagcagcgcgatgacgaaatgaagtcattaaggctcagtcaggaacaacaattgttccagattgaagaaagctacatggatgaagcgaaagccttggctagacgttatgagttagaacgacaagagattgagaaagttcgtgatgctaaaatacgcgctggcctacttaatgcctcagcgagagctgaagataatgagtatgaaagtcgaagaagggatgccttccaaaattaccaagcaatgagcgcatcgatgagtggagtccaagagtactacaatctagataaggagctcgaagatcgcagaaaaacgattgatgatgccttgaaatggaacaatatttcggaagaagaagcaagacaggcaaatttagcagcagagaaggactacctcctgaaaagggctaaattaaattcctattatggagagcaaataactggttctatggtggatatgctggaaactgctggtgataagcaatcaggaatatataaggcaatgtttgcagcgaacaaagcgtttgctattgcccaatcacttgttgctatccaacaaggtgttgcacaagcagcagcaaatcccttcccatacaacttagcagctatggcaagcgttgcggctgccacagcaagcattgttgcaaatattaaatctgtggctgatgttggttttgctacaggtggttacacaggaaacatggggcgtgctgatattgctggtgtagttcatgggcaagagtatgttctcaatgcggctgctacaaaacgaattggtgttgacacacttaatgcgctcaatagtggtgggagcctagggaatgttagtggggatggtccaaccatcaacgtctatacattaccggggcaaacagcaactgcaactcaaaatgatgatggctcgttagatatccgcattcagcaaattgcagagcaaaccgtggctactcaattggctaatcctaatagccgcatctcgaaaaccatgcaacaaaactacaatgctcaacggagacgataa

SEQ ID NO: 61375 - DNA, 426 bp, Acinetobacter baumannii
atgaaaacaatttgggctattttggcaggcctagccatatgcgtagctatctttgcaaacctaaaacctaagcatttagagggaagctctgctccagttatggctaaatcagaaagcaatttgataattgataaagagaaagccgagaaagtagctgtagatattgatgaagccagacaagtcgtagttgagcatttcaagaaaaacgaaaaaattgctaaagattcagtatggacctcaaaatcgatttttaaagttggtgttattgacaatggaaggagtagggatgggtatgcaaactatgtgtgccaagtcctaaatgactttggttttaaaaatgctgaaatatctgttcaaattatcgatattcagaagttagtaagtactaataagtggaaaaaactaggcgaagcacagtgtaaataa

SEQ ID NO: 61376 - DNA, 951 bp, Acinetobacter baumannii
atgacaagtttagcacaaaactttttaaacccaaacaataagccgctagttattggtgattttacaattcgtcaagacgaagatggacgttattgtttgcatgacttacataaagcaagcggagcattagaaaagcatcaaccagctttttttatgcgaaataaacaaactaaagacctaattgaagaaatagagaactctgtaaatttgcagagttcagaaaatgaccgatctgcaaatttgcagatcgctgtaaaagtgatcaaaggtggtgctggtgagcaaggtacttatgttgttaaagaacttgtctatgcgtatgcaatgtggattagtcctaaattccatttaatggtgatacgtgcctatgattcacttgtgatggaatgggttttaaatggaaaacaaacaatttcaccagagcaagcaggagttctttacaacattgttcatacacgagcgaatggtaataaaaacctaatcgttcaaatgtggagccgtttaaagagccactttaaatattcagcaagctaccgagaactacgagcgattcattttgaagatgctaagcattacctagaggtcatggatttaaatgctaagcctgaaaagcatgattcacctgatgttgtagcgcagttagatgaatatctaaaaaacctagatagccgctatccagctctaagcaatccaatagcttatgaaattggtcagaagatttcagattatcttcaataccaagacattaaagatgaacgcttgttttatacagtaagcattaatagtggcaaagtggctgtaatgccccaaagttcacatcattgttcactaaatatagtaaaacttgcagatgcttttgcaccattatgggaatttatgcagggttatgaagttagacatcgtgctaatcatttgagaaagcttccactaagaagacttcctaatcaataa

SEQ ID NO: 61377 - DNA, 267 bp, Acinetobacter baumannii
atgagtgagaatcaaaaggatccacaatacaaattgcgttggtctgaagatcttcggaaaaaaataactgatgcagcaaaagaaaataatcgttcaataaatgcagaaataacaactcggttagaagagagcttcaacactaaggaaacacatgaaactgaaatggctcttatgttgcaagtctttaaagatcaacaaaaacaaattgatcagcttcaagaaatggttaagcagttagttatcagaccaagacaaatagacgactaa

SEQ ID NO: 61378 - DNA, 165 bp, Acinetobacter baumannii
atggattcagattcttttaagaatgtctcagataagtcaatttcaaattctgtaagccaaatgacaccagaagaggtggaggaattgcggaaagattttaaagaagccatgaatcaggcgagattggttctagctagaacaaccatcaggcatagcccaaaataa

SEQ ID NO: 61379 - DNA, 198 bp, Acinetobacter baumannii
atgaaaactactgaagaatatgcatatcaattcaccatcgaactattcaagaactgtgaaactttcaaagaaaaagaagccgctatcgaagaagcttggaacttagctaaaaagttcactgaatttggtggaatcttccaacagcactttgaagtatggagtgaagtaggaaatctaccacacggcatcctgccttaa

SEQ ID NO: 61380 - DNA, 369 bp, Acinetobacter baumannii
atggaaaatatagatacagaattgtttgaaaggaatcttttagaaacttttgaagatgccgaatataaaagaatttgcgaactctttgattgtgaggatgaagaattttacaaaggtgttagattcacacttgcttatctaaaggccaaggggacaattagtcattcacggcaagaacatataagtgacattgttgaaagatttggtggcaaggataaagtaaaagaagccactaaaaccaaagctattgatgacgtttattgttgggaacttggtaagtggttcaaccatcgatattgggtagagaagatggagaaaaaccataatggtgttactctccgtgaattggcaatagctgcaaaagtataa

SEQ ID NO: 61381 - DNA, 237 bp, Acinetobacter baumannii; identical to SEQ ID NO: 46831

SEQ ID NO: 61382 - DNA, 354 bp, Acinetobacter baumannii; identical to SEQ ID NO: 46943

SEQ ID NO: 61383 - DNA, 468 bp, Acinetobacter baumannii
atgaaacctatacttattgcaatagttatattgctagtaatcttattaactattgcttttaaattatttttaaaggcaaggaatatcgcgaactctggaccaagagaatttacagatgctgttgagctaatgagtttcataaggtgtgtctatgaatgtaatattgaaagccaagtagttatgtatgggtttgtaaaagatgcatacgttagtgaagaggctattatttctgaagggggcccttatttagaagtgatagtagctttaattactagaaatggacatatggaagtaccaactatttgtggttctgctgaggaaactcttaaaaaaggagattttgttgctgtaatgccttttcataataagcgtcacgatctatggttttatactacagtagcaaaattaaaaccttactacctaggtaaaggtaaaggattccagatagaaaaaagttttactacttaa

SEQ ID NO: 61384 - DNA, 732 bp, Acinetobacter baumannii
atgaattttcttaaatcgaatattgaatatttgcttaataagcacaaaaccaatcctaatgaattggaacaaaaattcccgagaattaagcagtcaactgtttttagaattcagcaaggttttactaaggagccaaggaggtcaaccctagaacctattgcagagtgggctggtgtttcagttaatgatttaattgaagttgatttaagtaataaagataaaaatcaagaaaatgatattaatttagagctatatgaagatggagatcctgtaccagatggatatacagcaatcgactattatgatgaggtttttgttagtgctgggaatggatatttgaatattaatcaatcaagcccaaagaagttttttgtaccaacatatttactaagagagtgtaatgttcagccttctacagcaaaagtagtaaaagttcgaggtgacagcatgtatcctgtattacaagatgggcagcctatttctgtagacatgtctgcaacaaaaatttgggatggagaaatttatgcttttcagcatggtgacgacactaaagtaaagtacttatccaattggaatgaggaaggcgaaggaggttttaaagccacatctcgtaatgaagataaacatcgttatccagatgagtactactctcctgctcgtattgcttctgaagggattactataattggtcaatattggatgaaattagacaccaaaaaaataagaagataa

SEQ ID NO: 61385 - DNA, 198 bp, Acinetobacter baumannii
atgaatcttaaagagaagatcgtgttcttaacttctcgtaagtacacccagcaacaaattagtgagaaaaccgggattgaacaaagttcagtttccagaatccttcgtggattgcagcaaagtgtgcaatacgaaaaaggagtggctttagattttttggttcaaacggaatcgggtgatgtatgtccgaaaaattaa

SEQ ID NO: 61386 - DNA, 345 bp, Acinetobacter baumannii
atgaaaccagaacaatttattcgtgagtacggggtggagaacgtcaaaaccttaattgaggattatgagaaagatcaatttgcatttaagagttttgatcctgctgctgactgttgttttgatgctggcttatgtatggggcaagagaaagcttggtgggatatctgtatttacgacctcaagcgtcttgtggagtctttggatttggttgaatcatggggcggcattgatgatgtaaagctatatgacttgtctcattgcaaagataaacctgaatcggctggctacaagttgcttcaagcaattgctgattacgaatcaatatacggaggcggggatgagtaa

SEQ ID NO: 61387 - DNA, 261 bp, Acinetobacter baumannii
atgagtgagtttaaaaaaggcgacatcttggttaataaaacggctgtgaatacaggagctattgagctgatctatgagcataaatactactttcatggctttagcaaagactttggggtcataacaattgcaaagaagaaacttgataggtatcgcaaagcaactgaagcagaaaagcagataggccaccgcattgactgcgaagtattagacaaactagaaaaccacatttcgccgaattgcgaggtcaaaaatggataa

SEQ ID NO: 61388 - DNA, 228 bp, Acinetobacter baumannii
atgagtaataagaaaaaatccccctacactgattatcttaattgtgaaatattcgaaggcgatctaatacagcatccatcaggtgaaaaagggattgtggtctttgaaaagagatcaggtaacgattcagataattggcttgtcctatatgaagatggtattaaatcacgtttatgtcttcaagttagtgagaaaggtcaagctgctgtagtgaaggtgaacttatga

SEQ ID NO: 61389 - DNA, 186 bp, Acinetobacter baumannii
atgaacattgaagaaattaagaacactgcaccttctgggacaaagtactatagagagaaaaacggtcaaatcctttactacactaccgatatgattggctcaagacatattctatatagatatgaaaatgaaaaatgggaagaaacaactctaaatgattggagtgtgttatctagattagaatag

SEQ ID NO: 61390 - DNA, 906 bp, Acinetobacter baumannii
atgaaaacgattctttcaactcatgaaagattggcagagcgtttagtcaaaattattgtgaaattaaattcaggtgaaaaactgagtatccaagatttggcgcaggaatttaaaacgcatcctcgtactatacaacgtgattttgaacgcttggaaattacagatttacctattgtgcgcgatgaggaaacgaaaaaaatctatttaaaaccaatagctctaggtaattatggagtacatgatatagtccattttgctcatttgtctggtatccaaaaattatatcctaaattgaatgttccttttttacgcgggcttttggaccaaaagaatccacagaccttttcggcaaaaggttatacatttgaagatacaacgctttttacagaaaattttcaacaattagataacgctataaagcaaggcaaacaaattcattttttttataaaaatgtgattagatatgtgcatccatataaaatgattcaccaccatggtacttggtatttagcagctactgaacaaggaaaactaaaaacttatcgattaagcaatattcgagatctaattattttacatgaccatatttttgaacataattctgaaatattacagttattagatactgaagacagtatctggttcggttcagaaaagacagaagtaattctaactgttagtcctgatgtagctatatattttttacaacgaattttgtttcctgagcaaaaaataattaaaaaattagaagatggagcacttttaatttcgtgccggattaatcattttcaacagcttttacctttagttcgttattggattccacatattaaaattgtaaatccagaaccattacaggggaggttagaatatgaattaaaaaaatatttagatatgaataattaa

SEQ ID NO: 61391 - DNA, 1080 bp, Acinetobacter baumannii
atgccattaccttttcttctaattggtgcagcagcagcagctacagctgtgggagccaaaaaagcttatgatggacataagaaaaaaaatgatgcggacgaaattcttgtaaaagcaaaagatagatatacaaaatatagaaacagccttgataaggcgaatgaagatgctagtttttctttagaaaaactaggagatttagaattaagaattggcgccgattttgcgaaatttgataaattgattgaagagattctacaaaataataattttaagaaattagggaatattacattggatattcctcagcataagttgaaccaaatcaaagaagttgcaattagtgcaacagattatttgaagaccgttgttgctggaggagtttctggagctgcaactggatttgcagtttatggtggagtattagcattaggtgcagcttccacaggtactcctatagcagcgttatctggcgtagctgcatataatgctactatggccgctattggaggaggttcattagctgctggcggttggggaatggctggtggtgcgatggtattaggaggagctgtagttgctcctgtattagccgtcgctgggattgcttatggtatgcatggttcaaaagcattaaaaaatgctgaagatgtggaaaaacaagttgaacgtgcagttagtacaatggctaaagctaaacgtcaacttgtaaatgtaaattattactcagaacaaattaaagcagaattggaaaaaatttatgaggtatttggtttatatgtatataaattacaagaagttaatgagattgtaaaaaaaggtgatgaggagaaaattatagctattgtagaagaagctaatttaactattcaaaatggtataagtttagcagcgatcatggcaaaactaatttcaaagcctttatttaaactaaaagttgatatagatggaaagatccttatagataaagatggtaatccagaaattttaactgataaggatggcatgcaggtattagataaagaaggtttgacagaaattcttgaggaaaccaaacaaaactttaaggctgctaactaa

SEQ ID NO: 61392 - DNA, 1629 bp, Acinetobacter baumannii
atgtcagtaaaagtttttgattggacacaagagattaatcaagtaataactaggagtttggttacaacgttcggacttgattttttattactagaagataagaaaggtggtgatgttgatacagtatataatgtacgtcaaggaatttgggcaacggttgaagaaaaacaaaagtatataaatagagaagaatataattcagatgcctatcatcaagatgtaaactatattaaaaaggggcgtcaagacaaaaaattacagcaggaggggagcttaaaagatcattatcgtaaaaataaaaatttaggatctaaagacaagcgggaccttgatcatgtgatttcagcgtatgaaattcataatgatgctgggcgtattttagctgaactggatggagtggttttagctaataaaaattctaatttattttcaactgtaagtagtattaacagaactaagaaacaatattctgtagataaatttttgcaaaatttacctcaaacaattaaaaaccgtgaagttgaattaagcaagttagaacataaatgtaagacgatgctacaagatactcctcaacagaagcatctatatcatcaattacaggataaaattagaaagaaacagcaagccttagatgaattaaaacagactgatcagcatggtatgagaaaagttgatcaggaagcaagggcaaataatgaaaagtatattaatacgtattatcaaagtaccaaattttttaaaaacagttttgaggcagcaaaagttaaaggtcttaatatgggactaagagagtcagtaggacttattcttgctgaaatctggttcgaattcaaagagaatattcctactttattaaaaaagtataagaatattgagtttaaaatttctattttttttaaagacctacaggatattttaatcaatattgttgaaagagtgaaagtacgttttaaggatattgttgagcattttatggaaagtgcgttatctggtttttttgctagcttgacaacaacaattataaatattttcctgacaactgctaagttgtggggcaaaattattcgtgaaagttggcttaatattgtcaatgttactaagctagttttctttaatcctgaaaatttaaccacagggcagcttactaaagcaacgtttaaaattctttcagcaagtgttggtcttcttcttggtatggttgtaaatgaaagtttggtttgtttaaaaacattaccactggggaatgaaatttctacatttataagtgcattatcaagtggtatcgtgatattgggcttaaattactttattgaacaaaaccaaactatgcaaaaattttgggtatatttagatcaaattaaaaataaatatgaaaaggttttagaccactttaaagaaattaatattgaacttgatcgttatgtgctcgagttaactcaacttgaatttggaattgatataaatcaactctcaatttttgcaagaaatttaagttctgctacagatgagatggaaagaaatatcattctaaaacaagagattgaaaaacagtctattaaattacctcttgaaatgggaaatgttgaaagtacacaaaactggttgttaggtttggcaagaaaatga

SEQ ID NO: 61393 - DNA, 270 bp, Acinetobacter baumannii
atgagcaatttcccttgtacacagcgtggagtatgttgtagacatgtgaacttttcggaattgacagcttatctggatcgtggtgatggtgtttgccgtcatcatgatttaaatacacatttatgtactatctatgagcatcgtcctgccgtgtgtcgggtagatatcttttatgagcaatatttcaaaaaacagtatacgtgggatgagtttatagaacttaacttgattgcctgtaagcaattaagtgaattagataaaaatgagtag

SEQ ID NO: 61394 - DNA, 207 bp, Acinetobacter baumannii
atggagatgtttaatgggcaggggcgtggagcaaacctctcttcagctaaagatactgcctatggattactctgttcgatgacagaatttattgaccacgaatgtcgtgctatgagtattggtcaccgacttgattctgcatggtttggtgcaggtgcaatgatgaagcagcgtggactggaacaggcattgaaattgatagtttaa

SEQ ID NO: 61395 - DNA, 921 bp, Acinetobacter baumannii
atgcaattaccatcttctccaaaaaaaaatgactttgatgttgagaccttctccaagtatttatcactagcctttaaactcagcacattcttaggcggcctatgctttgtggtgtattgtcaacgtttgaattacttcccttccggggtgactgttggtgacagtctattatttatcatctttgctgccagttttggcttagtctatggctttatcaacatgggattactctcggttggtgtctgtttaatgttcttactcaagcttttatttaaaccagttcatggatttctaaaaaaaaatataccatggaagaatcgtgccggaacttatgaaataatcctctttgtaagaccagaaccgattcactatattttgtccataatcggtatggtattcatctacctcatgtataatctagatcattcagcatttacagtacttaatctactagcaactatactttttcaagctatattctggggtgcctacaatgacaaaagattaagagtgtgtcatatcttattaccttcaaccaatgaactttctatcgcacaacaaggagaacataataaaaaaatgcgatggctatttttaggaatgattgtaatagcgccattgttatttagcggggttgctggtcgaattttagatggaggaatgaggttggcgcatctcagttctggaccatcctatgtactgattaagccaccatatgataaagccattcctctatcttatcttgatcaaaaacccatctttactgaaacaggatataagtcttttaaaaaaattgatgtgatgcttactggtattggtcaaaaaactgttattcagtttattcctaaacaaggagccaaccctcaaccacttgcggttccaaatgatcacatcaaggtatttccagactttactcaataa

SEQ ID NO: 61396 - DNA, 876 bp, Acinetobacter baumannii
atgatttcagaagacattttggctagatggacagccccttctagtgatactgaacaagaaaagcaagaaagagcggaacgaatgattcgccaagcgattgatgaccatgaaccttttagagagtgttcattaaatgtctatgcaaagggctcttatgcaaataatacaaatgtgcggtcagatagtgatgttgatatagcagtagaatgtacagatgtgaggtattggaaggaatctaaaaaaggcaattatgaaacgccaggaactccttataatggaatatggacacctgagaaactaaggacagagctaattctggcaatgaaaaaaaagtttccaggtcaggtggatacatcaggtgtgactgctatacaaataaatgctaatacagcacgtgtaaatgctgatgtagttccatgtttcagctaccgctattacatggaaaatggatatagagatggtacgaaaattttcaaggttgatggtaaaagcatagtgaactatccattgcaacaaattagaaatggcaaagataaaaatattaggacaaactataattataaaaaatgcgtaagaattttaaaacgtattgaaaatgcaatggcaattgagggtaaatataaagagcttccttcatatttcattgagtgtttagcctataattgtcctgattatgtattcggaagattgacatggacagaatgccttaaggatattcttattcatatttacaattcattaaatggctctgaacctagtgaaaatcgttggcttgaggtgaataaatgtttttatttatttcattctaaacaaaagtggaatcgtcaggatgggcgtgaatttgctcaagctgcttggagttattgtggattttaa

SEQ ID NO: 61397 - DNA, 1743 bp, Acinetobacter baumannii
atgtctcgcggtatttatctttttatgtgggcatatcaggaaagttttagaagattatctcaattacttattcaagatgtattaaaagaattaggagcagaaggaaatgcagaagtttttctggttggtgcccgagctcctgaaagtacaaataaaaatgaggtatgtattgaaccagaagatggtaaatggtccctttcaatttttgaaggattattagattcaatcgaatcaatttatgataatcatcgcttacaaagcatggcttttggtgatcaagcaagtatgcgagataagccaaaatggatgcgacaggattcaactcgtagagccattgagaatgcacttaaaagctttgatgatacgaatgaagtcatttctttttgtgggcaaactcaacctttaggtgaatattacattacaccgatcatccaaattcctaataatacttttataaaatttcctatattaaagaataagtatggtagagagcatcaacagagttctggttatcgtagcctaatacatgctgctatatctacggttctttcagagatatctgaaaaacttcaaactccagaaccaggtcgtttttcctataaagcaatgagaagttctgaagaaattatacgaattgcagcgagggcttttttacggacaccaggattatcgattgaacaacaatattatcaggatggtctttttgatgaattaaacctcatttcatctctcatgtatgagggagcgcgaggaattggcagtttaattcttattaatcctgataatgaagctattgaatacttaattcggtttattcaacctgtaccctttcgtgaaccgcggtgggttcgtaagattctacagatggctgtatctggatcagctattattgcagatagtcagcatatttacggactagggcagcttaaaaagacacatgattcacaagaacaagatgcttttattgttaactttcttgatcactactattgggagttatgttgcggagagttagtattgcttcgaagtcaatatggtgtacccaagctgccacaagaacattttgataagccgtctttcatagcaaactatattcgcttatttcccaaatcttcagttgaagatagtttaaacctgtggaacttattacaagttcagataaaacaagcatatggcagtatgattgtagtcattgaagatgctgcaattgaagctgaaaggcttagtaagcaaggtacaactattataccaacacgtttatctgaagcattgcttcgaagtattagtcgtattgatggtacaattctgcttgatccttatggcatttgtcatgcatttggtattattttggatggcgaagcaaatgataaatgtactccatctagaggggctcgatataactctggtgttcgttatgtatgctctgagggacggcgtggactagctatagttgtttcagatgataaaacagttgatatcatccctgaaattcgccctttagtaagtcgatctttacttgaacgatatatcactgtttttaatacgtctacaattgataattatcatgattctagggggtggcttgacaagcaccggttctacattaatgctgaacaatgtaagcaacttaattcaacaattgtccgtttagataattgtccaaaagaagttggccttatttatattggaacagataaatttgaggtacatcctgatttcgatgaaagttatcttagtgattaa

SEQ ID NO: 61398 - DNA, 600 bp, Acinetobacter baumannii
atgcatgattatgcggtctttggtcatgatagagcatctattggcaggtggcttggttttggtgcgattgtagtagctggcggaattgctcaaattttagctaaggctagtaatttaactggaatcgatgcttttacaaaagctactattactacgggattagtgtatttaggacttcattggttgtttaataaatggatgtggaaagttcctgtttttaaaatcccggatatcagtgggtcgtggaaagtaacaggtgaaactttagaccatgaaggtaatattatatatacttggaatggggtacttggaattgagcaaacatggaaatgtattctaatacatttaaaaactcagactagccaaagcgaaagctatacggcaacactttcccgtagatatggaccaacaggtggatggttacttagttatagttacaagagtgagcctgagttagaacagttacatttattgaattctcataaagggtattgtgaaattgagtttgacaaagaattaaagtatggaaaggcttcttattttaatagtgcaggtagaagaacttttggtgtaataaaattaaaaaagataagtaattga

SEQ ID NO: 61399 - DNA, 438 bp, Acinetobacter baumannii
atgaatgctaaagtaaatatttctaatcgtgccggagcaagtttccctgtgcgtcgtatggactttgagtttgctcaagttccacgctattgggcaaattacgatgcaggattaactcattttatgacagcattatcggctctttttccggaaggagagcagttctttgtaaacagtactcgtgctgtgcgaaacgatcctaaactggctgatccagcacttcaaaaagaaataagtgcttttattggccaagaagctatgcattctaaagagcatcttgcatttaatgcttctgcgcaggcgtatggatatgatgttcgtaaaatggaaaaacagacaggtaaagttattaaagtaggtacttcggttgtaaccaagctaatgaaaccttttggttatacaaaagaaatgattgatttaacaggtacctgtgcttaa

SEQ ID NO: 61400 - DNA, 1122 bp, Acinetobacter baumannii
atggctctaccgattattactgctgaccaaactttattggttcaagcaattattgtgtacctatacgcggatccgggtttaggtaaatcatcgatgggctttactgcggaaaaagcaatttcttttgactttgaccgtggtgctcaccgtactggtgaattacgtcgaggtgcggttgtacaggttcaacaatggagtgatgttgcaaaccttactccgcaggacttagcaccatataaaaccgtagtcattgataccgtgggtgcaatgcttgaatgcattaaaacccacctgttacttacggcaaataaccgtcaaaaagatggttctttaaagttaaaggctcaaggtttagcgaaccaaacgttcaagcaatacatcaatactttgattagtttaggtaaagatgttgttttcattgcacacgcatcagaagatcaaaacggtgatcaaattatttaccgaccagatctaggtggtaaaaaccgtaacgagctttaccgtatcgcagatgtcatgggttatctaacaactgttactactggtgaaggtaaaaatgcccgcgttattaatttcaaaccttcgcctacacatcatgcgaaaaactcaggtgctttaggcggtgaaaccggtgaagtatgggtacctgatcttaaagcacaccctactttcttggctgacctgattactcaagctaaagatcacattaacaccttaacgcctgcacaacttgcagcagctaaagcccaagaagagctagaaaactggaaacaaagctgtgaggaagcagagcatgcaggtgaccttaatcaattaactgagtcgcttgataaagaacatatgtattaccagaacatgcgccaagcaatgttaatgagggctaaagcattgaattgcacgtttgataagcaacgtggcacttggattagtccacctgaatttaacggtatctcagatcaacaaagagatgaacttcaaaacttcatagctgaacgcggcctagacgtgaaaacagtttgtgaacacttcggcatagatgcccttatccaaattgaagcagcaaaactgccagcagttaaacaagacattgaaacattagctaaaacggggatgacagcatga

SEQ ID NO: 61401 - DNA, 237 bp, Acinetobacter baumannii
atgggaacaaatatttatatgcttgcccaacttgcaagtcaaaattgtggtattgccttgctacctgacacagcagctgaggattttgtaaaatcaggtcaacttgtacaaatcttgccagattggaaagcagcccacggtatattccatgctgtttatccgtcacgaagaggtttactgccagctgtacgtgtatttattgattatttggtagaacatctttcagaacatccataa

SEQ ID NO: 61402 - DNA, 522 bp, Acinetobacter baumannii; identical to SEQ ID NO: 46790

SEQ ID NO: 61403 - DNA, 525 bp, Acinetobacter baumannii
gtgggcaattatcgtcattcacgtcgtcaattaatgcaattgcaaaatttaagtgagtggcgtgaagaggtagttagagcaactaaccagccacgtagttttatccttagaaactcgacgatgattgatttagtcgaaaaaaatccacgcaatagtttccaattatctcaagtaaaagatatccgtccgaatgttgtccgtgaatatggaaagattattcttgatcttttaaaagacttacctgttgaaggacactggccagctaaaattgctaaaccttttaaaattacatccaaagaaaccctaaataaaatggatgcattgattgctaaagcgatagaacaaacctctataccaaaagaagttttacttcgtaagaaatggttaaatgcgattcatcagcatgtgcttactaaaggtgatgaacaggatctcccagattatttattgggttggcgctatgagcttttaactaagccgcttattcagttatttaaagaagagaaagccagtcttttattttag

SEQ ID NO: 61404 - DNA, 744 bp, Acinetobacter baumannii
gtgattgaaacagctcgtcatcaccgtgaatttattcaagacccagttttaaaacagcgtgttacttcattgattggacaagaggcgattcactctaaactgcacaatgaatataacgatgcacttaaagatgttgaataccctgtcgatttataccgtttcttgggcgaaaacttctttaaatatgtgtttttgaaattcccgcaaccgcttaaattatcgatgatggctggtattgagcattttacagcggtacttgccgaatacatgatgaaacacgaaaagaatttctactattcagatgatgcaaaaagccgtgctttatggatgtggcatatgcttgaagaatctgagcataaagatattgcctatgatgtatatcaattactcaatggtagctacccactacgagcttctggcttcttcttagcattcttcactattttaggtctaattcctgcgactaccttgtttattccggttttaagaaaaccgcaggaaatgttgactagaaaattctggaaagacgcgcgccgtggtgtaggacttatttttggtccaaaagatggtgtatttggtagcaccattggccagattttcgattatttacgtcctgacttccacccaaatgaccatgacacgaccgaatatctggagtactacaaagacaaattactcaaagaaggcggcgcgattgcaccttactttgtgaaggaatttaccccacctgtacgcttgtcttaa

SEQ ID NO: 61405 - DNA, 219 bp, Acinetobacter baumannii
gtgagccaaatagatttttcaaaatttaaagattttatggaagttgataatattgataccgttaaatcaaaagtggacgctgggtggcaactcttaggtgtttcttctggaacctatgatatcgataatgaaaagcgagcatatttcttatattcactagggcacactgaaaagcaacctttatcgaatgtaaagtttagatttggatcggagtcatag

SEQ ID NO: 61406 - DNA, 1200 bp, Acinetobacter baumannii
atggctgaaagtatccatacatttttaaatgagcgtaaagaactttggttaaaagatcgaataaaaaaggccgaaaatgaaagtgccatagcagaattacagcagcaagcaaattataaatttagtttgaatgagtggcttcctgacgcagcaaagcgggttactcaactttctatggtgagtcatccgagtaaatttagtcatccaagtgcgaaaacttcaagtgttattgctaaggtagagtattgtaatgatggttatttaagaagcggtaatgtggattattctttagatgtatttggtaacgccgctgcaatggatgtctttaagtttctgtccttagctctaactgaaaacttgacagtattggatggtttcgaaaagcaagatcaagaacttaaaaaattaattgcccatgctgaattagactttgataatttaagttcagaatttttaaaaataaaagcaacagatgattctattaaaactgatcatctagtgaagcaggtctatttcccagttggtgaagctcaataccatttgctgtctattttgacgccatctggtttaattactcggctaaaacaatcggtagatgttatgcgtttttctgaagagactaaacaggctaaagagtcacgtaagaaaaatgagcatcatgaagttggatattctgatatttttgatttaactgtaacaggttatggtggaactcaaccacaaaatgtcagtgttctaaatagccaaaatgcagggcgagcttatttattaccaagttgccctcctgtcttagaaaaaagaacaattcggcttccaaaaactgatttctttgctcaatgtttatatcgaaaaaattatcaggatagttttattcaattacataagtttatgcagtttgtgattgatcaaatattactacaagccttaaaaactagagaatatgcagttgagggatggtcaaatcaggattattacgccagcctacctaaaatacagcgtatttggttggataaagttcatcagaaagaacgagaagaaaattctgactggagagacgaattaagtagagaggtagcacgctggatattacgaagctatgaaaaagtgattagcgatgcttacacgttaggaacaggcgagttactggatgtcaaacaacgggtagagaactcattacaaaaagcaaaggagtttttttaa

SEQ ID NO: 61407 - DNA, 462 bp, Acinetobacter baumannii; identical to SEQ ID NO: 57076

SEQ ID NO: 61408 - DNA, 1026 bp, Acinetobacter baumannii; identical to SEQ ID NO: 57075

SEQ ID NO: 61409 - DNA, 774 bp, Acinetobacter baumannii
  misc_feature (753)..(762): n is a, c, g, or t
atgtctgaacttattatgaatgaaaaaactgacttagagcctcaggttccaagtgtattaccactattagccttacgtgatgtggtggtttatccacacatgcagattgcgctatttgtgggtcgtgaaaaatcgatcaatgcagttgatgtggctcgtaacagtgacaatttagtatttgtagttgcgcaaaaagattcgcttacagaagaaattgatcacgacaatttataccagtacggtacagtcgctaagattgtacaagtagttaatcatgaaaatgatgaaaactgcattaaagtacttattgaaggcttacatcgttctaagttgaaaaaaattatcgatgaagatagttatttgactgccgaacatgaattaagtccaatgacgattaatgtagataaggcaacgcaagaaactcgtttacaagagttacgtaacttatttgctcaatatgcagaagcaaaattacgtaatgcacgtgaactggttgctgctgccaacaaaatcgaagatttattgcaattgatgttcttcgtagcaactcgtgtgcctctaaatattgaaattaagcagaaatttttagagtacgatgagtttgaagctcatttgcaagagttgatgaactacttgatgaatcaatctgctgaacagcaaattgagcaaactttacatgacagcgtgaaacgccaaatggaaaagaaccaacgtgaatactttctaaatgaaaaaatgaaagtcattcaacgnnnnnnnnnncattcaacgtga

SEQ ID NO: 61410 - DNA, 270 bp, Acinetobacter baumannii
atgcgacaagcaattaagattgaaccaggtttaatggaaaaacttgtggctgttgttgaacgcctggctcaatctaaagaagagcgacgcgttggtcgtgaagaatttgcacacatgctcaatattgaacctgaaacgttagacgcaagagttcgtgaaggcagataccaaaggccttacaaggatggacgaaaaagtttttggttattgtcgtatgtgcaatctgtcgttacagacacaaaagaatctggtaaagtagccaccaactga

SEQ ID NO: 61411 - DNA, 231 bp, Acinetobacter baumannii
gtgaatgtgatcctcactgaaaccgacctagatatcgcactacaggctggtgatagctatcacgagattcttgaccatgttacctatttgcttttcgaaaaggctttagttaaggcaagaggaagtaaatcaaaggctgcaaaaattttgaaaataaatcgcggaacattaaatgtgattttaaagagagttgaagccaaaaaggaggcacgcaatgcgacaagcaattaa

SEQ ID NO: 61412 - DNA, 600 bp, Acinetobacter baumannii
atggctaaaggtcaagctattaaatatacgcttgagcagttggactttgtaaagtctaactgcacccttgagcgtaaagaattaacccggctttttaacgaaaagtttgaaacgcaactaaccgtgcaatgtcttagtagtttgtgtaagcgcaacaaatggagtactggccgaactggtcgttttgaaaaaggaagcgcgcctccgaataagggcacaaaagggttaacaggggcaaacaagacaagttttaagaaaggtcaaagcccctggaataaaaaaccaattggttatgagcgaatagacaataaagatggctatgttcatatcaaaattgctgagccaaatgtttttgctctgaaacaccgacacgtttgggagaaacattttgggcctgttcctgataaacatgtaattgcctttaagaaccgggataaaacagattgtcgaattgaaaaccttatcttaatgcacaaatcagaaatggttcgttattcacaaagctttcacaagttagctaatcctgaaaccaatgaaacttgtttaattatggccaaggttaaagccaaggctgctaaattgaaaaaaggagagcaataa

SEQ ID NO: 61413 - DNA, 261 bp, Acinetobacter baumannii
atgtcaaatttatccgaattaaataaacacctttttgctcaactagatcgattaagcaataaagagcttaagggtgatgctcttaaagaagaatgcgctcgtgctggcgcagtaaatgaaatctgcaaatctgtaattgaaaatgccaatttacaactacaagcaacaaaacttgttgctgaatacagagggatgaaggacggagctgacaatctccctgaagcttttaaaacaactcaaaggacgattagtcatggctaa

SEQ ID NO: 61414 - DNA, 291 bp, Acinetobacter baumannii
atgctgtcaaatggctcagtcaaagcacgtgaatctattcgtaatgctcataacgcgaagcaggatgttttgttaactgcagtgttgctcaagcaaatttgcaaagctttgggcatcaaagatatgcaatcgctgttcttgttttcagagcaagcacgcatcccaaaaaaaattactttcggcaagcataaaggtatggacattaaagacttacctgctgattacgtcacctggttattaaagcaagatgacttagatccatacctacgtaaggcattaataaaaggataa

SEQ ID NO: 61415 - DNA, 234 bp, Acinetobacter baumannii
atgtcgtctccaaaagtagcttttgacaaagcagtaaaaatcgcagggggcactccaaccgccttggctagaggtattgggttaaccccttgggccgtacataaatgggataaagaaaatatccctcctaaacgttgcgaacaaatcgaagaatttactaacggtgaagttaaagcagaagaacttcgaccagatatcaactgggaatacagacgtcgcagcaaaaaacaatga

SEQ ID NO: 61416 - DNA, 306 bp, Acinetobacter baumannii
atgcaaaacataaatatgcatttaaaaactagcaaaaaattattagctccaatgtcgacaagagtgccaattgaagtgcaagaacttgtagatgaattagcaggtggcgctagagctaagtggataagagaagccattgaattaaagcttgaagttgatttaggccaatcatcaattgatgagctaaaaaaatcaaagaatacaacgaattcaagtgaatacctgaatgtattcaaaagtattttttctttctttcagacaaataaaaagcccgatgtgcgagatcgagctttaggtgttcattaa

SEQ ID NO: 61417 - DNA, 630 bp, Acinetobacter baumannii
atgagagaaagaccaattatctttaatacagcaatggttaaggccatattagaaggtcgtaaaactcagactcgtcgtttggtaaaagaaaaactgatttctgaacaggctgaattcgaaagtggaaacagacctaatgttatccatagtgaaccaagcctgaaatattacatagataacagttgtccatttggacaagttggcgatcatctctgggtgcgcgagacattttgtatcgggtcaattgaagaacaagatcattaccaaggttggcccaagccattgtatgtctatcaagatggggaccctaaacaatacccaattcataaagaatggtgtttgagcgaaggtatttcatttgatgatgttcagtggaaaccgtcaatacatatgcctcgaagtgcatgtcgcattgtactagaaataacaaatattagggttgaaaggttattaagtatttcagaatccgattgtatgaaagaagggattggttcctcacttctccgtgactgtaaaaagcccaaatttatgcagttatgggaggaaatatacggggagggaacttgtctagataacccttgggtttgggtaattgagtttaaagttatccagggcggtaagaatgagtaa

SEQ ID NO: 61418 - DNA, 357 bp, Acinetobacter baumannii
atgagtaagacttttcaacaatggtttgaagattatgaaaataatgctgaatacgcggctcacaaaattgccaaagatgcttatgaagctgggcagcaatcacgccaggaggaaatagaccgccttaaagggcagcttgctaagctgggttttacagatcttgggggccaattgatgaaaccaccgctagggattgcgccaaaatttgatttattggatgagctaagaagttcaattggaaatctagttcaaaagtataaacacgatgctcatgcttcaagcctttttggtgatcaggataaagcgcgagtttataacggcattgccaatcaattagaccagttacttaagggttaa

SEQ ID NO: 61419 - DNA, 459 bp, Acinetobacter baumannii
atgagcaaagttttaattggaattgatactggagtaaataccggctttgcagtggcatttgaccagggtaatggtggccaactacacgatgttgaatctttaacaattactcaggcgatgagcaaagttttagagctggtagaaggccatggcaaagaaaatctaatgctgtttattgaggatgcccgtttgcgtacatggtttggtaatgcagatgcgcgacaagctcgcagcggtgccggagttcgtgaggggatcggatccgtgaagagggatgctcagatttgggaggattggtgcaaagaacaaggcttgaaatacaagatgattcaccctgcagctaacaaaaccaaaactgatgctaagtatttttcaaagctaacagggtgggcaaagagaactaatgaacatgcacgggatgcagcaatgcttgtattcgggcgatatgcaaaattttga

SEQ ID NO: 61420 - DNA, 375 bp, Acinetobacter baumannii
atgaacatccaagacattcgactagagctagttaagcaagcaatggatataggtgtgcatcctgaagaaattccgggggtggtagatccattagctgagtttgtagaaagtggtttaaaaagacaaaaaccgtgtgatttcaaggattatgaacagagatatatcaatgaattgctaaaaaaacttcatcaacattttggagagaaaaatataaccgccgttgaaattgcaaggaatggttctttaaggatttatgtttcatgccaacagatcataattggcattcaaagtttttttgcagactcaaaaaattacccggatttctttcgaggacatgagttagttttctttcatgtgccacctaaaaaaccatag

SEQ ID NO: 61421 - DNA, 357 bp, Acinetobacter baumannii
atgaagaaaattatcttattggttacaacatctttattaagcttcggttcgttggctaactgtgaagtttactttaatgaccctacggatgtcgcaaaatgttatgaagatgaatctttcgctaaagtaacaaccaatctcaagaagttaactgagctttccaaagaacaaataagttataaccccaatgttataaaagaactcagtaaatcccaaaaggattggttgacttaccgtaacagttactgtgacacatacagtaactatcacggtgaaaaaaacaatcattcaaattgcatagttaggttaaataaagagcgtgctcaacaattacaagctgatattgatagcaattaa

SEQ ID NO: 61422 - DNA, 450 bp, Acinetobacter baumannii
gtgagcacttcatccagacctatttgtccttactgtaatagtaaacagacacgttatgcctcaagcaaatcaaatatacttaaatcacaatatacttgtaaaaattgtggccaaagtttttcagtagataatcaactatatgaatcaaaaggtggatgcttcaaattcttttttaaattgatatttggggtaataattgtcgctattggtttcgccatctacttagcaaaatttgatgacactcctaataactcacaatcggctaaacaacttactgaaagcaaaaagtcagatgccgacgacaaggaagagtttactgctgaagctgaaaaagcagctcatgattatatccctactgaagaagactataagaaacatgaaagtattgctgacagtaaagatcaaagcgatactttaaatatctcaacgactattcggaacaaagactaa

SEQ ID NO: 61423 - DNA, 2604 bp, Acinetobacter baumannii
atggcaacaaactggaacgcgattttagcaaatattaataatgcttccgatatcttagcaatcctccgaaaagttctaggcttgctcgatggtaaagttgatctaacaaagatcgatgaaattattaatgatattactaacatgcaagccgatgtcgatacagcattaacaaatgttaattcggcattatctgaatttgatacagaagcccaagaagccattcagcaagttattgctgcgggtctaatggaagggtttgcaactgaagcagagttattagctaccagaccaactgaacctaagaaatacgcaaaagctgaagatacggatattatttggttttggaataaaccggaaggctcacctgatggtaattattggaccagtacagggcttagtgagtttaagcgtgctgaaaattatattgatcagtatagttcattaactaaaaattctacggtttattatccatttatcacttctaagcgcaataatattattgagagtattgttacaactatacaggaagcatatttaaagccgtatattcttgacgttgtagtaaatgatgcagaccctactaagtattatcgcattcagcaaattagtaaccctgatcatgctacagcagctaacagatggattttcgaagttttagctagaactagttttgatactgctgaaacgagtgagagaaccttttctgtagttttccctattgtcaaaaacaaagggattcaaacttttactgtgcaagatggtgatatctctatatctgtgactttagatacaaataaatgtccaggatttgatttttattcagtcacatcaagtgatagtggatatacatattacatctcaccaagtcgatatctttattcaacgcttacgaaatctattgcttatgcttatgtcgatcaatcaagctcattaaccaagaattcaactgtttattaccctttcagctcaactaaaaggaacaaggttaatgaaagcacagtatcaacaacacatgttgcatatttaaggccatatattctaagcgttagagttatgaatgcgagtaaagatcaatactatcgtgttcaacagatcagtaacccagatcatgctacagcagcgaatagatggatctttgaagtcttagccaaaaatgggtttgatgctactgaaactaagattagggaaataactgctgttctgccgatcgttaagaataccggtattaaaacgtatcttgtggaagatggtgacttaaaattctcaatcacccttgatacaaataaatgcccagcatttgatttttattcagtcgcatctacagatagctcatacacatatatcatcgatccaagcttgtattcttatgctgcggtgagcaccgctgaattagcagcacttggtacaagaattgatggatttattaagcccttacaactacagaatttacttaaagatctgcgaaaccccattcagtcagttcaaataaaagcgattggtgactctattacgtatggtttgggtgctactgacaatggaagtggtggtggagtgccaggtgtacatggtcctgcaactacaagaacttgggtaaatattttacgtgattatttaggaacgacattttgcactagtgaacgctttgatgacactattcttgaaactggcgaagctttttatacaagtgaaggtacaagtgttttaagtgccgaactatcaaatttcacattcaaaaatagtgctacaggaaaagtatttacaactcctgaaatgcaagcattgattggcattagtggcagctccccgacgggaacttatattgatttgagaagcccagcattaacttcggtcattgcacctactgacatggagtttttgtttaatggaaatgaattcacaattaatcatgcgcggctaggcaatggtagtgcaacagagtcatttattgatgtgtttgttaacgatgtcctacattctagctttaatgtttacacatcatcgacacctgactttcttggaacttttacggtaaacggactaactgacggtcagaagaagatacggatcgccaatcggttaactaataccactatctatgctcgcttagtctcaattactgctcctcgtaaaatttctgtgattaatgagggtgtttctggatggaacacaggaagctggctttctggtgacaacatatcaaacaaaatcagtgctaaagataactatgtgattatgatgcttggaacaaatgaccgacatacaacacagaaaattggcactttcaaaaataattatcttcagctgcttgatcgtattggaactaagaacagtaaggctcaaattattgtcatggtgccgccagcagtaacgcaaagtgaagaccctagtactggacgtttatttagaattgctgacttgaattatgcaattagccaaattgcgcaactaagatctatctctttgattaatttgtttgaagtgacttctaagttaaaagctcaaggaattgagtttcttttgcctccaccagatcaattacatcccaatgactacggctatggagtgattgctgaatacattattaatcaaatcttgagtgcataa

SEQ ID NO: 61424 - DNA, 390 bp, Acinetobacter baumannii
atggaaccagtttccactagcggtttaacagcaattttaaaattttatggtgcagcaatcatggtgacattagcggtcggtttagttgcggcagttgttttgatgatacgtatgcctcgttcaccacaagagtgggccgtaggtttgatttgtactgttgtatcaagtttagctggtggctcattcattatcgtgaagtgggggcttcatgaatgggttactgatgtatgggggatgattgcacttggtggattcttctttgtttgtggtttacctggttgggctttagtccgctggatctttaattttatagataaacaggaaggtaagacgattattgaagtaattaaagaagttaagaaagccaaaaacgatattacgaacagttaa

SEQ ID NO: 61425 - DNA, 825 bp, Acinetobacter baumannii
atgaatccagaactatctatcgccgaagggttgttatattccaccataaaaataacagccacctataaggggtgcactctcagtactggtacaggattcttttcaatatttggtcgagaaaaggggcatttttttcctgtaattattacaaacaaacatgtagtcgagggagctgatgaaataaagtttgtttgtcatgttgctgacagtgaatataaaagaccaactggtcaacttatcgatgtttcaattgaacttaaaaaaacgctagtcccgcacccagaggatgttgatttgtgtgcaatatccttttcttcaatcctaaaggaagctactgataaagatattaatattttctatgccccacttaatagcaacctcatacctgatgatgaatcttgggaagattttgatgccattgaacaagtaacaatgataggttgcccaaatggactttttgatagcgtcaataatttgccattggtcagacagggaattactgccacaagtatagccaagccgtataatggcaaacaagaattcttaattgatatggcatgcttccctggttcttcaggttcgcctgttttgatatttaataaagagggatactttgataaaaagacgcagtccataatccaacatgaaatgagggttagactggtaggtattttacatgctgggcctcaatatttaaattctggtgaaattgttttaacagctaatcctcaatttcaaatatcatcattgatgcatttaggcatggttattaggtcaactgaactcaagaaacttgaagaatacttgatccagacaaggctatag

SEQ ID NO: 61426 - DNA, 1293 bp, Acinetobacter baumannii
atgagagagcgaatttttgcattagtcgatgtgaataactgctatgtcagttgtgaaaaggtttttcgccctgaattaaataaccgccccatcattgtgctcagcaataacgacggctgtgcagtcgctcgctctcaagaagctaaagaccttggaattaaaatgggagttcccctcttccagatccgagatattgtagaaagacataatgtagtagtgctttcaagtaactatagtgtctatgctgaaatgagccgtagattcatgaatatcttaaaactctatgtcactgaaagcgagcaagaagtttattcgattgatgagtgctttttagatttaacagcttacttgaataattacgacttaactacttattgccatggtatgaaagatagaatctggcgatggataggtcttccagtatgtattggcattggcaggtcaaagacagaagcaaagatagcaaatcacattgctaagaaaaataaaggttttgatggtgtgtgtaatttggttgcaatggacccatgtaataaagaggcctatttatcatctattgatgtttctgaagtttggggtgtcggtaggcagcacactaaaaaactaaattcgatgggaattaaaacagtcttagatttggctagtgtatgtccagaacatatacagcaacagttttcggtagtcatgaagcgaactgtgtatgaactacaaggcatttcttgcattgaaattgagcatacaccaccaagtaaaaaacaaatcatttcatctaaatcatttgggcagaaggttactgaactgatagacctgcaagaagctatctcactctacatgcaaaatgctgtggtccggttgagaaaagatagattattgtgcggatgtgttattgtttttgctcagtcaaacccttttgataaaaataggcctttctttaataggtcgctttctctaccagttgcagtgccgactgataatgtcttaaagatggttcagatagctacttttttaataagacatctatatgcgcggggaattgaatacaagaagtgtggtgtaattttgacaggtttagagcctaaagataccttcaactatgatctgttgacagactggagcaagctcgagaaggatgagagtttgatgacaactctagaacaagttgtcgagaagtttgggaaacataaaatcgctgtgggtagttgtcgcttgcctaaccgtagctggtcaatgactagagacaaactaactcagaattactttagttgggaaggcctgcctaagattaataagtag

SEQ ID NO: 61427 - DNA, 903 bp, Acinetobacter baumannii; identical to SEQ ID NO: 44992

SEQ ID NO: 61428 - DNA, 612 bp, Acinetobacter baumannii
atgtcttcaatgaaaggtatggatcatgacatgtcttcaaaaacaatgagctcttctggatcagatgaagtggtttacggatgggcgaatgcctcaaccccagctggactaaaagcacttcaatatagtgatctacaatctttaacccctcaaaaagatacccgtgctccagaacgtgaaattgaaatccgcttaggtggaaatatggagcgctatatttggacaattaatggtaagaagtttaatgaaactgaaccatttaaagtgaaatatggtgagcgtatacgcttgaaatttgttaacgatagtatgatggctcatccgatgcatttacacggcatgtttatgcaactggaaaatggccaagatccaagtaatatgccgaataaacatacggttattgttccaccaggtaagacagttacaactttattaacggctgatgagttaggtgaatgggctattcattgccatttgctctatcacatgtctgctggaatgatgaataaacttattgtggcaaatgtcgatagtaatagtactgattcgaaagatgttgttgctcaacctaatactaatgataagggggtaaatcaacatgcgcaccactaa

SEQ ID NO: 61429 - DNA, 1245 bp, Acinetobacter baumannii
gtgattaatttagtatgtggtcaaccacgtaatggcaaaactcaatttatggtgaaaaccatattagatatgcttgaagaaaataaaaaattagaagaacaaggtaaaccggcaagacaaatttattgtgatattgatggtctgagaatacctgaagttgaacctgctccagatgattggcgagatactccggatggttcaattattatttatgatgaagtacatatgcgtaaagcatatgagtacaagggtaaccaatactctcaagatcagatgattaaggaccttacaattcatggtcattttaacaaggatatttggttaattactcaggaccctgcgcgtattgaaaaaggtattcataagcttattgataagatgtacttcataaagcgtcctagttctaaaccgccttatacaaatgtttttgtatttgataagtggttatctagccctgaacctgctgcaaatcgtaatgctaaacataagaagtatttcgaccattatcgctttcattttaaagacgaatatcaaaagctttatcattctgcgtctgaccattccagtatcaaatttaagttaccaaaacagttatttatctatgtatcaattattttaggaatagttggttttgtagtatttggtttaatgaatactaaatcttttaacccgcaaagatttgaggataaacaaagtgcatcagataccaaaaaagatagtaaaacgaatggtcaaacggttaatcagaagactgacgaacagaatcttttattagatcagcagtgttctaaacagtatggtttaaccattgagcaatgtgcagacttacgcgatccgacaaaaagaaatgctgaattattggcaaaagagcaaaatgacatgcaaagtattgtgcttaaatacaatcctaataagccttatgatattgatgctagtcaagtcagttatgagattacgtcaaagcctgtgtttagtggttgtatgaagcagaatggacgttatgtagcatatacccagcaaggtacaattttgcatgatgtgtctcaatcagattgcagacgactcttaaaacatgcaggtgatcgaccttttaattattttgctcaaccacgtaatgaacctatgaatacagaagctttgagaaaggattctgttgagcagattccacaacgtcaacaaccgattcaatatgctgaaaactatatacagcgtggcttagagagagaccctaattgggatttataa

SEQ ID NO: 61430 - DNA, 195 bp, Acinetobacter baumannii; identical to SEQ ID NO: 58198

SEQ ID NO: 61431 - DNA, 177 bp, Acinetobacter baumannii
atgaatgaaaaatggacctacaaagaaatgatggccctgcgttgtgcatataaccatggtgtaagaactccagaaacacgagcggctgcatgcttgtatatcaagcttagacgtgcagggaagattgaagagttcaaagctgaaagcatgactaaacgttacaaggaggcggtatga

SEQ ID NO: 61432 - DNA, 333 bp, Acinetobacter baumannii
atgagtgggttatttaatgtttatagcgcttcgcgaacagggcatttaattgaaggtttaacgccattcgaagtgttaagagatatggataagaagggggaattagtcgttggggggatattttacagcagggggcaagtaagaaaagagagcattgataaatgtgctgatctagtacttatgcaaactgatactccaaaaatggagtttgattggagttccaagtacctaaaggtgttcttttttcagcttgagagttccaggccaatagttattacacaggatctcttagatgcctatgccatcgttaaacgtgacggagaacaacaatga

SEQ ID NO: 61433 - DNA, 522 bp, Acinetobacter baumannii; identical to SEQ ID NO: 46790

SEQ ID NO: 61434 - DNA, 654 bp, Acinetobacter baumannii; identical to SEQ ID NO: 53578

SEQ ID NO: 61435 - DNA, 162 bp, Acinetobacter baumannii
atgagtatcgaaatcaagcaagagaagtacttcaagttagaagttgaagtagaagaaagcactgtaattatttttcaaaaagattcagacattgtgattagcaaagacgctgcaaaagaattgtttaaaatattaaaaggctttgttgaaaaacataagtga

SEQ ID NO: 61436 - DNA, 141 bp, Acinetobacter baumannii
atggacagacacacattattatcaataggcattggcctagtgcttggtttcatgttgattttaatcacagagcatttccgctttgttataggcatggttctgagtgtgtttgctttgagatggttgtttagccagtggtga

SEQ ID NO: 61437 - DNA, 270 bp, Acinetobacter baumannii
atgtctgaaattatattcaatattaattaccatattcgatttaagccgacacaatatggcaaagatcattatcgaaaaaaaagagaagtaattaacaatggaattaagacgttggatattcctttggacttgaaaattgataatgatggttttgcatctctgcaaatgcatgaatttatgtattactttggagatattgcatacttgggtgggcaaagctttattgagaattgtgaaatccgtctaaatagaaaacacatagaaaaatag

SEQ ID NO: 61438 - DNA, 669 bp, Acinetobacter baumannii
gtgaatatgaacaaagtttatttcaagatgcaagaacagaccgtccaagaggacggttttttttcgggctatcttgctgtttttgacaatattgattcccatggcgatgtgattagaaaaggggcttttctcaaaacaattgaggaatggaactcgaaaggaaagtatcccgccattttttggaatcatgatccagacgagccgatcggggtttttaccctcatgcgtgaggatgaaaaagggctttatgtagaagggcgtttattaatttccgatattgtccgagccaaatcaacgtatgcactaatgaaggtaaaagcaattgacggtatgtcaattgggtatatcaccattcaatcaacacacgatccgcaaacaatgattcgtgagctcttagagttggagctcgttgaaggctcaattgtggccttcccgtctaatccaaattcattgatcagttccgttaaatccaaattacaagatggcgagctgccatccctaccagaatttgaaaagttcctgagagagtcaggattttcaaaaacgcaagccactgtcatcgctagtaagggtttgcgtcatcttttgagcgagtcagagggtgaaaacgaaaaagcgaaatcaatttcaaatgccttaaatattttacgaggaatcagtaatgactga

SEQ ID NO: 61439 - DNA, 144 bp, Acinetobacter baumannii
atgacacagtatctcatgtttgcggaaaatatttataacaaaattaaagatgaggaattgttttcacatgactgtattgaaaatatgaacttacttatgacatgtatacgcagagaaattgagggaacagaatttaaattataa

SEQ ID NO: 61440 - DNA, 279 bp, Acinetobacter baumannii
  misc_feature (12)..(21): n is a, c, g, or t
ttgattactatnnnnnnnnnngtaaatgccttatatgacccaaatggtaaatatggccgctggaacactattggaatcgcttgttattgtattggtatcttacttcagttgccctttattgatagtaaattctataaaggacaaattgccgaaatgttgggtggagtcgatttatcttggctagtgggattgttatccactgcagttttatattatgtacttgccaaaagagctcaaataaaaatttcaaaagctcttcaacttgaacgagtaaaataa

SEQ ID NO: 61441 - DNA, 426 bp, Acinetobacter baumannii
atgagtaacatcggttcttgtttatgccataaagtaaaattttctgtaccttgtgaaatcaaaacggtttatcactgccattgcagcttatgccgaaaacaaacaggtactggagcgaatgccgctactttagtaaaagaaaatcagtttaaatggttgatgggtaaggaatatgtggctacctataaaaaagaaactggttttacttcatcattttgtaatagatgtggttcgcctgtccctaataaaattaatggtacaaactatatgtggataccgttggggcttctcgaacaaccgtttaaaccagatttaaaacttaatttttgtatagagtcaaaacatgattgggttgtgttaggggatgctcataaaaactttgcacatttacctgagttagaagagttcttaaaatattttgaataa

SEQ ID NO: 61442 - DNA, 729 bp, Acinetobacter baumannii; identical to SEQ ID NO: 50063

SEQ ID NO: 61443 - DNA, 465 bp, Acinetobacter baumannii; identical to SEQ ID NO: 50064

SEQ ID NO: 61444 - DNA, 591 bp, Acinetobacter baumannii; identical to SEQ ID NO: 50065

SEQ ID NO: 61445 - DNA, 366 bp, Acinetobacter baumannii
  misc_feature (352)..(361): n is a, c, g, or t
atgtcaaaattaatacagcctatcagttttaaggctttgtttatatttactcctcttctgtttgtatcaataggttgtagtgaaacgctatattcccaaacaatcccatcagtaaagtcttcttcagaaaatatcgactatccagagatcgatacagcattaggagaaaagttacaaccgaatgaggaagtaatagctcatcaaataactcaagttattgagaagtcgattcgtgaacagtatacggcgggaaatgctttgcgtgatgcacaccctaaagcacatggatgtgttcgtgctgaatttcatgtacttaaaaatataccagctcaacttgcaaaaggtatttttnnnnnnnnnngataa

SEQ ID NO: 61446 - DNA, 336 bp, Acinetobacter baumannii
ttgattagagataaaggactgcaatacgcgaaggaaatcgtagattcagccccttctaacgcaactgaatggaatgagggttatgagttccaatgtggtcaaagtgtagaaatcagcccagcagatcgtgagaagtattttgtagatttggttgagcttaaacgtcttgtggagtcggttgatttggttgaatcatggggtggcattgaggacttaaaactatatgacttgtctcattgcaaagataaacctgaatctgctggatacaagttgcttcatgcaattgctgattacgaatcaatatacggaggcggggatgagcaaacgaattcttaa

SEQ ID NO: 61447 - DNA, 162 bp, Acinetobacter baumannii
atgtctgcagagactgtgcctgtacctggcaatgaagtgttgcctgcagggtcagttgctgttgcagtcactgtatcgccatccaccaggttacccgggtttggtactgaccagctgccatctgtgcctgctaccacggttgcagttgtgccatcaggataa

SEQ ID NO: 61448 - DNA, 351 bp, Acinetobacter baumannii
atgagcaattttgtttttaagcgtggtgacactttcaacttaaatctgcaattagttgatatggatgaagcactgcaatatccagccaatgatgtacgtcgagcgattgatctaacgggttatacctttacttctcaggtcaaaactttagatggtactgcagttgcgactttcacttgtactgctttaaaccagagtacacaaaaggggtggctaaatgttaagtctggagcaagtactgcaacgtggccattgggtttgtgtcagatggatattaaggccgttgttggtggtgttgttcaacatactgaaactttgactttccaagtcattgagggagtaacagcataa

SEQ ID NO: 61449 - DNA, 471 bp, Acinetobacter baumannii
atgggaactcataccatcggtcatatatcatcattaagtatttttgatgatagaaatttcaaagaatttgaaaagaaagtttccaaacttcgtgaggcgctgagagatgctttaaaatctcacaatcaaattattgaaggtgaaaagatacaacctgctgtagtaaggaaaagggtcaatacgatactgagtcaattgaattcttttgaagaggttgaatcaataatcaatagtcgaatttctgatattgaaaaatttaaaaaaactgatccacaaatcctatgttacttaactgatgattatgaagagtcaaaaatctttgcctctttaagtatggcctttaacggaattgaaaacatgaaagaggaaacatatttaagaagtttagaaattaagtattctacaactttcagatgccatagaattaaagccgctgatcatagtgttatgcgacgtccacgtttttattaa

SEQ ID NO: 61450 - DNA, 321 bp, Acinetobacter baumannii
atggcatcgactccacgtattactaattatgatgaagttttaggtttaccgggttttttagaaaaaaatttaattacacctgagaattttgattcagtattttctgattatcaaattcgagacagagacatgcattgctgcttacttagtgatagaggactttgtaatcataaacacaactttggttacgtgatccagctaaaagatggcactctaagcataatgggcaatgactgtgcggaaaaaaatttggcgcgaatgaaggtattattcaaggaattaatctttatgaaaatactaaagaagctgagaaaaaattag

SEQ ID NO: 61451 - DNA, 384 bp, Acinetobacter baumannii
ttggatattgaaaaactaattgctgaatgcaaagatttggtagatacattggctgagtcaaaaaagaagttgcaagatctagtttctattaaggcaaattattattcattgtcaggagagtctgtggagacaatcacgcaggttgtcatgtttgattgtgacactacctttaatttacttaagcaggagatattcgacttctactcaaaacgttataggaatgagcccttcatgcacttagttgatacagagttggaatccataaaagaagaaatgaaaatgagctccatgaagatagttttaaatattcgagtccaagaaaaaattaaaagaacggaaaagaaacttcagagcattgaaaaagatctacctaagtattcataa

SEQ ID NO: 61452 - DNA, 951 bp, Acinetobacter baumannii
atgcctaccgctgcgaatttagaattaccacgaccaaaggactggaatgagtttgaagatatttgtttatcaataagtaaaataaaatggtcaaatcctaacttttcaagatttgggcgaataggtcagaaacaagatggagttgatatctacggagatggacaacttggacaacttattggcgtacaatgtaagaacacattagttaataatttaaccatagaaattattaataaagaaataaataatgctgaattatttaccccgcctatagcagaaatgtacatcgccacatcagcggtacgagatgtaaatatacaacgtgaagttgctgcactttcacaaagtcgcatagtaaacggaaaatttggtgtaggtctaattttttgggccgatattgaacaagaattatcgaagaatatgggtgaagtagagagattttatcctcagtttttcaaaagctctctaaatccccaaagtcaacccgacctcagagctcgtgatatatcaagtttgacaaattttttaaactacattgatatcgagccgattcaatattatttagagctttcccctaagttttttccttataattttctaaagaatctcgagcttctaaaaaatctatactatagcccactatttaatctttatgatttggatttaaaagcagtattatgtagttggattaataagtggcttgaaatagaacaaaatatattgcatgccccctatcagtggttggaacatacaaatacttggagctttatcatgccaatggacttttgccgtactcctgctgaaaacgctatgtatgagaacttgcaacttttagtatctgattttatacatttacaaaaagatttttgtgaatttatccatcaaaaatatcctgaaatcgatttaataagtacaagtagaaatgcaagaacaatactctgtaatttgtaa

SEQ ID NO: 61453 - DNA, 3993 bp, Acinetobacter baumannii
atgtctcaacttgattggagtaaatttgaaaatttatctggtgcagctgatgtaaattttgaaaagctttgtagatccttaataagaagacattatggtcaatatggttcctttaaggaactagcaaatcaggcaggagttgaattccatcttaagctagaccaaaattgtacgttaggagactcaacacgctggtatggatggcaatgtaagtggtatgacttacctagagcacgagctataggtgcaactagaaaagctaaaattgtcgatggtctagataagtccaagaaatatttacctaatttaacggattgggttttatggactaaatatattcttacagagagtgatcaaaaatggttttatggattacaagctaattatccatttaaactacatcttcaaacttgtgatgacattgagaatttattggtcgggccagcattagctttgcgagaggcttattttggtgagttagtgattgatgaacaagtgctaaatcaaaattatcaaatcatcgcatctactcatattaagaagtttcaaccagaagtacaccaaacagttaaagttgaagaaataattgggaaatgtttaggaaggcactcttcttgggagtcaatagatagccttgggaaggctataaacaataatttaaaaatagttaaagacgcactgaatattatagatccctatattcagacaactttacccaattttttagctgatggggaaaaacttggcagctttttgaactctttatttttagagttggctgcaggaaattttgaaaaagtaaaagatttattatctgaagatatagattgtgattggtctaactataggaaaactgtatctcgactaagagctaaaagaagccatacagctatgactgccgcaaatttgttagcagatttttattctttctcacgagaagtaaaaacggtaaggaaggctttaaatgctagggtaattgcagttgttggtaaggctggtgatggtaaaacagatttggccttagacatatgtagaccaaaagaaagctttaatgcaggagtgctttttctaggaaaagatttaaaagcaggtggaaatttagatgatttagtcaaagtttttaaaatatatggaaaatctgttagtacatttgagaatttattagaagcaatagatgcagctggtcagcggcttggtattcgtattcctattgtaattgatgggctaagtgaatctgaagatccaaggaattggagagatgaagtagctaaagcgactgcattgttagaaaactatccaaatgtattactaatattaactttaagaagtgagttttatcaagattgtatccctgaaaatactccaacttctgagttgaatggttttgctgataatccaagtcaagttatacataattattttgaatattacaaaattgatgcgttagatgcagatataccaatcgagctgcttagccatcctttaacattaaggctttattgtgaagcagcaaatgcagaaaggagagtagctgtcggtgtagaagcattacctcgttctcaagttgccatatttgagcaatattttaaaaatgcaattgatcgtattgtggcattatcttcatcaaatcaaaggttatatcatgaagatattgaagatgctttattaaatattgctgaagtactatggaaagaaaatcgtagaactttaaattttaagcgggctcgcaagattgctaatgatattgtggactggggaagtagtttaataagaagtcttgaatcagaaggcattttattaagatatggaacgcaaaatggtaaacaaaagataggtttttcttatgatttaatggctgggtttaaaatagctgaataccttttgaaaggtgattttaataattggattagaaaaaatattaataaaattcaacatggtaaaccacattcaaatactttggcttatgatgtttttaactcattagttggcctatatcctaaatattatacgagaaaacatttttggcaattgttagaaggtgattttaaagaacgtgctcttttacaaacaactcaagagcaagcgagtcttatcaacagggaaaccattcaagaatttcagaactatttattatcttcagagaaatttgcttctcaagcatttaaaaagctgaaaactactcggtcagcatatgctcatccatttgatgcaaatttcttagataaatctttaagaaatatgagcaatacataccgtgatttaacatggtctgaatggataaggaaaaattctagagaacttaaaattgacttggaagtccttgaaaaaagatggtctgaaataaaaattggttctaatgaaaaaggtcgagctatatgggtccaatggttattaacaactacccatagagatctaagagatcaagcaacaaaagtactttctctatatgcaaaaaaagatccaagagcattctttgagatggcaattaactcattaaatattacagatccatatgtgccagaaagaacttttgctgcagcgtatggagctattttgagcgctgattttattgatgcagaaaaaatcaatagcagtgtttgtgatttcgctcaaaaaattatagaaaattgttttacacctaatgctcaacactctactactcatacaattctgagggaatatttcttaggtattattaattatgctttaaaagtgaatcagtattttgttagccaagaatatttagatcactgtcaaaaaccttatgaacatttaccaaatttgttcgagagtcttcctgatgttagtgaagagagaataattgaagtcaaggaagcagcccttcgtatggactttaataattacactattggaaggctaactactgatagagctaattatgatgattcacatcctgattatattcaaacacgaagaactattttaaagagaatgattcaacttggatatgaacctgaaaaatttcaagagattgatagggatataggttcgagttcttattatgatcgtgatgtgaaaatagatagatatggaaaaaaatatagttggattgctttttatgaaatgtatggatggaaggctgatagagagcttttagatgattggcgtggtaatgaaagatgtagcgatgtaagtattgatccaacattccctaaaattgataattcttggaatccagaacttacagatatatttactaattctccaaatgatattggtgagtggattttacatggaccaatcccgaattattttaatcttttggagactcagcagtttactcaaaatgatagttggattttacttgatggatttctgcaagaggactcgaaaacggattatcgtgaaatatttacattcatgagaggtttttttgttgcaaatgaacatgtatctacaataagtgaatttgttggaaataaggattatcttggtaataatgcattgccacaaattcctgaaaaccattacaaatatgcaggcgaaatggttttgggaaatacatttttcaatctccatcaagatgtaagtagtcgagtaagatttgatgaatgggatgaatcaagctttttaatcgaagttcctgtgcaatcttattcttgggagtcttatcatagttcattgaatcaagcagggggaattgacttcccaaatcctgagttatgtcaaaaactagatttaaaatatcataatgaccatccagacttatatgacattcatggagtagcatctatttttagaacattcaagaccgatatggagaatttgaaaggtcatttatcatatttgagaaaagatcttttccaaaaatatctgacagaaactggacaaacttttatatggatattgtggggggagcggagacaaaactataagggtggtgtagaggtatataaatactttaaaaataaccaacacttacataaacagatttatatctggcaagaaaatcaaatagttaaaatggattga

SEQ ID NO: 61454 - DNA, 474 bp, Acinetobacter baumannii
atgaaaatttggaatagttatggttcagagcattcaatgaatttggtgttaataggttcatttgttcaagagaaaaatgctgagaatatagagaaacttattgggaagttgaagttagcttctgagcatgagggatattatttatctggtgaaccttcagaaaatcatagattttctagagaggtcttagaggctcttcaagagcagcaaattcatcatttatctccattagaaatagaccagtttaattctgattattatttagagcgagatggaaataagataacgattgatacggatgagattgatatatctgcattcattaaaatatttgtggatgctggtgctaaagtagaagtttactcaaaacatttttattctgagacttctgagacttctgagacttctgagaaacctaaaaaacctaaaaaacctaagaaacctaagaaacttaaagattcggaggaggaatag

SEQ ID NO: 61455 - DNA, 900 bp, Acinetobacter baumannii
  misc_feature (7)..(16): n is a, c, g, or t
atgaaannnnnnnnnngaataggaccagatggaattcatttttttgatagattcacaggtttaaatattttaatcgatgaagttatacctccagaaaatgagtggtcacaagccccaaggcaagtttctgttgctctcacaaatgtatgtgatttgcattgtgaattttgctatgcgccaaaaataaaggcttcactccaattagatcaattaaagaggtgggtcaaagagctagatcaactgggtactcttggtattggatttggaggaggtgagccaactttatatccccatttttcagaaatttgtgaatatacggcaaatgaaacagatttggcggtgacctttacaacacatgggcatcgtttaacagacacattactatctaatttgaaggggaatgtacattttataaggatcagtattgacggagtggggcagacctatgaaggctttcgaggtcgtaaatttgataaattaatagagcgtattgaaagagcaagggaaatcagttcattaggttttaatattgtaattaatgattcaacaatacaggatctagatcaagtcacggaaattgcaaggaagtttgatatatccgaagtactactcttaccccagcaagccactcaaaatgttaaaggattatcaaaagattcctatgaaaaaatgaagatgtggataacaggctatagtggaaaaactcgcttaactataagtgatatcgggcttgaatcaaattttatatgtaatccacttttgatggaaactgggcttaatgcttatgctcatatagatgctctaggcttattaaaaagtagttcatattcaaatattggtcagcaaattggtgacaaaagcattttaaatacacttcagttattaaaagaatgtaagtaa

SEQ ID NO: 61456 - DNA, 159 bp, Acinetobacter baumannii
gtgactcaggttgaacttgcgcgtcgtttgaacaaaccgcaatcttatgtatctaaagttgaaattttagaaagacgtatagatgtaattgaattaatagattggcttaatgctttagataaaaaaactatagaatttattagtcaacttaacaattga

SEQ ID NO: 61457 - DNA, 1035 bp, Acinetobacter baumannii
atgaatgttgataaggagaatgtaaaaaaatatgagctgaaaggtaatctactcggaaatttggaagacatagagcaggaaattcttaaaaaagataaaaatgcttttttagtaatttgtttacatggtagagacgagcatatatctagccaattttatactgcaattaagttactttgtttaaagtatgatgctggatcgcaatttttatatagtgataagctttctaatgaaaatactttgaaatatagtatttccaatgttgccttacaaatcttttgtaaagcaaatggaattccatggagtgttactaatagatctgatgaaaaagaaagtctaattattggtattggaactagccataagagactaaatgaggaaaaaacaatttttcatgcattcgctatgtgcacagattcatctggtatttttagctcatccatgacactcgcccattctgaaataaaaaataattactttactgatatagagaaaaatttaattgaattgaagaaatcatcaaaccttgataattacaagcaagtagtttttcatcttactaataaaattagtaactctgatatgagggtattaagtgaaattatcaaaaatatctttaatgatcgtgcggatttagtaattttgaaactaaataaatcttctaaatatataggtttctcagacaggaatgattgtgtagttgctaaaggtgtatgtataaagttacatgctagaaaattcttagtgtggacagatgggcattgtaatgaaaatatttatagtaatagaccttcaaaaccaattgatatcgaaatattacatagtcccaaagatattattgtaaaaaaccttttagaagatatctttaaactttcgagtgcaaactggcatggttttaaaacaaactcattgccgattacacttgtgtattctaaagatattgcaaactttatttattatgtacatgaaagtggcttgttaaaaaaattacaagaattaccaacttcgaaagtttctagtccatggtttttataa

SEQ ID NO: 61458 - DNA, 1071 bp, Acinetobacter baumannii
atgaataaagattactttaaagataatacattactttttattttaggtgctggaagtagtattgatgcaggcattcctaccgcctacaaaatggtatctgattttgaagataggattaaaaatgataatgaactcaaaaaactatattcatattttaaaagtgctataattttccagagaggtctaaagtgttattcacctaatatttctgtaagtattgaagaaatacttaatgttattgaggcacttaatttacaagaagataatattctttatccatatattggtacatggtctcaacattttttaaaaacctcaggtgcagattttgaaaatgtaagaaaattagatgtaaaaattagagaacttttattttcatgggttactttaaatgattatagaaaatcaaaatatttttcaaacataggtcggcttgctacagatattaatacttctattcgtatttttagtttgaattatgatatatgtgtagaaaaagcgtttcagatctctgatatgagaattgaaactggaatctctccagaaacatatgagtggtcttcacttcgattcgatgatttacctgataatgaaatacctgacgcatatttatataaacttcatggctctatcgactggcaaaaacaagattcaggattgcctaaatattcagaaacacctattaaagatgatccacaggtaatttttggtacggctgtcaagcttagatctttggatccgtatctatttaatctatatgaattaagaaaatactcattacatgagaatttaagattcattgtcataataggatatagttttagtgatgaccacataaatcgattgatacagcaatctcttctacaaaggaagttaataaaattaataataattgctcctgataatgaggaaaaattatatgaaaaaacagttagagaaaaattcttatcggaaaatattgaagacaatagattaatttttgttaatgagtttgctaaaaactttcttgagaatttaaatctggatttttttaatcaatattatcaagaagatccagatttaccattttga

SEQ ID NO: 61459 - DNA, 2040 bp, Acinetobacter baumannii
atgactaagcgtattttccaatctgtactatcaatttcggtacttacaggaatgtttcctgcggcttatgccgctgaaagtgaaaatattttagttgattcttccataaaaaataaaaaagatagtgaagttacacaattagaaaaaatagtcgttacagcaagtggctttgaacaaaatataaaaaaagcagcagcttcgatttctgttctgacacaagaggaaattaataaaaaagcatatcgagatgtaacggatgcacttaaagatgtaccgggggtggtcgttacaggtggcgggagctcatcagatattagtattcgtggaatggggagcgcctataccgttattatggtcgatggtaagaaagtaaatacacgttctgtgcggccaaatagtgataattcaggtattgaacaaggttggttaccaggaatcgaaagtatcgaacgtattgaagttattcgtggtccaatgtctggcttatatggttcagatgccatgggtggtgtgattaatatcattactaaaaaagtcgcagatgtttggaacagttctgttaagttagatacaacaattcaggaaaataataaatctggaaacctttaccaagctaatacttatgtatcgggaccattaattaagaatttactcggtttaaaagccaatggtacattttcacaaagagatgaagatgaaattattggagggtataacaaacaaaaaattcgagcaggaggggctactttaagcttaactcctaatgatcaacataccattgagcttgaataccagcgttctattcaaaatcgtaatgctacagttgggaaaacagtttcacctattcaaactggtcgtaatccaccagcagattcattaacagactattaccgtacagaatatagtttaacgcaccgtggtgacattggtcctgtgaagactcattcttatattcaacgcgaagaaaataagaacccgtctagaaatatggaagctgtaaatactacatttaatacgcttaaccaaatcacattagcaaatcatgcgcttagtgttgggggcagctatttaaaagaagaattggatgatttaggtaaccagttaaaagtgggcgggtcacaacctgtttctaatttagatcgttatagctgggcattatttgcagaagatgcatggaatattacagatccttttacattaacaatgtcactgcgtatggatcaggacgaaaaatttggagatcatttcagtcctaaagtatatggtgtatggactttaaatgataattggattattaaaggcggcgtatcaacaggctataagacacctgcactacgagcgacagtagcagaatgggggcaaactacgggcggaggacgttcggcaggggtaattgttggtaatccaaatttaaaaccagaaaaaagtacgaactatgagctgtcattttcttgggataatcttgataacctcaatgctggtctaacgatttttaatagcgaatttaaagataaaattacagaagttagaacatgctcgggagatgcgggtacttataattgtgattggttgggtactaaatttgattttgtcagtcaacgaacaaatgtagataaagccaatatgagagggattgaagcgacgtttggttggctcatttcacctgacttaaaattgaatgccaattatacctataccgatacagagcaaaagagtggggagtttaaaggccagcctttaaatgaaatgccggaacacatgtttaataccactttagattggcaggtgaatgatttggtgggtatgtggagccgtttgaatttccgtagcaaaacttctgaatatttaagccgaacctcaatggctgaaggaaagcctgcttatggactggttgatgttggtatgaactataaaccgacggataaaatccaagttgcagcaggtatctataacttatttgataaagatgttgatgtagcaacctacaattatgttttagacggacgccgttataatttaggaatcatttataaattctaa

SEQ ID NO: 61460 - DNA, 711 bp, Acinetobacter baumannii
atgattaagcatctttcagatacagtcttgaatgcttttatacaaaagttctctgaacaagaaaactcttgtggctttactctgcctttagttttcccaaatggttcacctgctgttgtttatgcgcataaagacactcgtgacaatattattcttaacgattacggcttaaatattcgacattttgaagaatcaatatgtattgatgatttcgatgcaattgaaaaagttaagaacttttgttcaaattatgactctatctctgtaaaaggaggctgtcttatagctgagtcttcaattaaacatttggattttactgtaatcgagtacactgaacttttagggaaacttattaactatcaatacaaatcaagatcacatcaagctattgataaaatacttgattcaatcagagaagttttagaaaaaagatttcaatcgattgaggtaagccctaaattgttagggagatctggtgaaaaatatggttttaatttttcgcatgacaatactttcattgactatattcaagcagataaatctaaaacaaacactcaacttagaaaaatgattgacacacaaaatctaaatagagatgtgactttcaatattattattgatgatcttgaaagtgataagtacaaatctgagcaaatgatactctcagaatatgctgtagttcagagactaagtaaatttctgcaatcataa

SEQ ID NO: 61461 - DNA, 492 bp, Acinetobacter baumannii
atgggtgggaatagatgctttggtgatttgacggaaggaaaaagaattttggagttaccgaagtacttcgaggctcctattaaaatgagaagagatattagtaaattatcactttacctttactcaggtgctcctatattcgagagttcaactgatctaaatattgttggtttaagtatttacttacgcaccaatattactccggattctatgaagcatagttttgggttaatacagaaggttggaaaaaacattaattggatctatgacttatgcatttaccctgaacatcaaagatctcatgtagataagaagaaacgagaagttttctatggtcctcatattcacgttttagatgaatcttttgaaattggactggattataggattgatgaatggcaaaaatggtttcatttttttgctgaaaacattaatttgcaaattatgtcagatgatataatggagccacttgcaggggagttgctactatga

SEQ ID NO: 61462 - DNA, 405 bp, Acinetobacter baumannii
atgaaagaagattttgtaatttgccaatattgcgaagaagagtacgcagttgattattacagcaaaattcatccagacgttattttatgcaatccatgtgcaaacatgattttagaagttgtgcacaaggcgcaatatggccgagatctttttgggcgaaaaaatgaagaacgttcgcaaaaatatatgaaaaagaaaattggtctaaaacttcgccttgaggtttacgagcgagatggatttaagtgcgttacgtgtggcgttcaaaagaatttaacacttgatcatattaaaccagagattttgggcggtgtatcaacaatagaaaacctccaaacaatgtgtaagtcatgtaattcatcaaagggcactaagtatgatgaatcagacgaggagggcgaatga

SEQ ID NO: 61463 - DNA, 321 bp, Acinetobacter baumannii
atgacgtatttagcaatccagactatcaatagtgaaacagacttagaaggtcatgcttttgaggcaaacaagaaaattaacttcaatttgaagcaattgaataatcagatcgagttgttaccagagaaagttgaagatcttggtggagaaaacccgtcagccttaaagtacctaagtttagttaatgaaactattcatcaaaatagtttgctggttggttttgactatcccaaatatgaacccaacttagcattttcttatgatacaaaaagtaaagtatatgatccgctcaatatttactttaaatctctaacaagataa

SEQ ID NO: 61464 - DNA, 3372 bp, Acinetobacter baumannii
atgcatcaacatgctcaagaaaaattaaagtctcctactttagacgacttaataaatgatagtagactagaacgattgttctcaaaaaatgttaaaccctgtgttcttcagctgtgggtattacaaataaaatgcggccaattaagtgagaatcgaatagtttacggccgtctacttccttatagtcattgtaataacacttggaatttcagccataacaacaagttcattactattaactcacaaactaaagctagagtaactaaactcactttgtaccttcaaagtattcattgtgccgatctcttacgattattgaatgataggcaaactattactctaattagcaaagaattaaggtttacaattcccgaaagattagaagaagaattcggaaaaacctcactatctcctactgatctggcttaccgccctgttgcatacctcatcaatcgtgatgcttatcatcattcactctctagcccacatgaaggagctggagcatttagtgcctcgattacccaaactgataaggatgcattatttcaactaggatctctatatagtccaacgttaactaagatggtcgtcaaatcccttaatgaagacacaggtatggacttttctattaccgatacctctagatttggtgacatagaattgcttgtttttccaacattagatgatcaggagcgaaacttattagaaataaactggataaactcaccacacactttaatagctaggtttaatccctctcaggtaccatactataacagtttccaatttcgtcttaatgtcgaaaataatagtcaaattacttattcagtactcgctttagcagaaaaaaatgaagatggattatttgaatgtaggttcgagttagatgaccaaataagtgcctgtatagatagtactgaactagagattttcggctttcgtgatagtgcttacaaacaaggtacgttatgctcacgctggcaaattaattatattagggaaatgcattttcaaagccatgttgttggtcatggtataggccgttcatataagttcgattggctagaaaaaacagctcaacccgctgacaaactaagagtagaagcagccctaacgattaataacaataatcaaggttttgctggccacgtcggaggacgtgaggtagattcatgggttccagccaaccgtgaaatagctactctttttaaacggttacatccccaaaaatcgaatggtctattctgtccccgctggagtcagggtaatgataatgggcgtttacaacttgtagaatggttcaaggcgttactaactcaatatcaacagcaccaaatagtcatttttgatccttattttgaagatgcaggtttaggcttattattgctttactctgtacaaaaatcagactacatcgtattcagatctctacccaaaactcctccaaaagataaacctcaacgccgccgatcagataatacggctcagaatgggattaataatctattagctaattgtgagcaaagtcatcacaagctaagaaaccttaagttacgtatttatggactgaaggaaggccgtctacatgatcgctatataataattatgggtagagatggtcttccaattacaggttttcatctatcaaactcatttcaaagggcagccgaaaaccacccactactgattacaccaattccatcagatactttactggaggtagaagagtatgtgttatcactgatacaagaagccaaagtatcacagaatcaagaaaatattgaaaataccaatatacgccttctcttcgactctacagttttacctccttcaacaccgaaacggtacgagccattactctttctcaataaaccttttgcaggtgaagtacttagtctttggtgtagtgagcctacactacacggcttaaacagtaacgtattaaaagaacaaatgactaccctaggcctacttgaaggagaatctctcaatttatccacaagagtaacaaattttcataactttttaggtcaacaagcagacaacttcaataacttcggcccaatctgggaaatacttggagatatacttgctcactcacatactaatgactattacatggaagaacttgaatctgaacataattttttaaaatttttagctcattttctcaagttatcatttaatcgtgaatatacagaaatagataagaatttaactgtagtagagtcccaattctttacaagaaccatcgaagagttactatatagctcatatcaaccacaccacttatttcaaacgacaaaatattctgctttaacttggtcagaatactttgctattaagttcttatggcaatttaatccagatgttctcttagaaattgccgaaaaacaaatattaaatattcctatagacagccaaagctcaaaaatcataagactatcccttctaagccaaatcgttagtgaaatttctctttctgtacaaatcagaatcactgaaatacagctagaacgattacttagtagtagtagcgccttactctattggatgggactacatgctattcaaatacaattagaaaaaccaaatggcttttctaaagccatatcattgataactaactttacaactgccaatcaaatacaagcccttggctggatgattaatcatgctgctaaaaaatcagataataccgaaacttataaaggtcttatcatagcattacataaaattttaccatccaaaatttccaaagatgaattaaaaagcttaattgactcaatgcgcggccatatgaaacaactggcttgggcagaaccttggttattcaatgacatcatttttcctctactagaaaatgatcaaattaacgtcaataatgcctgcgagatttggactcaagaactcatttcaatgcttgagccagaaggtccaaatacatctttattatttgaccaagcacgagaaggtcaaacaactaatatttgcgcattcctcatggctcatagcagcccagtgcaacagcaaagtagtctccaattgataaataagattttgcaccaacagaaaaggattattcagcagcctctggctagtacttcaaactggtcacgatgggataaggcattgaagatttcattgtggatattagccttctgcaaatggtgtgaatactatctatctaaatctcatctaaagaacaatgaattagataaactatccgaaaatgctcttaaattagccgaagctaaaccaatcaaagaatggagaactgaaacttctgatcaatcttctggggttatagcattccttaatcaaggggaatctctgttagcttcaatcgacgaaacagaaaacattccttaa

SEQ ID NO: 61465 - DNA, 909 bp, Acinetobacter baumannii
atgagcattcagacctctcaagcctcatccttaaattattatgtaggttttttatccgtactgtttgctgcttttttatggggtactgcgggcacagcggcctcatttgccagagagttaaatccgatcattatcggtttaatttcgattggtgtgggtggactgattcatactttaatgagtttaaatgcaataaaaaaagattataaaaagctacttcaatacaagtctaaagttttaacaggtgtggttgtatcaattgcatgtcccgttgctttttactcttcagttgcaaccgtaggtgtgtcgatcggtacagtggtttctattggtttcgctccattattcacagtcatgcttgaatggttgtttgacaaacgacctttatctttatcgtggtttattagttttctcttaggctttacaggagtagttcttctttcatttagcggaaacctacatcatgaaaatcaagtcatccatgctgaccgattgattggtgttttatatggcttaatttcaggcttaagttatgccacctactcttggacaataaaaagtctgatcaataaagaaattaattctagagctgccatgggaacaatttttggtatttgctcacttattgttattcctattcttttttttacagctaccaatttattccgttttcatgaaaatatttttgtaggaatttatatcgcatttgtacctatgtttttaggttacttattcttcagttttggtttaagacgtattcctgcaagtcaagcgatgactttagccctatttgagcttcctgtagctactcttttagcagttatcttagttggtgaaagcttaacacttagcaattatctcggcttactctctatcttcttatgtattatcgtcttaactaaaaagtaa

SEQ ID NO: 61466 - DNA, 951 bp, Acinetobacter baumannii
atgactgtaactagcccggtaattgccccagcagaccaaagaaaattatttagtttactaccgacaggtgtagtcgctattacaggtatgacagaagatgataagcctacaggtcttgtggtaggaacttttcagtccttatctctagagccagcattagtgaccttctgtgtagataagtcttcaagcacatggcccgtattaagaaataaaggcaaatttacagctaatattttgtctacttcgcaactcgatgtttgtaaagcattagggcgtaaaggggatgaaaagtttaaaggcttatcttatcaagatagtccgattggtactccacgtttagctcagtcagttgcttggattgattgccaagtgttatctgaggtaatcgctggtgaccattttatgattgttggtgcaatcaaagcattcgagttcggaacagaaaatgcactaattttcagtgggggtaagtttggggaatgtcagccattacctacaacaaatccagaaactgataacaacatagcgaatgctgatttagtttcccgtatttcaaatgcttggactaaagcatggggtgagggtgaaactgctgcgtttgagaatattgttagttctgactatgtccgttactcgaaagggagtcaaaaactaaatcttgcagatatgattcagcaaattcaagaatctcatgctgcatttagtaatttcaaagtagaagttcttcatacagtccaagaagatggctttattgctttacattggaaaacggttgctaaacacactgggttatttatgggtgttccagcaacatatcgcgatgtaactgtacatggttcttcctttatgaaacataagaatggtttgattactcaagaatgggtggtgtgggatccaagagagttattggcctcaattgatatctggcatttaggtgataaagcagtttaa

SEQ ID NO: 61467 - DNA, 1374 bp, Acinetobacter baumannii
atgaccaaacaaattaagttttttgctttcgactttgctggccctgcacatttatcagcaggaacttggaaacatccactagatcgtggacatgagtacaagtcagttaaattctgggttgaatatgcaaaattgttagaaaaaggatgttttgacggtatcttttttgctgataacgttggttatcacgatgtatataaaggctcttatgaagatgctttaaaagatgcagctcaatttcctgcaaatgatcctgcttacattattccagcaatggcagcagcgactgaacatcttggatttggtgtaacttcatcaacagcatatgaccacccatatagcgtggctcgtaaatttgccactttagatcatttaacggatggccgtgtaggctggaatgtagttacttcttattctgatagcgctgctaaaaaccttggttcaggtacacaacgtagtcatgatgaccgttatggccatgctgaagaatttgtagatgttgtattaaaactgcttgaaggatcttgggaagacgatgcagcggtagttgaccgtgaaaaaggaatctatatcgatccatcacgtgttcatgaaattcaccatgaaggtgagcattttaaagttcctggtattttcttatgtgaaccatcaaaacaacgcactcctgtaattttccaagcgggaggttcatctcgtggtgttgcgttagctgctgctacagccgaagccgtatttacaaatgccacttcaaaagctggtttgaaaaaacaagttgataatttacgtcaacaggctgctgctgcggggcgtgatccaaatcatattgtagttgtacaaatgatgacagttgtgactggaagaacagatgaagaggcacagcagcgttatgaagaatataaaaagctcgtaagttacgatggcgcaatggcgcgttacagcggttgggctggtctagatatgtcaacttttgacccagatgttcctttaaagcacgtgaagacaaatgctggtcaaaccatggttgatctattctcaaaaatggacccaactaaagaatggacaccacgagatattgctgaatatatcggtattggtggaacttcacctgtgattgtcggtggacctgaaacagttgctaaagaattgcagtcttgggtagatgaaactggtattgatggcttcaatttaggtaatgccattaagtttcaagatattaaggactttattgacaatgttgtaccagagttgcaaagccgtggcctaatgcgtactggctatgatggttcaactctacgtgaaaatatttttggacaaggtaatgctcgtttagctagcgatcatccgggtgctaaatatcataaaacttctgcctaa

SEQ ID NO: 61468 - DNA, 810 bp, Acinetobacter baumannii
atgtctgaacaagctgagctaaatgaagaattaaatgagagcacggtggagacgccagaactcattaataaatcagtgattaaggcaaccgttttattgaataaacttggtcaatatccacgtggtattactgtgactgaattggcacaggaagtacgtatgtctcgaccaacgacattccgtttactttatagtcttgaacagactggttttgtcgaaagatacgataataaatatatgttgggttggaaaatcgctcgtttggggcgtttagctgatcctcatagcggtatccttgctttagttcaacccatcctgcaaggtctggcagatcaattaaatgaattaattggttatgcggtcgtaaatggtgaagctgattttgaccttattgctgaggcatcaggtgggggacgttggttctcattgcaaggatatattggtcgggatttcccaattcatgcaagtgctacaggtaagattgttttagctgaactgagtgatgagaaggtaaagagtcttttacctgcgacattgcctaaaatggcaagtcgaacgattactgatcgggctgaacttatccgaaatctacaacaaatccgtgtacaagaatttgccattattgatgatgagctagaagaaagcttatttgctgttgctgtaggtgttcgagatagcacgggtaaactggtaggtgttcttgctgctacgggacctaaacaaagaatgctttctcaatctttagtcaatatagtgagcgagcttcaaaagactgcaaaaggtatttcagaaaaaatagctcaaatataa

SEQ ID NO: 61469 - DNA, 1332 bp, Acinetobacter baumannii
atggaacaggttataagttctacagggaaaaaggatattggcgtggcaaatcgacggaaatttattaccaaactgacttggcttattgccggaggaatgtttgtagatggttttgttcttggttatgtaggaatggtaatgcctgcaataacacaagagttaaatctatctttgacttggcaaggattaattggtgcggcagcacttataggaattttctttggtagtcctttagggggatggctcgccgatcgaattgggcgtcgtccaatgttcacattagatctcatgttgtttttggtctgttcaattgctcaattctttgtttcagatgtatggtcgctatttatagttcgttttttaatgggcgtagctattggaatggaatattccgtaggttggccaatgttgtcagaattcgctcctgcacgtagccgtggaaaacttttagctttgcaggaagttggctggtatgtaggtttcttagcttcttattctatcggatatgtcttaacagtaatctggcctgttcattggaatattattttaggcttaagtactattccaactcttattgtacttttacttcgaataggcactcctgaatcacctcgttggttaatgagtaaaggtcgaaaagaagaggcggtcaaaattgcttcggaatatatggaagaagaagagcagcgcgatattctaaatcaaaagccagttgctgttgataaacatcacggcttaatggaattattcactgctaaaaatattaaaattacaatatttgtttccgtattctatttctgttcagtaactccatattttgcaattggttcttttgtacctatggtgttggaaaagttaggtctacatgatggttttacgggtggtttatttttaaatatctttgctgtagcaggtgttgtatttacagcaatgctcgttgaaaaaatgggacgtcgtaaacttggtattccgccattctttatctgtgctgtcgcttttgtgcttattggtttatatgctgaaggctctccaacattggtattaatttgcttcttagtattttattttgcaaatacaattcctacagcgcttacaggtgtttatccgggtgaagtcttcccaaccgaggtccgtggaattggtattgggtttgtgactgcggtatctcgtattggtgcggcagcaggtacatttttattaccactcggaattgcggcttatggtgctgagatgatggtatatatcgcagcaattgtctgtgtggtaggaggcgtagtttcttactatcttgcaccagagacaaaaggtaaagcattgagtgagacagcttaa

SEQ ID NO: 61470 - DNA, 759 bp, Acinetobacter baumannii
gtgacttatattattggttttaatatgattaaagattttttcatttattttaataagaaagatatttcaattagattttatatagtagcagtcgctattttttttatagggattttttttattaaaaaagatgttgatatttttttaaaaattttttacatctctatggggctttttgaaattggctttgttgtttgggtttatagtttttttaaaaaatatattaattttgaatacgttaagtttttttggttcttctttcatttggctgtgctgtggttagcagccgtttatgcgagtaaaatagttagtaaaggtttagaattaccatcatctgattatagttatactattagtttttttacatttttttgctatccacctgcttttttatatatcgctacagctattgggttgttattttatatagtttttatttttgcttattctatattatctatatttaagagagaaattctttcagatggttttcctatacttcattttattggttttgtgattactatttttttattttctttggggcatgataagttaatgtcattctattattataaggctcctaaatatgtgagaaaaatagcatatgaaactgattatcaatatatgccaaaatacttggataattttcctgagatgaataaacaggtaaaaataaagctacatgaaaatggagtgtattcgattttaactaaacaagaggatgagtatatattagaggtgggtaaatttaaataa

SEQ ID NO: 61471 - DNA, 3192 bp, Acinetobacter baumannii
atggataatttgtcagctaaagattttcttaaaaatagaagaccagaggagttttctagttctactatcgttgaagtaggaactctagatagagtgcaattagaatactatttatctacgcttaatatacgtagccaagaattagaatttgagacattcgctaaaaaattatgtgagaaagttgtttgtcctaatctcttagagcaaacaggacctgttgcaggtggtgatggaaaaacagatactcagacctttcctgtttcttcacagaatcaattattgtggcttgaaggagttaatgagcaatctcacaatgagcgttgggcttttgctgtaagtactcaaaaagattggaaaaccaagtgtaaaaaagatgtaaaaaaaattgttgaaacgggcagggggtatgtaaaagttttttgtataaccaatcaatcaattaaagcagatcaaagaagtaaattagaggatgagttaaccaagcaatattcaattgatgtacgtattttagatttaagttggatattggaccaaatttataagaatcagttagagtttctagcaatcaatacattaagtattcctacattatataaaagagaaattgaattaagtgctgatgattatcagaaacaaaaagaattagatagattgaataaactaattacagaaaaaattgatgcttcaagaattacaactcagcaggtagattatttcctagaggtggctattctaagcaaagaattagaaaaacctataattgatacccaaagtttatttgatcgggctattcgagttgctaaaaaatttggaacatctcagcaattattagaggcaagttatcagtatgcttgggctgcacactggtggtttgaagattattcattatttgagagtaatttagaattaacttttgaaaatcttgcagaaaatactaactcagaaagttgggagaaaatagtaaacttgttgacaatttactatgggaggtatagctatttaaaagatatacatcctagtgtagatattgatcatatctataataataccattgatgtattggatagattatcaaaagatttaagtcgtccaagtaactcattaatggcatctattcacttggatttattacagctaattgttaagtttccagatgaaaaatattgtatagagttattaaaaaagacacttgaaacgtgtcgattgggaagtaatctaataggttttccttttgaaaaattttataatttatttcaggaattggatattatttttgataaatatgaagaatatgaagaacttttagattactttacagagcaatctggtttacgtgatagtgagataaagacagcaaaactacaacttgaacgtggattgaagcgtttagacgataataagccataccaagctattaagttattagggaagtctgtttcaggtctaaataaaaaagaaacgtatgacgaaatgacttatgcaaatctattattatctgaagcatattcaagggttggtcttagatgggcaagtagaggaagtctattattttcagcatcacttctagcaaattattttcataaagaaaaattaattttaccctcagctataagagtctattggcaacttgcgtggaaagagttggagttaggtagaattcctcaatcattacgttgggcagaactagcactacttagcttaaatgcaataaaagatgattacatagatgaggaagagttaatacgatttgatgggtgtttagctcatttattattaaattgtaggtttgatcaacttgctgagctagaatatttacctgattttttagaaaaattgcaacttttcttttctaatagtgctctcctatatattttaggatatgaagataagttaaaagaagaatttcagcaaacctctttagatgagtttgtgaaaacattatttttgtgtcgagatacagatactagacatcctacatctcaaattttacctacattaggaaagtctattacctacactactagagtgtcgggatgtgagtttaaaattcaatttccaaatcgctctccatatattgaactgtctgaatctattttgactacaatcgaaaatttcttttctacaaatccaattgataaagtttttacaaaaattagctcattagaaattaatattattggtgatgatgatgaaaatagcaccatatcgcatgaatttagtaaatcctccaaaggaatatatgtagatattttctgttctaattttacatgggagcatttagatcaaaatagtcaaaaaatagtttttgagtggtttgttcagtttgttattgaatgtttgattaaagtttatcatgttctagatattgataaatttgtagaagcctcattcataactgatttatctattacaaggtctattgcatttagtacatgttttggtgcgatatacaatgtcatgggaagagattcacataaaaatgttttagacatacttaatggtaataaaggaactaaatttgagttaattagaaagttgtcttgggatcaaggtagcccaaaagtgctacaaaataaaactgagaaaattcaaatggaatatcataaaaaaaatcctgatttcggaaatttagaatccataagtcatgatcaaattgacataaaaactttgattaaacctgaattatgggatgaagcatcatggtatggcttagcttttatgtgttttgcaaataatcctccttttatttttttaatttttaagaaaaaagagggtatacatgtctttatggatttgtaccaacaattaggccaggttgataatttagaaagattaagattctccattataagaggagtatctaaaaatgaaccttataattatagagtgctacttactgaaaacattatggcaaatgagcaacataaattaattactatgtgtagtcgtattcatgagatgacaccagctacaaatcagaactggaataactttgaaaaagattataagaaatatggatcatatagtttaagttttggtgtgttttttaatggaaaattttatccatatccagaatttgaaaaattttcaattaagaaaaaagaattggtaattaaaaatgcttgggaaattgatgataatgatattgaaaaaatagtattacgtgctgaagatgaccctaatgttccataa

SEQ ID NO: 61472 - DNA, 201 bp, Acinetobacter baumannii
atgagcactactaataatcaagcaaatcaacgcaataatcagcagcaacaacagcaaaatgacaaccgtaaccaacagcaaaacgatcaacagcaacaaaataaccagcaacaacagcaaaatgataaccgcggccaacaacaaggatctaatcaaaaagattctggccaacaaaactcaaataacaaccaacaacgttaa

SEQ ID NO: 61473 - DNA, 555 bp, Acinetobacter baumannii
atgactgattttgttaaagaattagcggcttgtcgtgttgagggaacacaacttcctttttatcttgaaaaagtacaaggttatacagagcaagaagtagagctaattgctaaaaatcttaatcttgatatacatggacaatttagagattttttacttcaaataggaaaatgttcagggggcttattatggagtgatgagttctacatgtatgattatagatgtgaaaaagttttttttatcaactatcaaaaaaatattcaagaagatgattatatgattgataatcagggagaattagatcctgtaggggaaaaaatattttttctatcctgtgaatatgaaacctatctgtattatttatttacttctgagcaggataattatgtatggttccttgatagtgctgaatctgtaatttgggaaaaaactaatatgaccttattagattatctaaaaaattatgtttttgaaaagactaaaagaaatagatttatagattttgatttaacagaagaacaaattaatagatctattacaggtcgtttactctag

SEQ ID NO: 61474 - DNA, 570 bp, Acinetobacter baumannii
atgaatgcatttgatgaaaaagttattagagcctatcaaactaaatcaacgattagggtataccaagcattttcttctgaactagcagatttagctattataaataattcttttaaagacaacccattttttaaaactacaagaatgacttggatcaaaccttcttttctatggatgatgtatcggtcagggtggggaatgaaagataaaaatcaacaaagaattcttgctatagacattacgaaagatgggttcaattgggcactcaaccatagttgttctagccaaaaaccaaaagatcttttagaaaatgattggaaatttttaaaacaaaatatacctgtcagaatacaatgggatccggatagaaatatttttttagaaccacaaaagtatagaacaattcaaataggccttactggaatagctgttgaaaaatacattaatgattgggttttaaacattactgatatcactgaacatgttaaaacaatttataatcttattttaaataataaaattgaagaagcaaaaattcttttacccaatgaaaaaatatattccatataa

SEQ ID NO: 61475 - DNA, 501 bp, Acinetobacter baumannii
atgaaggattatgaaaaatatatagaagattgttacctaggtaaaattagcatacctatattaaaagaaagaataggatctaaagatatagatgaatattcttttgcaaaacaattattgaagatcgcgaaggatttaaaaaatagtgatgctatccatgtagcatttcttatatttgatgaatatgaattaaaagaagaagatttcgatctattagatattttcttctctcattggcacgatgcacatgaagatatagcttttacagtaagtaaaattaaaaattgtaatcttgttgatttctttgataaagctattaactttattccgaattacatggtagatgatagtgcgagagggcttgctagaaaggtattttttggtttaggtgagaatataagttgccctaattctttagaatgtttaataaaatatagtacatcttcagatggtgtattgaaaggatttgctcaagagcaatttcagatatatggtaagtaa

SEQ ID NO: 61476 - DNA, 354 bp, Acinetobacter baumannii
atgaaaaagcaaatgaaatttctaatttctttttttaccactttttttctgttacctactcttgcttttccagcaacaaattataatcaagatgtaacaggaacaattgaaagaatttatctaaatggcgatatctatttttttcgtctaaatgggaatgatacctgtgcaaaaaagacgaatggatataatgaatattatatttttaatgtaagccaacctcatgcaaagagttggtatgctttaatattaacggctgctcaaaatagaaaacctatcacggttagagtaaaaacagattgtaaaattgatgctcaaaaagaaattatgtatatttttcaagactacacttaa

SEQ ID NO: 61477 - DNA, 273 bp, Acinetobacter baumannii
ttgaaatatcccatatgtttacaagaagtgatattaaatattaaacacatttctgatgaacaaactatctatgctgagcaaccttgggatattacatcccaagcaattgctctatcagacagcgataaaatggaaattattatcgaggataaatattacagttactttcttgaagtatttattattaaagaattgatagaagacttacctaattcagtaagtagtcaagacctagtatttcggattattgaatatgcaataaatgatgcatga

SEQ ID NO: 61478 - DNA, 498 bp, Acinetobacter baumannii
atgtcaaatattaagattaaaattttaagtattaacgagcttaaagatttcagaactatcagactttccgctttaaaaaaatcaccaaaaatgtttggatctacctatgatgcagaggtagagagaccttcaatattttttgaagcgtgcctatcaaattcaatggtatttggtgcctactataaaaatgaaataataggcttagccacattaacacaagagattggagtaaagctttctcataaagcatatttgtcgagtgtgtttattgagcctgaatttcaacaaaaaggtattgcaagtcatctacttaatgcagtcattgaatatagtaaaaagcacgttgaacaaattttacttactgttgcagaagacaataaagcagcaattcacctttataaaaaacttggttttcaaatctatggaattgaagaaaaagctctaaaagataatgatgaatatattgacgaaattctgatgaagctttttgtgatctaa

SEQ ID NO: 61479 - DNA, 678 bp, Acinetobacter baumannii
atgcgcctaaataaagacaatgtagttaatgctatatgcatttttggaatagtagtttccatatgttttatgctaatagtaatgttgaaatatttttatggacaaaaaattgatatatcttttattaaggatatattctcaataggagctacactgtttgcagccttaattgcaatatcactatttaatgattggaaagatcaacataataaacaagtgaactctgaatttattatgaaattctacgatgacttatttgatatgaaggcagaagctatctccctcattggcttcttgatggattatactggtttagaatttaaagaaaaaatcgaacaatataaagaattagaaaaaaataatatttttttatgtaaattaaaagacttttctatgcaaaaactatcggatctggcatttataataaatgaagatgactacaataagcattttaaaaataaaattgatgaactgggtagaaaattagaatccattcttttgatatacaacatatttcttgagacttacgatttggataaaagagaaaaatcgaaagactcaagaattatcaaagaagcagaaaataaattgttagatagtctgccaaccatgcaaggtgatttatataatcactatcgagcatttatggttgaacttaagaaatattaccgtgcttaa

SEQ ID NO: 61480 - DNA, 348 bp, Acinetobacter baumannii
atgttagaaaaacttttatattcattggggttaactatttctctagccgtattagttagctgttctaaacaagataaaattaaaccgcttcctccttcggttgaagagcagttcataaaatctagccaacagattgatacgatgctcaatgctctagagaatcgagaggtttctttaagccaaaagcgggaaatattgtgcaaggactatcctgaagtctataaaaaacaatacatgccagcattactaatgctttcacctaaagtttatacaaaagaaactctattaagagattatggggctgtgattagtttttataaaaaagcttggtccattcattgtgcctaa

SEQ ID NO: 61481 - DNA, 1446 bp, Acinetobacter baumannii
atgagtgatgtaacttttcaacatgctgaatatgttaagaacttgccatactggcaaaaacttgatgatgtttgtgaaggtgaagatgcagttaaggctaaaggtgaaaaatatttgccaatgccaaatgcacatgataaatcacctgcaaataaaagcgcttataaggcttatcttacccgtgcagtcttttatgaagtaacagggactacatcaaatagtttagttggagcagcttttgcaacagatccaagttttaaatttcctcccgagcttgctcatttagaacgtaatgcgaatggagccggtttaagtacttatcaattggctcaaaatggaattcgccacttattgaagcattatcgttgcgctttatatgttgattatcctgatgtgccaccagctcgtaatctagcggaatttaaagcgcaaaaagcctatcctatgattcatttgctcaatgcccttgatgtagtgaattgggattcagtaatggtcgataaccaaaaaaaactttgtctcgtggttatccgtgaatttaggtctgagcgtggtgctgatggctttagtaaaaccgaacaagagcaatatcgtgtacttcgtttagagcaagagggtaatggagaatatatttattccgttcaggtgtacacaaagggtgaaaagggtaactgggttggcggagataagaagtttccaacagattacaacgggaatttctggacctatataccttttacatttgtaggtgcaattgataattcagaagagattaaaaagcctccattacttcctttggctaatctcaatttagcccattacagagacagtgcggactttcaagagtccgttttttatatggggcaacctcaatattatgcgaagggtgttaattgggagtggtatgaccaagccaagaaacgtggcatctacattggagcgaaagtacttttgcctttacctgaaaatggtggtttaggaattgtacaagccgaccctaatactcttgcccgggaagcgatgaaagataagtgggaaaaaatgaaggagatgggggcgcgtttaattgagaagggtactgcgggtaaaaagaccgccaccgaagcgaatagcgatgacgccgttcagcattcagttctttcgctctgtgtagtcaatatgaatgaagccttgtcagcagcattacgatgggcagcaaagtttgtaatgccagatgttgatgttctctctaaggacgaattggtatttgaaattagtcaggaatttaacaagcaaggttatttagctgagttagctagacagttatttgaagcagctttacaaggccgatcttcatttaaatcatggtgggaatacaaccaaacaggtatgttccctaaacaaaaatatgaagaagagctacagaatgttgaagcagagcaagatggaactttaaatcaaaggtag

SEQ ID NO: 61482 - DNA, 237 bp, Acinetobacter baumannii
atgacaattatcacattacgagatgttgagacaaatgagcgggtaattgtaaggtctgtaatcgacccaatcgcaagaaaagatacaaagggcaacttacaaattgttcaagttcataagtggctatatgatgaatctgatgattttgttgatgaagagttctatggtgctctgaacagtggaaaagttggaatgtatgtaagttttcagtatgtgattatgaaaattgaaaactaa

SEQ ID NO: 61483 - DNA, 2034 bp, Acinetobacter baumannii
atgattattttaggattaaaaattaaccttattactaatgaaggttcattcggttttaaagaaacttttggcagaaatttaactgtaattaaagctggaaactcaggggggaaaagtactctagttagcacaattctttatgctttaggtatggaagaaattctaggtggaaaaggagaaaatgttttaccctactgtttgagtacatattttgattatgaagctagacgaatagaagtaattgcatctgagatttatttggaagttgaaaatagttttggtgagattagaacttttagacgagtaattaaagataagcataaaagttcaaagttaatagagatttattctagtagatatatttcttctaatgaaagattaggcatagctacagctacttatgtacatgatgcaggtggtgcgaaaagagaagagggttttcatttttatttggaaaagtttcttaatcttagcttgccagaagtgggtgccacatctggtggaatggcaaaattatatttacaaactatcttctcagcccatgctattgagcaaaaacgtggttggacagactatttagctaatattccattctatggaatacgtgatccaaaaactcgagtagttgagtatttattaggcttagaagtatttgatataaatgctttaaagaataatttagtaagtaatttagggcgagtgacgcagctatggcaagcgactaatagagaactacttaataaagccacagagataggacttaatattgaggggatatataaggaaccatccttactttttaatcctgatgaattaactgtttttgcaaaagataattacactattgatgagtatattattgtattaaaaagagaatatgaagagttagttcgtaaagagagagctgaatataatatttcttcagaagaaattttgaaacaaattgaagtaattactgatgagctacaactcctaacaattggttttgaacaattaaattctaaactttttaataaccgtatttcaatttctacatatcaagaaatgttatattcgattaatgaagatcttggaaaaaataaagctgctcttaagcttagagatcttggtgcaaaattagatcttgaaatttctgaagataaatgccctacatgttttcaacatataattgataacttactagctgaagaaattaaaggacctcaaatggatctcaaagagcagattgaacatttgaatagtcaaaagaaaatgttagaaaaacaaatagatgggattttagaagaaaatagtgtgattgaaataaaatttaataatacgaaaaaagaaatcaatagaaaacgtaatgtattagatagtttaagaaagtcggtaacttccggtactgagatggagaaattatacattagacgacaaatctatattgaaaatgaagtaaaaaatttagaaaattttaaggagagattttctaaatgtaagtcacaattgcaagaattattacagcaatttcaaattatagataaacaattaaaacaattacctaaggacttttattcagtaaaagattttgaaaaaattaaattatttgaaaacttttttaagggcaatgctagaaaattccattatgaaagtgcacaaatatcagacattatcatgagcaaagataatttattaccatctttagcgcatatggagttgcgagaaattagacgttcaagtactaaaacagactccagtgctagtgatttcgtacgtttaatttggagttatcttattgctttatatcaagcttcaaatgttgaacctaaaggaaatcatttgaactttctcttactggatgagcctggtcaacattctatggcacaacaaagtcagcgtgccctattacttgaattatctagttatagttcattacaaagtatagtcgctgcctcttttgatgaatctgaggcaattttccaggaagttactaatcaaataaagtttaagttaataacttggcaaggaaaattaattaaacctcttattaattaa

SEQ ID NO: 61484 - DNA, 468 bp, Acinetobacter baumannii
atgattgttgataatgctgccatgaaaattaaatttataagaagaccagctcctgtatttgttgagcacagacctatttataagataggacaaataatgctcattctatatatttcttcccgaggatataaatctagtttgactagattgcatttatttaattgggttttaaaagaagaaaaaaggaaagaaaatttaattaactctcttaagggcgggaatcttaaaatttctgcatggggatttgatccggccttaacaattgccatccgatttgctatagcggaaaaattattatttgaagaaagtacgggatataaattgtccgaattgggaatccaatttagtaaagagattatgtcagattctctactttttactcaagaaaaagaatttttattgtcaataaagaaggctttaacagaagcaatggtagagtctgtagccaaaagttggaaaagtctatga

SEQ ID NO: 61485 - DNA, 927 bp, Acinetobacter baumannii
atgtttaatacaaaatatgggccatttgatggaactacttgggaaaatttgtgtcaaatgatatttaaacgaaaatatgaacaagagtcttatcaaaggatgcctacttcacctggggattttgggctagaaggttttactttagtgacaggagtcggttttcagtgttattgtccaaataaacactatgatagaaaagaactatatgagaaacaaagagataaaattacaactgatttaaagaaattaaaagaatatacagaagaaattgcctgtcgattaggtcgaactaaactttcaaaatggatatttgtaactccagagtttgataaaaatgaattaattaaacatgctcgagctaaggaggaggaggttagaagttgggaattacctattttatccgatgattttacgattttattatatgatgctgatgattatgcattagaaattagagaatttcagaaagcattaggcgaagtattatttttttctcaagtacagccacttgcagaattggataagccaactgaagtatatgaagaaaatataaatagaaaaaataagttacgattaaaagaatttgaaagtagtgagacttatgaaaaaagactggcaaaattaaatgagatgactattaaacaatttctggaatgtgatccttatttaaaagcaatagataacgaatcaccaactttctacctgaaattattgcgcgttataacagaatttgaaaatactgtaaaagaggaaacacttacgtggtttggtaatcctaatgatttaaccgataaactaaaaaaattgctgaatgaacgaatcattaatgacttaagcccaaattcaaatatgactatggctgaggaaatttcaagaagagtatttgctagatggcttgcagtatgtgagttagattatgattgttga

SEQ ID NO: 61486 - DNA, 1785 bp, Acinetobacter baumannii
atgatattatatgatttgatagattcagaaaaaaagccatctttaacaagccaaattaatagccttttacaggctgcatttattaaagcaggattaccgacggagacggcattttcaactaaatcaatgatgactgatatagcagatttccaatgtaatggtgtccttcaagttgcaaaaagccttagaaaaaatccatttgacttagctacaactgtagtcaatcatttattaatttctccggaattttctaatgtttcagtttcaggtccgggatttattaatttaaaattatctgatgagatgttaaatagaagtgcatctaaacaattagaagacccgaatctcaatgtatcccttgttaacaataaacgttgtattcttattgattttggtggtcccaacgttgcaaaacctttacatgtaggacatttacgctctctcataattggagagagtgtacgacgtatttttgccattcaaggatacaacataatttcggatttacatttaggagactgggggctgcaaatggggatgctaatctctgaaattgaaattagataccccaatctacgatgttttgatgagctaaatccgtctttgtcaattgactctttgaaatgtatagaggagttggatagtttatatcctgaagcatctaaagcttgtcaaaatgatccagaacggatgcaatttgctcgaaaagttactgctgccttacaagcaggtcatgttggttatagacttctatgggaaaaattgcgttcgatatcgctgagtaagcaacttaaagatatggaattgcttaatgcacattttgatttatttcttggagaaagtgatgtgcagccccttattcctgaaatgatccaatccttacgaagcaaaggcatagccaaagagagtcaaggtgctctcattattgatgtttctgaggaaacagataaaaaacctatgccaccgttaatactagaaaagtcggatggttctgcactctatgcgactactgatctagctacagtgttagatcgttatattaaatttcaacctgaaagtattttatatgtagtagatcaaaggcaatccttacattttgaacaagtttttcgcgcggttcgtgttgctgattatgctaaatctactaaattaattcatattggttttggtactgtaaatggtgttgatggtaaaccttataaaactcgagatgggggagtagcacgtttatcagacctgcttgaagaagcgatacagaaagcgaaaagtcgtatagcccttagatctgaaacaacaggtgaggaaagtgaattactagcgcgtaaagttggtctggcggcgataaaatttgcagatttagatagtcaccggcaatcaggctatatttttgatgcagagaggcttgtctctttcgaagggcgaactggaccatatgtacaatatgcatgtgtacgtataagttctattctaaaaaaagctgaggaatatggttggagtaagggagatattaatattattgaacctgctgagcgtgaattagtaatagaatgtgcgcgttttccagattatattctttctgtctcttccacttatgcgccaaatgaaattactaattatgtgtttaacttagcacaagttttccatcgattttataaagaatgttcagttatgaatgctaataatgacgaaatacgttcatcgcgaatttcactgtgtatgttagcacatgctgttttatcgcgtggcttatggctactagggatagaggttccaactcgtatgtaa

SEQ ID NO: 61487 - DNA, 1083 bp, Acinetobacter baumannii
atgaactatattgtagatattcaaccagcaattcaattaaaaaataataatggctctttagtaatttatgatttaatttcaaaggaatcctatgaggtagaaaatatagagatattgcctatatttgctacaataacggaatctgtgccatgtcctataaatgagttaaaagaaataattctttcacaatataatatatcaaaggtagaggtggatgatatattatcaacatttattagttatggtttacttgctgaagctagtacaattgtacataaaaaagctggtgtgcaggagtgggttgataatggatggattgatgctttggttttgcatctttcttcaagaaatttaaattattcagatgatccagcatattttaatggtttggaaaatgaaagttttgaacccatagaaaatagtaaaattaaagagatagatgagaaaaatgcaagtaattactattatttgaatagtgatttagatgatatttcaggagaagatattcttcacggtattattggtaggagatcattccagccattttataaaaaagaatttaaccaaaacgatatagattcaattttatggttttcaaatcaatatgcaagaaaaagaggaacgaaaatatttgaatctagtgatagagactcagtatatgatagtgctttttcagcacttcatacatatatagtaatttataaagatttgttaattttagatcaagtcttatctgcgggttgttactattatgatttaaataagcatgcacttatactaataagagaaggaaattataaaaaagaggtggccaaattagcaattggtcaaaaaagagcagcaggcggtttagctactattataatagcagcagatttagaaaaatatagtacggtatataaacacgagcgaagttacagaaatttattaataaatacagctcaactttgccagttctatttagtgcaagcaacaataaaaggttttaatacatttataacacccgcaatacttgatgaagagatggcagattttttagatctttctgataatattcctttatatattgcagctattgggtga

SEQ ID NO: 61488 - DNA, 1104 bp, Acinetobacter baumannii
ttggataaaaatactatacttaaaatatgcccatcatttcaagttaggtttattggatctgagaagtatttatacagagcaaaagaccgtttggcttgggaacctgatattattaaaaatgaaatgttttgggaggtatgggaatttttcttgaaaccaagaagtgttttagaagcattagagagtattaatcatgaaaatgattatgttattaatgcaataaaaggattgatagattgtggaatactagaagtaaataatataaaagatggatatgggtataataagtttattctttcaaaaaaactaattaataatatggaaagtgttttctttcatattagtacctcacgaatgaattgggtaaattactctaaaagtaaagaaattcaagagttagatcataatgaaatggatatcaaggtaagagaagagcaaccgccatctaattttaaaaagtataggaattcgataccaaaatatgatttggctgaattaatacctttaaaattttttaagagtaaaataaataatagtattttctcaaaagaaattgaggggttaaataataaaatatcattagatttaattaatcttttattaaattactccatagccaaagttggtacagtagagatgtatgctacaggaaagcatatacttaaacctgttccttctggaggtgctaggcatacaacagaggcatatataattgttaatgatggagtagatggtatagattttggagcatatcattttaatgtaaataatcatagattagataaaataaatattagctcatttgatgttaataaactaataatagcaagtaatgtactagtgagaggaaaaggaaaaaaaccgaaggtgataattttacatagctgtatatttgaacgaagtatgtttcgatatagagaagcaagaagttaccgagtaatgcattttgatctgggacatattcatgcaaacgaaataatagtaggtagtattttgggtttagattgcacagaaagttactctgtaccagaaaatttaattgaatcaatcttgtctctaaatccattaaaagaatcagttatgtcatcttttattatatattga

SEQ ID NO: 61489 - DNA, 168 bp, Acinetobacter baumannii
atgaatgattgtaatgaaaatattaaccaatcaaccgaaagcttaatcaaatcaagtaaagttcccacaagaaatgactttaaagcagcattaaaaaagaactcaactcagactcatggagcattaggtaatagacaaggttgtgtcataataattaaacctatttga

SEQ ID NO: 61490 - DNA, 855 bp, Acinetobacter baumannii
atgcaaacaaaaaaaagaagtagtcgatcaagaagagattggattgatgttattcgtacagctatttggtacgcctatatacacactaattttccagaggccacaaattatcagatagaaaagatcattgaacctgaagcttttgtaaaagataagaaatattattttcatcgcaataaatggacgaaatatgaattgggaaggcatacacctgaaatggagcttattcgtaaagtaaatcaacatgtagaaggaacagcaagaattattaatcatgttttatgggaggctataagagggcgtaagccattgaattggtttgttgagagtggggtcaaccaactttcttgggatgttcaacaaattatttttaaatcagtgaatgaccaaaagaagttaattccggttttacagataagaaaggatttaagaagattagagcggttagcaaacttggatgcattagctgctttaatcatattcttaagaatggcagatgatcaaaatcaaacagaaattgctttaagtattggacagtcaatttatagaatattattggtaatgtgtgtgtttttgcctttagcaaagtttaggtatggattagcatttttaatttatctatatgtatttcctctctgtcggagtgagatgaaaaaatttgatagtaatgatgttgatgagttttttgatagatccagtaatttaaattatattttgttagcagctgaagatgaaaatattattgatttagagcgaaagggggttgctcaaaaaatgtacactaattttctatttgacattctagatggtaaacgtggtcttgaaatgattcgtgaattttctccgtcattttaa

SEQ ID NO: 61491 - DNA, 258 bp, Acinetobacter baumannii
atgaataaaacaattttaataagtgcagaaatgattgaacgtgatctatttgaacgtcatggtcccatgatttcagatgatgctttgagaattgccttaggatatcgttcctttgatgcctttagacaagctttaacaagaaaaactgtaccgatccctattttttctgtcgaaaaccgtcgtggtaagtatgcattagttaaagatttagctttctggttagcaaaacaaagaaatgaagcaatccaacaaaattaa

SEQ ID NO: 61492 - DNA, 690 bp, Acinetobacter baumannii
atgtaccctttcccacaaaacagaagaagtaatctgaatcaatttatttgggaacaaatagaaaaagcttttcaggttaaacctaacttagcatcaaccctccacggccaacgaaaaatttatcaagggtgttttggccgcagaacagccttatttcctagcactaaatctggtggggcaattccacttgaaagtcatctcgaattggctcaagcactctgccttgaacaaaatacccaagtgaaaagcttccgtactcaggcattaaaaatccccttatcaggaagtaatttctcctatccagactttttggtccaaaacatcgatggatcatttgagatccatgaagtgaaaccctctattagggctctggcacaagaagagctccagaagtttgaacaagtctctcagatacttaatcaaatggggatattgtttaagcttattgaccaactcagcttaccaacaacaaaacagcttcaaaatcttttatatctttatcaaaggggtcataaacgaatatggacacctttagaaattgatcaggcaatggatgcactggaggaaactgcttttcagaacattcaagcaatatatagatcccttcaagaatcggatttgccttgtgaattaggtgactatttactctttcataaaaggatcatcctagatacagaaggaggaatttaa

SEQ ID NO: 61493 - DNA, 675 bp, Acinetobacter baumannii
ttgagtattgatatatctcctattagtgggccatatgttgatgggttacctattaatatttatgaaaaatcttctgtagaaaacattaaacagattgatattaattcaatagcaaactataaaacacgcacaggaaggcataagaaaggcataaagaactcagtaagagctcactgctattctctacttgaagctgctacattattgaaaatcagtgtacgggctgtatcatatttgatacatgcaggttatctcacaagaaattatctcgatcctgcatctgtaaaagttgacaggatatctttagactcattgaaacaaaaaattgaaagtgaagactacgttagctttgaagcaacggctgagatattaaattgctcattgaattggttgaaccagtattggtgcaaaacaggctttctaaccattgaagagcttgtcttttggaggcttataaagaaaagtgagttgaatgaagttcttaaattaaaagatgaatatataactggggcagaagctagtacgctacttggtatgcgtcattcatatatcactaacttacaaaaacaacagctaatcaaaccttattatcttggtaaaaatgataaaaaaatcagattgtttaagcgagaagatgtacaaaaattaaaggactcaaactattttaaggcttaa

SEQ ID NO: 61494 - DNA, 2517 bp, Acinetobacter baumannii
atgattcaaaagtgtccccaacctaatacaattttgtcaccttttttacttgctaattcgcatttacttaagaaattagaaaggatacctttcgtaagtgaaattaatgaaaaagatctcgaagagacaatttatttagcttatcagccttggcgtgcttcttatccagaccatgtatttagatcacattggtctttggtaaaacaagaaaaaaattctagtggtaaaggttggatatatagctctttaaagctgttatctgaccaatacatatattttcgtggtgataaaatacatgttgaactctcattatttggtgattggcagaatttattaagtcgtgtttcggctctaccaattcgtattgctgcctattcaataccttcggttaaaaatcgcatgaggcaagtaccattacctaacaataaggggatctttacacctatttatccttatgaaccagtagtagactcttatatttcagatgaaggattacatgaaactcatttacatttaaatggtactacaagtgcagaatggtgttggttaagagcattatataatccgaaaaaagaattaaatgaattttgtgatcaatataaagaaaatcatttagtgagagagctttgtcattcaattaatcctgatttaaatcctagctctttaaatcaatggttaaaagtagccagattgttacgttgttggctaatagcaattgctgatggacgtgccgaattatattcaaaaaaaataaagcaaaatttagattctgtttataaaaatatttcattgcctcatgatatatcaagtctactattatcagatcatgattttccattttccgatagttcacctcctttattcggaaatataaattctttgattgaacaagaagttcaatggttatatgaaattattaagcaacttagtgataaaccttccaaattaacagatagattacttcatttgtatttattaattcaaaatcagtatttacaattagttgtacaacgtgaagatatgtatggatttgatcagtttcaaaaatatacttttactgacttaagggaagcatctgaaaaaaaatatctttatcgtttcctgcaattgagtggagcaaatccacagagaagtaatataaattggcttgaaggacgttttgcccctaagaatgaattgaaaaagaatgaaaaaatactaagtagcatactaaaaggctatcttttttatctttcatcaaatattgaaagtgactatcagcactgggaactttcacagatacttgaaaagcttaacgatcaagtagcactgacatgttctgtaggttctagaaaatattttaaattagctttagttatacattttattaaagaagaatgtaaatatgaaattggaaaacaagattatcgacataaaaagttaaggttaaaactaaaaaaccaatgtgatattttacaaaaaactttagaacgctggcctcggctctctcaatggattcgtggcattgacgctgcttcaaatgaattacatgctccaccagaaatatttgcgccattctatagagcggctaagcaatatggaatattacatagaagttatcatgtaggtgaagattttcctcatttaattagtggtattcgtcaaattattgatgtcatggacttacttgattttcaggtaggggatcgtataggtcacggcacggccgtaggtatggatcctgggatatggataaatagtatgccttcacaaattgtcatccaacgtggggactggcttcttgatttactagtaatttgggatattttaaaatcaaaacctgagtgctatgaagcaacacaaaagataaccaaggacatcaatattcttattagtgatatatttccgcatgatatggagatcaagcctgaaacactattaatgcaaatgcaatatcgtggattacttcctgaatatgtatttaatgctattgatgataaagatgaatggtgttggcaaacatcaacatttaatgacgtttggagacaagaagcataccttgttgcaaaagtcgtgaaaaaaaataagttagatattttagccaaatggtggcgtgaccctaatgtaattatgaagagtaaagaacatattaatgttgatacaaattatttggatatagaaacgttaatcttattacagcagtccaccctacgtaggcttgcagaagcacgtattgtaatagagacactacctacaagtaacgttcgcatcagtcaataccaacattatagagagcatcacgcattacgttggatgagagttgaaggctttcaaaagccaaatgatcctacaattgctgtttctttgggttctgatgatccaggtatatttgctaatgatatagttagtgatttttatcatttatatgcagtactggtagagaaagggttgagtgatagtgaagccattcaaaaacttcgagaggttaacgaacgtggcaaattatatcgatttcatgatccagaattgtttggataa

SEQ ID NO: 61495 - DNA, 459 bp, Acinetobacter baumannii
atgatttctggaattgatataggtggtgaagaagaggttgtattaaaaatattaaatgaaaataaaaaacgtttactagataatcgtgatcgcctttatcatcaaagacaagtgagaaaatctaaattgaatatagctaataatctattagaggaaaatagagaaaaaataattgtaaataataatgatttaaaaaatttaaaaaatattcttattcaattagattttaattcagatcttaattcagattataataaaaataaaataatagaagaaattgaaaataaagagcatgaattaagtgagcttgagaaaaatagagtaaatattgaaaaagatattgaactggagaatgaaatactagggagtataaattcaacaattagagagctaacatctgaaattcgtaaaattaacgctcaaattcgtgaactaaaagaaaagggggaactaacatga

SEQ ID NO: 61496 - DNA, 1551 bp, Acinetobacter baumannii
atggtcactaaacctagaacaaatacacgcacccgtaaaacccaagaagttgcacatatttatgacacttttattgtcggtgcgggtatttctggtcttgctgctgcaattaagctaaatgaagcaggcttaactaattttaaaattattgaaaaagcaagccgcgttggtggtacttggcgtgaaaatacctatccgggctgtggttgtgatgtaccttcggctctgtactcttactcgtttgctccaagtgcaaaatggagccatttatttgcacgtcaaccggaaatcttaagctatttagaagatgttagtcgtgagtttgatattgagtccttaattgaattcaataccgaactattaaaagcggaatgggacaatgtaaaaaatgtctggaaactagagacaagctctggtttatatattgctaaaacagttctatttgctacaggtccaattactgaagcccagattccacgccttgaaggtttagatacctttactggtgaaatgttccattcggcgaaatggaaccatgactatgacttaactggaaaacgtattgccgtgattggtactggtgcatctgccatccagtttgtgccccaaattcagcctaaagcaaaagaactgtttgtattccaacgtacagccccttgggtactgccaaaaccggatacggatttgggggagttgagtaaatcaattattgccaaatatccagcgattcaggccacttggcgccagactgtagcaggcaccttaaatgtcatcaattttggtttacgcaacccaaaagctttaaagcctgtcaattttgctgcgaaacaattgttaaagttacaaattaaagatccagttttacgtaaaaacgtaacgcctaattttgatattggctgtaagcgtattttatttgccaataattattatccagcattacaagcaccgaataccacacttattccacatggcttagttaaagtggaaggcaacaccgtggttgcagctaacggtgaacgccatgaagttgatgtgattatttggggcactggatttgaagtgtctcatccacccattggtaaacgggtacataacgaaaaaggggaatgtctggcagaactttggaaagactcctcaccggaagcttacttaggaaccaatattgaaaatgtaccgaacgcatttcttatgttagggccaaatgtcttggtttatgactcattcattggtcttgctgaagcccaactgcaatatattgtagatggtttattgcaaatgaaagcgaaaggtattgctaaactttctgtaaaatcagaaataattaaaaagcataatgagcttatacaaaagcatttacaaaccacagtattcaatagtggtggttgtaagagttattaccttgatgcaaatggtcgtaactttgcagcatggccatggtcattgaaaaagcttaaacagcgtttacatcatttaaatttagaagaatatgaggtcatctatgaagctgatcttgtaaaagtaaaacctaaagttgaagaagtcgcaggttaa

SEQ ID NO: 61497 - DNA, 192 bp, Acinetobacter baumannii
atgcaaaatcaaatagagccaactaataatgttgaggatttagatctcgaggatgaacaaaagcaggaaaactctgtgcttaattctgtgaatcctgatccagtcgatgtgacagatttgcttgtagaaatcgggaaagatatagctgattttgcatcatctattttagataacattgatatcaatttttga

SEQ ID NO: 61498 - DNA, 219 bp, Acinetobacter baumannii
atggttgaaagatatttgaaaggtgcagctttagaaacaataaaacagatatttaagacaattggtattaatttcactaaatcagctttaaaaaaggctttaccatttggagtaggagtcatagttagttctacgactaactatgctttaactaaatttgtaggaaagcaagcagtagactggtttatttgcgatgcagttgataaaaaggctacttaa

SEQ ID NO: 61499 - DNA, 693 bp, Acinetobacter baumannii
atgccatattcaactgattttttagaaaaagatcttattattgatccaggcctttcccataaagatcaaatttttgcatataacagttcttataataaactagtcaatatatctaatatggtggagaaagataaagataaagcaattgaacaaaataatgcagatttaaatatagaaattgatagagaagttaaaaggttaaaattaatctctgcaccattttacttagcacaagagaaagcaaaaaaccttaaatctgaaggctttattttagttgatctggatggccatattagtaaaaatgatactccttcagatcaagtaccagatcccttggtttccttatttatgatacttcttaatgccattatagatggtcttttagacaacctaaataccaaccatgttgatgattataaacaatcacttgactttgttactattactactcccatttttgtatttcaactattggcttctgatactctacaggataataatggagaaattgcacaactcattaaagaccctatagtaagaccaattgttatagtacaaaagatagtaaatgtattactaaataagccattagaaaatgataatggtgatgtaggcaatgctggaaaggcagttgtgaaaaaagttgaggagataattggtggaatcggaaaaagtttgggaataggctggtaa

SEQ ID NO: 61500 - DNA, 942 bp, Acinetobacter baumannii
atgtcttcagaaaaagatagtaattctataaataagagtaggtttgatggagtttttacaaataaaacttcatcaatctctacgactgatgaaaataatatctcaactttcactactacatcctcaagtaatatttataataaagatactttaataccaccttccacaaaacaagatacatcttttaaaaaaggaaaggcaagtaatagttcacaacaaacaaattctgtttatagtgacaaaccgaattctactacaagcttttctttcgaaagtccgggtaataaatcctttaatgctagttctctgaatcaacaacaagttagttttggaaattttgatgcaatattaaagcaaaaagttgataatattgaagaaaacttattgaccaaacagcaacttgctctgggttctcttgataaaaaattaaatgatgctgttagggatattgataagcataaagctgatactaatactgagcttaaagaaacacgaaactctgttttaggtactattgcacttttcgctgctttttttacctttgtatctgttaatgttaatattttcacaaaagccgagaatgtaactcagtctcttatatttatgctttctttttggctttgtattgttggatttatatctctttttttcctttttctaaataaacatgtcggtaccaaaattcataaaacagctgaatttttcacaactgttgcttgcatagttctgtctggtattttgatgtatttattattcaaaaatagtgatcagaactcttatcaaaagttgaatgagaaattaatttcaattcaaaatgaaaataaaaaactaagagaagaaaatgcagaattgaataaaaagataacaagtaaatttgtatttattgatgatcaaattatggaattacgtaaaaatcaataccaattaaatcaatctaattag

SEQ ID NO: 61501 - DNA, 468 bp, Acinetobacter baumannii
atgcggaccatctgccaacactggaagtgtattgtctgcaagtgtccaggtaccgtcaccattgttcactgctgggtaatccacgccatccacagtcactacaactgtcgcagtaggatcatcaatcgtaccggtcaatgcaggtgtggtgtcattggtagatgcatctgtgaagctcacgaccggtgcagtggtatccacagtcaccactgcagtatcgttacctacgttacctgctgcatctgttgcagtcacggtaatggtgtgtggaccgtctgcgagtgttggaagtgtattgtctgcaagtgtccaggtgccgtcaccattgttcactgccggatagtcaacgccatccacattgacaactacagttgctgtcggatcgttcactgtaccagtaagtgctggtgtgctgtcattcgtcaacacgtcatccagcgcaaccacaggtgctgtgatgtctgctga

SEQ ID NO: 61502 - DNA, 156 bp, Acinetobacter baumannii
atgaaagatgattctattgagcacattagacatttcactagttttttgcataccgcattagttagtgtatctgttctttttcctgatttaggtaaatatattcctgatgaagaagatgttagattttttgattgtgaacagacttataaattttga

SEQ ID NO: 61503 - DNA, 369 bp, Acinetobacter baumannii
atgaaaccagaacagtttattcgtgagtttggcgaaaagaaggcgagagaggttgttgagggtgcgcctagcaatgctgaaagctaccaagatggctactacttcagaacaaaaccacaatttgaatttcacaatggcattcatgaggcttggaacttaaccgataacgatggtgagtacttcaagaagcttggctttgaaccagtaaaaatcaatgacctgaaaatgaagttggaaagccttcgcatcgtggagcagtttggtggaattgagaaagcaaggttcacatcacgcaccaaaaatggaatgggttacttgaaggaatgtatcaaagaccacgaatcaatatacggaggcggggatgagtaa

SEQ ID NO: 61504 - DNA, 183 bp, Acinetobacter baumannii
atgcaagtgcatgagaaaagaaaactacttgaagccattgatgtgcttattcgtcgtcctgcttcagcaacagagacaacacttgctgaggcaatggcctacttcaagatgctaattgaggagtctacacaaggacaaattgaagtccggtattcagatactactcagcagttgccattttaa

SEQ ID NO: 61505 - DNA, 285 bp, Acinetobacter baumannii
atggctaaaactcaactacaacacttcattaacggcgaatatgttgctagcaaaggaaatgatttcttcgatttggtaagcccagtcactggtgaagtctatgcacaatcgccgaatgcgaccgaggcagaagttgatgcagcttatactgctgcaaaagaagcatttaaaatttggggacgtagtacaccttcgactcgtcaaaaagcattacttaacttggcagatgccattgaagcaaatgctgaccgtttaattgaagcgcaaagccgcaatacaggttag

SEQ ID NO: 61506 - DNA, 195 bp, Acinetobacter baumannii; identical to SEQ ID NO: 49678

SEQ ID NO: 61507 - DNA, 1218 bp, Acinetobacter baumannii; identical to SEQ ID NO: 49679

SEQ ID NO: 61508 - DNA, 273 bp, Acinetobacter baumannii; identical to SEQ ID NO: 53387

SEQ ID NO: 61509 - DNA, 525 bp, Acinetobacter baumannii
atgagtgcattagatttagaccaattaagtgaatatctagatggagaccacaatgagtatggtctagactttgctgcaactcatggatttttgtgtgcaattgcagtaggtcctcagtttgaccgttggttggatgaattgttcgaaggtaaccagaaaaaggttccggctgaaattattcaacaaatcaaggtttggctagagtcgattcgtcaagatttagcaaatgaaaatgggattgaatttccatttgaagttgaagaagctgacgttgaatcaagcctaggtgattggagtgtagggtttgttgacgcaatgttcttaaacgaagaggcatggtttgcccctgagtatgaagaacaattggttgatttgactttaccaatcatggtttttagcggaattgatgaagaagatccacagatggaatctttccgtcgcaatggacagttaatggatgaactggcagaagaaatcccagataatttgaatgagttatatttgatgtaccatactccaaattaa

SEQ ID NO: 61510 - DNA, 165 bp, Acinetobacter baumannii
atgcccgccgaaattgcagtcactgaaattgaagatgtattgcttgcaaaaatggttttctcactacaaatttcagcaagttgcttaaataaagactgtttaacttcttttttctcaacgactgcttcaataaccaagtcagcatcacgcagtgcttcaatttga

SEQ ID NO: 61511 - DNA, 1377 bp, Acinetobacter baumannii
atgattaaaaacaatgacttggataatctaagaaatttgaatagaaatattattcaaaataaacctaattctgctccagctactcctcaaaggcttttcgtttatcttgatggtatcgcacaaaacaacgatggccatgattatgcttatggaacaaacgtcctaaccaatgaaaaagtgaaagttagactaacaacaattgatgaaagaattgatgacttagttgactctggtagagcaaagaacagacaacaagttgcctctcaagtaacaaatcagtatcaaaactctgccaatcctcgtcaatctttaaaagcgcgactgaacagcaatgtagttgtacttagttttgatcaatcttttgaaataaagagtgaagataattaccggtcatatcgtagccattgggcagaatcagtaacaagcaatcctagttcacaactaattacagctcccgttcatatccaatttgtaaataatcaaagacctttcggacgtgtcgaaattttagaagagaatttcaaaatagatataggatcctcaaaggaaaaaataaaagatgcatttttaaaatctcttgtacatcaagatgagttcagcgctgaaagatccggatctttaaattatatactgcgttataaagatactaatgaaccaatctatcaaggttctttgcaaacttttttacaacaagtatctgtaggtcctgaccgatctatccggataccagcggatattaatactactctcaataatttaatgaggaagcctttaaccacgcaggatttcacacctgacgatagtatgatgtttaatcatgatttaaatcgaatattggtaaatagatttcttggtgttgaattttctcaaaaattagaaacttctaatccacaattacaagataacctacgtcttatttctggaaagttgaaaaagggtgaaatttatcttgatgcttattcaactcaaaatatcttttttggtagagatacacttaagacatatcaagcaaaagcaaatagaaatagcagtccattaaaaatctatactgttactgatatgcacaatgaacaaccagtttatcaaaaaggttatatacattctttagttggcattgatagacattcagacactttagctccttttgtcacatttagttctactactgatccaatggcagtatcaaagaaaattcaagatttaaatattaatgaggaaaatttaaagcgaaccatttatctaaaagaagaattccaaaagcatccattacctaatagtgctgctccagttgtggataaagaaagagcaaatatcaatagaattcgggaagaaatgcaaaatcaatctaataactcaataaattttaataatatttaa

SEQ ID NO: 61512 - DNA, 204 bp, Acinetobacter baumannii; identical to SEQ ID NO: 58862

SEQ ID NO: 61513 - DNA, 336 bp, Acinetobacter baumannii; identical to SEQ ID NO: 57864

SEQ ID NO: 61514 - DNA, 405 bp, Acinetobacter baumannii
ttggattatcaaatacttgaccttcagacaatatatgcaattaaagatagatgtaaggaaacattaaatattgaagaaaatgattatgaagaggaaaagtcattttcaaaacgcttttcatataaacttaaagataatattaaactcgatacaaaaatattcaatgaatgcattgatatggatttaaagaagttaccattatctcaagaaaatcttgatattttaatgaataatgaagattacttaaaatttaaagacaacaagtccgtgcgcgaacttttaaataaggctaaaagggacagtttcatttcaatttatgaaggtcttgaaataaaagatgcattatatactgagcacttaaaattcaaggacaataattacaaaaaaaatatcaaatctttataa

SEQ ID NO: 61515 - DNA, 1806 bp, Acinetobacter baumannii
atgactaatacttctgctgatcaaaataagcactcttctgatgaaaataaagtaaaacctttatgggagattcttaaaccttataaagataaatatttacaagtttggtggtatggagggatggcaaaaggaaaaaggcctggagatcagccacaggtccatgtcttattcagagaagttttagacgatttcagccccactgataattttattcagattaagacaaatattacagatcttgtatcttggcgagttgactcaatttggcatcagcaacgaaagattcattttctaaacaacgatatctatgagtttgttattgatcatactgatttcgaattcaaatttttaaaaatctatgagaatgtggatgagaagaagagaattaactttctcaaaaagcgagaagaatgcgaaatagtagattcgaaaaggaaaaaaaattgtatatcgttcaaattgaatcatcctgagtttgatgaacttttaataccatgtctagaatttctcactagagcttatggtttatcaactgagctcattcgagtgcttactacatacaatgaaagtgaaagagaatctcgattatacactccccacataggtgagaagggtctctggactgtgcttctcggagatggtattactcgagcagaccatgtttttgttgcatattataaatataccgaaatggctaagaatgctacacgcattttatttagtagtattgtagaaaattctaattttaaacaagccaatatctatccaaaagttgtcccttggcatgatgagaccttacctatcagagtatcaggattccgcttagctggaacaaaaacatttgttgtgacaagaatcagaggaatgaaatccccaaaggatgaccatattagaataatacctaaagtaactgaacgtattaataccaccacagacactgaccatcccaatccacccttacctcaattgggtagtggtgacattaatgtttctacaaatccaggtggtcgacgtccaccttctaatcatgaattaattgaagatgacttcgaatggatagatgggggccctactagtgagttaagtaaatataaatataaaaaacaggctaaacgtcccaaaaggaaaaagaaatatatagaaacacagacgataagtactggagccccagataattcacctgatgtattaaatagccaaatagtcccttcaaccaaagattcaaaagaattccaggcacctgaagatggccgaattattgggctatggaaagcatgccttaaagcaaatgaaataagtcccgatataatacaaggtgttaactattatacatttgaaaagggttttgacttttctgagcttcccatgctgatcggtttttttacagaatctgaagttcagacacacaaaacatggtgctatgcaaattcattcaaaactcagataagaggagcattaattatcagattaaatgtatctcagttagaaccggtttatatttttgatatacaaccagcaacgtatacctctactgtagaaggcgagactctaacaaaagaaagaggacatgcaggtttaattttccgtatgaaacaagaaaaaaatctggaacaattcatatctgatttgatgtatttgctccctctcaatgaaggctcatacccacaagaagtttttcaaagcctattagtcactcaaatatttttattcagacattcacatacaaaaggattaaccgagggtgaatcaactttattaaacgctttaagaaaaataggcatagacaaaatttcatttaaaaactga

SEQ ID NO: 61516 - DNA, 1674 bp, Acinetobacter baumannii
atggcgagtccggcacaaatcattcgacataaatttctcaatacattcttttcacgccactctatttggttcttgtgtatttttactgcactcacaattacgtggtttagaaccgtatatacgcctcatagtatttattattttatttcggatactttactcaacggtttatgggtcgtcagtagcgcattaagcttattaggtctatatgatgtcctacaaaatagacattcaatcttaagaaattacccgattatgggccatttccgttttttatttgaagatatacgccctgaaattcgccaatactttattgaagcggatcaagatgcccttcctttctcgcgtatgcaaagaagtttggtttatcaacgtgctaaaaatgagaatgcagataaaccttttggatcaattattgatgtctatcaagaagattatcgctttattgttcattccattagtccatgtccaccagcggatcctaagagtttccgtattcaaattggtaatgcccaatgccttcaaccttatagtgcatccattatgaatatctcggccatgagctttggtagtttaagtgcgaatgcaatacgtgcattaaacaaaggagcacaattaggcggtttttatcacgataccggtgaaggtagtctcagcccttatcatttagaaaatggtggtgatattgtttggcaaattgccagtggatattttggctgccgaactttagacggaaaatttgatgaacagaagtttgctaagcagtctcaattgccacaaatcaaaatgattgagcttaagctttcgcaaggggctaaaccgggccatggcggtattttacctaaacataagattactgctgaaattgccgagatccgtggtgtttcccgtgaccatgattgtatctctcctgcgaagcattcaagcttttcgacaccaattgaaatgatgcatttcttacagaagttacggactttatctggtggtaaaccggtaggtttcaaactgtgtattggtcaaccttggcagtttatgagtattgtaaaagcaatgcttgaaacaaaaattgtgcctgattttattgtagttgatggttctgaaggtggtactggcgcagcccctattgagtttagtgactatatcggaacaccattacgtgaaggcctacgttttgttcataatacacttgtaggtgctggcctaagagatcaagttaaaattggtgcaagcggtaaaattattagtgcatttgatattgccagcacatttgctctcggtgcagattgggtgaactcagcacgtggctttatgtttgcagttggatgtattcaagcgcaaagttgccatacaaaccaatgtcctgtaggcgttgcaacccaagataaagatcgccagaaagcactccatgtaccaaccaaagcagaacgtgtatttaatttccataaaaatacattacatgcattatcagaaatgattgctgcggcaggtttacgtcatccatcggatattaaagctcatcatttagctcaacggattaatgaccgtgaaattaaaaactatgctcaattacacttcttcttaaaagaaggtgagcttttacaatctgaactgaaaaatgatgatgataatttctattatcgtatgtggaatatggctgacgccaatcatttttaa

SEQ ID NO: 61517 - DNA, 1797 bp, Acinetobacter baumannii; identical to SEQ ID NO: 45629

SEQ ID NO: 61518 - DNA, 183 bp, Acinetobacter baumannii; identical to SEQ ID NO: 56222

SEQ ID NO: 61519 - DNA, 516 bp, Acinetobacter baumannii
atgaaattaacaacccaaagggctaatccccctttggacacttggtacacacttatgaagaatatttttgttttatcactagctcttttaggggcacccgttgcatatgcagattttcaaggcaaagttattaaagtcgctgatggagatactcttaccgttctagtaaacggaaatacacaagaacgagttcgtctggagaatatagatgctcctgagtcttcacaagcatacggccagcaagcacgaaatttcttaaatagtcaggtttatggaaagttcgtatatgttaagtctaataaaatggatttatataaacgccatatcgggactatatatcttggaaattacaacattaaccagtcaattgttcaaaatggttatgcatgggcatttcgtgaatatttaacggatcctaattatattaagtatgagcaatacgctagacaaaacagattaggtttatggaaagacaacaatcctatatatcctagcaattggagaagatctaagtag

SEQ ID NO: 61520 - DNA, 267 bp, Acinetobacter baumannii
atgcctgaaccaagtaaaagaaatgggggcaagctggttaaaaccccttcagaaaaagttgtggattatagaaatcgacgtaagcaaagaattgattcgggtaaaccggatcaatgggattgcaaagattgtgctcacatacttgcgactgattacctaagagaaaagttgggtttattagcatggttgagaatagctgaattaaatggctataagttcccacctaaaaaaaccaatcagaatgaaattaacaacccaaagggctaa

SEQ ID NO: 61521 - DNA, 267 bp, Acinetobacter baumannii
gtgaaaaaatataatgtaaatatatttgatggtaataatataattttaaataaaattgtaagagctagatctctggatgctgcatattattgtgaagatattattaatgatcttaaaaaggaggtaggtgtttctgtattaaatttaacttacagtactatttatgaatttcaaggaagtgcagaattatggctttcaaatactaaaacaggtagaaaaatgtttaggttggaagctataataggtcttaaaataccaatctggtaa

SEQ ID NO: 61522 - DNA, 546 bp, Acinetobacter baumannii
ttgtttattgattttctacctgaatttgaagcgactattcagcgtacaggggtgcaaaaagataacttattctattttgccgactgtttaagacaatgggttaattctattgatccagaggacaataatcgaaagcgcaaaagaaaattcttgtttaaacgtgatccgagggatatttcacagatttggttttatgagccatattctaatacctattttaaagtacctaccgcaaagcgagagataccaccgattagcttatttgaatataagcaggttcagaactatctcaaaagtgaacgtcaggatgttcagaatcaggatgagatttacaaggcgattttgcatctacgtgatcaacttaatcaggctagaagcttgactcgaaagcaacgtcgctcaaaccaaagaaaaaaggaaaatgcaaaagccattactcagctttccgaacagaatcagtctaaaaaggctgtagtttctgaaagtcttcagacaagtgatgatttgtggagtactcctttaactgcatttgacgatttaaggtga

SEQ ID NO: 61523 - DNA, 339 bp, Acinetobacter baumannii
atgaaaaaacaagttgataagatcattttagtactctttgggattcaagaaatcaatatgctaattcccaaaaagagaggaaaagggtatttaaaacagcctctaggccattatgattgtccacttgctgccttaagtagagatattggttttgattttaatggtttggatggctacttagaaattcaaactggatacctaacagataaggataaagtagatctcactcaacgcgtggttgtaccaataagtaacttctatgattataaatggcaagaagttgatagaaatactttttttgaaactctcaaagggaatatagctagggtggataagtga

SEQ ID NO: 61524 - DNA, 1377 bp, Acinetobacter baumannii
atgactcataaactgtttaatgctatcagtttccgtatagcaattatcttctctctttctaccgtcatcatcttaatgattatggggttggttattcatcaacttgtaatgcatcatttcgaaactcaagaccgcacacagttagaaggtaaaattcaacttgtagaaaaccttcttgagcaaaacccagccaatacggatgaattaaatatatatttaaaagatgcactaattggtcatcatgacctcattgttcagatagagcgccctactggacaaattatttttagttcagcaccagcagtgattaaaactcaagctttagtcaaatctagacatactccatggatagaatgggagattcagaacaaaacataccgtggtttagtttataaaaagtcttttgatagaaataagagtattccgtcagctcaaattattgttggaatagatacatcagagcatctacattttttaaatgactttagacggcagttattatatatcggcgttttaggcactatttgtttaatgttccttggctggtttgctgcatggaagggattacgtccagttcaaaagatggcaaaagtagcagaaggtatttcagctcaacatctttctgaacgcctagaagttgaaaacactccaactgaactaaaatcactggccatagcttttaacgatatgttagatcgtttagaaacagcggtagaaaagctctcagatttttcatcagacctcgctcatgagattagaacacctattaacaatttgatgactcaaacccaagtttgtttatcacgtagtcgagatattaatacctatcaggaggtcctcttttccaacctggaagagtttgaacgtttagctcggatggtttccgatatgctattccttgcgaaggctgagcacgggttacatttaccaaatttacagcaagttaatttagtaaaagaagtctctgctttatttgacttttacgatgcgattgctgctgaaaagggtatgttattggaacaaacgggatacggttctgttaaaggcgatccatctatgttacgtcgtgctctaagcaatttattgtcaaatgcaatcaaatatggaaaaacagattcagtaatcaaaatcaaatatcaacaaaactttgatacgactgtttttacaattgaaaatgaaagctcacctttatcatcagatcagctgaatcggctatttgaccgtttttatagaactgatgcttcaagacaacgtgtcgaagaaggtactggtttaggcttagcaattaccaaatctattcttgatgttcatggagctacgattcaagcaacttatgaagatggacgcattatctttaaaattgtctttaaaaattaa

SEQ ID NO: 61525 - DNA, 684 bp, Acinetobacter baumannii
atgagaatcttactggttgaagacgaacaaaaaacaggtgattaccttaagcagggcctctctgaagctggatatattacagattgggttacggatggattatctggtaaacaccaagctctttcggaagaatacgacttaattattttagatgtcatgctaccaaagttagatggctggaatatcattaatgacatccgtaaaagcggaaaaacaatgcctattctttttctttcagctcgtgatcagattgaagatagagttaaaggtttagagttaggtgccgatgattatctcgtcaagccttttgcttttgctgagctactcgcaagaataaaaagtttacttcgtcggggtctacaaaaagaagacagcaatattattacgattgccgatcttgaacttgatctccgtaaacgtcgtgtgactcgggctggacagcgtattgatctaacagccaaagagtttgcattaatggagttatttatgcgaagacgaggagaaattctacctcgtgctctcattgcctctcaaatttgggacatgaattttgatagtgataccaatgtagtggaagtcgctattaagcggttaagaagtaaaatagacagcaattttagccctaagcttattcagaacatacgtggaatgggctatgtgctagaggtagaagatgactcataa

SEQ ID NO: 61526 - DNA, 342 bp, Acinetobacter baumannii
atgaaatctctattccgtcgtggtttaactactcttctatgtgttgggactttagttgctggaactcaatcttgggcagcagatgctaaacaggcaaatagtgcaagtacagaagtcaaggtaaatccaaaagcgcaagaaaactgcaaaaagccttgtgacatgaagagtgaagagaaaaatcaacaagatcatagtcaacatgatcacggtaagatgacagatatgtcccaaatggatcactcaaaaatgatgaatatggatcactctaatatgggtgacatggatcattctaaaatgatgaacatggaccattctaaaatgaacatgtcaaataaataa

SEQ ID NO: 61527 - DNA, 348 bp, Acinetobacter baumannii
atgaatataaattttaagtttgttacttggcattatatcattccgattatttatctaagtgtttcttttttctcatgttattgtattttttggctatatggcaatgagattaacaatagtatactaaccattattggtactgttttctttttggaaggaaatgatctaaatagatctatttcttatctcaattggtctactgttgatggtgcttactcgttagttttatttatgcttgcgaatgctatagttttgagcattaaatttattatttggggataccctttttgtaaactaggaattaatattctagagaagcagcaaatgaaagttaaaactgctcactaa

SEQ ID NO: 61528 - DNA, 153 bp, Acinetobacter baumannii; identical to SEQ ID NO: 51143

SEQ ID NO: 61529 - DNA, 258 bp, Acinetobacter baumannii; identical to SEQ ID NO: 50278

SEQ ID NO: 61530 - DNA, 1296 bp, Acinetobacter baumannii
atgagtggttgcggttgtaataaaggaagttcttgtgacgacactaagcaaaatcaatctgaatcagaaatagattcttgtaagggtaaagattcagctactgaagaaaataaaagttcttgttgtggtaataaggtagaacaagtacctaattatgatgaaaaagattcctatggtagtaatcagccgtgttctggggaattgaattcgtgctgcggtccagattctttaaagtcacctgaattagttaatggggataaacctatagcgactttcatcagtgactataacattccgaaaatggattgttccgcagaagaacaaatggttcggatgactttatcttctttagtggatgttaagagattggtttttgatttgccaaaccggaacttaaaagttctgcataatggtgaaagtaaagaaatcactgcaaaactcgaagctcttggattcggagcaaagttaaataaaactgaatcttatgaaaataaagagcatgcacaagaagccagtacttttttaattccgaagatggattgttcggcagaagagcaaatggtaagaatggccctttctcccttgcatgaagttaaaggtttatcttttgatttagcacaaaggaagttagttgttttccatacaaatgggattaatgaaattactacaaaacttgaagccctcggttttggtgcaaaaattgttgaaacggtaaaagctacaggagaattgcccgagacacttgacccaaataatcaagcgaaagttctaaaattattattagcaatcaatggtgttctttttcttattgaattcataagtggaattattgcagcatcaacggggcttattgcggactctcttgatatgtttgcggatgctgccgtttacggtatagcactttacgcagtagggaaagcctctaaatatcaattaaaagcagctcattttgcaggatggattcaacttttattagctttgatcgttattgttgatgttgtcagacgctttatgtttggtagtgaacctgagtcagatttgatgatccttattggcttcttagcacttattgctaacgtatcgtgcctgtatctcatttctggacataaagatggtggagctcatatgaaagcgagttggatcttttccgctaatgacgtgatcgtaaatatgggagttattttagcaggtgtgcttgttgcatggactggttcagcttacccagatttgattattggcatccttgtttctctgtttgtgcttaatggcgctcgaaaaattttggcgttgagataa

SEQ ID NO: 61531 - DNA, 171 bp, Acinetobacter baumannii; identical to SEQ ID NO: 51532

SEQ ID NO: 61532 - DNA, 660 bp, Acinetobacter baumannii
gtgtatagaaaaaactcatggggtggttatgaactagccgttggaaaaaaagactctggaaccgagcataaatcctggtcagaatcctcacccaaagaactcattgattgggttaataactcatccctatatggggtatatgcaactgaaaaattacaccagttccgtcgattagtgcgatatctcaagcgctggagaaacattaagtttagtaaggatgtatgtagaaagatctattcaattggcttaacagtaatggtcaaacaacactttaagccgagtattgatgaagatggatttccaaatgatttacttgcactaaaagctacaattgattcgattcttgattggtctggatatttccaatggcactctgatgatcaatggaaagtaaaagtagaactccctgtttacccatcaagagatattttccacggtagtagcctaaatactggaaccagatttagaaatcaattaactaatttacgctcaacattgcaggatgtaattgatacatcagatgaaactgaacagtgttctttattaattaaagtatttggcgatgactttccaagtaatgcaaatactaacagtgcatcgaatacacagaaagtacaatttgccacagctggcgctgtagggacttctcaaggcgcatga

SEQ ID NO: 61533 - DNA, 405 bp, Acinetobacter baumannii
atgattaaacagaactttaaaccaagtattgatgaagacgggtttccaaatgatttactcgcactaaaagctacagttgattcaattctggattggtctggttattttcaattgcactctgatgatcaatggaaagtaaaagttaacctcccagtttatccatctagagatatttttcatggtagtagcctaaatacgggcactagatttagaaatcaattcactaatttacgatctacattgcaggatgtaattgatgcatcagatgaagctgaacaatgctctttactggtcaagatattcggtgatgactttccaaataatgtaaataccaacagtgcaagcacggctcaaaaagtacaatttgccacagctggcgctgtagggacttctcaaggcgcatga

SEQ ID NO: 61534 - DNA, 318 bp, Acinetobacter baumannii
atgctgttttacctgaaacaagcaatagaacacagtcaggaaaaattacattcgtttgaacaatccttaaatgagcaacaactaaatgatgcaattcgtacaggggcagtattacgggtccgccctaaagcaatgacggttgctgtgattttggcaggattgttgccaattctttggggaacgggaaccggatctgaattaatgagccgtattgctttacctatggttgggggcatgatttcagctccacttttatcaatgtttgttattccggctgcatatcagcttttaaccaaaagaaaactatcaattcattga

SEQ ID NO: 61535 - DNA, 348 bp, Acinetobacter baumannii
atggctggcgatgggatcaatgatgctcccgctttggcccaagctgatattggaattgcaatgggtaccggtactgatgtagcaatgaatagtgctcaagttaccttaattaaaggtgatttacgtggtatcgaaattgctcgctccttatcagaagctacagtaaaaaatatgaagcagaatttaatgtttgcttttctttataatgctttgggtattcctctagcggctggagtattgtatccgttcactggatggctgctttcaccaatgattgctgcattagcaatgagcctaagttctgcctcggttattggtaatgcattacgattacgtaatttcaaataa

SEQ ID NO: 61536 - DNA, 348 bp, Acinetobacter baumannii
atggctggcgatgggatcaatgatgctcccgctttggcccaagctgatattggaattgcaatgggtaccggtactgatgttgcaatgaatagtgctcaagttaccttaattaaaggtgatttacgtggtatcgaaattgctcgctccttatcagaagctacagtaaaaaatatgaagcagaatttaatgtttgcttttctttataatgctttgggtattcctctagcggctggagtattgtatccgttcactggatggctgctttcaccaatgattgctgcattagcaatgagcctaagttccgcctcggttattggtaatgcattacgattacgtaatttcaaataa

SEQ ID NO: 61537 - DNA, 300 bp, Acinetobacter baumannii
atgagttatctatttttgtcgtgtacagagcgaaatattaatatcctgatgctcgcaatcgtttatcgtggaatagcgatacctatcctttggacattgcttaataaacgtggaaattcagatacgaaagagcgtattgctttgattcaacgctttatagccatttttggtaaagaccgtattgtgaatgtgttcgcagacagagagtttatcggtgagcagtggtttacatggttaattgaacaagacatcaacttctgcattcgtgttaaaaaaacttcattgtcaccaatcatttag

SEQ ID NO: 61538 - DNA, 348 bp, Acinetobacter baumannii
atggctggcgatgggatcaatgatgctcccgctttggcccaagctgatattggaattgcaatgggtaccggtactgatgttgcaatgaatagtgctcaagttaccttaattaaaggtgatttacgtggtatcgaaattgctcgctccttatcagaagctacagtaaaaaatatgaagcagaatttaatgtttgcttttctttataatgctttgggtattcctctagcggctggagtattgtatccgttcactggatggctgctttcaccaatgattgctgcattagcaatgagcctaagttctgcctcggttattggtaatgcattacgattacgtaatttcaaataa

SEQ ID NO: 61539 - DNA, 348 bp, Acinetobacter baumannii
atggctggcgatgggatcaatgatgctcccgctttggcccaagctgatattggaattgcaatgggtaccggtactgatgtagcaatgaatagtgctcaagttaccttaattaaaggtgatttacgtggtatcgaaattgctcgctccttatcagaagctacagtaaaaaatatgaagcagaatttaatgtttgcttttctttataatgctttgggtattcctctagcggctggagtattgtatccgttcactggatggctgctttcaccaatgattgctgcattagcaatgagcctaagttccgcctcggttattggtaatgcattacgattacgtaatttcaaataa

SEQ ID NO: 61540 - DNA, 264 bp, Acinetobacter baumannii
atggaacagatgagtaaagacacagctaaagctgcttctgcccaagccatcggcatcattactgctattgatactaaagaaaatttactgactctcaaccatgaggctattcctgcaattaaatggcctgccatgacaatgggatttaaagttgttgatccggcattgttaaatggtttaactgtaggacaacatgtagagtttgagttaaaagctgaaggcgaaaactatattatcgttgctgttaaaccgaaagcttcataa

SEQ ID NO: 61541 - DNA, 264 bp, Acinetobacter baumannii
atggaacagatgagtaaagacacagctaaggctacttctgcccaagccgtcggcgtcattactgcaattgatactaaggaaaacttactgaccctcaaccatgaggctattcctgcaattaaatggcctgctatgacaatggggtttaaagttgctgatccggcattgttaaatagtttaactgtaggacaacatgtagagtttgagttaaaagccgaaggcgaaaactatattatcgttgctgttaaaccgaaagcttcataa

SEQ ID NO: 61542 - DNA, 4215 bp, Acinetobacter baumannii
atgctagaaaaaattgcttcaataacaagagatggtaatagtgcggttatccatctaaaagatgggactgaaattgttttagagaacttttttattagtgaaaatccacaaattcttttaaatgaggggcagacttattgggctgctaatttagctgaagatgctacaggacagaccactgttaattatttagaattaaaagagataccaaaatatatagatgcttcatcttctgtacccatctggtcttgggttgttagtgctttagctggtgcagggacagttgcattattatcccagcaagacgccaaagataaaacacctccggaaccaggtaaattgtctttccaaaatcttttagattcaggggagttaacacaagatcagatcacgaatgataacaagtttaatttaaaactcagcggacaggaaaagggaagtagcgtaacgtatttaatctctaccgatgaaggtaaaacctggcaggagacgacattaaatcaaaaagatttagctgatggtatttatctttataaagctgtagtgacagacgctgctggcaatacctcggaaacggctgtacaaaaagtggttgtggatactaccacaccacaagcaggtgaactgactctatctgacttgaatgatacaggcgtttcagccacagatcagattacgcaagataaaaacttcaatttaaagcttgaaggacaggaaactggtagccgagtaacatatttggtctctaccgatgaaggaaaaacgtggcaggaaaccacgatagcccaaaaagatttggctgatggtgtttacaaatataaagctgtagtgacagacgctgccggcaatacctcggaaacggctgtacaaaaagtggttgtggatactaccgcaccgcaagcaggtaaactcactttatctgatttgaatgatacaggtgtttcagcaacagatcagattacgcaagataatggttttactttaaagctagttcaaccgattgtgattggggaacaagccgctttactagaccactatgaagtttcaaaagatgaaggaaaaacttggcaagagacaacagctgatcaaaaagatttagctgatggtatttaccaatataaagctatagtgacagacctcgcaggcaatatctcagaatctgctatacaaaaagttattgtagataattccttaaatgttgaatcaaccacagtgattgtaaagccgattactgaagacaatacaataagtctagttgaaaaagatcaagttatttctataagacttgaaatagctaatttacccacagatttaaatagctcactgacatcagtaaatacgacattagacaatgttacttataattttcattttgatgaagtcacgcaagaatgggttactgaaattccagcagagtttctttggtcagtagagccgcaaaccaatatatcaattgagattagtcttactgatcaagctggcaatacagccattatcaaacatacccaaaattataatgtggatcatactccgaattcaccaaccctagattcactgactttcaacaatatagatggagctatcatttcaggtagtgcatataaaggaagtaaggtcgatatctacaataaaaatggtgattggcttgcaagtacaataactaatgaagaaggtaaatttactttacaagatctttcaattaactcaaatcaagaagtttacgcagtcgctacttataatgattatagcagtgaaaattcatcaattgggttagttactgaagttccagctattagtattacacgaattagtccagaaggcgtgattagtggttatgcgactgaaggtagtcattttattgtaaaagatcagaatggaaatattctacaagaatttaattctaatgtatttgatagctctggtattacaccatttagtgtaatggcattaggcgaagtaagaccatttattttgtccctcgatcagcctttagaggaaggggctcaaattattatctctacagataaagataatatttcaggccatccacaatatattactgcagactatactccagcagtatttttagaaactccacaatttgatattagtggtgaaactttatcagtacatgttaatgaacctaacagctttattcgtgcattttctggagaaggcaatttaattgctacaggttttaccgatgagcaaggctttgcaagtttacaagtgttccaatttttaaaagaaggcgaaacggttactgtacaagtagtagataaaaatcaaaatacgagtgaaaccctaatcgaggttccaaactttgcttatattccacatgttgaacgtattacacaagaaggcttaatttctggagttgctgaagataatagtacggtaattgtacgtgatgctgatggcaatgaattaggaaaggttacattaggtgatgataatagttggagtgactttagtcattttagcttgagtgtaaaccgccctttaattgatggagagaaaatttccgttcaaattattgataataaagggttaatgagtcctgagcaaaatatcatcgtagatctgactcctccacctgctccaacggagttaaatttcaatgatgctggtgatttagtttatggtcatgcagaacctttctctgaaattttagttaaagatgggcaaggaaatattcttaataaatggttttggaataactggaccgatgagagtggaagtttctcaatagaactaggtacatttttaaccaatgctgagacggtttatgtcacggctaccgatgtaaatggaaacgtaagtttagcagctcagatacaagcacctaattatgcctttgctccatatgttgatagctttacttcggatggcgtgataagtgggcaagctgaaaataatagtactctcgttgttaaagacgccaaaggtgacgttgtagctgaaattaaagttggtgaagataacggttggaatggatcaagttattttaaacaccagcttgatcgtcctcttgtcgatggtgagcagtttttcttatcaattaaggatgcacgtgggcaagtaagtgctgatactgtaattaccgctgatacggttgctcccgcaccagccagtaatttagttttctcagaagatggttcatatcttacgggtgtagcagagctgaatactacgattcaggtttttgatcataatggtcagctagtgaatatatggaataacaccattaactctgatggtacatttactatttacttaggtagcaacaatttacatggagaagcattcacagtcactgttaaagaccaagccggaaatgtgagtgaggctatttcaataaatgcgccacttgacgatattgcaccgaatccaattaaaaatattttacttgatgcaaatggtcaaaactttacggcacaagcagaagcaaatagtcagatcgaagtttttgattcattgggtaatcagacaggttggggttctacagatagtgcaggtaatgcttctggttctttcaatcaaacttatttacacggtgaggaactcacttttgttgttatagatcgagcaggtaatcgcagtatcgaatttaagcaaaatgctttaattgataccattgcaccaaatccgattgaaaatatcatcttcaacgaaaatggccaaagttttacagctcaggcagaagccggaagttctattgatgtattagatcagactggaaataagattggttttggttacaccgatagctcaggtaatgtatctggttattttcaacaagtttacttacacggtgaggaacttacttttgtcgtgatcgatcgagcaggtaaccgcagtgcagaggtcaagcagagtgctttgaatgatgacgtcgcaccaaatccgattgaaaatattgtattagatctcaatggccagaactttacagctcaggcagaagcaaatagccaaattgaaatcaaaaataataacggtgacgtcgtaggttatggatcagcagatagtgcaggtaatgtttcaggatatttgtatcaagtgcatttacatggcgaagagctcacttttattgtagttgaccgagcgggtaaccgtagtacagcggttaagcagaatgccttgattgatgatattgcgccaaatccgattgaaaatattatattagatatcaatggtcaaaactttatagcgtaa

SEQ ID NO: 61543 - DNA, 1005 bp, Acinetobacter baumannii
ttgtatagaagaaggatttctgaaatctatgttcagttattatttgaatatctggaaaaactaggacatgacccagaaaaggtattgggtgaaccgtggcctaaagcagattcaaatcatttagaaggcgtagatatcgatcattgggaaagtcttctcattattgccaaagattatttaaatgaccctttcattggtttacatgtgggtcaaaccattacagctcagcatctaggtgttttagggtcagtctttcttgcctgtgaaaatctgggggcggttttagaaaggtttgagcgatatcagcggcttgtctatgatgtttatcctgccactgtacgtatttatactgaatatgtagagctttcatgggatacaaaaggtgagcaagtcggccctttatcggacgaaactggccgtaccgttatagttcaattttgccgtagtctcattagaggaaaagaaagactcaaagaaatacattttattcatgaacggcctgaaaatgttcagccttatgaggagtattttggttgtcctgtgctttttgaacagcctgtggcactgatgcgttttgataaggaaatcttaagtctaccgcttaaaaactccgacgccgccttagttgccatactagaaaaacatgctgacaagttactggcaagcctgccacatattgatgaaattacagatcaagttcgtaaacagattgcttacttacttcatcaaggcgaaccaactattgaacagcttgcagagcgattaaattattcacgtagaaccttgcaacgccgtttaaccgaggcaggtacgaattttcggaaagaattaaatactgtccgttacgaattggcaaaatcgtatttaaaagatctaaggctacaaattgtagaaatagctttactgttaggttatgccgagcacagtccatttacacgggcttataaagagtggtcgggtaaaacaccacaacaagctagagaagaaatgaatgagttaaggtag

SEQ ID NO: 61544 - DNA, 285 bp, Acinetobacter baumannii; identical to SEQ ID NO: 61505

SEQ ID NO: 61545 - DNA, 495 bp, Acinetobacter baumannii; identical to SEQ ID NO: 56108

SEQ ID NO: 61546 - DNA, 366 bp, Acinetobacter baumannii
atgttgaaaattattaaagttatggcatttgttacgactgttgctgcactcagcgcttgtagtaaaaatgaagcaccaaagcaagaaaagagtgaagcaccgatggaacagatgagtaaagacacagctaaagctgcttctgcccaagccatcggcatcattactgctattgatactaaagaaaatttactgactctcaaccatgaggctattcctgcaattaaatggcctgccatgacaatgggatttaaagttgttgatccggcattgttaaatagtttaactgtaggacaacatgtagagtttgagttaaaagccgaaggcgaaaactatattatcgttgctgttaaaccgaaagcttcataa

SEQ ID NO: 61547 - DNA, 1527 bp, Acinetobacter baumannii
atgttaagaaataagttggcatttgcaatggcgggacttgtcggtgtgagtttggcagttggtggtggtgccggttattggtttgcccataaaagtgaaaaaacacaatcggacagtacgcagaagacagctaaggttttgtattggtacgatcccatgaaacctgagcagcattttgataagccaggtaaatcaccttttatggacatgcagctggttcctaaatatgctgatgaaggtgatgcaggcgctactgaaagtacagtagtaaagattgatccctctattcagcaaaatctggctatacgttatgccatggttgaacaagcaatggtaggaagtaacttgctgaccaatggcatattgcaggcgaatgagcgtcaagttgctattttacaaacaagagcaaatggatttgttcagcgtgtctatggtcatgccgttggagatattgtgtctcaaggtagtccgattgctgatgtttctatacccgagtggacgggtgagcaaacagaatttctggctgtgcttagaatgggtgatcgttctttaattcaggcaagcagacaacgattacagcttttgggaataccgcaagatgtgatccagcgtgtggaaagaacacgtaaagtccagtccactatgactttgagcgctcctgtgagtggatttattgattcactagaggtacgtagtggaatggccttaagtatggggcaaacgcttgccacaattaaagggtttaacccgatttggctagaagctgcggttcccgaagctcaaattgcaacaataaaacaaggaagtaaggccgaagtaacattggctgcctatacaaaaacagttacaggtaaagttattgatattctaccaacactcgataccacaagcagaaccataaaagttcgtattgaattacccaattcagatggtcgtttaaaaccgggtatgtttgctagcgtaaaattccttaataatccccaagcaagtttagtgatcccggagcaagcggtaattcgaaccggtacacggaatgtcgtcattgtggcacatgagcaaggacgtttcgaacctgttgtcgtgcagttgggacaaagtgacggtcttaaagtagccatcttacaagggctaaaagttgggcaaaaggttgtgatttcaggacaattcctgattgattctgaagcaaatttacaaggtgtactcgataagcttaatacaggaaaagctatttccacctctcaaactcaaaattctaaaccatccctatatcaaggtattggtagagtcgaaaaagttacacttcaggaaattacaatctctcatcaagcgattgcaggacttggttggggggctatgacaatgagctttaaacaacctgcaaagccttttactcaaattcggtcaggtgatcaggttagttttagctttaaacaagttagtgatgcttatgtcatttctaatatttccaagatatctaacaatatgtccatggcatctatgccgagtgaaaagggagatccatcatga

SEQ ID NO: 61548 - DNA, 1302 bp, Acinetobacter baumannii
atgtctcactatagaaaattgccgtccaaagtatggataaggcaatcgttaagcattgtgtgtctattatttttatatggccatgcaaatgcagaaatactgactttagagaacgcattaaagcgtgctgaggaaaatgcacctactttaaaagcaaattatgctcagattgaaggtgcagagaacaatgtactcgcttcaggtattttacctaatcccaaactatttgttggattagataattatccagtatctggagattcggcttggtcagtcacccaagagggtatgactatgcagaagataggcgttatgcaggattttccaaataaggccaaaagaaaggccgaagttgaacttgctcaagctgaactcggagttgcaaatagtcaaacacaaattcttcgaattgatctacggcaacaagtcgctacagcatggtttaagcgtttttatcttgagcaaaagctagcgctgatagataagttacttgcagaaaacgggctgcttggaaaactgactcaaacacaaataatttcaggtcaatcgttgatcgctgatgcaatgacacctaagcaagaatatacggtattacttgatcaaaaggatgatttatcgcgagatctgacaaaagcaaagctggagctacatcgtttagttagtgcaaatcctttggaaaactcctctcagatagagaccttaccaactcaggcccccaacctacaagttgataccgcgcaactatatcaccacctacatcaacaccctgaactgaaggcatttcaagcacaaaagcaagtcactgaatcaaagctgaaacaagcacaagctttacagaagccagattggggaatagaggtggcttaccagcatagagctccagagtttggagacatgattggagttcagttgacgacagaaataccagtattctcaagaaaacgaagtggtcccctcattcaagccgcgttagcagagcaaaatcgagtcactgcggatcaagaagcaaaatatcgtgagcatttaagcatgttggatgatggactttcagatattgaagctcttaatcagcaaattaagcgggctactcaaatgagtattccttatgcaatacaaaaagagcggttacagctcgcgagttatcaggcaggaaaagccaaattaactgatgtaatagcaacacgtcaggcattacttgaacaacgaatgcgtcttattgatcttcaacaacaacaatcaatgataacggctcaactgtactttaattttgttgaacccactcaaaaccataccgaggagtaa

SEQ ID NO: 61549 - DNA, 768 bp, Acinetobacter baumannii
atgaatcaaaaatatcaaattaaactttcacaacttataaaaggctgttttatatatgcaattgcgaattatgctttagcacagcctatagttgtagaaggtgtagtgccaaatgaagcaagtaaacaggctattttaatgaaaatgcagtctgtttatggtgcagatcaagttgtcgataaaatacaagttcgaccagttgccgctccaaatggatggagtgactctgtcacacgagttattacacctgatcttaaaaaagtttctcagggtaagttaagtgttaatggaacccgatttgaactgaccgggaaaatgctaaatccgacagaaatacagccaaccattcagtcttttcagagtttggtacagcctccatatcaattattttcccagctttctgtaaatcaggctgagcagaagattattgatgatgctttaaaaaatcgaattattgaatttgaatctggtagtgcagtattaactgaagctgggcaaaaaattcttgatgaaatggctgttgctttaaataaagtgggcgggaaaaaagtcaaaattgtggggcataccgatagttctggtgatgcgaccaaaaacttaaaactcagccaagatcgagctttagcagttaaaaattatttaattagtaagaatattcctgctgatcatttatctaccgaaggtttaggttcatctaagcctgtagcggacaatacttctgcggaaggtagaaagaaaaaccgccgaattgagttcaccgttttatag

SEQ ID NO: 61550 - DNA, 1416 bp, Acinetobacter baumannii
  misc_feature (1385)..(1394): n is a, c, g, or t
atgaacgtacaatcacaagaattgactagttctgacgcagagagcttgtctcctgctgatctgggctatagtcaagctaatagtcttagtcaagggcacccaaatttagcctcttttaagtatgagacagagtttaaactgccagtttcattaattcatgtgactcatgaatgttcattagttgaacataagatttggttgtgtctcttgaatcatgcttgtgaaattcttgaaaattttcaagataatggttctcatcctattgttaattttaaaataccgtttgatctattaagattcaaaacaaatagtcaacacagacttaaggagattaataaatcactaagtaatttaagagatgctgaaatacaaatcgatatcttcaatgcacaaggattaaagtcatcttcctcacaattcagctttattcaagattttgcgatttataataaaaatatgatgcttaatcgagaagaggtggaagctgataacaaaccagactaccaaagtcttgaaattgtatattcattacctcctttttttagttcaattattactgattctatttcgattgaaaaagtaaaacgtttatttagttggacacaaatacaatctttaagtacatcaacaggaagaaatggaaaaattgaattattaatttataaattactggaaggaactgatgagccaattactttggcatacgaaacattcaaacagtatctaggctatggtgatgtagaagaaaatcgttatttcttgcgtgatactcttaaaccagctttaaaaaattttaatgcaaacgaattgcttgaatatgaagttgaaacagactttataagaggtaagcgtcaaaaaatagagtcgataaaactattcaaaaaatataagtttgttgataatgaacaagctgctcatgcatggcaatcactcttagatagtccacctgagaatacaacaaatttacgaatccgtattaagcagttagtgccggaaaattatgatatcgatagtttaacagatgattctatatatacgattctatcgcgtcttaaacaatggataaatggattgaagaaaaagggccagacaattaactttgtcggggcatgccgttcagcatttaaagataagagctggattgattctaaaaatggtaaagggcaatcatcattaattttaggcgaagaagtcgatgatgttgttgtgaaggctagtagaacaaactacgaaagtgccgtgggtaaaggcgatattcccaaaacttcacaagagtctgattacaataatccagtgaataaaattgctaaatctgttgcgactttgatttctactttagctatcaaaggatctaaaacaacgttctttgaaaatatatctaaagnnnnnnnnnnaaagagaattttgacgaattga

SEQ ID NO: 61551 - DNA, 225 bp, Acinetobacter baumannii
atgctagacagagaaatacttctaaaaaaatggttagatgaatatttattagcaaataaatctaatgaaacaatatacacgcttaaaaatagtttaaatctattctttgaatataccaatttagcattagaggaaatcgaagcatcagatattagaacatttatagcttatagagctcaaaatggagtaggagtttctacactaaaaaaaatatctctgctataa

SEQ ID NO: 61552 - DNA, 471 bp, Acinetobacter baumannii
atgaccaagttgaagcctcaaaagattgtaatgaaaaagagtttatttactttttcacatctagacctaaagttaggtttgatctctcacggaaaattaaataatcgccaatatataaaaacctccttaaattcaatcctaatttttttaaaaaaattatcttctgctcttcaaaaatctcttcaattaccagatgatattgagccttggtcaaaaaagatacctactcctgtaaagaaatttggaatttacattgaaagttccatatggtttatttcatcactaaccacaacaacatactttattctaattgctttattaactattttaactaaaaaatcgctaactatttccgactttattacaatttttggtatttcagccctacttgtcgtatgttcaaaattcttatatgtggaaggtcgaagatgtttattaaaagcaaaaaattataataaaattaatatttaa

SEQ ID NO: 61553 - DNA, 486 bp, Acinetobacter baumannii
atggatagagagcatcgtggctattccgatatgctttattacttgctgcatttaaaagaaaagagagatatttttctgaatattttaatttttaaagtatcagttatttctcctccacgtaatagtattggaatagtttcaacaaactccgtacttgatcatattccaaaggaattggaaatatttgttattgaatattgtctaatatattattttaggccatcaattcaaaaaggtgatatggatacttcttggagtaagtttgttaattattttaggagtttacagaaggaaggaataaacgctttgtattttaagttggaaatgaaagaaagtacagaatataatagttggggtacacctaatttagctgccaagaaaagccattacttttcttggcaattaaataaaagtggacttcaaatggaaagattttatgaaagtaaagatttagatgaagaggtttttaaggatttctttatttaa

SEQ ID NO: 61554 - DNA, 849 bp, Acinetobacter baumannii
atgattgatgtcaacaaagacctgaccaatacaatttcaaagcctgatgagaaaaatcctagacctcgtgaaaaaagtcaaaataagaatgagcacatcaatactcaaaaaccaccatcaagaacaagcggtgaatatcgtaagcgttctgaggtggaaactggaaatacacaaggtattctgaagtattcttttaatgaaccaaccgatgatccaattgaagtcggagcatctaatcaaccttattcagataaatcagaagaggttgaaacatcttctgatgaaccctatggtaatcaaaatactaagatcaaaaaatctgaaacgacagatacaccacctagcagagatgaacgttttgacattcaatacattatccaatctctccaagaacttgcttctgaaatgggttctcctctggaacatctgtctgcaattaatgaacatggtgaaatgatagcgagtattaatttgcttcaaatcaaaaaacttgtgcctgaacccaagcatccctcatggattgattatgataaagggcgaaaattattgttcttaaaattagacttaaaagatcaaaatggattttcctatctcatcgatatacataaaaataaaaatcatgaagcattttgtgcctttcttatttttactcagaataagttaacaagcgaacaaattaaaaaaatctgtattgaactagaaaatgccaagggaataaaaaaatgggcactctactgtgatagtttcattcataaaatgattgcaataaaacatttatacgcaacaccagatgaatggaaaaatcgctttaaaaatttattcataagcttacagaaggacaaatcctaa

SEQ ID NO: 61555 - DNA, 171 bp, Acinetobacter baumannii; identical to SEQ ID NO: 51532

SEQ ID NO: 61556 - DNA, 471 bp, Acinetobacter baumannii; identical to SEQ ID NO: 57761

SEQ ID NO: 61557 - DNA, 417 bp, Acinetobacter baumannii; identical to SEQ ID NO: 56435

SEQ ID NO: 61558 - DNA, 627 bp, Acinetobacter baumannii
atgtgccaagcacagtctttatggctttgctgtgcctttttttctcccaaaaaagtatctcatttagaaacaacaagaatttataacggtaaaactatgccaaatttagaaacctcttccaaaaaattacatgttattcgtacggctataaacttatttactacctatggatttcacaccacgggtgtagatctgattgttaaaaaatccggaattccgaaagctacgctctataactactttcactcaaaagaaggtttaattgaaatgtgcatcgcctttcaaaaaagcctgctgaaagaagaagtactcgagattatttactcaaaccgttactgcacaccaaccgataagctcaaagaaattgtggttttacatgttaactctaacagtctgtatcatttgctacttaaagccttttttgaaattaaagggacatatcctcaggcttaccgtatggcaatcgagtatagaaagtggctaattcgagaactttttgacttaatttttagtttggaaactcgtgccttaaaacctgatgccgatatggttttaaacctaatagatggtttgatgtttgggtttttaagtaccaatagtttgagtgaaagtagttatagagcgtag

SEQ ID NO: 61559 - DNA, 405 bp, Acinetobacter baumannii; identical to SEQ ID NO: 61533

SEQ ID NO: 61560 - DNA, 705 bp, Acinetobacter baumannii
atgaacccattcaaaggccggcattttcagcgtgacatcattctgtgggccgtacgctggtactgcaaatacggcatcagttaccgtgagctgcaggagatgctggctgaacgcggagtgaatgtcgatcactccacgatttaccgctgggttcagcgttatgcgcctgaaatggaaaaacggctgcgctggtactggcgtaacccttccgatctttgcccgtggcacatggatgaaacctacgtgaaggtcaatggccgctgggcgtatctgtaccgggccgtcgacagccggggccgcactgtcgatttttatctctcctcccgtcgtaacagcaaagctgcataccggtttctgggtaaaatcctcaacaacgtgaagaagtggcagatcccgcgattcatcaacacggataaagcgcccgcctatggtcgcgcgcttgctctgctcaaacgcgaaggccggtgcccgtctgacgttgaacaccgacagattaagtaccggaacaacgtgattgaatgcgatcatggcaaactgaaacggataatcggcgccacgctgggatttaaatccatgaagacggcttacgccaccatcaaaggtattgaggtgatgcgtgcactacgcaaaggccaggcctcagcattttattatggtgatcccctgggcgaaatgcgcctggtaagcagagtttttgaaacgtaa

SEQ ID NO: 61561 - DNA, 348 bp, Acinetobacter baumannii; identical to SEQ ID NO: 61539

SEQ ID NO: 61562 - DNA, 906 bp, Acinetobacter baumannii
atgattagccttattaaaaatagtagttatggtggcactattgcaattttagtagcctctttcttatggggaaccacggggacagccgcagcatttgccccaacacttggtccacttgcaattggcgcggttgctatggggggaggtgggcttttacaggcattgattgcatctcgggccatccgggaacaccgacaatttattgggcgaaatatttctattattcttttaggtgttgtggcagttgggatataccccctagctttttattcttccatgcattatgccggaattacgattggtacggtggtttcaattggttcggctccactcattgcagcagttttagagcgattctttgaccgtaaagttttatctaaaacatggttcctaagttttgtgttgggtgttgtaggggtaagtttgttatctatgggcgaaagccacgcagcacaagagagtacaaatgaatggaataaaatttttggtatttttcttgggctggtagcgggtgcaacctattcactttattcatgggctgcaaaaagattaatagaccgaggtattgcagctaaagctgcaatgggcatgattatgggaggtggggcagtcatcttgcttccaactttattaattacaggtggtgggctactgcaaagttcaacaaatttacttgttgctggctatatgatgctgattcctatgtttttgggttatttgctttttggtttcgggttaaaaactgtaaatgccagtcaagccaccactttaactttatttgaacctcttgttgcagcgatttttgccattgttttggttggcgaaagtgtctcatggattgggtgggcaggcatgtttttgattttcatttgtattttgatgttatcaaagcctgaaaatacataa

SEQ ID NO: 61563 - DNA, 231 bp, Acinetobacter baumannii
atgttttgtgtaggtccacacgaatttcatattgatggggcgttaaggcgctattactcaggttctattgatattacctacaaccagaaagatcgatatttcttggtgggtgagaaaaagaaagtcaaatgtaaggcttgtaaggggtttggcttcattcgagatgatgggtgggggcatatagataaatgtgaaacgtgtgatgcagaaaaaggagccagccatgagtga

SEQ ID NO: 61564 - DNA, 1140 bp, Acinetobacter baumannii
atgtggtcatggtggctcagtaaaataaaaaagagtatatcacttgccgaagctcaacaaacaaagttgttttctacagcatatcgaaatcaaaattcctcctatttttttacgaaaattgatcgttggcaacatttattagaattaattatcgcaagtaatgttttagctctggttttagctttggctgaagcgcagtcttggcatgcattaaacggctcacgtcttttacaatatatcgtttttattaactgggtgattttgtctttttttgccttggttgaacattttcaggatttttttagtcagctacagcaaaaatatgctttggtaattggctttgttatgctgcaagcgatagttgtggtaaccaccataataagcaatttttttcagtttggagttttgaaaaaaacatctgttatagcgcaggactggagcatttattttaccaatgtccctttatatttaagttatggaatattattaggggccttttgtctgcgttatttatatgttcgagaacaatggttacaccaacaatatgcagaattaaatgcccgtattcaggcaatgcaggctcgcattcatcctcattttttatttaatagtctaaataatgtggtgagtttaataacgatagatccagataaagcagaaagtatgttaattagcctgtcacgactgtttcgggcgagttttcaagaattaaaattagtgagcttgcatgaagaaattgagcttagtaagcaatatttaatgattgagcaaatacgtttgggcgagcgtttaaaagtcgaatggaaagtggaaattgaacctttgcaattaaaacaggtcactattcctttattgacattacaacctttattagagaatagtatttttcatggggtagagccaatgatgggtaaagcaaccattggggtattggttgaaatattgcaaaatcaggtcagtatagtcattaccaacccttatacacacgatacaataaattcacggaaagggcatggaatcgctcttgaaaatgttaaacagcgcttaaaagcgtattatgggaattcagtgagattccaggtatataagggtgaggctttatataccactattatgagctatcaataccaatcaaaataa

SEQ ID NO: 61565 - DNA, 423 bp, Acinetobacter baumannii
atgccaactagatataacacaggcgagtatagctacgatcttgaatatcactatggagatatgtcagcaagcatggagatgcttagagcacgtttaattgaattgttgactcctcatctgtctgaccgttatgtgaaatggagagaagcatatttcacatggtttacaaagtgcggcggggattcggggtggatgttttgtgtaggtccacacgaatttcatattgatggggcgttaaggcgctattactcaggttctattgatattacctacaaccagaaagatcgatatttcttggtgggtgagaaaaagaaagtcaaatgtaaggcttgtaaggggtttggcttcattcgagatgatgggtgggggcatatagataaatgtgaaatgtgtgatgcagaaaaaggagccagccatgagtga

SEQ ID NO: 61566 - DNA, 651 bp, Acinetobacter baumannii; identical to SEQ ID NO: 59726

SEQ ID NO: 61567 - DNA, 444 bp, Acinetobacter baumannii; identical to SEQ ID NO: 51455

SEQ ID NO: 61568 - DNA, 1086 bp, Acinetobacter baumannii
atgaaacgcttaaagtcccttgtctcagaacaaagtcaaatcaagcacctctctacccgactatttcgtcctcaaacattagtattgtcacaaagcactccatttgaagtgattggtgaattcaaccaaacccgtgttcgttattatgcagctacagaaaagagctttagagaaccattagtatttgtggcacctttagctattaatatggcgatttatgatttatatccatatcgttctcttatcaaatacttccaaaatgcaggttttgacgtataccttgtcgattgggggcgtttaggctttaaagatagacatcttaactttttatcgtttattgaagattttattcctaaagctatagagcttgtacgcacacattcaggcagtgatcaagtttctctacacggatggagtatggctggcatattcgttactttatatacagcgcataatcatccgaattatgtcaaaaaccttatagttttaggtagcccaatcgatagctatgcttctggttatattggaaaactctaccgaaccataaacaacactattgcccgcaataaaaagcttcaggaacgtatctactcaggtttaccgaagcgtttaattcataccccgggcattttaaattccttaggctttaaaattcttgaccctaaaggctggttcgatggtcatattcaattacttaagaaccttaataatcttcagttcgtacaagaacatgccacattaagcagttttttaaacaatatgattgattatccgggaggtattaatcaggacatgttatttaatgtttggctgcaaaatccattaatacaaggttctattcagttaaaagataaaaaaatcgaattgaaaaatatcgactgttcactcttagttggagctggtcgtagtgatcaattagtgacggcagatgcagctcagccattaagtcagttaaccagtagccaagatgttacatttactcttattcctggcggtcatttaggtctaatgtcaagccaagcaagtgcgcaggaattctggccaaagctagcaacatggctgagtgagcgttcaacaaaaatctaa

SEQ ID NO: 61569 - DNA, 234 bp, Acinetobacter baumannii
atgagcacttcacgagtaaagctaactaagtcatttatcgatcaacttgaactcacaccggctatttatcgtgacagtgagattattggctttgctattcgtgtaaataactcttataaaacttacattgtggaaaagaaagtaaaagggaaatcaattcgttgtaaattaggggattacgaaaaaattactcttgaagacgcccgtatacttgcacagcagaagaagttatag

SEQ ID NO: 61570 - DNA, 864 bp, Acinetobacter baumannii; identical to SEQ ID NO: 53541

SEQ ID NO: 61571 - DNA, 525 bp, Acinetobacter baumannii
atgatggctggtattgagcattttactgcggtacttgccgaatacatgatgaagcacgaaaagaatttctactattcagatgatgccaaaagccgtgctttatggatgtggcatatgcttgaagaatccgagcataaagatattgcttatgacgtctatcaggttttaaacggtaattatccgttacgggcaacgggctttttaatggctttcattaccattttagggcttattccaacagcaactttatttgtacctctactgcgtaagccaaaagaactgttgaccagaaaattttggaaagatgcacgtcgtggcgtcaacttaatttttagtccaaaagatggcgtatttggtagcaccattggtcagatttttgattacttacgtccagacttccatccaaatgatcatgacacgaccgaatatctggagtactacaaaaagaaattacttaacgagggcggtgcaattgcgccttactttgtgaaggaatttacaccaccagttcgtgcagtttcataa

SEQ ID NO: 61572 - DNA, 162 bp, Acinetobacter baumannii; identical to SEQ ID NO: 46251

SEQ ID NO: 61573 - DNA, 408 bp, Acinetobacter baumannii; identical to SEQ ID NO: 50978

SEQ ID NO: 61574 - DNA, 1197 bp, Acinetobacter baumannii; identical to SEQ ID NO: 49425

SEQ ID NO: 61575 - DNA, 666 bp, Acinetobacter baumannii
atgacttcaaatttttcacaactcagcacagatgctttatctccggggcaactacctgaatccgttaaagcattgttaaaacgtgctcacatcaacagatatccaaaacgaaccacaattgttgatgccggaacagagtcaaaatctttatatttaattttaaaaggctcagtttcaattattttacgtgaagacgatgaacgtgaaattgttgtggcatatttgaatcctggtgacttctttggggaaatggggcttttcgaaccgaaccctcaacgtacagctgaagttcgtacccgtgatgtctgtgaaattgcggaaatttcatatgacaacttccacgaactgagcaaacagtatccagatctcagctatgccgttttcgcgcaactcgttcgtcgtttaaaaaatacaactcgtaaaatgaccgatcttgcatttattgatgtgtcaggccgtattgcgcgttgcttaatcgacctatcttcacaaccagaagcaatgatcttgccgaatggccgtcaaattcgtattactcgacaagagattggacgcattgtcgggtgttcacgagaaatggttggccgtgtattaaagaccttagaagatcaaggtatgattcaaactgacggtaaagctattctaatttttctctgtacacgataa

SEQ ID NO: 61576 - DNA, 423 bp, Acinetobacter baumannii; identical to SEQ ID NO: 51314

SEQ ID NO: 61577 - DNA, 1443 bp, Acinetobacter baumannii
atgaatttcttaatattgataaattctgcccccaactataaatatttcttttatgagttagcgaaagaaatagaaagccgtgggcacaacatttattttgctatagattctcatcgttcaaagtatcttgaaccattacctgaattagataataatcaaaattctttcttttttgatagctatttagagaaaaattttgataaaaatttaagtgtttcacacaataataatcaagaatattggggagattatttttattcggattatgatcgttttttaacgcatgattttaatttaaataaagataaaaattattggcttaatgtaaaagttagtctagattctttttttgaagatattataaaagataaacaaattgactttgttttgtatgaaaatatatcaaacagttttgcttatgccgcttatttacagtgcacgaaacttggtaaaaaatatattggattaatggggtcacgtttaccaaatcactttgaaattcaaaattctattgtggaggaggagttaaaaaaactagaaatcttggctcaaaaaccaataacacaagatgagatggagtggtttgaaaactataaaaagagtattgtagatattcaaccagattatatgaaacagaatggattggataatgttgcaatttctagaatagtgaaacttaataagtttttaaaagcattacgcttacttactattggttttaaatataaacattattacgattatcagtttggtaatccatttatggtccctattaaagcaatccgagtaaatattaaaagatatttaaatacaaaaaaatctcaaaaattttatataaataatgacgagttagaaatttgctcatctaaagaaagattttatatatatccaatccactttcatcctgagtcttcaacttctgtattggcgccggaatatacaaatgaatactcgaatattataaatattgccaataatcttccttttggtacttatttatatgtaaaagaccacaaaagtgcaaaaggtgtgcagagttatgaattctataaaaaagtaagttcattacctaatgttcgtttagttaattttgatgtgaatattaagagattaattctaaagtcattaggtgttattactgttaatagcacggctgggtatgaagctttacttcttggaaaaccagtttatcttttgggtagagtgttttatgaaaactttaataacgtatataacctcaaatcctttagagatattagagatattagagatattctggattttcaatttttagatgtaaaaaaagattttatcgcatataaaaaatatgtttataaaggtgtaatttttattgattatggtaatagagtcaatgataaaaaaagatactttagtgaattggtcgattcgatattcttaaatattaatacggatattgagtga

SEQ ID NO: 61578 - DNA, 426 bp, Acinetobacter baumannii
atgagtaacatcggttcttgtttatgccataaagtaaaattctctgtactttgtgaaatcaaaacggtttatcactgccattgcagcttatgccgaaaacaaactgggactggagcgaatgccgctactttagtaaaagaaaatcagtttaattggttgatgggtaaggaatatgtggctacctataaaaaagaaactggttttacttcatcattttgtaatagatgtggctcgcctgtccctaataaaattaatggtacaaactatatgtggataccgttggggcttcttgaacaaccgtttaaaccagatttaaaacttaatttttgtatagagtcaaaacatgattgggttgtgttaggggatgctcataaaaactttgcacatttacctgagttagaagagttcttaaaatattttgaataa

SEQ ID NO: 61579 - DNA, 423 bp, Acinetobacter baumannii
atgaaagcatctaaattgattagagataaaggactgcaatacgcgaaggaaatcgtagattcagcacccgataacgcaactgaatggaacgagggttatgagttccaatgtggtcaaagtgtagaaatcagcccagcagatcgtgagaagtattttgtagatttggttgagcttaaacgtctggtggagtctttgaaaatcatcagcgatttaggtggagttgagaagctaacgcctgcattcattacgacagataagcatgttggttacacgcatgttcgcatggtgggaaatgggagattgagctttcttgatgatttttgcgacttcattccagatggttccatttcaattaagcgtgtgatgactgctatccgcgaccacgaatcaatatacggaggcggtgaatctcatgccaactag

SEQ ID NO: 61580 - DNA, 1173 bp, Acinetobacter baumannii
atgtcatatgatccacaaatgaatacagtgttcctaccgatgggtagttcatctgttgacatttggggtggtaaccgtaatccgttagatcacaaatacaatacttctgttttggcacttgatgcgacaacaggtaaagaaaagtgggtatatcaaactgttcataatgacttatgggactttgacttaccaatgcaaccaagtctagtcgactttccattaaaagatggtacgactaagccagctgttgtgattggaaccaaatcaggtcaattctttgtccttgaccgcgtaactggtaaaccgctaactaaagtgattgaacaaccagtgaaagcggcaaatattccgggtgagcaatatagcttaactcaaccgcgttctgttgaaatgcctcaaatcggtaatcagactttaactgagtcagatatgtggggtgcgacgccgtttgaccaactgatgtgtcgtattaactttaagtcaatgcgttacgaaggtttatttaccgcaccgggtactgatgtttcattaagcttccctggttctttaggtggcatgaactggggtagtattgcttttgacccgacacatcgttacatgttcgtaaacgatatgcgtcttggtttatgggttcaactcattaaacaaacacctgaagatattaagattcaggcgagtggtggcgaaaaagtaaatacaggtatgggtgctgtaccaatgaaaggtacaccatataaagtgaataaaaaccgctttatgtccgctttaagtattccttgtcaaaaaccaccgtttggtaccatgacagcaattgacatgaaaactcgtcaggttgcatggcaagtaccacttggtacagttgaggacactggaccacttggtattaagatgggcttgaaagcaccgattggtatgccaactattggtgggccaatggcaactcaaggtggcttagtcttctttgctgcaactcaagattattacttgcgtgcttttgattcatctacaggtaaagagctgtggaagtcacgtatgccagtaggtagtcaaggtacaccaatcagctatgtttcacctaaaacaggtaaacaatatgttgtggttaccgcgggtggtgcacgacagtctccagaccatggtgattatgtgatcgcatatagtttagagaaataa

SEQ ID NO: 61581 - DNA, 555 bp, Acinetobacter baumannii
atgaatgcttctttaattctgtctcataaaaatattgatcatatttataatttggtgcaacaaatacttgattctaatttttatattcacattaatttaaaggttaattttgttaaaataaaaaaagctacttctaatataggaaatattttctgtgtggaaaatcgggttgatagtaaatgggctagatatagtatagtgaaagatattcttaatttaatgaactatattttacagcaagatactcggaataaatattttcatttaattaatagcgatgatgttatttcaatcaacgaacaggtttgggacgactctacaatatatatggaatatgtagggacaggattattttctcgttcaaagtacttcttcattgactctgctttaagtaatattctgattaaagggggatggttcttatatacattatttttttttatttttttaaaaagagagaaggattacagagtaaatgcaacattatctatttttttatttatgaatttttacaatcttttgtcaaaaagttatagtttgaagaatattgggtga

SEQ ID NO: 61582 - DNA, 162 bp, Acinetobacter baumannii; identical to SEQ ID NO: 46255

SEQ ID NO: 61583 - DNA, 162 bp, Acinetobacter baumannii; identical to SEQ ID NO: 46255

SEQ ID NO: 61584 - DNA, 1278 bp, Acinetobacter baumannii; identical to SEQ ID NO: 53800

SEQ ID NO: 61585 - DNA, 534 bp, Acinetobacter baumannii; identical to SEQ ID NO: 53801

SEQ ID NO: 61586 - DNA, 564 bp, Acinetobacter baumannii; identical to SEQ ID NO: 53802

SEQ ID NO: 61587 - DNA, 468 bp, Acinetobacter baumannii; identical to SEQ ID NO: 53803

SEQ ID NO: 61588 - DNA, 597 bp, Acinetobacter baumannii; identical to SEQ ID NO: 53804

SEQ ID NO: 61589 - DNA, 1119 bp, Acinetobacter baumannii; identical to SEQ ID NO: 53805

SEQ ID NO: 61590 - DNA, 576 bp, Acinetobacter baumannii
atgccagtatttaataaaattggtgcagtatgtgcactgacagctttattaacggtcggttgtagcacggtaagtaagactgtatctgatacagcccatgcacttaccacaatgcatactaaaaaagtggtggatgttaatgaagtgacagccaatggtataggtaaaaaaattggtacgattagctttcaagatagtgataagggcttaatcattacccctgctttagcagatttaccaagtggtactcgcggtttccacattcatgaaaatccatcttgtgcccctgctgttaaagatggaaaaccaggcgctgctttagctgctggtagccactataaccctaaccaagctccacatcatggtacgccaactaccgggcatttaggcgatttaccagcattagttgttgacaatactggtgtagctacaactgctgttattgcaccacgtttaaaacttgctgacattcaaggtcgcgctatcatgatccatgctggtggtgataactattcagattctcctttgcctctaggtggtggcggagcgcgaattgcatgtggtgtaatcaaataa

SEQ ID NO: 61591 - DNA, 1230 bp, Acinetobacter baumannii
atgaaaaatattcaaacgacagcgttgaaccgtacaacgttgatgtttcctttagctttagtgctatttgaatttgcggtttatattggtaatgacctgattcagccagccatgttggcaattactgaagatttcggtgtaagtgcaacttgggcgccgtcttcaatgtcattttatttattaggtggtgcatctgttgcatggttactaggacctttatcagatcgattaggccgtaaaaaagtacttttgtctggtgttttattttttgccttgtgctgttttttaattttattaacgcgacaaattgaacactttctgacattacgttttttacaaggtattgggttaagcgtaatttcagcagtgggatatgcagcaattcaggaaaattttgccgagcgtgatgcgattaaagtcatggcacttatggcaaatatctcattgcttgcgcctttgctaggacctgtacttggagctttcttaattgattatgtttcatggcactggggtttcgtggcaattgctttacttgcactgctgagttgggttggcttaaagaaacaaatgcctagtcataaggtgagtgtaaccaaacagccttttagttatctttttgatgactttaaaaaggtatttagcaatcggcagttccttgggttaacgttggccttaccgcttgtgggtatgccgcttatgctttggattgcattatcgccaattattttggtcgatgaactgaagctaacgagtgtgcaatatggcttagcacagttcccggtatttttaggtttaattgttggtaacattgttttaattaaaattattgaccgtttagctttaggtaaaactgtcttaattggcttaccgattatgcttactggtacgctaattttaatattaggtgttgtctggcaagcctatttaattccttgcttgttaataggtatgacactcatttgttttggtgaaggaattagcttctcagtgctgtaccgttttgcactcatgtcatctgaagtgtcaaaaggaactgtagctgctgctgtttcaatgctattgatgacgagcttttttgcaatgattgagcttgtacgttacctctacacccaatttcatttatgggcttttgtcttatctgcttttgcatttattgccttgtggtttactcaaccacgtttagctttaaaacgagaaatgcaggaaagagttgcacaagacttacattaa

SEQ ID NO: 61592 - DNA, 366 bp, Acinetobacter baumannii; identical to SEQ ID NO: 53806

SEQ ID NO: 61593 - DNA, 588 bp, Acinetobacter baumannii; identical to SEQ ID NO: 53807

SEQ ID NO: 61594 - DNA, 315 bp, Acinetobacter baumannii
atgcttactattatcgcggaaattcgtactcaatcgggtggacagcaccgccaaaacgtattggatgcctttcagaaaatcattccaactgttttagcagaagatggttgtcatggttatgaacctttggttgaccacatttcaaatgcgagcttccaaaacaaagaccctgacattattgtgatgttagaaaaatgggaaagtgtggctcatcttgaagcacacttagctacacctcatatgcaagcgcatcatgaagcagtcaaagatgatgtggttgacgtcaaaattaaaattttagaaagcggcgtataa

SEQ ID NO: 61595 - DNA, 369 bp, Acinetobacter baumannii; identical to SEQ ID NO: 53808

SEQ ID NO: 61596 - DNA, 1410 bp, Acinetobacter baumannii; identical to SEQ ID NO: 53809

SEQ ID NO: 61597 - DNA, 1233 bp, Acinetobacter baumannii; identical to SEQ ID NO: 53810

SEQ ID NO: 61598 - DNA, 885 bp, Acinetobacter baumannii; identical to SEQ ID NO: 53811

SEQ ID NO: 61599 - DNA, 861 bp, Acinetobacter baumannii; identical to SEQ ID NO: 53812

SEQ ID NO: 61600 - DNA, 444 bp, Acinetobacter baumannii; identical to SEQ ID NO: 53813

SEQ ID NO: 61601 - DNA, 906 bp, Acinetobacter baumannii; identical to SEQ ID NO: 53815

SEQ ID NO: 61602 - DNA, 1035 bp, Acinetobacter baumannii; identical to SEQ ID NO: 53816

SEQ ID NO: 61603 - DNA, 975 bp, Acinetobacter baumannii; identical to SEQ ID NO: 53817

SEQ ID NO: 61604 - DNA, 369 bp, Acinetobacter baumannii; identical to SEQ ID NO: 43520

SEQ ID NO: 61605 - DNA, 741 bp, Acinetobacter baumannii; identical to SEQ ID NO: 53819

SEQ ID NO: 61606 - DNA, 549 bp, Acinetobacter baumannii; identical to SEQ ID NO: 53820

SEQ ID NO: 61607 - DNA, 252 bp, Acinetobacter baumannii; identical to SEQ ID NO: 43517

SEQ ID NO: 61608 - DNA, 426 bp, Acinetobacter baumannii; identical to SEQ ID NO: 53822

SEQ ID NO: 61609 - DNA, 483 bp, Acinetobacter baumannii; identical to SEQ ID NO: 53823

SEQ ID NO: 61610 - DNA, 3867 bp, Acinetobacter baumannii; identical to SEQ ID NO: 53824

SEQ ID NO: 61611 - DNA, 819 bp, Acinetobacter baumannii
atgacccatttaaattataaaaatatcaaaggtcgatctaaggaaacgggtgccacacttattgttgtacttattattttattgattgttatttctgtcggggttttggcaataagagtagcgattgtttctctaaaagttgcaactaatagccaagttggccaattaaactttcaatcttcagatactccgttagagcttattgtacagatgaacccaaccacattgacaaatattaccaatgtgattggagcagcactgaaagcacatgaaagtaaccctggtgcggaatataacttttgctataaaccaacttctacatctgtaagttttgctcaaactcggggagcaagtttgcttcgggctggcagcgccaataatgctgtggttgaagacggtggagtagcaggtttctgcgatttaacaagtgactatgggagtaatcgtcaagcggtagttactcaagttgctgtcagtatcccaaccgatgccatggctgatattccgggttcaaatctacctcgggacataaatctttccgaaggaacccaacttcctaaaagcatgctatctacgcaacgtattcgggttattacaacagcgtttttacctgcttatgcctcaaattctttagaaactctgcaatctgattgcttaagtacgagttccgcaaaaattagtgacaactttgatagtgcattaacggataagcaaactctagctgattgtttggcaaaccataacgtaccttttagtactcaagttcaagaatttaactataccaataagctgactgaaatcacggcaccaggttcataa

SEQ ID NO: 61612 - DNA, 1002 bp, Acinetobacter baumannii
atggctcaatcatttatttctaataaagaacaaggttttaccttgattgaacttatagtcgccttagctttaggcctaatattagtggctgctgcaacacagctatttattggagggcttttatcgagccgattgcaaaaggccaatgctgaaatccaggacagcggtatttttggtttggaatatatggcacgtgatatacggcttctaaattatggaaatgttgtaaatccacaattaacagatacaacgccttggggaggtattgtattaacaggttcaacagcaacaaatgccaacaatattaattttattccaaaagttgatacaaatacttatattccggaagcgttattaagccgtggtgcaggtgatacggtaagtacagtgaataaccactggaaaggtctttcaaatatacagaatagttcaaatgctgaagaacaaagcgatcaactgactattcaattcattgccccgaccaatatgactaattgtgaaggtgtgaatgtgttagcaggggacctaatagttcaacggtattttttacgtgttgataataatggtagctctcaacaggattatgcacttgcatgtgatgcgaatacccctgaggttagtgctacagcgcaacctgatatcgttaatggattaggagatgcagggcaaattatactgcctcggattgaccattttcatgtcttattaggtgcgaaaaacgcagctggtaattttgcttattacacaattcctcagtatcgggtggctgcacaagctgctcgagatgcgagtccagctgtggctgctccaagaattctgtcaatacaaatatcggtattagcccgttctacaaataatgctcaaaataaagcaatagaccctaatcagtcttttcttatgctagatcagactgtgcatgctgccgataacagaactcgctttttgcgacgcgtatatagcgtgacaattgctttacgcaatgcaatgggggaaacactatga

SEQ ID NO: 61613 - DNA, 555 bp, Acinetobacter baumannii
atgcatcactataagcaaaaagcccaagctggggtgggcttactcgaagttttggttgccttaattttacttgctattggagttttaggttatgttgccttgcagctaagagctatggatgcatcttcagaagcattaagtaaatctcaagccattctagtgatgaggggattagcagaaaatatccgtacaaatagtactcaagctagccagtatcctacatttgtgcgtagttatagcaactatacatctgatactcctgcacccacgtcatgttttaactctctatgtactgcctcccaacttgctcaatttgatgcctatcaagcagctagaaatgctaatcaactgggtatgagaattacgatgtcaaattgccctggcgttacaaatacaatggtgcaacaacgccagtgcctatttgtcttttggggtaaaactgcgccagtgattactacaaatggaacaaatactagtgtggatgtttcaagttgtatgaataataacggtgtttacgtgaataattcaacttgcttaatgatggaggcatattaa

SEQ ID NO: 61614 - DNA, 474 bp, Acinetobacter baumannii; identical to SEQ ID NO: 53799

SEQ ID NO: 61615 - DNA, 951 bp, Acinetobacter baumannii
atggaaattgtgttagctaatccgcgtggtttttgtgccggtgttgatcgagccatagcaatcgtcaatcgggctttggaatgttttaatcctcctatttatgtacgtcatgaagttgtacacaataaatttgtggtagatgacttacgccaaagaggggctgttttcgttgatgagctggaccaagtgccagatgattctattgtaattttcagtgcgcacggtgtttcaaaagcagttcagcaagaagcagagcgtcgaggcttaaaagtttttgatgcaacttgtccattggtgactaaagtacatattgaagtaactaaatatgctcgcgaagggacagaagctattttaattggtcatgaagggcacccagaagttgaaggtacgatgggacaatatgacaaattaaaaggtggagatatttatctggttgaagatgaggctgatgtggcagcactcgaggttagacatccggaaaaattagcatttgttacgcaaacgaccttatctattgatgatacagcaaaagtgattgatgctttgcgtgcgaaattcccgaatattcaaggtccgcgtaaagatgacatctgttatgcaactcaaaatagacaagatgcagtacgtgacttagctgaaaaatgtgatgttgtgctggttgttggctcacctaactcgtcaaattcgaatcgtttacgtgagcttgctgagcgtatggggaaagctgcttatctagtagataatgcagatcaacttgaacaatcatggttcaatgatacttgtaaaattggtgttacagcgggagcttcagctccagaaattttaattaagcaagtgattcaacgtttacaagattggggagctcaggcgcctaaagaattagaaggacgtgaggaaaatattacttttagtcttcctaaagaattacgtattcatgtgacccaagcataa

SEQ ID NO: 61616 - DNA, 630 bp, Acinetobacter baumannii; identical to SEQ ID NO: 46366

SEQ ID NO: 61617 - DNA, 279 bp, Acinetobacter baumannii; identical to SEQ ID NO: 43507

SEQ ID NO: 61618 - DNA, 384 bp, Acinetobacter baumannii
atgtcccgtcaagtcattcatactgaaaatgcccctgctgccatcggcacatattctcaagccattttagtaggtaacacactatatctatcagggcaaattggtttagatccttacagtatggaacttgtagacggcattgaagctcaaatccgccgtgtttttgataaccttaaagcagtatgtgaagctgcaggcggcacacttgcagatattgcaaagctcaatatttttcttactgatttatctaatttccaactcgttaaccaaattatgggcgaatattttgctcaaccatacccaactcgtgctgcacttggtgtagcaagcctgcctaaaggggctttagttgaaatggatggaattgttattattaatcagtaa

SEQ ID NO: 61619 - DNA, 195 bp, Acinetobacter baumannii
atgtacgtttgcttgtgtcgtggcattaccgatcaggatattaaagacgctattgaaaatggcgctgaaagctatcgtgaaattcgcgatttgcttgatcttggtacttgctgtggacgctgtgcaccagaagcacgtgctattattagtgaagaattagcagaaattgctgctcgcatttctgtagctgcataa

SEQ ID NO: 61620 - DNA, 465 bp, Acinetobacter baumannii
atgaaaggcaatcgtgatgttattaatcagctcaaccaagtgctgtatcatcatttaactgcaattaatcaatactttttacactctcgtatgtttaatgattggggaattgaacaactcggttctgccgaatataaagaatcaattcgccaaatgaagcatgctgataaaattattgagcgtatcttatttttagaaggtctccctaatcttcaacacttaggtaaattgtatatcggtcaacatacagaagaagttctgcaatgcgacatccgtaaagtaaaagaaaatattgaagcaattcagaaagcggtcgctttagctgaaacagaacaagactatgtaacgcgtgatttggtacaagaaatcttagaaaaagaggaagaatattgggattggttagatactcaaattgatcttattggcagtgttggtatcgaaaattatatccaaagccaaatgtaa

SEQ ID NO: 61621 - DNA, 1629 bp, Acinetobacter baumannii
atgcaagtattttttctgttcctcgctgcaattttgttgggttttgcgtggttatcaccatttcactataacccttgggtaatgttttctagtgaaatgagtacttttgcggcaggtttaagtgtcttagctgtacttttttaccaaaatattaaaattccgcgtgcacaattattgctattgccatttactttaattccagtggtgcagtgggcttttggtctagtttttgattttagtacagctttgttaagttcactttacttattaggcttctggtttatggtcttggctggctataacctatctttagatcaaaaaaagagagatcaaattttttcaggttttagcttattaataattattacatcgctattcaccagtcttatagcaattttccagtggttaaatattgagtcacatttaatttatacacttcatctaattggtaatcgtccttacggaaattttggtcaacccaacaacatggcaacattcttaattattgggttgttaggatgtttgtatttatatgaaaagcataaagtaacactatggttattattgccttccgccctgattattctatttactattgcattgagccagtctcgaacgtcatggatcgtttttccatttttactcatctattggatggttaaacaatttggaaaacaaaaaaggtttagatttgttcaaggtttattatggtgcttagctttttttctaattgctggcctaatcttaccttatataactcaatttattgaattctctacaaatacagaaattactgaaacaagttcgtttgtcgcgcgtgcggggtcggggcatgagcgtatagggatgtggatacaaatattacatgctatagctcagcagccatggttaggatatggatggagtcaaaccagcgttgctgtagttgatagtatccaatatgggacagtgcatgtatggtttaatagtgctcataatgtgctactggatatcatcatctggaacggtattccaataggtatagtcattattgcttactttgcatgttggttcgtttggctaaatcagcaggctaaagaaactatctcaattattgcaattatgatggtgtgtaccgtactcattcatgccatgttagagtttcctcaacgctacgcttacttcttacttacttgtggtttcttattaggcataattcaggcacagacacctgtactcaaaggcattgtactcaacaagcaggttcttcgattaatttggggaataagtgtaatacttctggtagcaatttggcgtgactataatgtctatgtcacaaatagtaatttgctgtttaagaataaacagccaaatgctgagattttaggaagtaatcagatttttattttaacgcagtttgagcagcgtctaaaatggattgagatgaagcctgaaactactttatctgatgctgatttagcagtatggggtaattttgtgaagaataaagcgacgccttataacttgcgtaaatatgcccagctacttgcctataatggaaaagtagaacaggccgagcagcaaatatttattttgcagcatctttatcgacagcaaataactttggcagagttgttaaaaaataaataa

SEQ ID NO: 61622 - DNA, 462 bp, Acinetobacter baumannii
atgaatgcacaaaaaggttttacattaatcgaacttatgatcgtggttgccattattggtattttggctgcgattgcgattcctgcttatcaaaattatgtagctcgttctcaggctacagctggatattctgaaattagtaacatgcgtacgggttacgacaccgaattaaatgatggtacagcgattacctctctttctcaagttggctttactgcgacttcatctggcgcatgttcagccataggtgttacaaattttggtaacgatggcgcagctactaacgctattacgtgtactttaaaaggaaatccaaaaatcgctggaaagattatttcactttcacgttcagcgaccggtgcatggacttgtagtacagatattgccactactgacgaattcttaccaaaaggatgtacaggtggtggaacaccagccgttggtgcaattactactttgtaa

SEQ ID NO: 61623 - DNA, 561 bp, Acinetobacter baumannii
atggtaacaacatcagaaacaacccaaattattactcagccaaaaattgaggaatctgtagagccaagtttaaaacgttggtttaagcatttttgttatttaccagcaagtagccgatatttttccaaacaagataaacaagctattgctgaggctgtacagcaagcagagcatggacatgttggcgaaatacaggttgtcatagaaggccatatcccatgttcacaagcgtatagacaaaatacccgtttaagagcccagcaattatttgcagaactgggtgtatgggatacagagctcaatagtggtgtattgctctatttaaatctgtgtgaacgcacagtagaaatcatctttgatcgtgggattaggaatgcaactactgaacaaatatggcagcagatttgtaagtcgattgtagagcagcttcaacaaaagcaatatcagaaagcggtagttacaggagttcagcaaattggagaagtgatggcacgcttttacgatgaaaacatgccagatcaattaaatgaattaggtaacgcacctatcattatcaattaa

SEQ ID NO: 61624 - DNA, 1083 bp, Acinetobacter baumannii
atgagaaatactatattgcttcagcctaagcaaattagggtattcgttattaccttaattgttctctgctgtggtgttctgtttcagaatgcggcttggagtgagaataatattgccactgctaccgatgaaacggatacggtagtggcaggcaaaattattcaacagcagcaagctcaagcatctaagcctcaaataaattctcaggcagcttcgagtgtcacacctcaaacgcaagttgcaaatgatatggctgatggtgaatcaattcgcggtttaccaacattaaatcaacctgtcattgatcaagctaacgttttgagtgaaaccgaaaaacaacagcttagccagaaaatcttaaatctttaccaacaaggtaaagcacaaataggtattgtgattgtaccgactacaggtcaagaagatatttttgattatgctttgcgagtaggtgaaaaatggcaactcggttcgagtaaacgagataatggcttacttattgcagttgcaattaatgaccatagaatacagattctaactggatacggtttagaaggagtattacctgatattgttgcaagtcgaattattcgaaatcaaattaccccttattttaaacaagcccaatatgctcaaggactaaatgcaggacttgatgaaattggaagaattttaaatttagatccggaagttgctcagcaagctgctcaagatttaaaagaacgccaacatcaagctgccgaagaacaacaagccaaacaaacaacgcttacaatggctttatttattcttgttgctggagttgtaggatcatttattgtcggtcgaccacttagcgcgtcaacagctggcgttgcggcagcggtagctggttttgtaaatggtgctggcgtaataatgagtttactactgggttttggtattttctttttactcataacttcaattgcccaactgattttacaggctattctgagtggagctggtggcggcggacgcggaggaggctttggcggtggtggcggaggctacggtggcggcggtggacgttttggcggtggaggtgcttcaggctcatggtaa

SEQ ID NO: 61625 - DNA, 591 bp, Acinetobacter baumannii
atgaaaacgtttaaacaacttgctatcgcgacaacacttgccagtaccctattattttcaggctgtggctataataccttacaggttaaagatgaagctgtaacagcggcttggtctgaagtacaaaaccaatatcaacgtcgtgccgatctagttccaaatctggtaaatgttgtaaaaggttatgctaaacatgaagaacaggttttaacagaagtcactcaagcacgtgccaatgttgcaggcttgaaggttgataaagaagtattagaagacccagcattacttgaaaaatatcaacaggcacaaagccagttaactggggcattatctcgacttattgccgtttcagaaaattacccagatttaaaagccaatacccaattccaagaattgcaagttcagcttgagggaacagaaaaccgaattgctgttgcccgtaatcgttatattacaactgttcaggactataacgcttatgttcgtcagttcccacaagcagtaacagcgaaagtgattggcatgcatcctaaagccaatttctctgcagaagcatctgctcagcaggctccaaaagtttcttttgattaa

SEQ ID NO: 61626 - DNA, 888 bp, Acinetobacter baumannii
atgaatatcgcaggtatgacggcagaaaaatcatatttaaatcgtcgaaaagcgttgggtattactgtgcgtcgccttgagtttaatcctcaagctatcaaacgctattattttgcaaattcacctttaatgtcccattttttaactgcactctcttcaacatttcccgtaggagaacagttttttgtaaatagcgtgcgtaatgtacgtgacaaagtttccgaccctcaattacaggctcagattgcggcatttattgggcaagaagcaatgcattcgaaagcacatggagagttcaatgaggcttggcgtcgtgatgactataatctggatcgctttcagaactggttgaatgagcgtgacaagtatttaagaacaatttctcctaagctgcagctagcactgacatgtgcatttgagcattttacggctttgctggggggatatattttacagcatccagaacttctaaaaactttggatcaagatgcgctaaagctttgggtttggcatgctatagaagaaattgagcatcgttcagttgcattcgatgtctatcaacaggtatatggcgatgaccgtattcgtcgtttactcatgcggagtgttactacagggtttgcaagtcttgctttttatggcactacacggctattttggcaagataaatggaagagcttgcctaaaatcggaggtaacttatttgggctatatttgcttgctaaaatgcttatacagctaactcctgaatattttgcttattacaaaaaagacttccacccgagtcaaaaagattatggccatatggtcgattattggaaaagctatttggccgatgaatatcaaatgacaagtttccaagaggaaaaaaattcaagaccaagctaa

SEQ ID NO: 61627 - DNA, 1422 bp, Acinetobacter baumannii
atggcagaacgcctaaataatgactttcaatttctggatgtaccacgtcaagatccagagaaaaaagatattactgtccgcaaagcagagtttgtggaaatttataaaccttttacttcggaaactgtaaccaatcagacgcaccgttgtttaggttgtggtaacccatattgcgaatggaaatgtcctgtacataactacattccaaactggctaaaactcattgctgaaggccaaattttccaggctgctgagctttgccatcaaacaaatactttacctgaggtatgtggtcgtgtatgtccgcaggaccgtttgtgtgaaggtgcttgtaccttaaatgatggctttggtgcagtaactattggtaatgctgaaaaatatatcaatgacacggcttttgctttgggttggcgcccagatatgtcacatgtgaagtggacaggtaaaaaagttgcaatcattggtgcgggtccagcaggcctaggctgtgctgacatcttagctcgtggcggcgttaaaccagtggtatttgacaagcgtcctgaaattggtggcttactaacatttggtattccagaattcaagatggaaaaagatgtgatgaagcgccgccgtgaaattttcactgggatgggcattgaattccgcttaaatactgaaattggtaaagatgtcacgattgatgaattacttgctgaatatgatgcagtattcatggggatgggtacttatacctacatgaaaggtggtttccctggtgaagatcttgacggtgtttatgatgcgcttgatttcttaatctctaacgtgaaccgttgtcagggatgggaaaaggacccaagtgaatacattagcatggatggtaaaaaagttattgttcttgggggtggtgataccgcaatggactgtaaccgtacttcattacgtcaaggtgcccacgacgtaacatgtgcataccgccgtgatgaaagtaatatgccgggttctgcacgtgaagtaaaaaatgcgtatgaagaaggcgtaaagttcttgtttaaccgtcaaccaatcgagattgttggcgaaaatggcaaggtaacaggcgtaaaagtggtaacgacacaaatgggtgaaccagatagtcgtggccgccgtagccctgagccaattccgggttctgaagaagttttacctgctgatgcagttttgctagcgttcggtttccgtccaagccctgctgactggtttggtagtgtgaatattaatcttgatggttctggtcgtgttgttgcacctgaacagcaggaatttaaattccagacttcaaacccaaaaatctttgctggtggtgatatggtacgtggttcagaccttgtagttacagcaatctgggaaggtcgccaagctgctgaaggtattttagattaccttggtgtttaa

SEQ ID NO: 61628 - DNA, 4482 bp, Acinetobacter baumannii
atgcacatgccatcgcctaatactgtagctcccgctcaaggtttatatcagcctgatgagtttaaggataactgtggttttggactgattgcccatatgaagggtgaatcaagtcatcatctagtagaaaccgcgattcacagtttaagttgcatgacgcaccgtggtggtattgccgcagatggcaagacgggagatggttgcggcttattattggcgatgccaaagcaatttttccgtgatgaagcaaaaaaactgagtgatattacactgagtgaaatttttgctgtgggtacggtatttttaaatattgatccagcattagcacagcactctaaaaatattttaacgaaagaaattgagtcagaaggtttacgtgtacttgcttggcgtatcgttccaacaaacaacgatgcattgggtgaaatcgcgcttcaatctttacctgcttttgagcaagtcattgtgaactgtccaatgggcgtaactgaggttgaatttaaccgtaagttattcttggcgcgtcgccgtgcggaacaacaactccaaaatgatccgttattttacgtgactacgctttgctcgacagtcattagctataaaggcttaatgatgcctgcggcgattgccgagttttatacagatttggcagatgagcgtttaaaatcacatattgtggtattccaccaacgtttctctacaaatacattaccgcgttggccattagctcagccattccgttatcttgcacataatggtgaaatcaacacaattacagcaaaccgtaactgggcattagcgcgtactcctaaatttgaaaacccattattaccaggtttgactgagcttaacccgattgtaaaccgtacaggttcggactcttcaagtttagataatatgcttgagattctggtgggcggtggtatggatttattccgtgctttacgtatgctcgtgccaccagcttggcagaacgttgaaactttagatgcagacttgcgtgcattctatgagttcaactctaaacatatggaagcttgggatggtccggcaggcctcgttattcaagatggtcgtcatgcgatttgtatgcttgaccgtaatggtttacgtcctgcgcgttgggttattaccaaaaatgattacattaccttggcatctgaaattggtgtttggggctatgagccagaagatgtagtatcaaaaggtcgtgtaggtcctggtcaaatcttggttgttgatacccttacaggtaaagtgcttgatactaaagacgttagcaatcacttgaaaaacatgcgtccgtaccgtgagtggttgcgtgaccatgcgattcgcttaaatgcaaacccggaacttgaagaacaacttgttgataaaggtttaactggcgatgcattaaaagcggctcaaaaaatgtttatggtgacatttgaagagcgcgatcagttgttacgtccaatcgctgagagcggtcaggaagctgttggttctatgggtgatgatacaccaatggctgtattgtctcgtcaagtacgtcatgtgaccgattacttccgtcaacagtttgcacaagtaacaaacccaccaattgacccattacgtgagtcaattgttatgtcacttgaaacctgtttgggtcgtgagcagaacgtattcgaacaaggccctgaacatgctgatcgtatcatcatctctagcccggttttatcaaattcaaaaatgcagcaaattcgtagcattgaacgtgcgggttatgaggcggttgatattgatctgaactatgctgaaaccgaaggtttacaagctgcgattactcgtatttgtgaagaatctgcacaagctgttcgtgatggtaagaccttaattgttttaactgataaaaacattcgtcaaggttatttacctgcaaatgctgcgcttgcaacaggtgcggtacaccatcacctcataaaaactggtttgcgtactgatgcaaacattatggttgaaaccggttttgcacgtgatccacatcaatttgcggtgttactcggttttggtgctactgccatttatccataccttgcatatgatgtaatcaatgatttgattgctaaaggtgagcttttaggtgatccaatccatgcacaggcaaacttccgtaaaggtatcgagaaaggcttattaaaagttctttcaaagatgggtatctcgacagtagcttcttaccgtggtggtcagttatttgaagcagttggtttatcttctgaagttgtagatcaatgtttcttaggtgttcctagtcgtatccaaggtgcaacatttgttgatcttgaaaatgaccagaaaaagttagcggctacagcttggtctaaccgtaaaccaattgatcaaggtggtttgctgaaattcgtatttggtaaagaatatcatgcgtttaacccagacgtgattaactcgctacataaggcagttcgttctggcaaatacgaagactttaaagaatatgccgagttagtgaataaccgtccgatcgcgactattcgtgacttatttaagttaaaaacaaccaatccaattccggttgagcaagttgaatcggttgaagctatcttgcctcgtttcgactcggcagggatgtcattaggcgcgctttcgccagaagcccatgaagcaattgcaattgccatgaataccattggtggtcgttcaaactctggtgagggtggtgaagatcctgcgcgttacggcacaattcgtaactccaaaattaagcaaattgcatctgggcgttttggtgtaacacctgcatatttaacttctgctgaagtcttgcaaattaaagttgctcaaggtgcaaaaccgggtgaaggtggtcagttgccaggtggtaaagtgaatggcttgattgcacgtttacgttactctgttccgggtgtgacacttatttcacctccgccgcatcatgacatttactcaattgaagatttgtcgcaactgatttttgacttgaaacaagttaacccgaaagccatggtatctgtgaagttagtatctgagccgggtgtaggtacaattgctgcaggtgttgctaaagcatatgcagactttattaccatttcaggttatgacggtggtactgctgcgtctccgctttcatcaattcaccatgcaggttcgccatgggagcttggcttgagtgaagcgcatcaggcacttcgtgtaaatgacttgcgtggcaaagtacgtgtacaaactgacggtggtttaaagactggtcttgatgttattaaggcggctattttaggtgctgaaagtttcggttttggttctacaccaatgatcgcattaggttgtaaatacctacgtatttgccacttaaacaactgtgcgactggtgttgcaactcaacaagatcatttacgtcaagagcactatattggcgaatcacaaatgctcattaatttcttccactttattgcagaagaaactcgtgaatggttggcggctcttggtgtagcttcacttaaagatttgattggccgtgtagatttacttgaagtcttaccgggtgaaacagagaaacatgctcatcttgatttaagtgcattgttaacttctcatcctgctgctgaaggtaaagcacagtattgtgaagtagaaggtaatgcaccgtttgacaagggcgtattggctgaaagaatggtcgaagaaatgcttcctgcaattgagtcaagcgctggtggtcaattcaactttaatgtcgtgaactgtgaccgttcaattggtgcacgtgtatcgggtgagattgctcgtcgctatggcaacttgggtatggaagcacatccggttgtaatgaacctaacaggtactgctggtcagtcacttggtgtttggaatgctggtggtttgcacatccgtcttgaaggtgatgcaaatgactatgtaggtaaaggtatggctggtggtcgtatttcgatcttcccaccaaaaggttcacctttccagacacaaaatacagcaattattggtaatacttgtttgtatggcgcaactggcggtaagttatttgctgcaggtacagcaggtgagcgtttcgcggttcgtaactctggtgcgtttgctgttattgaaggtgcaggtgatcactgctgtgaatatatgactggtggtgttgtgactgtgcttggaaaagtgggtcataacttcggtgcaggtatgacaggcggttttgcttacgtgcttgacctcgataatgactttgtagattactacaaccacgagttaattgacttaacccgtatttcaacagaatctatggaagatcataaagaattcttattgcgtattattgacgagcatatcaaggaaacaggtagtgcttgggcttacaaaatccgcaacgagtttgacttctacagccgtaaattctggcttgtaaaaccaaaagctgctaacttgcaatcgcttttgaaaactacacaagctgacccacaataa

SEQ ID NO: 61629 - DNA, 876 bp, Acinetobacter baumannii
atgactgtatcacgtacactttggcagaatgttcaacaatatatctggttggttggtggtattgtctgcttattccttgcttttattttttgggtcataactgataataaaaaactggttgaggttgaaaagtcagctgattccgatgcacccgtacaaattcagccagagaaagttgcaaccactcctaacttaggtgctttagctgacgaggttcgtccactggatttaacaacgcgaactgtggcgtcaggtgaacatgagcctgagtttcgtggcacaaaatttattaatgaaaataaaaaacaatggacgcttgagttattcagagcttctgatgaggacatcattaaaaactttttaaaaagtcgtactgatcgtaataagtttatttatttccgcttaagcggagaacaacaagcagaacaatatgtgttggcttacggaacattcaaacgttcagaagatgcggttcagcaattaacacagattaatttgcagttacctgattcggttaaacctcagccacagcagttctcaagttatgccccactggtaaatgatttgggggcagatgagatgaaaggtggcaataatcagttatatgaagttagattgcgtccagcagctttgcctagaattgatgaatctttattaatgtcagctccagcgagtggtaccctaaacactcagccaaaacctgctagtactaactcggctacaaaaactactattgtgcgtcgtgatgcggcaggaaatgtggttgatgtacaacaatcgaattctaatattgatcagccaaataaacctgcacaaacacggattaatgagaatcaacccaaaaatgctacaaatgagggcacaagagggaactaa

SEQ ID NO: 61630 - DNA, 1083 bp, Acinetobacter baumannii
atgcaaactttacatgttgaattaggcgaacgccgttatcctattttcattggtagccaacttgacccgaaacaattactagagccttatattcatggtcaacaggtcatgattgtgagtaatgttacggttgcgcctttatatttaagccactatcaggaagctttggaaagtctaggtaaaacggttgcgacctgtattttacctgatggcgaaaagtataaagatattcagcatttaaacttaatttttgatgcattgcttgaagctggttttaaccgcgattgtacggttttagctttaggtggtggcgtcattggtgatatggctggttttgcttctgcttgtttccaacgtggcgtttactttgtacaggttcctacgaccttactttcacaagtagactcaagtgttggtggaaaaacaggaattaatcatccgcttggcaagaatatgttaggtgcttttcagcaaccacaagtcgttttagctgacatggcacaattgaatacgctgccagaacgtgagctttcggccggtttagccgaagtaattaaatatgcacttttaggtgatgaagatttcttggtttggcttgaagaaaatatggatggcctggttgcaagagatgctgaccttttagcagaggctgtttatcgttcatgtgctcacaaagcccgcattgttgccaatgatgagaaagagcaaggtgaacgtgctttacttaacttaggtcatacttttggtcatgcgattgagtcgtatctaggttatggaacttggttgcatggtgaagctgtagcaactggaatggttatggcggcagatttatcacaacgtttgggttggatctcaaatgaagatgtggcacgtacaaaaaaaatcattcaacgtgcaaatttgccgatatcatgtccacaaattccattggatgatttccttggatatatggctcatgacaaaaaagttcttaatgggcaattacgtttggtgttgttaaaacaactcggacaagctgtaattactaaggactttgatgttgaacttatgaaacaagctattttggcgaatcaacacggataa

SEQ ID NO: 61631 - DNA, 570 bp, Acinetobacter baumannii
atgaaagcaattgaaataggtggcgccttgccaagcaaagcgtttgaaaccctaccaaatatttatttggtagggcccatgggggcaggaaaaacaaccgttggacgtcatttagcagaactattagggcgtgaatttttagatagtgatcatgaaattgagcgcaagacaggggccactattccctggatttttgaaaaagaaggagaagtcggcttccgtacgcgtgaaactgtcgttttaaatgagcttacttcacgtaaggcattagtgcttgccacaggtggcggtgctattactcaggcgcctaatcgggagtttttaaagcaacgtggaatcgttgtttatctatatactcctgtcgaattacaactacaaagaacctatcgcgataaaaatagacctttattacaagttgaaaatcctgaacaaaaattgcgggatttattaaagatcagagatcctctgtatcgtgaagttgcacactatacgattgaaacgaatcaaggtgctgcacgtgatcttgcccaaaagattttgcaacttattctatcgaacaagttaaaatag

SEQ ID NO: 61632 - DNA, 741 bp, Acinetobacter baumannii
atgagtcaagacgaacttcaagaattgtcattagaacaattatctgcaaagaaaaagaaatttaatctcgataaattccttcagcaatttaatacgctggatatgaacaactatggtagttggccaatatctgtaaaaattacgtgttggatttttattttctttgctgtgttagctttggggtatttcattgttattcaaccgaaattacaagctattgataatgctcaagctcaggaaagcaatttattaaacgaatttcgtgaaaaagactcgaaattacgtaacctgcaacagtatcaggtgcaacttcaagagatgcaggcaaatttcaaccagcaactagagcagttaccaaaagaaactgagattccgagtttagttgaagatatcaacttaacaggagtgaactctggattgaaatttaaaaatattcgcttggaagatgaagtaaagcaggaaatttttattgagcaaccaattgccatagaagcgaccggggactatcacgcatttggagcttttgtaagtagtatcgctgctttgcctcgtattgtaactatgcacgattttactgttgatgtatcgccagctaaagataacaagtctgatattcctgtgctgaactattccattaaagcaaaaacataccgatacgtagggacaacagatacatcggagcaaacaggcaaagctccagcagcatctgcctcaacgaacactactgttcagccgaaatag

SEQ ID NO: 61633 - DNA, 642 bp, Acinetobacter baumannii
atggcaacaattaatttactgccttggcgcgaagagctgagggagcaacgaaaaaaacaatttataacgttatgttttggggtggttgttttggggattacaaccgtatttgggggatggttttattttgaccataaattagatgatcaagagcaagcgaatcagctcattatgagcacaaatcagaaccttgatcagcaattaaaaacattaaacggcttacaggaacagcgtgatgccattattgaacgcatgaagttgatccaaggtttgcagagtcaacgtccagtagtggtaagacttgttgatgagttagttcgagtcacaccaccagctatgtatttaacgaaatttagccgaaccggagataagtttacgattgaaggtaaagctgagagtccaaatacagtagccgaactactccgtaatcttgaagcatctccttggtatcgtaatgcttttatgaactctttcttggctaatgaagagaaaaaagataaggctgcaagttctcttcttcctagggtggaagaccactatggtagttttgttgtgactgtcgatttgggggaaatgggcgtggccacaacggatgattctgctaagccatctacaggtgaaagtgtgggggctgctaaatga

SEQ ID NO: 61634 - DNA, 1059 bp, Acinetobacter baumannii
gtgctcaggttatatcgtaaacctaataaggggttaatgggtgtcgatattagttcgacttctgttaagttgttagagctctctgtcaagaacggtaaatattgggtagaaagctatgctttgatgcctttacccgaaaacagtgtagttgaaaaaaatatcttaaatccagaagcagttgcagaggctttggaacgggcgatgaatttagcaaatccccaaaccactcatgctgcaattgctgttccgacatcgacggttattcataaaactatcgaaatggatgcagatatgagcgatgacgaacgcgaagttcagattcgtgtagatgcggagcagtatataccgttccctttagatgaggtgagccttgattttgaggttttgccggatcgtcttgcgaatccaaatcgtgtaaatgtgctcttggtcgccacaagaacagaaaacgttgaaacacgcgttgaagtgcttgaattggcagatttaaatcctaaattggctgatgtcgaaagttacgcggttgagcgcgcttttagcgtgtttgctgatagcttaccgatgggtgcaaataccatagggattttagatatcggccataccatgacgacattatctgtcatgcaaaatggaaagattatttatacacgagagcaggttttcggcggaaaacaacttacgcttgaaattcaaagtcgttatggtttgtctttagaagaagcaagccgagcgaaaaaagatcgctctttaccagatgattatgaaattgaagtgctagacccatttctagacgcggtagttcagcaggcggcccgttcactacaatttttcttttcttcatcccaatttaacgaaatagaccatattttgctcgctggtggaaatgcgaatattccaggccttgccaagcttttgcagcaaaaattaggttaccgtgtcacgattgccaacccattcttacaaatgggcttttctcctcaagtcgacgttcaaaaaattgaaaatgatgcttcatctttaatggtggcatgtggcttggctttaaggagttttgattaa

SEQ ID NO: 61635 - DNA, 2556 bp, Acinetobacter baumannii
atgaaaaagctatccagtttgggcttcgtgcgtccaatttttttgatcattattattatcttggtctcacttccgatgggattctatggcatgtatctctatattgccccaacgcttccggaaatgagttcactaaaaaaagcaccgcttttaaaaccattgcaagtctatacagccgacaatcaactcattgctgaatacggtggtaaactttctattccggttgaatacaaacaaattcctcctaattttattcatgcattcctagcagcagaagattcttctttctttgaacatagcggcattagttttaaaggtttaggccgtgctttgagtgaaagtgtgactggttctgatgtacaaactggtggctcaaccatcacgatgcaggtcgcaaagaactattatttgagtccagaaagaacattaaaacgcaaactaacagaaatctttttggctcgaaaaattgagcaaaacttatctaaagaagacatcttaagcctctatgtaaataagattttcttaggtaaaaatgcttacggtatcgcagcggctgcaaagatttactacaacaaaagcattaatgagctcagcattgcccaaatggccatgattgccggcttgcctaaagcaccatctaaatataatccagttgttaaccctgagcgtgcacttgaacgtcgcaactggattttaggccgaatgcttcaacttggttatatctctcaaacggaatatcaaaaagccgttgcagaaccaatcaatttgaatatgcccaaccgtgacttaaataatattcacccctacgcaggtgaaatggtccgctcagagcttgtaaaacattttggtgaacaagcaattgattctggttataaagtctatacaacaattaatgcgaaacgccaagcgattgcggaaaaagctgtgcaagacggtcttgaagcttatgaccgtcgtcatggctggcgtggtgcagaagcacatgataagccattaagcgaatttagagcatatgccaacacttatccggcgcaagtcaccaaggtaaatagcagctcttttgaagcattaatgcaagatggctcaacagtaaccgtgcaatggtccggcatgtcatgggcccgtccctatcgcaatgcaaataacgtaggtgcagcgccttctcgcgcatcccaaattgttaaagttaaagatattgttcgcttacgcccaaatgaagctaaaactgcgtggtcactagttcaagtaccaaaagttcaaggtcagctcattgcaattaacccaaacgatggctcaattgaagcaattgtaggtggttataatttctatcaatcaaaatttaaccgtgctttacaaggctggcgtcagccaggttctaccatcaaaccattcctctatgctttagcattagaacgtggcatgacaccttatagtatggtgaatgatagccctattacgattggtaagtggacaccgaagaactctgatggtcgctacctaggcatgatcccgttacgccgtgctttgtatttgtctcgtaatacggtttcagtaagactcttacaaactgtaggaattgaacgtactcgccaattattcatggattttggtttacaagaggatcaaattccacgtaactacaccattgctttaggcacgcctcaagtattaccaattcaaatggcaactggttatgcaacattcgcaaacggtggttaccgtgttcaaccgcattttattcagcgtattgaagatgcatacggtaaagtcatttacgaagccaagccagaatatgcatgtattccatgtattaatgctcctgagacaactgacgatgcacaggtaactactccagatgatcaagttgttgaagtcacaaataaagagctagagcagaaagaaaaggcaaccaaacaactcaatcttaaacagactgacaaaaataacagtcaatatcgtcaagctcagcgtattttaaaatcaagctctgcttatgacatggcaaatatcttacgtgacgtaattgagcatggtacaggtcgtgctgcacttaaaattggccgtagtgatttaggaggtaaaacaggtacgactaacgatgcaaaagatgcatggtttgcaggttttaatggcaagttagtaactgtaacatgggttggttttgaccagccgactacacttggtcgccgtgagtatggtggtattgctgcactaccaatctggattaactttatgggtcaagcattgcaaggtacaccagctgcttgggttcgtttagaaaaagatgctcaggcacctatttctcgcgataagcaagaagtcacaactgaagtaggcgataagaaaacatatcgtgctgcccctccattagcacgtccactctatcgtcctgcaccaccacaacctaaaaccaccaataatgacttcgatgacttacctggtgaggaaattgtgattccttccaagacaacccctccagcgatgaaaccttcgcaaggggcagcgccgaagcgtgaaaaagatgaattagaaaacttgattaatcaaattgagtaa

SEQ ID NO: 61636 - DNA, 825 bp, Acinetobacter baumannii
gtgactacgcaaaatttaatgtgccctgtgtgtcgtcaacgacttgagctggtaagcaaaacatggcggtgtgaacagggccatagctatgacattgcaaagcaaggttatgtgaacttacatgttgtacagcacaaacatagtaaaaatccgggagatactcctgagtctgtagatgcgcgccgtgcttttttacaaggtggctattatcaacctttacagcaagcagtagttcatttgctgaaacagcttaaagctaaaatggtacttgatattggctgtggcgagggctattacaccagtgcaatgcaacaggtcgttgaacagtgtataggtgtagatattgcaaaaaatgcagtacaacgcgcagcaaagttaaatgacaaagtgacgtgggtggttggtacaggagcaactttacctgtcatcgatcaaagcatggatgtgtgtacgagtctttttagcccgattccccaaacggaaattctgcgtgttttaaaagatgatggttatttaattgttgtgactccagcaaccgatcatttgtatgcgatgcgtgaggcgttgtttgaacaggttaatcctcatacaccacagaaatttgttgaacaattgcaagatttatttgagttgaaagaacagcaagttattgatgctcctttagtacttgaccagcaggctttaaaaaatcttattgctatgactccctatgcttataaggcatctccagaacgtcgtatgcaattagaacagaaagcacacttacaagtgaccgcatcttttcaaatttatctttttcaaaagcgtaataaaaaagccatctaa

SEQ ID NO: 61637 - DNA, 333 bp, Acinetobacter baumannii
atgacaaaagttgctggtctagaccaattatctgtaattaatcaaaaagtagttggagagggcgaagtcttacctcaagttgtgcttaaagatggaagtcaggtgcaaacgggaactgtcgcgacgatgctgcataatattgaactctataatgcggggcaaagagggcaaattgaagaagagttgaagatcgcaattccaactttagttaaagtgggcttatttgatttgtttgaagtagatgaatggattaagggaacaaatgcaggccgtacatttgttggaatgcacgctaaggcttatttacaacaaaaagaacaagagaataattaa

SEQ ID NO: 61638 - DNA, 1119 bp, Acinetobacter baumannii
atgctgttatggttgtttgaacaacttgcgggctatcacagttcgtttcaggttgttcgttatttaacattacgttctttactcagtgtattaacgtcactgaccattggtttggttctcggaccaatcatgattcgtaaattacaagcgttaaaatacggtcaggcagtaagttcgtttgctcctgaaaatcatgctaagaagatgggtacaccgaccatgggtgggattttaattctgctctcaattggtattagtactttattgtgggctgatttatctaacccttatgtttggattgtacttggtgtaatggttgtgttcggtgcggttggctgggcagatgactggattaaaattcgctataaagataatgcaggtctacctgcccgtaagaagtttttctggacttctgtcgcatcgctgggtgctggtattgcgttatatttaattgctacccaacaatctaatgcagaatacacagcaaatatgctggatttattgattcctttctttaagaatctttcaattccgctttctattgttcctttaggtttagcatttattgtatttacctatttagtaattaatggtgcctctaatgcggttaacctaactgatggtctagatggtttagccattatgccagtagttatggtagcgacgggcttaggcgtatttgcgtatttatctggtgatattcgttttgccaactatttgcatattccttatgtgaaatacacttcagaacttgtggtgatctgttctgccatgattggtgcgggtttggcatttctttggtataacgcacatccggcgcaagtctttatgggtgatgtgggcgctttagctctaggtgcaatgcttggaaccattgccgttatggttcgccaagaaatcgtattcgcaattatgggcggtgttttcgttatggaagcggtatcggtattcctgcaaatcggctcattacgaatgcggaataaacgcgtatttttgatggcacctttgcaccatcactatgaaaaacaaggctggaaagaaacccaagtagttatccgtttctggattattacgattatgctggttgttttaggcctaatgaccttaaaattgcgctag

SEQ ID NO: 61639 - DNA, 1401 bp, Acinetobacter baumannii
atgcatacttcaaccaccagtaccgtgcctttggaaccgtggacagctcaacaattacaacaggcaacacagggttactggcataaagaccagatccctcaaactgaaattaaacgtattttgactgactcgcgtcatgcagaaagtggggatgcctttttagcactaaaaggtgaacgtttcgacgcgcataattttgtcgcgcaagtggctgcaaatggttgccaagtcgctattgtcgagcggcctatagatgcagaaattgctcagcttgtcgttgccgatacccgtttggctttagggcaacttggtgcgtatcgccgtgaacaaaatgctcaattgaaagtaattgctttaacgggtagtagtggtaaaaccaccaccaaagaaatgctaggaagtattttgtctcgtttagcacctacattgattacccgaggcaatttaaataatgaccttggcgtgccgatgatgttgcttgagcttcgaaaggagcatcagtatgcggtgatggaacttggtgcaaatcatcaaggtgaaattgattacacatcaaaacttgttcaaccgcatgttgctggcattttaaatattggaactgctcatttgggtgagttcggcgggcgtgatggcatttgccgtgctaaatcagaaatctatcgtcatattttacctcagggcgttgctattgttccgcaacaagatgactttaccgctgagattcgtgaagcagccaaaagccatcaaatcatgagctttggtgctggtggtgatgtctttgctacagagattgaattgttgccacaatctgccaatttccagttacatacgcctcaaggttcaagttttgtaagactgccatttgcgggtgagcacaatgtgcaaaacgcaactgcagcagtagcatttgctttggcgttaggtgttagcttggaagatatcgtaaaaggtctagagcaagcacaaggtgcaaaaggtcgtttgaattttattcaaaaagcgcctcatttatttattgatgatacttataacgccaatccaacatctatgcgtgctgcggcacaagtattacttcagcaaaatggcattaaagtcatggtgatgggggatattggggagttaggtgatagcagttggcaagaacatcacgatttaggtcgcgatcttgctgagcttcctttagaccatattattgcagttgggcagtttgcctcagcagctcttgaaggcgcaggtcttcattctactaaattgaaagcatttcagactcaagctgaggcgcttccatttttaatcaatctaatccaaacacatcaaccccagtccatgagtttcctgtttaaaggttctcgctttactcatatggaaacgttgatggctgatttgatggagaaactttaa

SEQ ID NO: 61640 - DNA, 1500 bp, Acinetobacter baumannii
atgactgtttcttttcaagaaattcatccaatcgaaattgatgctcaatggcctcaacagccatttcacggctttagtttagatagtcgtaaagttgaaacggaccaaatttttattgctttgacaagttatagccagcctgaaaaaacgcgtacatttgctgaagcggctttagcaaatggagcgttggctgtcattagcgaaaccgaattaggtgtagcaaatgaatgggtatgccctgatgtgcgtcagcgcatgggagagtggcaaaaacgttatttgcaacaggctgatgtagtaaaacctttacggattatagctgtaacaggcacaaatggtaaaacaacaatttctcgtttaattgctgagttaattagttcacaacagcagcgctgtgcagtgatggggacaacagggaatggtattttacctaacttaacgccttctacgcatactaccctcgacgctctacagttacaaaatgcgctacatgactatgctaaacagggagcaacttttgcttctttagaagcaagttcacatggtcttgaacaggggcgattaaatggttgcgatattgaaattgctgtttatagcaacttaagtcgtgaccatctggattatcacggcactttagaagcttatgcagaagcgaaggcgcgtttatttcagtttaattcgttaaaagtcgctgttattaatttagatgatgcgtatgctgacttgatgattaagtctgcccaaaataatccagcacaacctaaaattttgacttattcactaactcaaaatacagctgattattacattaccgatttaagctatagcttggcgggcgcaacttttaatttagtaagtcagcaaggttcatttgcggtagaaagcccattattaggtcatttcaatgttgaaaatttaattgccgcactcatcgctgctgagcaagctagtttcgatttacaggcattggttaattttgttcctaaactaattggtgcgccaggccgaatgcaagttattcgtgatgatgagcgattatttgtagtggattatgcgcatacaccagatgcattgattcaagtgcttaaaacattaaagcgtcatgtttcgaatcagctttgggcggtgtttggatgtggtggtgaccgtgaccgtggtaagcgtccactcatgactcaagcagctttggatggcgcaaatcctgttattctgacttcagataatccaagaacagaagaccctgaacaaatttttgctgacatgaagcaaggaattgatttttcagggcatcgtatgcatgaaattcatgaccgccgtgaagcaattaaatttgttgcagagcaagctcaagctggtgacattgtagtgattgccggcaaaggacatgaaaattatcaagaaattaatggtgtgcgtcactggtttgatgatgtggttgaagtgcgttccgcgattgatgcccaacatcatacggtagatgctgcttaccctgcacaatag

SEQ ID NO: 61641 - DNA, 1833 bp, Acinetobacter baumannii
atggtagataagcgaacaaagcaaacacgaaaaaaacagcagtctatttcggaaaaaccaagtcttgcctttgatatgtggcggttttatctgctctgggcggtagtgctactgtgttttgtggtattaattgcacgtgcattttatgttcaagtcattaataaagactttttgcaaaataaggccaatgccaatattttgcgtactgaacgtatagaggctatgcgtggagtgattagtgatcgccacggtgtacctttagcgattagtagtccaatcatgaaaattgtgattgatccgcgtgattattttgagaccaagcatttatatgatcaaattacggctgaactaaaacaagatccaaacaaccgtaaattaaaacgccaattgccagataaaaatttaaatcttgatgaacttgccgacgtggtgggtgttgatcgtgctgatcttaaaaaacagatgaatgcgcgtccgcgttctcgctatcttgttttgaaaaaagaagtacctcctcagcaagctgacctcattatgaaaggtaatttccaaggggtgtatgcagaaaaaacttataaacgttattacccgcaacctcagccaaatgcccaaattattggtttgaccaatagtgaaggtcaaggtatcgaaggcttggaaatgcagttgaataagcaactgtcaggtgtagacggtgagcaaaaaattattcgcgataagcgtggtaaccgtttaaaagtttctgaggtaattcgtgagggcgaacctggtgaaaatatcactttaagtatcgactcacgtttgcagtacattatgtaccgtgaattaacggctgcaggtgtggctaacaatgcgcgttcagcaacggcgattgcagttgatgttaaaacgggtgaaattctggcaatgaccagttggccatcttataacccgaatgataagaatggcttatcaaataaagatgctatgcgtaaccgtggtgcgatcgatatgttcgagccaggttcaaccatgaaaccttttactatttctgcagctttagaaactggtcaatatacgccaaatacgattgtaaatacctctcctggctcaatgcgtttaggctggcatactattcgtgatacccataactatggggctttgaccgtaagtggtgtcattattaagtcttcaaacgtgggttctgcaaaaattgcattatcacttccgaaagaaactttgccgagcttctttaatcgtgttggttttggtaagcgttctgcagtaaggttccctggggaaagttcaggtctggttttacctgttaataaattaaactcttctcaaatcgggaccatggcatatggttatggcttaaacgcgacaatccttcaattggctcaaggttatgccatgcttgcaaatcatggtgtcaaaatgccattaagcttgcataaactagatcagccacctaaaggtgagcaagttttaaatccgaaaattgccgatcaagttttgttaatgcttgagcaagtgactatgccgggtggtactgcaaaacaaggcaatattcctggttatagggtaggtggtaaaacaggtactgcacataaattgcgtgcagatggtaaaggatattcaaataatgagtatcgtgccttatttgcgggtgtcgcaccaattagtgatccacgtttagccgttattgtagtggtggaaaacccacaaggtcgctattacggtggtttggttgccgctccagtttttgctcgtattatgcaagagtcgttgcgcttaatgaatgtgccgcttgataagccacttaatactccagaaaatcctattcgcaggtaa

SEQ ID NO: 61642 - DNA, 333 bp, Acinetobacter baumannii
atgaaaagcagtgatgaaatcgaaaccacagaaaataaagtggtcaaaaaagttgtggtatatgcagtcatggtggcattggtttttatcagtgccatgatggtggtatttcaagtatttgaataccgtcatgattatagagagttaagttcttatatgcgtgaacgtgatgacctcaatgctgaatgggggcgtttattgattgagcaacaaacatttggtgcgactgctcaaattggtacacgtgctgtgacacaattacgaatgttttcgccacctgctgcagaaacggtggtaatttctttaccgatgacctcagagcaaaataagtaa

SEQ ID NO: 61643 - DNA, 924 bp, Acinetobacter baumannii
atgtcgcatatttctgtcttactttttgagaccgttgaaagcttattggcagatcgcacaactggggtgtatatcgatgcaacctttggacgaggtgggcatacgcgcttgttattgtcgaaactcgatgaaaacgcccgagtatatgcttttgataaagaccctcaagctctggaagttgcgactgctttagcacaagaagatccaagatttacgattattcatgcaagttttgctgatattaaggaaaaaatgcaggaaattggggtgcaaagtgtcgatggaattatggcagacttaggtgtgtcctctcctcaactcgaccaggctgaacgcggctttagctttatgcaagatggcccgttagatatgcgtatggataactctaaggggttgacggctgccgaatggttacttgaggttgaagaggaagatttggcaaatatcatttatcaatatggtgaagaacgatatagtcgccgtattgctagagcaattaaacaggccggaaaattggatactacggcgcaattggctgaaatagtaaaaacagcccatccaaaatgggaaaagcataaacatccggcgacacgtacgtttcaggcaatccgtattgctattaacaaagaactagatgatattgaagtatttttaccgcaagctgtagacttacttaaaccaaaaggtcgtttgtctgtgatcagcttccattcgcttgaagatcggttgatcaaacagtttattcaaaaagaatcaactctagcagaagattctggttgggggatgcctcaacagcaggttgatacgagaagattaaagaaaatttcacgggttcgtgcgagtgaagaagaagtaaaagcgaatccacgttcacgtagtgcatggcttcgggttgctgaacgcttggaacaaaaaggcgcgtaa

SEQ ID NO: 61644 - DNA, 1002 bp, Acinetobacter baumannii; identical to SEQ ID NO: 46371

SEQ ID NO: 61645 - DNA, 300 bp, Acinetobacter baumannii
atgaaaattcattatggaaaagctttaagcttgggtttggtgcttagttttgcatcacaactgtctacagcagctgtactgaaagatacaccaagtaaaagtctttcagataaacagtcttcacttattgaaaaagctttagatcagcaaaaacgtaacactattgtacttccatcaacagatgatgagttaaaagtacttaatactatccgtgttacaccaactcaaaactttcttgcagcacagcatgaacgtttttcacgttttgttcaggcaatcttccagccacacacttcttaa

SEQ ID NO: 61646 - DNA, 1509 bp, Acinetobacter baumannii
atgaaagttcgtactcgtattgcaccttctcctaccggtttcccacatgttggtactgcctacatcgccctattcaatatgtgttttgcgaaacagcatggcggggaattcattttaagaattgaagatacagaccagcttcgctctacgccagaatctgaaaaaatgattttagactctctacgctggttaggcttaaattggtctgaaggtccggatgtaggtggtcctcacgctccttaccgccaatcagagcgcatgggaatttataagcaatacgcgttagaacttgttgaaaaaggtcatgctttttattgttttgctacagcagaagaacttgaccaaatgcgtgccgagcagcaagctcgtggcgaaacaccaaaatacgatggtcgtggtttaaagctgtctcaagaagaagtagctcgacgtcttgaagcgggtgaacctcatgttatccgtatgaaagtgcctgaagaaggcgtatgtaaatttaacgacttactccgtggggaagttgaaattccttgggcacaagtcgatatgcaagtgcttcttaaaacagatggtttaccaacctaccatttagctaacgttgttgatgaccatttaatggaaatcactcatgtattacgtggtgaagaatggcttccatctgcaccgaagcatcaattgctttaccaatactttggttgggaaatgccaacgctttgccatatgccgttgcttcgtaatccagataaatcgaagttatctaaacgcaaaaacccgacctcaattaactactaccgtgatatcggcgttttaccagaagccttactcaactatttaggccgtatgggttggtcaatgccggatgaaagagaagttttcacattacaagacatgatggataactttgatattcaacgcgtatcactaggtggaccaatttttgacgttgaaaaactcaattggttaaatggtcaatggattaaagggttaaccccaggacaactattagatcgtttattgacatggaaaagtgatcgcagcactttagaagacattgctgccgctattcaaccacgtattaatttactttctgaagctgtaaattgggctggtttctactttaaccatatgccacaaattacggctgaaatgtttgaaagtaaaaaattgactcaagagcaagttcgtcaaagtttacaattcgcaatttggcgtcttgaaagtcagtttacttggaataacgacacagttagtcaaactttaatggatttggcaaatcagatgggcattaaattacgtgacttcatgccaacgttctttattgcaattgctggctcaacaagttcaacaccagttatgcagtcaatggttacgcttggccctgacttaacctttgctcgcttacgacatgcactagaaattgtaggtgcaccgagtaaaaaagaggtaaaaaactgggaaaagcttaatgaaagtttaaaattgccgaaaaatgaagcaactagcgaagcttaa

SEQ ID NO: 61647 - DNA, 546 bp, Acinetobacter baumannii
atgaatattgagcaatatttagatgcactaataaaacgcgaaggtggctatgtaaatgatccacttgatcatgggcatgcgactaaatttggaattacacaagccattgctcgtagttatggttatcaaggtgcaatggagaatttaacgttagagacagccagagaaatttataggaatcaatattggcttgagccgcgatttgatcaagttaatttgatcagcacacttgttgctgaagagttattcgacacgggtgtgaattgtggtattagtttcacaaaaccacttttacaacgtgcattaaatttattgaataggcagggcaaagaaggctgggtagaccttaaggtagatggtgaatatgggccagccactttgcaggctttaataaaatatattaaaaaccgtggtaaagaaggtgaaaaagtgctggtacggcttcttaatattatgcaaggccaacgctatattgaaattacggaaacaaatccgaagcatgagcaattcttttatggatggcttgctaatcgtatcagcttataa

SEQ ID NO: 61648 - DNA, 318 bp, Acinetobacter baumannii
atgtctaaaatattttttagagaatttaaagccttatttactaaatcaattctagtagagcggttagtcggattagagaacttaaatgttaagcatttaattctaccattctatattttttctaaagatttagaagcggggccgaatattagaatagactatttagaagataatgaattagtgagatctacgtgggattcaagagatgaagaatttgaagatttaaaatttgaagattttctaacactatataaaaaattagaagaaaaaattagtaagcttattaatacaatttatccaaattggatacaaaaataa

SEQ ID NO: 61649 - DNA, 366 bp, Acinetobacter baumannii
atgtcagatgaaaataaactggaacaagagattcaagaaaagggcttaaatgctccacgtatcacgcctgatcatatcgattcaaagattaaagctgtccgcttcatcaatggtggagttgcgccagattattatgcagatgattataaagataattgtggtgcaagttgcttaactatctgcattctgtctttagaaaacggatttacagtcactggcgaatcagcttgcgctagtccagaaaactttgacgagaagatgggacgagaaatttcctataaaaatgctcgtgaaaagatttggcaacttgaaggctatttattgaaagaaaagctttatcaggccgagttagataagcagttctaa

SEQ ID NO: 61650 - DNA, 486 bp, Acinetobacter baumannii
atgaccacattcaaagaggcaactacgatgagcttaacagcaactaaactaatgcttatcaaacatattatagctaatggaactatagaggacttgattaaagaaattggggctagttggtatgttgaaccaccattgattgatgaaatcaaagctgttgaacgtgctgatggtgtttttcttaaggcagtcaatgagctgtttcaatcaatttatttaaatcaagaagaactgtatctgactagcaaaaagttgcagatttacttatcaagtcatccagtacgtaatgaattacttaagttagcttatcagcgtaaattgtttgaaaatccagtcacaacaattgacttaaatcaattaaacatagaagcgtttaatgatgcatttaaaaatggatctggatttatgcaagtaagcgacctaggaattagatgcctttcgagagatgaagtcattcagcctattgagtttccacatcagccttaa

SEQ ID NO: 61651 - DNA, 327 bp, Acinetobacter baumannii
atggccgagaaattaaccgcaagtgtcacctttaagtgcactgaaaaaatgaaaatcaaattagagcgtattgcacgttctagaaagttaaacggctcatcagagctaatgcgtatagctgccatggacataatcttcgaggttgaggagatgcttaattgtctacaaatgcctatcgatctgaccacagttaccgaagatacaaggaatacgcctgagccgtttgagcttgaactggcgccaaatccacataaaacacaggcacaaaaaaagcccaattgtcgcaaccaattgagccttatctgccattccactgcaaagcaatga

SEQ ID NO: 61652 - DNA, 516 bp, Acinetobacter baumannii
atggataactacaaaatcggcgacgaagttgagcttcttgaagatttttacactagaagtggcgcagaaataattttcaaaaaaggcactatcgcaaaggtaatcgcattgcagctttatgatgaaattcacattgatgtaaatggtgacaaccgttggtgttctccagatatcttgaagttggttgataaaaaagacccagccttgattagcggtgcggaggcgttgcgagctttggcggatgggaaagaggttgaatacaactggcttaaccaaaaatcatctcaatggatgcttatttctgatgagttaaagcaattcagcctgtatgagattttaaatggaacaacagagtttggggcaattaaattccgcctcaaaccccaaaccatcaagcttaatgatgttgaagttcctgcacctataaaaacaggggttgaatcagattcaggtgtactggtcttgtttaagaataatgaagatcgggataaattcctgaaggcaatggggtgctaa

SEQ ID NO: 61653 - DNA, 1380 bp, Acinetobacter baumannii
atgttagtaaacttttcttgtgaaaatattctttcttttaaaaatgaagtatcattttcaatgcttgcctctcaaaaaaagaaagacaatattttaacgaataatttttttatggctgggaaagaacaacaagaacccattctagaaacttcacttatttttggagctaatggaagcggaaagacaaactttattgctacattggcgtacctaaaaaggatcgctcttaatcaaaatccagaaaataaatttatagctccttttcgattaaataatgatagcaaaaagactccttctgagcttgaaattgagttttatgcaaaaaataatatcaaatatcgttatggtatttctatttttaaaggcgaaattattgaggagtggctttattacactcctcaaacaagagaaacaatattattccatcgagagaaaaatagtctcatagagtataatagtgctgggtttattgaagcaaaagactttattgatgaaaatcaaaaaataagtgataaattaaaaaatgatactgcttttatctttcttctatcaacattcaatggagaacattctaatgctatttcagaatggttttctaatatagttatattagatatagaagataaaaaagataatcttaaagatactttgtactactggaaggataataatgattttcaaaattgggctagacctattttaaactcattaggtatatgtgatttgaaatttgaccataaggttgaatcagtcgaagatattgtaaaacagattaagagcgaccaagaaaagcttaaaaatagtaacgaaaaaaataaagagctaaaagataaagctattaatctttttgataatcttctagattttgtaacatcatcatctttggaaaaaacagaagatattgattttaatagtgttaaagttataaaaaatatagatggtaatgaattccctatccctctttatttagagtctagcggtactattaaattaatacatttattaagtgcactatatagatcctctaaaaatggagaaatattattaattgatgaatttgatgttaaattccacacgttactctctaaatatatatttaaaaaatatcatgatattaataacaagggacaagtaattgtaactgttcatgatacaaacttaatggatacaaactatttcagaagagaccaaatttggcttataaataaaaaccctaaaggcgaaagtgagctatactcattaatagaattcaaagaattagcatcaaatattaataataagaactattcaacagaatatttaacaggttttttccatgctataccactatttaatgaagatgatgtagatagtttaatggaagataattcaaatggctaa

SEQ ID NO: 61654 - DNA, 438 bp, Acinetobacter baumannii
atggctaaactgcgtaataggggcaaagcaagtaacgatagatctgaagaacaaagagaaaaaaatgatagtaatttacaaacgaaaattactttaggttttgatttctttcttggtcaggatactaagggaacagggcaaacatgggaagattggcatacaagtggacttatagtctctatgctacataagctcaaacacctttgtactctgacaccagcccaagctaaaaatgaagggtctctaaaaatatatggcgctttccctccctgctctaaatttaaatgtccttcacacctaaaagagatcgactcgtggggaactattagacaaatgggaaacggagggaaaacccgtattgctggtttttatgataaaaattatgtattccgaatagtttttttagataaaaatcatgagttttggcctacagattaa

SEQ ID NO: 61655 - DNA, 447 bp, Acinetobacter baumannii
gtgtctgaaatcagttttgaacgtcttcatcaatttttctgcaaagttccaagtgtacaagaagcccgtatcatggcttatggagcagatggcgaacatgcttggtggtttaagttcagtattgatgtagaacaccctctcgcatggcaaaccgttcaagaactcgggcatgttttaaattatctgtcgacgaatgagcgtttacctactttattctttcctgtatctccaccaccttacatgaatggtgaagcaaaagattttttatcatgggttattcagtgtaatcaccctgagttttctccagatgtggtttgtgattggcttgaagcgcgtttgccgaatcctgtagatgatgagtcgcagtggaaaattaagacggatttgagtgaaatagagaagttagatgataaggctttggatcaattgattccgcctactgcttaa

SEQ ID NO: 61656 - DNA, 612 bp, Acinetobacter baumannii; identical to SEQ ID NO: 50134

SEQ ID NO: 61657 - DNA, 483 bp, Acinetobacter baumannii
atgagtgcacaaattttagatccatgctgcggctctcgtatgttctggtttgatcgtaaaaatccaaatgtagtgtttggtgatattcggaaagaagaacatacattgtgtgatgggcgttctctagtgattgaaccagatgtgatgatggattttcgcgacatgccttttaaggatggccaattcactttagttgtttttgaccctcctcacctagtgaaggcaggcaaacaaagttggttagctcttaagtatggaaagttgcaagacgattggcgcgaagatattcgaaaaggttttgcagagtgctttcgtgtgttggccaacggtggtgttttaattttcaaatggaatgaaacacagatcaaagttagtgaacttttagcactgacagatcaaaaaccattgtttggccacattactggcaaacgggcgaatacacattggattacttttatgaagtttgagggagctgagggatga

SEQ ID NO: 61658 - DNA, 960 bp, Acinetobacter baumannii; identical to SEQ ID NO: 50950

SEQ ID NO: 61659 - DNA, 861 bp, Acinetobacter baumannii
atgtttaaacgtaattcaataaaaatattaagcagtcttgccgttgctggggtgttgttaactgcatgtagtaaaacgccatcaactgaacaggcaagtaatgctcaagcagaccattctttagaacaagtcaaaaaaaatggagttctaagagttgccgtttttgccgatgatccgccgtttggttttgtagatagtgcgggtaataatcagggctttgatgtggctttagcaaaacgagtgactaaagatttgctcggtgatgaaaagaaagttgagtttattgtgactgaagcttcaaatcgggtggagtttttaaaatcaaatcgagctgatgttgtattcgcgacatttacggtaactcctgaacgcaaggaagttgtcgattttgctgagccttatttaaaaggtgctttcggcatagtatctcctaaagccaagccgattacagatattgctcaattagaaggtaagaccttaattgtaaacaaaggcacaagttcagatacgtactttaccaagcattatccaaaagtgaatttactcaagttcgaaagaaattcggatgcttttaaagccttaaccgacggtcgtggtgacgcgatttcacaagatagtacttatgccttggcttgggccgcgaagaacccaagttatgtggcaggtattcagtctattggtgatcaagagtttattgcaccagcggttaaaaagggcaatacccaactattgaattggctcaatactgaaattaagcagctcagaacaagcggtgaaattaagaaaatttatgatgaaaccttgaagccaatttacggtgattcagtcaatccgaatgtgtttttagatgtaggtcaataa

SEQ ID NO: 61660 - DNA, 732 bp, Acinetobacter baumannii
atgcctttgttatcgatacaacaattacagaaatcatttgcacaaagtcatattttacagggcattgatctggatgtagaacaaggagaggtggttgttattttaggcccatcgggctgcggtaaaagtactttattgcgctgtattaacggcttagaaccgattcagggtggcgagattcgtttaacaggctcaggtgttttgggcaaagatgtggactggactaatgctcgtcaaaaaattggcatggtttttcagaactatgagttatttgggcatatgaacgtcattgacaatattttgctcgggccacttaaagtacaaaaacgtcaccgcgatgaagcagaacaagtagcagatgagttgctaaagcgagtcgggctatatgagcgaaaacttgattatccgcgacaactttctggcggacaaaaacagcgtatagccattgtccgttcactggtcatgcaacctcaagtgattttacttgatgaaattaccgctgcgcttgatccggaaatggtgagagaagtgcttgatgtagtactcaaattggcgaatgaaggaatgaccatgttgattgtgacacatgagatgtcctttgcccgtaaggttgctgaccgcatcatttttatggataagggcaagattattgaacaggcttcaccagaagaattttttgaacagccaaaaacagaacgagcgaaagctttcttaaatattttgtcgtactaa

SEQ ID NO: 61661 - DNA, 666 bp, Acinetobacter baumannii
atggaacttgattatttatttcaagcgagtcacctcgaacgtttaatgtggggactttgggcaactgcaaaaattgcatttatttcagtgtttttctctgcaattttcgggacagtcttcggcgtcattatgacttctaagaatatagtcgttaaagcgctgtgccgcctgtatctagaagcgatccgaatcattccaattttagttttgctatttgtgttttatttcggctttgcgacatggtttaactggcagttttcagcaatgtgggtatgcattgttgtatttgttttatggggtacggcagaaatgggcgatttggttcgtgcagccattacttcgattgatcagcatcaacgcgattcggcctatgcgctcggactaactcatgttcaagctttgatctacgtcatttttccgcaaagtctaaaacgagtaacaccaggcgcgattaatttatttacccgaatggtgaaaaccagctctttggcagtcctgattggcgtggttgaagtcattaaagttggccagcaaattattgaaaattcgctgttgaccgtgccaagcgcttctctttggatttatggctttatttttattttgtattttctgatttgctatcccttatctcgtttggcggcacatttagaaaaggtctgggagtaa

SEQ ID NO: 61662 - DNA, 759 bp, Acinetobacter baumannii; identical to SEQ ID NO: 50222

SEQ ID NO: 61663 - DNA, 1329 bp, Acinetobacter baumannii
atgttggaacacgatattcaagaaaacccaccatcaagacgaactattcaacgtaggcttaaacaatatgatccgtataaacttattaaagcaactgaaggaacaagaatagcaaatcaaacacttaaagcagcaggacgaaagatgaaaagtccattcattttagcaattgtagaaatagatacccatattctagacattatcattattgattcaacaaccaatctcccccttggccgtccttacctaagctgtgcgattgatgtacacacccgagctattgttggttattacatcagtatgcttcctcctagcgcaacaaccaccttagctttattaaagaatatgcttctacgaccatctcagaatttacctggaggtattccctccttaattgttccagataatggagtcgagtttaaaaatacggcactaagccatatctgcaatcatttgaaaatcacaatacagcctgcacaaaataggaacccagataataaaccacatattgaacgttttttcggtacgcttacatttggactaattcaacaattacaaggtacaacattttctaatcccgaagctcgcggcgactatgactcaagaaaacatgcaagtgttaccctagaaaatttgaaatcatatgttgatgaatggattcataatatatatcactgctcaatccactcaatgacgggacgagcaccaatgctattttgggaagatgcttctcaaagttgtccaccattaaccatatcaactgatgaagtagatattattgcccgtcgcccaatcagtagaaaaattcataaaggacaagtcaaatttgaatatttgacctacttttcgcatgcgttagcaacccttgaagcaaatggcttaactgacgttattgttatgattgatgagctcaatttagagcacgtatatatcaaacactcatcaattgatgaagtaatacgagcggactcaacagagcctgattacaccaagaatctctctctgcaagaacatcttgaaattcgcaaggaacttaaactggtatctcaagcagataagcaaagattaggaaaacatcgcgtatggtacgctcgatggaagttatacgaacgcattcaaaaagatgcttgttctaaaaacaagaagttaaagcagttaaaactagagcttcctcaaacacttaagaacctcttagaccaagatatccatacagtgtcccaaccaatagacccgtcagcttcaacatttatctcctcttctgaaatggatcttctaaatcaatcaaaccttgatgatgattttggaacattggagtttgatgatgaataa

SEQ ID NO: 61664 - DNA, 477 bp, Acinetobacter baumannii
atgaatgcagcagtgacaataatgcaaacaactgactggtcaaaattcagtacagaagattggtttagacaatttggggcttggatgaatggggatacggaaacaaagaagctaatttataaatcacttcccacccgaaagctgactcaaaaacagcgtgaggaattaattgcacaatatatgagtgatgaaaattttcatgaacctgttttgcaaaaagggctatcttgtcaaatttcagacaatgaagcacgtgcattccagcgtatcgttttggatatacgtcaaattgatagcgagcctctacaggattggatggatgctttatggcagatctgtgtggaaaacaaaaaacttagagaggtggcggcaatgtatgagacttctacaattcaaattcgtcaggatatgaaatgtgcattggcattcatctcaggtcgttatccaaatttaaaatctgatttgcttcagaagtaa

SEQ ID NO: 61665 - DNA, 330 bp, Acinetobacter baumannii
atgaaaacaacctcagaacaagccatttacgacttaagtagtgctatttacaaacttgtaatgaatgatttttctcaaactgatcaggcatatgataaagctcattttctcgcacgatgcttaattcagttaagtgatttaaaaatgctagattgtgaaatcaaattaaatgatcaaacgattcaatacaagatatgcgaaaaaaactatactttttggttggttgaaactccagagccaactgagaagtttccttttttggattatttaacaaaagaaattatggttattttttacaacctcaatccagatgaatgcaaaaggcaataa

SEQ ID NO: 61666 - DNA, 387 bp, Acinetobacter baumannii
atgtcgattacaaattattctttatcaggtccaaatgaatctagctttaaggtttctaaatttgtagatgattttaaggttttcgatagtgggatactgcattgcggatcaaatggcaaaatcagacttagaattgatgattttgaagtaaattttatttttgcaactgataatactattagcacctcgaaaattgatcttgaattggatagtaatccaggtttaagtgttagattaatacttaaaaattttgacaatccattaggtagtggtttgttagagccagcctatttagcaaaatacaaaggtaaggatatttttatcacctttttggtcaatagaatcgaaaacgctagacagcttgcatatacttttctaactaagtag

SEQ ID NO: 61667 - DNA, 354 bp, Acinetobacter baumannii
ttgaaagatgatgcacagataaattttcaggttgactcagtgcaaggaaaccaaattgattatcctgttgcgtctgatgaaattaagacagctagaattataggtaaaattaccaaagaaattggaacgggcgatgatgcgaagcattcaattatttggactactattagatggtgttttattattgcttcagctataagtttaatattatttatatttttaggatttgcttacaacaataataatcaaagtgaaattgtagagttaaagaaatttatttttagtatatggtctattttcacgcccataattactcttgctttaggttatgcttttggtaaggattataaataa

SEQ ID NO: 61668 - DNA, 1041 bp, Acinetobacter baumannii
atgaaatctcgtgcagctgtcgcctttgccccaggaaaacctttagaaattgttgaagttgatgttgcaccacccaaggctggtgaggttttaataaaaattacccatacaggggtatgccataccgatgcttttacattatctggcgatgacccagaaggtgttttcccagcgattttaggtcatgaaggtgcaggtgttgtagttgaagtaggcgagggcgtaacaagtgttcaacctggcgaccacgtgattccactttatacagctgaatgtaaagaatgcttattctgtaaatccggaaaaactaacttgtgtgttgcggtacgtgcgacgcaaggtaaaggtgtaatgccggatggaactacacgtttttcatataacggcgaaccgatttaccattacatgggttgttcaacctttagtgaatatacagtagttgcggaagtctctttagctaaaatcaatcctgaagcgaatcacgaacaagtttgtttacttggatgtggtgtaacgaccggtattggcgccgtgcataacacagctaaagtacaagaaggtgattcggttgctgtatttggtttaggcggtattggtttagctgttgtacaaggtgcacgtcaagcgaaagcagggcgcattattgtcgtagatactaatccagataaatttgaacttgctaagcagtttggtgctacagatttcttaaatccaaaagattatgatcaacctattcagcaagtgattgtagaaatgacaggttggggcgtagatcattcatttgaatgtatcggtaacgtcaatgttatgcgctcggctctagagtgtgcacatcgtggttggggacaatccgttattattggcgttgctggtgcagggcaagaaatttcgactcgtccattccagttagttacaggccgtaaatggttaggcactgcttttggtggagtaaaaggccgttcacaacttcctaaaatggtcgaagatgccatgaaaggcgatattcaacttgaaccttttgtgactcataatgataattga

SEQ ID NO: 61669 - DNA, 159 bp, Acinetobacter baumannii; identical to SEQ ID NO: 60274

SEQ ID NO: 61670 - DNA, 159 bp, Acinetobacter baumannii; identical to SEQ ID NO: 60274

SEQ ID NO: 61671 - DNA, 159 bp, Acinetobacter baumannii; identical to SEQ ID NO: 52639

SEQ ID NO: 61672 - DNA, 159 bp, Acinetobacter baumannii; identical to SEQ ID NO: 60274

SEQ ID NO: 61673 - DNA, 1857 bp, Acinetobacter baumannii
atgttaagttttcctatccctctagtctgtaatattgatagtgctaatggaactttagaaaaaagtttaactttagtttcaccttttacgtgtattttaggtcccaatggcgctggaaagacacatttattacgtagtctaagaagtctttttgctaattcccatgagtttaatcagcttggcaaaactagattgatttcagcgggaagaatgggggtttcggaacagtatcgttctgatgcactaggacattattctggtgatcattataattttgaatcagataatttcggtgctgttagtgatggagttcgacgccatcatatgcagtctattaatggtgatattcatacattatcaattcggcatgatattagaattaaagtccaagaacgattgagaaagctatttaaacgagatattgagatagttccagatggtggagtattaaaagtatatttttcaaaacttgatggatctaaaaaatatacctcaagtagagaggcttctggtttaatgcacttagttggaattttatcagcgctatatgatgatgaggtaaaatttctacttatagatgaacctgaagtatctttacatcctcaattacaatcatttcttcttggagagatgttagatgtatctattaataaacgtaataagatagttattatagcaacacattcaccaagtatgattaacattcaaagtgttaatgacttattttcattggttttctgtgatgatttggatcaacctcttaaacaattaacaaatgaaatgggtgaactacaaggtaggaatattaaatctctagtttccagactaggacaagaacataagatgacattcttttgtaaaagaccacttttagttgaagggccatctgatgttgtaatttgtaatgctctagctgctaaacttcaaatgtatttagaggctagtgggtgccaatttttacctgtgattggaaaagatcaattacctattgtatataaattgttagttgctatgggcaaagaacctttaattttagcagatgctgattcaatcgtagatactacagattttttaaataaaatttttaatgcgaacccaagtgttttagatatcattgttacagaaataggagtcgatccatttgatttagtgagaaaagtagatcaagagctaattcaattaatcaataacgaatgggatgcaatttcaagttttgcaatgaaacaatcctattggattttggggcataaagatgatgaaaataaggctaagaagagagcttgttttactttattgtttaatttaagggattcagagttcgaagaaattccgaattttgaaaattggagtaaattaaaaacaagatatattactttgctaagagtattagaaaaaataggagtatttgtattaagaaaaggggccatagaatcctactatccagaagaatataaagtgactaatactgataaaatagaggtcgcttttaatcaaattgataatatacatagtggtgacttatcttctattaatgaaagttatgcagatataatacgctttttagaaatggcttctgcttatattaaaattagtgagatagaagctgttagacaaatattactgtctgctttggcgccttgtattgatggtgttaaaaatgaaaataatatgtttgatctaaatacaattgcaagaaataatattggagaaaaagctaatttatttaatatcgaaaaaaatgaagataatattgtagttagtttgaattctaaaatattaaatattccaggatttccattaacaattcataaggattgtaacttaaattccactttattagaaaaattgatggagtaa

SEQ ID NO: 61674 - DNA, 708 bp, Acinetobacter baumannii
atgaataaaccattaatcctctttaatttagtaagaaatcttaaaaaatatcataatcaaccagatgttaggccatatgaatgttttagggcggttttagatcttcctagggattctgatatcaaaaaacatttagtctatctgtctcaaatggcctatgatgtagctagtcatttagaagcagataatccattacttaatgataggacatgggtcactaaattggttaacgtattgacccatccatttgagcaagtaggtcaatttaatgctaaattaaatgatctttacccaatcgtagagatttctttagcatctcatgttagagcgtgggatcatatttcaagtattaataaagctttaaccgatgatgaaatcacaaacttgaaagaaaatactcgtcagttattggatgaagttatcaaattggatagtgtagatgcaaaagtaaaagtttatctaatcgatcagcttaaaaaagttttaaatgttctggataactaccaaatttatgggcatgaaaaattaatagatatcttagaaaaatcaattggtcatgtaattgttgataaaaattatgaaaaatttatgtgtgattctagccaaagtgaaaattggaaaaaatatttaacagatcttagtactgttattacactttcctctggtgtaatgccattattacaatctttacaaggttatttaccctag

SEQ ID NO: 61675 - DNA, 276 bp, Acinetobacter baumannii
atgtatcctgtatcttttttaaccattttaaaagtaaataattttcttcagacccgtttaatttttgaatctttattattaataaatcagaaaaaagcttttaaaacatatcctatttatcagttttacagtttttatctttgttttttatacatttttttagaggaaaagaattttagaacaaagactattcttttttatgtatatcgtatacgatatatgaagaatgattggacagctattgatacccattccataacttttgagatggattaa

SEQ ID NO: 61676 - DNA, 207 bp, Acinetobacter baumannii
atgaagcctgaaactactttatctgatgctgatttagcagtatggggtaattttgtgaagaataaagcgacgccttataacttgcgtaaatatgcccagctacttgcctataatggaaaagtagaacaggccgagcagcaaatatttattttgcagcatctttatcgacagcaaataactttggcagagttgttaaaaaataaataa

SEQ ID NO: 61677 - DNA, 2151 bp, Acinetobacter baumannii
gtgaataatctgactcaactattcaatcgttttaaagcgaattcaattttaatttattgcctgcaaattttaattgtactcacaggcacaactttaggtttactttggttaggtcataatgagctgatcgttcctgtgactttaggtgcgattgctgctgcacttactgattttgatgatcgcttaagtcttcgtttacgcaacctgctctatgtctgcctactcttttttactgttagcactattcttggttttttagcaccttataaatttttatttattttatatctttcaatttccagtgcttgtttcattttattgggagctttagggcaacgctacgccaccatttcttttggtacgattttactctcaatttatagtatgtttggtttaggagaatatgcacactggtaccaacagcctacttattttgtctatggtgcgttgtggtacggcctaacttctattttattttttattcttaaaccaacacttcctttacaagataaactttcacaaatttttgaagaaatttcagccttacttcaagctaaagcacggttattcgacccagataataaagaaaatgttgaacagcttttatttgaattatcactacaaaatacacaagttgcacagagccttaaccaaatacgcagctctctgctgactcgccttaaggcatcacgagtcagtaataaaagtatttactggttaaacctatacttttttgcgcgagatatacacgagcaggcaacttctaattatttacactacgagcatatccaacaaaattttagccgtagtgatctcatttttcgttttcagaaaaacctacgcttacaggcacaagcttgccatgatttagcccaatgcattttgcataatcaacaatatcagtcttctcaagaaagccaaattggcctaaaccatttggaaagctctttgaaagactggatacaacagcatccacaaaattttgaagttaaaaatttaaagctaatttttaataatttaaaaggaatgcatgaacaatttgagcagcttcaatatgctcaaccgtttaatgaaacgctaagtcagaacaagcaagaacatctcaatttactagatgatgatattcaaggattttcagaccttgttttaaaaattcggcagcaactgacgccacaatcggccctatttagacatgcagtacgaattgcggttgtatttgccgcaggttatgccatttccctcttaccttttgcccaacatggttactggattttgctcaccagtttatttgtttgccaaattacttactttgcaaccaaaagtcgtttaaagcttagaacgattgggactttactcggcgttttattgggtattcccattttatattttgttcctagtattgaaggtcaactcattcttaccattatttgtggagttagctttttctacttacgccagaaaaaatatgcgctggcaacactgatggcaaccttaatggtattgctcattttcaacttaaaaggtgcaggttacagcattattttacctcgcctaatcgacaccttattaggctgctttattgcttggcttgctgttaattttatttggccagactggaacttccgtaatattccaaacaatattaagaaaagtagccaagcaaccttcgattacttcaatgtgattgttgagcaatatcagcacgggaaaaatcaagacattgaatatcgtagaattcgccgagctgcacataacgcgcaaattgaactgtcgaatatgatttcaagcttaagtgccgagcccaacccaaatcccgagctgattcattacgcctttcgttatttggtttatagccacagccagttgagttatgtcgcagcattaggcagccaaagacaaaaaattgatgatcaacaggtattacaacttttactggattgtcagcaaattcttaaacaaagtttatttgaacaagctttggttaactttaattttcttgaacagactttaaagcaaattcaaagtttaataactcacgaacatttttcagagaactacacacttgtcttaaaacagatgagtttattattagaaaccttgcctgaactcttaagcttaaaaggcaaacttttagagcatgaaattaaatag

SEQ ID NO: 61678 - DNA, 777 bp, Acinetobacter baumannii
atgggcatggaatgggatgttatccttagtttgatcttttttgcgtttactgcgggagcaattgatgctgctgttggtggcggcggactcatccagattcccgggatcatgagcactttccctaacatgtcgactgctacggtgattggtaccaataaagtctcatccatttttggtacggcatcggcagcttatacatttgctaaaaaagtaaagttgcaatggaagcttttagccgttattgccatttgtgccttgattagttctttcgctggtgcagcttgtttgtcgcttatccctcaatcggtattgcgtcctttcgtttttgtgatgttgattgtgattgcgatttataccctagttaaaaagaacttcggacaggttcataccgagcaaaaaattaccacgaaaatgctcgttttagctggtatcggtagtctggcgattggcttttatgacggtattttcggaccgggtactggtagtttctttatctttttcttcattcgttttttacaagtcgattttttacatgcttcggcgttgtcaaaaatcggtaattttatgactaacttagctgcgctgagtttcctcattccaactgggcacgctattttacatattggtttaatgatggcagcggctaacgtgctaggttctattgttggggtgcgtaccgcacttaaatacggtagtgggtttgtacgtattatctttttaattttggtgagtatcctgatttgccgtttgggatatcaaatgtttgttacaggttaa

SEQ ID NO: 61679 - DNA, 906 bp, Acinetobacter baumannii
atgacgacaaaaaatcaaaaaatttctcgtcgccatatcagtggtgtatttcttttaaataaaccattagggctaagttctaacgctgctttgcaaaaagtgcgttggctttaccgtgcccaaaaggcgggtcatactggtgcattagatccattagcaaccggtttacttcctatttgtttaggagaggccactaaattctcacattacttgctggactcgacaaagcgttatcaaactactgttcgattaggccaaactacaacaacaggtgatgttgaaggcgatattttacaagaacgtcctatcccggttcttagcaaagagcttattgagcaaactttagaaaagtttaggggcgatattcaacaagttccaccgatgtactcggcattaaaaaaagaaggtaagccactatatgagctggccagaaagggtatagagattgagcgtgaggcacgcccagttacgatttatgccttagaactcattgaatttactgaaaatagtatcactttagatgtaacttgttctaaaggaacatatattcgtgtgctaggtgaagatattggtgaggcacttggttgtggtggtcatttaaccatgcttcaccgtattcaaactggacattttgaactcatcccaagttataccattgaatatttggaaagcttaacggaagagcaaagagaagcttcgctactgcccgtatatgctccaattgaccatttcttaaaaattcaggttcccgaaggacgggaaaaatatttttgtaacggtctagaaagcaatattgatcattctgcagaagcagaagtgttggttttttcgggtgaacgctgtctaggtttagctgaaattaccgataaaaaacggttggtacctaaacgtatcttaaatttgtag

SEQ ID NO: 61680 - DNA, 1032 bp, Acinetobacter baumannii
atgcaaaggatgcagaaaaagatatggtggtgtgtgctcggattttttattttgagcctcatcgcatgtgtgtattggctaagcccagactcggaaaatacttcacctcagccaaatcaggatgaagctaggttggtagctacttcacaatctactttaaattcaccattaaacgaaaatacttatttgagtaaaagtcagcaagatactcaagttaactgccaattaaaaattgatagttcacagcatttagttgtgaatagccaaacccgtgactgctttgaatattttattacgcagtatggcgagagcaatttacaacaagttaaaactcattttgagaaatttatacaagatcaatatttagagccagcccgctcacagattattgatttgtggacgcgttatttaaaataccgtgagcagcttgcacaaattcaaccgcctcaatctaaacaacaggatcaaaattattttcaaaagatcttcagttcaattcaagatataagaaaacgtttcttctctgcctctgaaattgaagggttattttcaacagaagacatttatcagaactacacattagatcgcatgaagattttagaagattcatctttaagcgaaattgaaaaagctaaaaaactcaaagagcgctttgaacaattaccagaagactggcaagaaaacctacaagaactctcaaagcttgatgatttacacacactgaccaaacaaattaaagctcgcaatggttcagcagaggaacttcggcaaatgcgtacagcacttgttggagccgaggcaactcaacgattagaaactttagatatacagcgtaatgcgtggcaacagcgagtgactggctacttaaatcaacgtgatgaagtcctgcatagcaatatgagtgacagcgctaaaaaacaagctattcaacaactacgccaacaacaatttagctcatcgcaagaacagcttcgtcttagaacttttgaaacagtccatgaccaaggaggtgaactaccctttaactactag

SEQ ID NO: 61681 - DNA, 975 bp, Acinetobacter baumannii
atgaaaaggaacttaatatttttctgtgctgcaatactctcaggactgagtgtttcagcaacccatgccacaaatgcagagcaagtcaaaagctcattcgtctattcaacttatgcacaaaccaaatatccattggtttttaaccatggtatggctggttttaaccgagttggaacagatacgcttggtctggactactggtatcagattcttcctgatcttgcgcgtaacggaggaaatgtctgggcaacaagagtttcaccgtttaactcaactgaagttcgtggagaacaacttgcccaacaagtagaagaaattattgccatcactggaaagcctaaagtcaacttgatcggacatagccacgggggacctacaattcgctatgtcgctgggatcatgcctgaaaaagtcgcttcgcttactactattggtgcacctcacaaaggatcgccaatggcagatgtcatcctgaatgttgagggtactcctctatccggactggcaacattagtaaactggttttccgcagcaattacttgggcaggaggtctagacccaaatagttatccgcatgactccttagcaggtgcccacagtttatcgactcaaggctctgcacagtttaattctcaatttccaatgggtgttcctaccacgtcttgtggtgaaggtgcttatcaagagaaaggaatctatatgtattcattctctggcaataaagcactcacaaatccattagatccttttgatattgcattaacaggaagtagtctagtggttgacccatttggggataatgatgggctggtttctcgatgcagtgccaaatttggtaaaactattcgtgacgactataactggaatcatttagatgaagtcaatcaggtcatgggaatacgttctatttttgcagcagaccctgtctcggtttatcgtcaacatgctaaccgtttaaaacttcaaggattataa

SEQ ID NO: 61682 - DNA, 369 bp, Acinetobacter baumannii; identical to SEQ ID NO: 43520

SEQ ID NO: 61683 - DNA, 741 bp, Acinetobacter baumannii
gtgttttttgcagtcattacgctttttcctgaaatgtttgaagcgattacagcctacgggattagcgggcgtgcagcaaaacgtgacatagtacaagtcacttgtattaatccacgtgattttgctgaagggaattaccgaagagtggatgaacgtccatttggtggtggtcctggtatggtgatgatggcggagcctttggcaaaagcaattaaccatgccaaacaacttgcttcgcaagcaggatgtgttcatgtacctgtggtgtatatgtctccacaaggcaaaactttaaatgaacaggcagtacagcagtttgtcgattatgatggcttaattgtattgtgtgggcgttatgaaggcgtcgatgagcgtttgatccagcattatgttgatcaggaatggtcgattggagattacgtcttatctggtggtgaactacctgccatggtgttgcttgatagtattattcgccgtttgccgaatgtaatgtcagatgagcaatcagcgatacaggattcttttgtagatggtcttttggattgtccgcaatacactaagccagaccagtttgaaggtttagatgttcctgaaattttaaagtcgggacatcatgccaatattgagaaatggcgttttttgcagcgttatcaacgaactttagagcgtcgacctgagttgattgaacaggttacgttgactaagcagcaaaaaaaatggctgtcagatgaacaagggtaa

SEQ ID NO: 61684 - DNA, 549 bp, Acinetobacter baumannii
atgacaccaacacagaatgttcccgaagatcgtattcagattggacagttacgttcagcttatggattaaatgggtggctctgggtgtattccaatacagaacccatgagcaatatgtttgactacttgccttggtacatcgagaccaaggccggttggcaaatcgttgatgtaaaacgttggaaaccacatggcaaaggcctggttgttgctctaaaaggtgtgagtgatcgcacaggagcagaaagcttggttggcgctaatatctggattgctaaatctcaactgccgaaagcagatgtagatgagtactactggtcagatttgaaaggcttaacagtgttaggtcttgatgacgacgaacaggaagtgaacttggggcaaattcatgagttgtttgaaactggagccaatgatgtgatggttgtacgcgctacaccagacagcattgattcagaagaacgcatgatcccgtggcataaagatgtggtgcaacgcgttgatcttgaagctggtcgcatttacgtcaattggggcgtagattattaa

SEQ ID NO: 61685 - DNA, 252 bp, Acinetobacter baumannii
atggttgttattcgtttagcacgtggcggcgcaaaaaaacgtccattctatcaaatcgttgtgactgatagccgcaatgcacgtgatggtcgtttcatcgagcgtatcggtttctttaacccaactgcacaaggtcaagcagaaaaacttcgtttagatgcagaccgttttgctcactgggtttctcaaggtgctcaaccttctgaacgtgttgcttctttggctgctcaagctaaaaaagctactgcataa

SEQ ID NO: 61686 - DNA, 426 bp, Acinetobacter baumannii
atgaagaatggttttactttaatagaaatcatgattgtagtagcgataattgcaattttagcagctatagcgacaccttcatatttgcaatatttacgtaaagggcatcgtacagctgttcaatccgaaatgatgaatattgcccaaacattagaatcagaaaaagtagttcacaatcgttattcgtcgaatgcgaccatacagtcgatttatggttctaatgtgagtcctcttcagggcaaagctttatatactttagcttttactactttaaacgattcgacatgggtgcttacggcaacaccaatcgctaatacttcacaagctggtgatggaattatttgcttaaatgatcaagggcaaaaattttgggcaaaaggtgctacagattgtgcactatcggcttcatcaagttggacagagtaa

SEQ ID NO: 61687 - DNA, 483 bp, Acinetobacter baumannii
atgaataagtactctattctacggttcaatcaaggggttaccttgattgagcttatggtcgtgattgttatcgttgctatttttgcttcaattgctatcccttcatatcaaagttatagccgtagagctactgcatctgcggctaaaagtgaaattttgaaattagctgaacaattggaacagcataaatcaagaaattttacttatagggggtttaccacaacctctataaccctacctcgcgggggatatacgattcagattactgatgatacgacgacaggaaatttattgacgaatgctgctgcaaatggacaaacatgggtcattaaagcgacaactacagattcaagaaactttaattttattgctaagaattcaggtttgcgttgtcaaagtttaacagctacggctgttgataatgactgtggtggaacagtcacttgcaatgtatgtgaaacaaatagtgagaattggcaatga

SEQ ID NO: 61688 - DNA, 819 bp, Acinetobacter baumannii
atgacccatttaaattataaaaatattaaaggtcgatctaaggaaacgggtgccacacttattgttgtacttattattttattgattgttatttctgtcggggttttggcaataagagtagcgattgtttctctaaaagttgcaactaatagccaagttggccaattaaactttcaatcttcagatactccgttagagcttattgtacagatgaacccaaccacattgacaaatattaccaatgtgattggtgcagcacttaaagcacatgaaagtaaccctggtgcggaatataacttttgctataaaccaacctctacatctgtaagttttgctcaaactcggggagcaagtttgcttcgggctggcagcgccaataatgctgtggttgaagacggtggagtagcaggtttctgcgatttaacaagtgactatggaagtaatcgtcaagcggtagttactcaagttgctgtcagtatcccaaccgatgccatgcctgatattccgggttcaaatctacctcgggacataaatctttccgaaggaacccaacttcctaaaagtatgctatctacgcaacgtattcgggttattacaacagcgtttttacctgcttatgcatcaacttctttagaaactctgcaatctgattgcttaagtacgagttccgcaaaaattagtgacaactttgatagtgcattaacggataagcaaactctagctgattgtttggcaaaccataacgtaccttttagtactcaagttcaagaatttaactataccaataagctgactgaaatcacggcaccaggttcataa

SEQ ID NO: 61689 - DNA, 1002 bp, Acinetobacter baumannii
atggctcaatcatttatttctaataaagaacaaggttttaccttgattgaacttatagtcgccttagctttaggcctaatattagtggctgctgcaacacagctatttattggagggcttttatccagccgattgcaaaaggccaatgctgaaattcaggacagcggtatttttggtttggaatatatggcacgtgatatacggcttctaaattatggaaatgttgtaaatccacaattaacagatacaacgccttggggaggtattgtattaacaggttcaacagcaacaaatgccaacaatattaattttattccaaaagttgatacaaatacttatattccggaagcgttattaagccgtggtgcaggtgatacggtaagtacagtgaataaccactggaaaggtctttcaaatatacagaatagttcaaatgctgaagtacaaagcgatcaactaactattcaattcattgccccgaccaatatgactaattgtgaaggtgtgaatgtgttagcgggggacctaatagttcaacggtattttttacgtgttgataataatggtagttctcaacaggattatgcacttgcatgtgatgcgaatacccctgcggttagtgctacagctcaacctgatatcgttaatggattaggagatgcagggcaaattatactgcctcgtattgaccattttcatgtcttattaggtgcgaaaaacgcagctggtaattttgcttattacacaattcctcagtatcgggtggctgcacaagctgctcgagatgcgagtccagctgtggctgctccaagaattctgtcaatacaaatatcggtattagcccgttctacaaataatgctcaaaataaggcaatagaccctaatcagttttttcttatgctagatcagaatgtgcatgctgccgataacagaactcgctttttgcgacgcgtatatagcgtgacaattgctttacgcaatgcaatgggggaaacaatatga

SEQ ID NO: 61690 - DNA, 555 bp, Acinetobacter baumannii
atgcatcactataagcaaaaagcccaagctggggtgggcttactcgaagttttggttgccttaattttacttgctattggagttttaggttatgttgccttgcagctaagagctatggatgcatcttcagaagcattaagtaaatctcaagccattctagtgatgaggggattagcagaaaatatccgtacaaatagtactcaagctagccagtatcctacatttgtgcgtagttatagcaactatacatctgatactcctgcacccacgtcatgttttaactctctatgtactgcctcccaacttgctcaatttgatgcctatcaagcagctagaaatgctaatcaactgggtatgagaattacgatgtcaaattgccctggcgttacaaatacaatggtgcaacaacgccagtgcctatttgtcttttggggtaaaactgcgccagtgattactacaaatggaacaaatactagtgtggatgtttcaagttgtatgagtaataacggtgtttacgtgaataattcaacttgcttaatgatggaggcatattaa

SEQ ID NO: 61691 - DNA, 474 bp, Acinetobacter baumannii
atgaggggaattattccacaagaagggttcaccttggtcgagctaatggtgacgattgcagtcatggctattattgcactgatggctgcgccatcaatgtcaaatttattagaaagtaaacgtttagatgctaatcaaagagacttaatcaacactttatcagaagcgaaaagtcaggcaattttaggtcgtcagaatgtttctgttaacttgaactcaacagcttcaaatacacccacttcattaaattggaagacagcttctaataatactcttgagctaaaaaatatagccgctgatggtacgcaaagttctttaacgactaccactttagcttttaatgcaaatggagtagtggcaaatataactcaagatacgcttttatctatttgtaattctagaataaataaaaagaaagtcattattttgaccaagcttggcactttagtttttaaggccgaggagacttgttaa

SEQ ID NO: 61692 - DNA, 951 bp, Acinetobacter baumannii
atggaaattgtgttagctaatccgcgtggtttttgtgccggtgttgatcgagccatagcaatcgtcaatcgggctttggaatgttttaatcctcctatttatgtacgtcatgaagttgtacacaataaatttgtggtagatgacttacgccaaagaggggctgttttcgttgatgagctggaccaagtgccagatgattctattgtaattttcagtgcgcacggtgtttcaaaagcagttcagcaagaagcagagcgtcgaggcttaaaagtatttgatgcgacttgtccattggtgactaaagtacatattgaagtaactaaatatgctcgcgaagggacagaagctattttaattggtcatgaaggacacccagaagttgaaggtacgatgggacaatatgacaaattaaaaggtggcgatatttatctggttgaagatgaggctgatgtggcagcacttgaggttagacatccggaaaaattagcatttgttacgcaaacgaccttatctattgatgatacagcaaaagtgattgatgctttgcgtgcaaaattcccgaatattcaaggtccgcgtaaagatgacatctgttatgcaactcaaaatagacaagatgcagtacgtgacttagctgaaaaatgtgatgttgtgctggttgttggctcgcctaactcgtcaaattcgaatcgtttacgtgagcttgctgagcgtatggggaaagctgcttatctagtagataatgcagatcaacttgaacaatcatggttcaatgatacttgtaaaattggtgttacagcaggagcttcagccccagaaattttaattaagcaagtgattcaacgtttacaagattggggagctcaggcgcctaaagaattagaaggacgtgaggaaaatattacttttagtcttcctaaagaattacgtattcatgtgacccaggcataa

SEQ ID NO: 61693 - DNA, 429 bp, Acinetobacter baumannii
atgaatgcacaaaaaggttttacattaatcgaacttatgatcgtggttgccattatcggtattttggcggcaattgcgattcctgcgtatcaaaactatattgctaagtcacaagcatctgaggcatttactctagcagatggattgaaaacaacaattaatactaatttacaggctgggacatgttttgctggcggcgctactgcagcaacggccgctgatcaagtagctggaaaatatggtgatgctgagattggcggaactgcaccaaattgtacgatcacctatacattcaaatcatcgggtgtatcaactaaacttacttctaaacagattgtaatgaatgtaagcgaaacaggtattttaacaaagaatagcagtactaatgctccagctgagttacttccacaatcttttacagcttcataa

SEQ ID NO: 61694 - DNA, 1029 bp, Acinetobacter baumannii
atggcatcgactccacgcattactaactatgatgaagttttaggtttacctggttttttagaacaaaatttaattacacccgaaaattttgattcggtgttctctgattatcaaattcgagacagggacatgcattgttgtttagttagtgatagagggctttgtaatcacaaacacaatttcggttatgttattaaattaaaagatggctcactaagtataatgggcaatgattgtgctgaaagaaagtttggagcaaatggaggaatcattcaaggaatcagcctctatgagaatactaaagaagctgagaaaaaattaggtaaagtttttgattttgctattcgtattgatgaatatattgaaagattacgtaagatcgaagttaatttaaaaatcatagaagattattactttaacctaaaacttaatattggctcaagaaattatttaaaactaaatgagcgttacaaagctgctaatacaaaagttgaagtaaagacctataaattaggaaaacccgaccctgataatccgaatgaagaaactctaatttatatggcaactcatacgattggtcatatatcatcgttaaacatttttgatgatagaaatttcaaagagtttgaaaagaaagttttcaaacttcgagaggcattgagagacgctttaaaatctcacaatcaaattattgagggtgaaaagatacaacctgctgcattacgaaaaagggtaaatacaatactaagtcaattgaactcttttgatgaagtagaaacaaccatcaacacccgagtatctgatattgaaaaatttagaagaacagacccagaaattctttgttatttaactgatgattacgaagaatcaaaaatctttgcctcattaagtatggcttttcacggaattgaaaacatgaaagaagagacatatttaaggagcctagaaattaagtattctacggctttcagatgtcatagaattaaagcagccgatcatagcgttatgcgacgctctattttttattag

SEQ ID NO: 61695 - DNA, 177 bp, Acinetobacter baumannii
atgtaccaatgtgcccaactagacgaagtcacaaatcagtgccttacatgggtacaagttggttttctaggattacccgaaatcactaacggccaagcgggtgatatagccatcaagataggcatttgtatttgcttagcttggggctttaaaaaaattggtcaactgctcaaataa

SEQ ID NO: 61696 - DNA, 249 bp, Acinetobacter baumannii
atgggcgaacttactactgttcaaactcaaccacaaactaaacgccaaggcgttccatctcgtgctttagctacttcacttgtattgtctgctttagctatggcaaatgctgctcacgctgatatcgatgtaacaccagttacaactgaattaagcggtttaacaactccgatcggcttggttggtgctgcattcttggttgttctagtaacgatcaaaggatggaaaattatccgccgagctttgtaa

SEQ ID NO: 61697 - DNA, 1350 bp, Acinetobacter baumannii
atggttaatcgttatagttttcgtaatttgtcttttgataattttaaattaattacatggctacagatcttcattatagccattgcgcctaacttcattttctatcaatcagccaatgcaacctctgtcgcgggtgagggttggtctgttactaaacgcttagttcagggtgctacaacattctacgatggcactaaaaatattgttctgaatggcaagaattacgctgctactggagcagctaaaattacacctgcggctagtcaagtttctaaaatgattgttagaactggcgctgtacttgctgttgatttggcaattaaaactttgattggtgctgttgattacgtaatggatcctgcaaacaatcgcgttaaatattatgttgagcctactagtaacacaccgcaacccactgatctctatatgtggaagtatgaaagcagtgtaactggtacaacttattttcgttatccgggtgtgccttcatcaatttgtcaatcaatccttactatgtggtctggtaaaactccttggaagtatgacaaagttgctctttcatcatcttcaacaacatcagttgtttgttatttatctagtacaacaactagttacgatggtaattctggtgttgctcgtgtcaataaccctgcatacaatccaaacgcacaacctaatcgagaggaaagatatttaccctatgatgctgtagctactcaaattgtaagtgatgccacagcagataaatctgaaggcaaagcttatgtttcttcagtcgctgacactgcactagaagaagacgaacaaaaacaaatcgttcctgctaacgatatgatccaacaattaacccaatcacaagcaattcctactactggtacgggtactggtactgctgtacctgctccaacaactggtgagcctacaactggtgatcctgctgcagctactccaccttatgatattaaattaaattttcctgttttctgtgattgggcacctgttgtttgtcaggctgcacaagttgccattaacttcccaactactgtcgcgggctattggactacttttaataaatggatgaatgagtcagctacagattcaactgatacaaaaccagaaattaaggatctacaactaaattttgacgatggtgatcgtgtctctttcgaccagacttgcccacaagccgaacctatagaaatcactattaagggcgtttcatctgagacgaatttctcttttgaacctctttgtaatttcatgatcatgattagaccttttgtgattggatctgcctatttaatcggagcttatatcgttatgggtttatcaagggggaatagtgagtaa

SEQ ID NO: 61698 - DNA, 285 bp, Acinetobacter baumannii
atgggaaaaataatctatacagcattaactttactgctcggatctgcaattaagcgcctccttttaggggcaggaataggcatctttacaacaagtgttgtacagggatttatcagcatgtatatcgcccgtgcaacttcaaatatgagctttggtccttctactgcacttgcatttttggggatgtgtggtggggataaagcaattggcattctcataggcgctttaagcacttatgcaattattaaatctgcccaaataggcatacagaaattatcaagctga

SEQ ID NO: 61699 - DNA, 774 bp, Acinetobacter baumannii
atgagtgatggaaatcaaaaagtaaatcaaaatggcagacctgtttatttattctcgccaagtcaaaaagaagcagctagtacggcccaagatacttcaacatatattggtgtgttaactaactcaactaaactgatcgagaaaaataactttgcttggggacttctacattcaaaaaatactcctccgttcagcttagaacgtattaaaaaatctaccaatgcgcgtatgtatttttataaacccgataatgtaggaaataaggtatttcgaggaaaccctaacacaagtgtatctaatgtaggcgaagtagcaaaaaagtttgacaaaataggaggtaaattaggaaaagcaggagatattgtagaaattggaatattgaccagagaacgtgattccaaaggtttagttgtaaaagcggcaacaatgacaggctcaacttatggagaagcaggcggattagcattagcaggaaaaatatgtcctaaactagcaaaaggtacaccacaaaaagctgcacttgttggtgcatcatgttttggagcactgttttatttaggaaataaagctggagatgcaattggaaaaggagctggagaatcaaaagtaggacaaaggcttggagattcgcaagctgtagtgagtgttgttaatggtttagcagacgcagcagatatattggaagcacaagaaaaggcaaatgccgaagcggaaagacaaaaacagcttgaaaaagatcctatgttagaatggcacataatgggagctgattaa

SEQ ID NO: 61700 - DNA, 687 bp, Acinetobacter baumannii
atggctggtggttctcaaatcattattaataaagatggtattaccctgattacgccagggaaatttgagccgaaagctggacaacacctttttaaaggcggtgaaaaagctaattattctttaccagagatccctaacgttcaatctccttttagtaataaattagatgtttataatttatttcctgatatatctaatatcgaatattctgttttacattcaaatggacaagtaaaaactggcttccttgaccagtatggtaggactggacgcatcaaatctaatgaaaaagaaaaggttaaagttctgatcggaggcgatgactggcattattatatcgacaaactaggtggaactaagaatgatgaaacatatataaaattcttagatttcttagggaatccaataagtaatttagagttccaaatcactaatgacaacaataaattaataacatcttgtcgaactgaccaaaatggagaagcgaaatttagtagccctaatgatgactttcctattttatctattaaaaattttatagatcaaacatataaacccatgatgcgtattgaaaataattttgttcgagaaattattttaattagtcctaaaatattaaaagaaatagaattattgcctgaaacagaagaaaaaggcgattatttaagaagtaattattcagaataa

SEQ ID NO: 61701 - DNA, 708 bp, Acinetobacter baumannii
atggcaaaacgacctgtttttattcctaattctagtggttctacacttgttgatacaaaaatgatagattttcaatatcattcaggttttgcagttgttcaaaagcaaaaatctattaattcgctacatgacagtattcgagataaattagatattttcaacattttggaaatatctagtaaatcagaggtagagttgggggtggctcttagtgcttttaatctaatgatgtttgataaaaaaacacatcaaaaatttagtgttgaatgtgcttttcaaagtagtaaagtttttcaaaatggaggcccatttttggatcttttaaacgttacttcaagagaagcgaaaaaggacgaaagattaaaaacttcaggacagttaaaaaagtttactttttatggaattgattgggctttagatccattaacagcattctatgattggttatatattaacgcattaaattttaatgctgagtatcatcaagaactcttagcatatgaagcgtttactgatattgagtttaatcctgaaaaatcaataaattgtcaggcttattcaattgcaatgtttgtagctttatcaaaaagaaatctgttagataaagttagaaatcctaaagaatttcttaagttttatagtgattttaaagtaaataatgcttattttgctattcaaaacaattctcaagcaggaaatcttttttaa

SEQ ID NO: 61702 - DNA, 411 bp, Acinetobacter baumannii
atgttttatcgattgagatgtgctgttcctgaaagcaaatgggctattttagttttcaaatctgatttattaactacaaacaattgtttattttaccctgtgaatgcggcgtcatctaatgttagtagatcaccagtagatatgttccgtggagggcaagcattggaaagaatgtttacttattctgccgagagtcgtgaaagtgttcttagagcatgtgatcctacagatgttcaggcagaagtaatgattcctggaatagttactatggaaaatttgaaaggttgtattttgagtgaaaaggatttagtagaatttttttctaaaagatttccaaacattaaattcgtccactgtcattcaggaagacaagtatttaatacaagaaaagctttcctttggggctattag

SEQ ID NO: 61703 - DNA, 570 bp, Acinetobacter baumannii
atgatttataatgttgtaaataaaactacgcagatgcttaacctcagacctagtatttgggggattacattaaaagtactttgcattaaattattgtatttactgctttttatgagtggttctgttggtgcttctccaggttcaatattatatgtaaaaattaaagacaatgatgcgtgtgtatttacaaaaggaggctatgataaagcatatggaaaccagactttaatttatatgggtaaagtagatggaattaatgcctttcattcttcatattcaaaaatttatttgaatcttaaaatgcctattactgaagaaaactgcattaggataaatagtttagaatttaaagaaaattttccttactctattacgcttgaagtagatagagaatataatcaaaggatatgcgtaaaacaaaattctgaaggaaaaacggtattattagaagctaaagcagacctagagaaagggacatattgtggcactaaccaatataattactctagcaatagtcttttggctaaattaaaaaatctttattattgggtggttggcttattaatctag

SEQ ID NO: 61704 - DNA, 249 bp, Acinetobacter baumannii
atgacttacaaacgactatttgtttctcaagaaattgacaaagaaatgaaagagattattttggagaactataaatcaaatgaaattgtagaaaaacatgcttactatatgttgctaggagaacaaggattaaataacactggtgttggattcactactataggtttttgtttgtataaagataaaattcttactgagcagaaaagtgagaacactaatacatttattcaaaaatgccatgatttataa

SEQ ID NO: 61705 - DNA, 483 bp, Acinetobacter baumannii
atgaaattattatatttattactttttattagtagtgctgttaacgcctctccatatgccaccctatatgtaaaaattaaagacaatgatgtctgtgtatttacaaaaggagattacgataaaacaccagatgacaaaactttgatttacatgggaaaagtggatggaattaatacctttcatgattcttattcaaagacttatttgaatcttaaaatgcctattattgaagagaactgtattaaaattaataaatcagagtttaaagagaatttgccctattccatttggcttgaaactgatcaagagtataatcaacgaatatgtgtaaatcaaaattccgaaggaaaaactgtattattagaggctaaagcagatctagaaaaaggtacatattgtggcactaaccaatatgattactctagcaatagcctttggactaaattaaaaaatctttgttattggttagttagcttattttag

SEQ ID NO: 61706 - DNA, 264 bp, Acinetobacter baumannii
atgattctaaatgctgaacaaagtatggttcaggagatgatgcgtaactatgcgcaaaatcagttaaaaccaactgctgcacatcgcgataagacccatgaatttccggctcaggaattaaaagacttaggcgccctaggcgctatggggatgactgtgcccgatgaatggggcggtgccggaatggattatgtatctttggtactcgcaattgaggaaattgccgcaggcgatggtgctatttcgacaatcgtaagcgtataa

SEQ ID NO: 61707 - DNA, 867 bp, Acinetobacter baumannii
ttgatttgcggtattacactggcatacggttcagagcagcaaaaacaagcctatttgccaaaatttgcttctggtgaatggctaggatgcttttgtttaactgagccacatgtcggttccgatgcgagcgcgattttatgcaaagctgagcgagatggcgaccattgggtactcaatggcgtaaagcaatttattaccagtggtaaaaatgctcaagtggctttggtatttgcggttacagataaacaggctggcaaaaaaggcatttcgtgctttcttgtaccgaccaatacaccaggttacttggtgactcgtattgaagacaaaatgggtcaacatgcttcggacaccgcaaccattacgcttgaagactgccgaattcctttagaaaatttggtgggacaagaaggtgaaggttataaaattgcgctatctaatttagcagctggacgtattggtattgcggctcaatctgtcggtatggcaagagcggcttttgatgcagccgtgcaatacgcaaatgaacgtaaggcctttggtgtagagctggttcagcatcaggcggttggttttcgcttagccgatatggcaactcagattgaagcggcgcatcagctagcattgcatgctgcaactttaaaagatgcgggactaccttgtttaaaagaggcctcaatggcgaaactctttgcatcaactatggctgagcgagtatgttcggatgcaatccagattcatggcggttatggatacgtcagtgatttccctgttgagagaatttatcgggatgttcgtgtaagccagatttatgaaggtgcttctgatattcagcgcttggtgattgctcgtgaagtggctcaagtttag

SEQ ID NO: 61708 - DNA, 354 bp, Acinetobacter baumannii
atgagcaattttgtttttaagcgtggtgacactttcaacttgaacttgcagctggttgatatggatgaagccctgcaatatccaccggatgacgtgcgccgtgcaattgatctaacaggctacacattcacatcgcaagttaaatcgttggcggatggagcagtggtagctacattgacttgtgcagcattaagccagagcacacaaaagggttggcttaatgtgaaatctggagcaagcacagctgcttggcctttaggtctgtgccagatggatattaaggctgtcgtgaatggagttacccagcatacagatactttgattttccaagtgattgatggggtaacagcataa

SEQ ID NO: 61709 - DNA, 519 bp, Acinetobacter baumannii
atggcaacactaaaagagcctgtaaaaatctttattgtccagtctcttgcttgtcgtgacacccctcaagaagtagcagatgccgtaaaacaagaattcggcattgaaattggacgacaacaagtagctgcttatgaccctacaaaggttagggggaaggatctaagtcaaaagtttgtagacctttttaataaaactagagaagaatttgacaagggcgcttttgatatccctatcgttaataaattttatcgccttcgtgaaatccagaagatgtacgagaaggctggtaaaaacgttcagctaaggcagagcttaattaaattagcaagagaagaaagcaagtcagatcaaaaagattcaatgtctgaaaaagcacaaattgaacttgaaattaagaagcttgaacttgaagaaattaaacgccgagttaatccgcctaaggaaaaaccaccagaagaagattaccgccttgatctaaaaccagacgaggaattgccgaatgaacctatcctttag

SEQ ID NO: 61710 - DNA, 618 bp, Acinetobacter baumannii
atgaaaagaccttatccgcctgaatgggtattagaactcagtgaagatatgtccatgaacttctgcccagctcctgaaattactgattggcttcatcaagggatattaaatccagaaagtaacctatttaatgaagatcatgagcacttaattgagcacacaggagttaagtttctatgggctgagtgcggatttgctaagcaaggtagagatattcatgggcaagcagagatagtggcatttagagctagtggctggcaaaaagaccgacaagaggctcaaatgattaaatggtttggtgaattgccaaaagcactaattactcttgatgctcgatattgcactgactgttcagatgaagactttatggcgttggttgagcatgagttatatcacttagctcacaaatatagctcaatggggccttgttatgacgcagacaataatgcagtcctgcaaatgcgtgggcacgacgttgaagagtttcacggggttgttaagcgttatggtatgtctcgagatgtacaaactatggtggagcttgcaaatgatggtccgactatatcaagggctagtattgctcatgcatgtggaacgtgtcttttgaagttggcttaa

SEQ ID NO: 61711 - DNA, 237 bp, Acinetobacter baumannii
atgagtaaaactatttttaaattgattgttaagttccttcaatttgttgtagtggggctttctacgattggcttgttttattggatcttcggcccagcgattctaagtgatgacatgagccgaatgtttattgttgtagctgttttatgtgctggagttatttcccacttagctaccacacaagaaattgatgagtggtttgatgagcactttaaaaaaggagccagccatgagtga

SEQ ID NO: 61712 - DNA, 369 bp, Acinetobacter baumannii
atgaaaccagaacagtttattcgtgattggggtttgccagaggctaaacgaattattaatgagtctcctgaatgggcttctgagtggtgcatggattgcaaggactacattaattattgcgactcagatgttgttagtgattgtgaatcttgtgtctctattgctggcctagagcgtctggtggagtctttggacatcattagcgacctagatggaatcgatgcggcaaaaggaacattggctgaattaataaagctcgattgggatgaatttgagcatcgttggattgataactggatgtgcacaagaccacgtttagaacaagccatccgcgaccacgaatcaatatacggaggcggggatgagtaa

SEQ ID NO: 61713 - DNA, 456 bp, Acinetobacter baumannii
atgagtgagaagattatgacacagaaattcgaaattaaaaatcgcttcacagaagaagtcctttttacctgtgatgttcctgaaggtatggaatcaggaatgattgctcgtcatgtattagaaagtgcgattgctgccggtgccgaccttagctgtgccaaccttcgcggtgccaaccttcgcgatgccaaccttcgcggtgccgacctttttggtgccaaagctgccccgctcattgtttacggattgcgctggaatgtgattattagtggcttggggaaaatgcgaattggctgccaagaacacagtgttgaagattggaaatcatttgatgatgcgcgtatcacgcgcatggatagcgaagcgcttgaattttggaatcaacacaaatcaatgcttttgaatatgtgtgatagctacgttcatccagttcaggaggaatctagcaatgactga

SEQ ID NO: 61714 - DNA, 186 bp, Acinetobacter baumannii
atgactgagaataaatattcaatcaagcaagcgtttgttgatggtacgtcaggattcttattgttctgggtagttttctttttagctgtaggttttttacgtagctgtgccgacgaacaagcagcaaacgaactcaaagcaaaacagaacatgtatgtgcgtgtgcaagtggaaggagctaactaa

SEQ ID NO: 61715 - DNA, 192 bp, Acinetobacter baumannii
atgaactcaaaagcattatgcctccaggcaaacccgaacctttattgtaagcctattggtgctggcatgttccagttttaccaaatctttgaaggccaatatttctttgctaactcagctaatactgaaaaagcagcatgggatttagcacttaagaagttggaagaagacaaggagccctctcatggataa

SEQ ID NO: 61716 - DNA, 771 bp, Acinetobacter baumannii
atggataactacaaaatcaaagttaaagatgaagctagcgcagatgaagcaagggatctatttaaaaagattggttaccagcctgataactcttcatatgaaccatatgtgggatgggttgcagtttttgaagatggtagcggaagtttctaccgccacaatatgaatttggatgagtgcgtagaaattactatagctcaactccgcgaccttgtcgtgttgaagcgtaatgatgtgagagatgcgacacatcgcgacaagctggatgaatcaatctatttaactagcgataaggtcatttattactggtgtggagaatggtgtaaatcagcaattaataaatcaaatgactatgaagattatattgcgaatagcctgacgcctattactcaaccccaagacccagccttgattagcggtgcggaggcaaagcttgcgtgggctaatggagttgatattcaaatcaagaatgtaaattgtgtcaactggtatgacttagatgagagcaaatacaatcttgatatttttgataatgttcgtgttgatttccgcctcaaacctcaaaccatcaagcttgaacttgagctaccgaagccttttgagccagaagttggtcaagaagtttggtttattgatgacaatagcaaatgtggctactcgcgatctgctgaatatgggagtgacatttactcttactttggttggtggcgcaccgaagaagaaatcaagcaagtcgtagcgcaactcagaaagatacgaggtgcctcatga

SEQ ID NO: 61717 - DNA, 624 bp, Acinetobacter baumannii
atgaaaaattttaatgaatttgaattaataggaatagaaatagctcttttactaatctgtataattttttctctcatgggaaaacatatttttggtctagaaggagactatttgtctgctgcagcaactttatttgcttcagttattgctcttatacttttcaatgattggagagatgaacaagaacatcaggtgttcactgaacttataaaaactattaaacaagattatagaaaattaaatgtcaaatatattgaagatttatatagcttacatgaaatgctacacaagcttaaattcaatcggcctacacaagcattgacgtttgaagtaatcgaaaaaattactttgtcatatactactttctcaagagtatttaaagaaattaagagtgactttaataattttgatgagatgtataaaacgattattgattatgaagatgagctatataattcttatcagaatgtatgtaatgaaattcaaaaaatcccagatacaaataactatgaagaaacaattaataaattaaaaaattttagagatctcgaaaatgacttggttggtaaactttatgttgagatcgtttttagtttgatagggaagttatcggctaaaggataa

SEQ ID NO: 61718 - DNA, 630 bp, Acinetobacter baumannii
atgaaaatatttaaaattatatgcaccctaatttttagctttctattttttttaagttgctcaatttacttcaagcatgaatttaatattgatggagattatctttcagcattttcaacaattgttgctgctactgctgcattttatttttataccgattggaaagatgagcataaattcaacttattgaaacaacatcaggactatttaaagatcaaaggggcaaaattgcttgcccattttagaaaatctcaagtgttgtttgccacgattgaaggttcaactgtgcaagagggggaaaagaaatggattgatgcttgtgttgagataagattattctcatctgaattaactcatattcaaaaatccctcctagaatataaaagttgtctttctacttttgaatcaaatgaaattttggaaaaacataaagataagttggagaaatacagtactagaatttcgcaaattaatgatgagtttgtttctaaacttccatatttcagtataagtgcaagtcctcagtgttcagatgttctcgaaagttggagagattccataataaagtttgattttttttgttctgtagaaatgtctgatttttattttaaatacttaaaaaccaaataa

SEQ ID NO: 61719 - DNA, 372 bp, Acinetobacter baumannii
atgaacaataaccctgaaacaatcgaaatcaatggtttaaaaaccattcacaagctttgtgaatttgctgtaaatcacaatatggaaggatgttcttttacagaaatcgttgaacgcatgttctctgaattagaggaaaccaccaaaaagcttgtgatgaaagcaagtcgagtcgaattaacctgtgaacaattatatgccgcagctaattttggctcacccgataatgaccctgatttgatagatacagaagtcacgattgcttggtttgagagtggacacagtggaagtggttactacgcttatatcagtgaatatccagaagaaggcgcaatcaaattagaaagtaaattgggagcagaacagccatga

SEQ ID NO: 61720 - DNA, 369 bp, Acinetobacter baumannii
atgacaaatttaaataaattaagaagtgattttgaggctatttactggaatccaacagcagtagattggttttcttttaatgaaaaattgaatcgctatattgaccttgacccgcatacaggaaactttcctcatgaaagtgaagaattgattcatcaattgaatcagttaaacaacgcttgggatttataccaaaaagccaaagcacaaacagtgccaaatgaaatcatcaatgaaattcaatcttggattgctgttaaatcattcgctgtagaagatgcacatccagatttgccaatcattgatgctaatgaattaggtgaatttatcgaacaattagttaaaggcgaatcgggagctgagcaatga

SEQ ID NO: 61721 - DNA, 723 bp, Acinetobacter baumannii
atggcagaattaacaccaggtgatcgtttgcgatttttaagaactcaagccggtctcaatcaaaaagaactttctaaaaagacaggtgtagggcaatcatctatttctgactttgagaacaatgtgaaaattatggctgctgataagttggcagcaattgcaaaagcattaaacagtacatctgagtacataatctttggtggctctaatgccaaattaatggaagataaaaagcttgctgtctgggaagatggtgatgaaattccatcagatatggtagcaattaagtactatgatgatgtccgtgttagtgcgggatatggttatatgaatgaaaccccacaaacacataagcagctttggtttagacgcgattccttagatgcttataatgtaagtattaaagattctgaagcagtcgttgtgcagggtgaaagtatgtaccctgaattttcggatggacaagttattgctgttgatagatcagccacaaaaatatttgacggtgaaatttacgctttccaagttggagaagacactaaagtaaaatttctctttaattggacagaacaaggtgaaggcggttttaaagcagtttcacgaaatgaggataaaattcgttttccagatgagtactactcacctgcccgtatagaagcagaaggaatatacatcattggtcaatactggtggaaatctcaacttaaaagaattagaagataa

SEQ ID NO: 61722 - DNA, 204 bp, Acinetobacter baumannii
atggaaaattggcaagaaataatcgctgatattaaacaaagcggtatgactcaaccacaaatagctgctgaagttccttgctctcaaagttatgtaagtgacttagagaatggcaaaagaggacaacgcatttcccacaagattgcttctggtctcttagctcttcataagaaagttactcagaaagcggaagaaaccacatga

SEQ ID NO: 61723 - DNA, 144 bp, Acinetobacter baumannii
atgaaatatgtttttttaataatggcagtacttgcagctttttgtatcgatcataagcagtcaggatcgtataacacgattcttttgattactgcggctgtcttctcaattgcagcgatagttaccgattacatcggtaaatga

SEQ ID NO: 61724 - DNA, 2262 bp, Acinetobacter baumannii
atgcgtatcccacaatttaatcgacaagtttcggacaatagtgttccaaatgtacaagtcagtggcggcatgtcagcaggcgaagccgctagcttagttggtaataaaactgatagcttagttggtgcacttaattcaggtttgaatgcgtaccaagcataccaagatgaagcggaccgcgtacgggttattgatgcgcaaaataaactcgctgaattaaaactccatttacaaaacaatgatgtcgacgggtacggcaacaaaaaaggtgtagatgttgttagttttgatgatggcaacggtggcgggtttgtagactactatacaaaagcatatcaagatggagttgggcaaattgcaaatactttaggcaatagccgtcaacgtgccttgtttaaagaaatgtctgaacgtgacgcggtgcagttcaaaggctcgttacaaaattactttgtacgtgaaaatgatgtttatcagcaaagcgtttattcatcttctgcagatcgttttattcgagaaataaacgagaatcctggtgacttcactaagattgatgaaagccgtgctaatcttaaagcttcattaggtaaattaatgaatcttgaaggaaaggcagcgactgaagcagaaaacatttatcttaaaaatgtctcagtggcccacattacaaacattagcgcctttgtcgaaaatggtgatttaaaagcagcacttgcctataaaaataaatataaagacgagatttcattagcagatagctttaaggtagatcagcgtattcatcaaaaacttgaagatcagcaagtcgaatctttagttaatatggccacaaccggaactcaagagggcagcaaccctgctttaaacgttcccccgcaagcatcagcaaaaattgctcaggagcttaaaagtcttacacctgaacagatgaaaaacatcaaatacaatgatcaacgtttggatgtttacactgtgcatgctgcaaaagaaaaaggcatggaatgggcagcgcctttaattttaggactaagattggctggtgaaaaatctaataatagtgccgtttctgaaaagggtgctaaatctgttatgcagtttatacttgatacatggaaacagtacagtaaaggcggtcaaagggatattaacaaccccgctgatactattgacgctgcttttgattttatttcagacattagtaaaaaatataaaacaaaagacccaatggttattgccgcttactatcatggcggggatgaggatgcaagaagggtattagcaggggggcaacctaaagggcctagaggtcgcgcgtatttagaacgtatggataagtggttaactaaagattttgggcagtacgcaaacaagcctgcaaaaactcgagaacaagcacaatcagagatttggaatagcaatgcgcctgtagagttgaaacaaaaagccttaatttttaccgatcggtactacaatgggttggataaagctaaagaagaaaaacaaaaccaagtatacgattattactttaaaggtattaattcgggccaatttacttatgagcagattcctgtggttgatattaatgctttagagcccaatcagatcaaaagtttagaagcggtcagtaatgccaaatttaaaaaggatattaaaactgaccctacgatttacagcatgataatgctaaataaagatgagcttttcaaaggaaaaccacaatcagttttgcatcagtacgctgataaattatccgcatcagactatcgtgctgtcacaaaaatgtatattgatgttaatgctccaccaaaagatgtaagaaaagaagatgctattgaagttagccctaagacggtttcggattatttaaatccatatttacctatgcttggtattacaaataagacaaataagaatcagatcgatcattatgccgctgttcaggcagacgtaacacaaacattgcgtgaagctgaagctcgaaaaggaagcaagctgaccaaggatgaatttagtcgagctgttcttaaaacgatcgggctaaataccaaaatcacaacatcacgttctttgtttggtgtgtcaattggcagttctgaaagcaatttaaatcgcatatactcagttaaaagtaaagacgatattgctcctaatactcaaaagaaaattgatgacttgtttaaaaaacaaggtcgtgatttatcaaaagtaacattggcagaatatcttaatgcttattattcaatggctagaagggggttttaa

SEQ ID NO: 61725 - DNA, 393 bp, Acinetobacter baumannii
ttgaaaaaagtattgattgtttgtttattaagtgggtttttaaccccattatcgtttgctaaaagtgaagttcagactgatgaacctacagagatagcatttacaaagtggatgtcgtgcgtggatgttagcacaaaattttatagtctttctggcgagtctaccgaaaacatagcaacggcagttatgggaaaatgcagagttaatcaagaaacatttaatgcggttgctgaacaatctatgctttctgaaacatcaaaaagtaacgctgatcggaagtatgcaagagtgcaatcaaacgagttaacagcagagcttgcatcgcaactgaaggaaagaattatccaaaaaatagttgaagaaaaagcgataaaaggactaaaaaaggaataa

SEQ ID NO: 61726 - DNA, 2415 bp, Acinetobacter baumannii
atgacagttcctatttccgaccgtttaagccaactgtatgttggtaacggcacaaacacccgatttgattttacctttcgagtattcaatcaagaagatgcgacgggggttgctatccgtaaaaaaggtgcaactgagtttgaaacagttgacccttctacatatacagttacccttaatcaagacggctttggggggtacgtaacatttaacacaccgccttcatcatctgtatatttttatatagcgggggcaacccctcttgatcaacttcttgatattacaaattacgacaatttttatcccgatgctattgaacgtgcgctagataaacttactgcattgcttcaagagtggggcacacaattagaccaagaaaaacaagctcgtatattagctgatatcaactacgactctctggcaatggaacgtgaagagaatttagaaaaccgtttgacaagttatatcaacgctttaatagggatcactaatccaaaggtatttgacggtattacagaccgtatggttatcacaaaggatggtagaacccaaagagagtttaacgaatctgttcctttttggacggacgattatgttgcgttcaagcaagagacttacatacgggaagaaaagatcattgaacataatattgcgactgttgctgaggaacaacagcgcgcgattattagagaagatgatatttacaatgaccttagagcaaaaatcggtggtttagaaggtgggtctgcaaaagcttacaagaccttttcggaggctcaatctgataccgctaacattcccgctaactcaacggtttatgtgactaatgacggtgataataccgggctatataactttgatggcgtagcttttgtaaaaagtgattatgaccctgttaagcaatccaatgaatttactaaagcttctatttcgtctttatcccaaaatctttcagaaataaaaaaatctaatgaggactcatctgtgatccctgttcttgtcgattcgcagaataaaatattaattggatacaatgaatctaaagatcgaattgaggcaggggggttgcaagaacaagtaattgaaaacttccccaatttaatgaagtcagaagacacaacgaaggttgctgttctaacagactcaatgcacaaaatcttgatcggttatgatacggagaaagatcaagcaataatcgcaggccttgaattaccaaacaaaaaaccagaagttgctgaagtaaatcatttcgtatttgatgggcagtctctaggcataggtgcgactgctactacaatattaagtacataccagccttattttaatgtgacatttggtacgggtcctcgcatggactcagccccagtctcagtcattccgttggtagaacaatttaatagcccggcatcagatggtggcacagaccgaggcgagaccccatgttcgggtgcagcaaattacgcaagccgtgcaatgatgctagaaaatgggattaacccgaaagaccatgtgattttctgttcagctgcgggccatggcggataccggatcgatcagcttgaaaagggcacaacatggtatgagtttctactccaccatgtttctgaagccaaaagactaaattctggtaaaacttacaaagttcaagcaatcgcttgggtgcaaggtgagaacgatgctattaccgggacacaaacttcttatgagctttatcgtcaaaaattagaaaaattacaaagagatgctaatgatgacatcaaggagattacggggcaagtcgatgatatcaagtttatttcatatcagctctcatatgcggcgcgcacatggtcagcccaagctttagttcaactccacttagctcaagaatctgactcatttgcattgtctacgccgatgtatcacatgccttacgccccagacaatatccatttaacaaatgtgggatacaaatggatgggggcttatttcggacgagcatataaacagttaattgttgataaccgtaagcctgatttcattaatccaaaaggggcacaattgattggcgatgaaattcatatccactttgacgtgccgaaggcccctctcgtacttgatacaacaactttagcgcctaccacagatagcggttttaaagttttagtaaatgatgcgtctgcaacgatttccagtattactgctgaaaatgacaaagttattatcaaaatatctagcacccctgctgcaagtgcatcagtaaaggttagatatgctctcgattatcttggcgcaggaatatctataaccgggggggcttctggaaatcttcgagattcaacaacagattcaattaaaattgcaggtgtagaaagaccgctatatcacgtatgcccgcattttgaattaactgcatttacagacaaaggaatttaa

SEQ ID NO: 61727 - DNA, 780 bp, Acinetobacter baumannii
atgactcaattattttttaaagctgaaaattttgtaagcgatcgagcactacctgtattgaacgatgtagggccaattgttcctaatcttgaaaacaattcttatgaccactgggtgtttaaagactcatcggcttctctaaaaggtgttgttaacggtcatttactgacattacagcagaatgcagcatatgtgccagtgtttagtaatagtggagttacaatatcaacggccatggggaatgctttgatcagtgatattgttgattcgtcagaccaaagcataacaatggctgcagtagttaaatgtaacacaacggccttatctattttattaggtaatttagtgccgagcaattccacaacaagtagtggtttgtctgggtttgcaagtggtggtaaaacttatttaaccgttaagcccacaactcttggtggccctgggggcatttcatcattagcgtgccctagtaatatctctcaaacatccaatttctttattgctattagcgtagataaagtgactaaacaaggaattatttttacaaaacaagcagatattgaaaccagcaatgaagcaacctatactgctgcaacatacgatgcctcattaaataatcacgctttaggtaatagtgcttactctttgcaaaatacgttgaccaatttagcaacattcgcagaagcaatattttttaataaggcgttaaacatgactgaactccaagggttggcgactaggtcaaaatctcgaatggctgatagaggaataattctatag

SEQ ID NO: 61728 - DNA, 1191 bp, Acinetobacter baumannii
ttgaatatatttatgctgaactctcggcctcaccctacacgccctttaattaaatatggaacattacttttaggtgcgcttttagcgggttgtaattcctcatcaagtttagaccccacaccgacgcaaaagcagatcacaattaagcgcgataaattcggtacaccacatgtatatgcaaataatacctatggacttttctacggttatggctattcggtagcgaccgatcgattattccagatggaaatgtcgaaacgtacaggacaaggtacagtggccgatgtgctcggtcccgactatcttcaatatgatattgcaacacatagccgttttgacccagaaaatattaagcaacaactcgccgcgctctcaccagaagaccgagcaatttttgaaggttatgccgcaggttttaataagcgcgttaaagaggttttagcagatccagctcttatgcctaaagagttcacagatcatggttttaaaccatcaacatggcaaccagaagatattgctatggtttgggtgggtttaattttaaatcgcttcttttcagcaagttcggaagtatcaaatttagatttactcacgcaattgcaaaaagaaaaaggtcaagaagaaggccttaaagtctatcaacaattacgttggctagatgacccaagtgccccaactattattcaatctgcacaaaaaccacagcttatagcgcatcaacagcaaatacttaaagacattagccctatttcaaacaaagcagccaaaacctatttagctcaagctcgcattgctttaggcaaaagtgtgatagacggtgtacctaccgccagtaatgcatgggtcttaaaaggtgataagaccattgaaggccaagcagttttatataatggcccacagcaaggatggtatacacctgcaattacttacagtattggtttacatggggctggctataatttgacaggtataactccagttggcttgcctgcaattttatttggaactaatggcaaaatcgcatggggttcgacggtaggttcactcgatactaacgatgtttatcaactcaccctaaatccaagtaattcaaaagaatatttatataaagggatttatattccatttgaacacaagcaagtaaaaataaaagttaagaatcaggccgaccatgtttttagatgtttataa

SEQ ID NO: 61729 - DNA, 420 bp, Acinetobacter baumannii
atgtttaatttaattgataaacattttaatgaattaatgaaatcgcctaagtttcaggcattagatggtatttggctatcaattagtcgattaggtaatgatttagaattttatgaaattgtggacaataactttgatttaaaaaaaacaatatttttctatattttagaaaagttaatgaaaaatggtgatttattacttgctaaaagcgaaaatgatgaaattttatatgacatgcctatctctgagcaattggaatggttcaaactatcattccctcaatcagaacgacatgcggaggaattaggtgttgttgatgtcggaacttggcttgttgtttatgataaagatttttgtccattaagacctgtctgggtctatacacttaaaaatggtgaaaaacatttagagtgggcataa

SEQ ID NO: 61730 - DNA, 297 bp, Acinetobacter baumannii
atgattaataagtttaatgttgatcaaattgactatatgttaaattttcaagaagccaaatatcatcatttaggatggctgtgggatgcaattgacagcttagaacgaaatatcggtttgccagtaagtttaataaataattttgctttgaaaaaagaattttttttcaatatgttgaggaagttaattttagaaaataaactaaaattagctagaaacaataaaatactagatgatgaaatttcaggggttttatctgaatttagcttaatttttcctatatccgaagagtcttga

SEQ ID NO: 61731 - DNA, 312 bp, Acinetobacter baumannii
atgaaaaatgaatcattcgatattgctaacatgcccaagtatggttatattaatcgggctttgagcaaaatctcaaagttagctttggtcggctatgaatactcagcgcatacagtccgcttaaagggctttttttgtatgcgtcatttctctatgcgttcgcatgttatggcgaagctggagggggaagcgttcgcgcttgccagtcacctgagttactggtcgaccaacccctttcagctttgccacctaaattatttggtcgtaattggcaaagctcctacaaactcaggagcgcattatcatgcctaa

SEQ ID NO: 61732 - DNA, 675 bp, Acinetobacter baumannii
atgaataatagcagttttccaaactacaccacaccttcaatacataacccagaacttatatcttttgctaagagcattaactctggggatctaattaccacaccccacagtattgatttactcccgataggcaattgctattggaatgttgaatggttagtacaaaatcaaggaggtggtgttgtatatggttggattttttcagaatggaaaggactcatgcttgaagctatgcaccatgcagtttggatttcgcctaacaatcaattaatagatattacacaaaactatccaagcatgagtgaaacacattctattttccttcctgatccaagtagtagtctgctcacattagatgtacaacctaatattctaaataaagttaaattactttctaactctcaggaactaatagatttcaacaacctgcaggataagaaaattgaaatacttcgcgaattaaatcaaatattttatgacttaggacatcgttgcgaagcccaaagatccaaaataacaggtaagccttttgacttctctcctaacatgtccaaagctacgaatgaccaactggataaaatcaaaaaattaacgactgagattaatcagatagaactagtttgtggtcaatatattccacgtctaaataaattgagtcacgattctgatcactaa

SEQ ID NO: 61733 - DNA, 174 bp, Acinetobacter baumannii
atgagtgaattaaaaaaagatataccagagattactggtgaaatgatttcagatgtacatcgaattttacaatatggagccagcttatcctgtggaattgttagtgatcagaatcgtgactcaatttatttagacgtggaatatattgaccacaaactagttctatctgattaa

SEQ ID NO: 61734 - DNA, 915 bp, Acinetobacter baumannii
atgaatgagttggctcttttcgcaggcgctggtggcggagtactcgcatcttatctcttgggatggcgaacagtgtgcgcagttgaacgtgatgcctacgccgcacaagttttggcgcaacgacagaatgatggaattctcgaagctttcccaatttggtctgacattacaacttttgacggaaaaccatggcaaggaattgttgacgttatatctggcggctttccgtgccaagacatctcatccgcggggaaaggtgctggaatcgaaggtgaacgttctgggctttggtcagaaatggcacgaattattggtgaagtacgacctagatacgtgttcgtggaaaactcaccaatgcttgtttccagaggacttacacgagtcatcagtgaccttgcccaaatggggtatgacgcgcaatgggcacgtttttcagcatctaactttggagcgccccatatccgtgaccgaatctggattgtgggccacgccacaagcaagggattttcgaagtggtcaaccccaacgatgggacaatccggatcgatcgagaaacctaaacgatcaagttgcgaaattcccaactcccaaagcatcggatgggaacaagcgtgggaaggtgagcaatcatccaaggaacggcttagccggtgttgtggagaatcttccaactccgactgcttcaatgagcaaaggctcatcaccagcgactctgaccaggaaagatggcaagagcaggataaacgatcggctcgatcatcatgtaatgaactcacatggtgggaagttgaacccgaattgggtcgagtggctgatggggtggccaatcgggtggaccgacttaaagccattggaaatggacaagtttcaatcgtggctaaatgcgcattcgaatatttaggtggtgcaaaatga

SEQ ID NO: 61735 - DNA, 978 bp, Acinetobacter baumannii
atgcgaaaactttcaattttaaagtacttacgcttaaatgacctttgcccaatcttcaatatccaaaaatctgaaatctacgatcctactttaaaaattgaagacttcattcatgagattgaggaaaaacatacgctactgacagacaacaattcatctgccaatgtcacggcgcttggtgattttgagatctgcagaaagctcaataacaccttgtacgaaaacaacaacacggtaaaagactttactcaagattttgtacatcagattcttgaagcaagacgtcttgaatccatcacacctgaagggatggcacctggacaaagaacagtaatgtcttcgtccacggcgaaaggtgaaatctccaaagaacaaaaacaccgtgaaagtattgtttcagcacaaaaagaagcaaacattaaagaccagattattgagaagcgaaaacagttccagtacttcggtaaagattctgacatttcacctcaagtacaagctggtgcttacaacaatgcggatcttgatgctgaatttaatatctatggtgaacgtataagcgaacctgaacaggctcaacaggaaagtgatgttgaagctgtgactcgcgccttaatcacaccaatgaacctagacagctactatgatgaattgaaagagatcctaacaggatatgacttaaccgttgcgccaattactgaatatcagcttgttcagatgccacgccatgtaaaacctgaagatcagacacaatacattgcggaaaacaaagccagtcttgatcaagccatctcacatagcactcaaaatgaaatggaattcgtagaacaacagtatgcagctaagtttgaaaaagctttgatgaaaaacccgttctcgcacgaatgcgttacttttgaaaaattgttggtgatacttggttcaaaaggttcttcagcttcattacgatcaggcattacaatcaaaaaaaaggatgactaa

SEQ ID NO: 61736 - DNA, 174 bp, Acinetobacter baumannii
atgactaaagaacagctagacgacttacaaacacttggaatgactgactataaaacacgtttacacgttaaaggtgtgcgaattattgaagtgcaacagtactcaaagtctgtcgataacaacgccgtacaaccacttgcaactaataccactcaaacgcaattcttaaattaa

SEQ ID NO: 61737 - DNA, 1089 bp, Acinetobacter baumannii
atgttagacactttactttcggtattttcaccaaaacataagctttataagaatctcaagctaaaaccctttattgatacctatttagtcaattctgacagcatcgccatgaccgatgttttcccttttcatcaaatcaaagattctctttgtatgactggtatatctcctactaattttgtaccaggccaaaacattgttttgaatccacatgccaaagataacgattccatcagctaccttggtcaagatacgcaaaatcataagccgttctacatctctacctttgctgaagaattggctgaagtatttaacccgatttttgcagaaaccattcatcttgaaacaccatgcttacttgacctatctgaaattggggggttctcaaattccaagtcggatttaagccagtaccgtagcattgatgattttgtaaaaaacgcatgccctgattacattagtgatgtgagtatggaaaatttagatcaaatgttgttatggccagaaatccgtttattgaactctccagatacaaccactgatcaattttttatctacggctggagccctaagatttttgttcaaaatgctggtggatcacatcacatggctgctgcacattacttggctaagaaactgagccaatgtgtgccgattcaaggcaaagtaagtttgaatcttatctcaaataaagcacttcaaaactttgattcaaaatacgctgcgttcgccgtgacacatgatgcattgattgatatggggaatgatttatctgaatcagggcttgaatatcagctggtgtttttccgtgaacgtgaagttaattttatcttcttcaaaaaaaatgatcagaatgcccgtattatttcgctattcaacaatctgcatgcttcattgaatggtgcattaaagacggcggttcaagcgcaactcaaaaatgaagcactactcaccatcatgagtgctaacctctctgatacatcaaaagatcaattctttagcacacgacctcacttggctgagatctacaatcacgttcaaaacgaaatttgtttgagtggtcctaaaccgactagcccgataatctaa

SEQ ID NO: 61738 - DNA, 507 bp, Acinetobacter baumannii
atggatcaccaatcatcaactacaccacatgcactcattctcggtctgacacttgaacaggccatttctgttttagcaaagaaacccgttgatgctacccactacaactatcttgaagatgacgagtacaacacctacgtcatgatgaaacctgagtggactagcctcaacaaacatgcctacctacatgtagatggcttaacccatgagcgtaaatggaagtttatgcctaatgctttaggtgagtacaacttgatagagggctgtattgacctgtttgaacttaaccaggccatcgaacagcaatatcttgtgtttgaacaattcctgaatagccacgacacaccgttccgcaaagttggtgagaagttttcttttgtcacacaactgctctttgatgcatgggtgatagatccagaacgtgcgattcaaaaacttcatgagatgaaggaaacaaaaatctcattacaagtgcctttgcttcatgggaatagtcagcatgattga

SEQ ID NO: 61739 - DNA, 177 bp, Acinetobacter baumannii
atgaacatgaatgaaaacattgcttcagaaattgaagctcgtaacgcttttgaaaataaatacggcctggtcggtagtctgttggccagtggcaattattcttcttgggtgcatcaggcgaaatgggaagcttttcgtgatggttggatgcaaagtgaagtagatgtttttgagtaa

SEQ ID NO: 61740 - DNA, 1956 bp, Acinetobacter baumannii
atgattaaacttaaaaatattgagatattaaaatataagtcatttacaactcctcaatcaataaacattgaggaagatataactgttttagtaggaatgaatgaatcgggaaaaacttctgttttagaatgtttagctaaaactaattattttgaagatgatgaaaagtttaaatttaacgaaacgttagactatcctcgaaaagaactaaaaagtatcagtaagtcggatagcaaacctaaagcaattatttgcacttatcatatttcagatgaactaattggcttaatcgaaaataggttaggtaaaggaacttggcaaggaagtaatgaaatcaccctaacaagttcttatggtgattcatctacattaataagtggtgtatcgataaattttgaattatttttaaaacacttaaatttatctgatattggtgatgatgtaaaaactgagttgaagttggctctaacagaagagaaatttgatcaaatattaaagaagttcccagatgaaaccgaaaggttagagcctttaagaaaatatttcttcaaaagttctacatggatgacttttattgaaagatatgcatatagtgttttaataaaaagacatttaccaaaatttatttactatgatgaatattatcaactcccatcaaggattattctagaaagttttttagatgatgatgttgatctatcggatgatctaaaaacagcaaaggcactcttagatttatccgaaattaatgtgaatgaacttattaatgcagacgatttcgaagactttattgctgaattagaagcaactgaggctttgatttctgacacactatttcaatattggtctgcaaatcagaacttaaatattgaatttaaaattgataaaaaaacagctactgtgaaaaggcaagtaaatacaagttatggcagtgctacaacggtcgatacaaatattgttgaacatgtcttagatattcgagtaaaaaactcgaaaacgagagtttctttacctcttcagaatagaagtaaaggatttaattggtttttttcattcttagtttggtttaacaaaattcaggctgattcaaattcaaaatatattctactcttagatgagccaggccttaacttgcatgcaactgctcaagcagatttactacgttttttagaaagtttagttgataagtatcaagttatttatacaactcactcacctttcatggtagaaacaacgaaattaaatcgggtcagaacggtatttagtgactccgatagctctatcgttagtgatagtattcaacaaaaagaccctaatacacttttccctttacaagctgctttagggtatgatgttgcacagaatttatttatttctaaaaaaaatctattggtagaaggtgtctcagacttactatacttgaccacaatttcagaatatttgaatgcgaataaacgaactggcttaaatgaagatattacaattgtgcctacaggcggtttagataaagttgctagttttatttcattacttcgaggttcaaaactatcaattttctgcctattagattcgtttactgaccaaaagtctcaggcaagatttgatagtctaactattcaaaaaattatatctgataaaaatataaaatttttccatgattttttggataatagaaaaaaagctgatattgaagatatatttactattgatgaatatctgcaactttttaatatttctctctcatctacccatgctgaaattaaggtggaagaattaagtactgaaattgaagatatattatcaaaaattaataaagttattaaaaagaatagatttaatcattatttacctgcaaaagaatttgctagtaataaggattttgttaatagcctttcagaagctactttatcaagatttgaaactatctttaaagaggtcaataagaatcttaaatag

SEQ ID NO: 61741 - DNA, 387 bp, Acinetobacter baumannii
atgaattctaatttcacaagaattattcctatttattcttttccatgtatagaaatctggtttcttttacattttgaatgcactactcgtccatttaattcgcaaggaaaaaaatctattggtgaagtaattaaagattattttcaaagtacttatgcaccagattatacagaaactaataaaaatgtcattgaaagtttggttcctgactatgaacgggctatatacaactcaattcgactgtgcaatcaacaatctaaagtaaactcaattaatccaattaccaatatgcatgctttaataactttgctaaaaaatatttctgaaagatctcagaattatgtatatgaagatgtctatcaatctttcattcaagaaaatatttaa

SEQ ID NO: 61742 - DNA, 804 bp, Acinetobacter baumannii
atgaatatgttggtaaatataaaaagagaagtgcaagcatctgaattagactttgttgaagtcaaaaagctaattttgcaatgcgaaaaagcaaaatcgtcaataaaggtcatttatgaatccatcaaagatattgaacttgatgcttatcagattgtgagtgcaatcacccgaaaatcatattcatcatcattcaacactgaagaatctgctttaaaacaaatatcatcatgcttctggaggaagttaactgagatcatcaatcttagaaacttcatatctgaaaaagaatatgatgcgttgcaagataaaattgctcgtcatgcaattgaagatttcacgatggataacgtgaatgtatttttagaatctatctggtctacacgccacatggcatatgcacgtaaagttgattcattgtttagtcaattatcaagcaaatacaaaaccaatcttggtgctggtattaacccgtgcgtgatcattcatcacaatagctaccattcttattgcagacgagataatttagtggaagaagtacgctttatagcaaggcagttatttggcaagcctttagaccacaccagattagataaactcaggttacaccgtggtatctggcatagcattgatgataatttattacgcattaagatctacgaaaacggtaactgtcatatcttgtttaatcaatgcgtagttgatcgcattaaccaggtattaaacctgttatatccaaatcaaattggcatagatccaaatgtaaaacacaaacgccgtgcgtatgatgaacctattttgtaa

SEQ ID NO: 61743 - DNA, 504 bp, Acinetobacter baumannii
atgcgttttattaaaccaatcacaatcgctctgatcactagttttggggctggttgctctcaagttgatgtacttcgttcaggtaccattttcagcaaaagaaatgccgatggtgttgcctgtatataccaacgtttgccagatgaccgtaatagtgctggcatgtatacgaaagcttttgaacaaaagtggggttgggaatgcccattaacgtttaaagaaagcactgataaacaacaagcactagttagacaagaaacactccggctcactttacctatggacaatgcagatctgaaattaatgattgaagatcctgagtttcaaaaactcaaaaaacttgaaccgttaaagacctttattgtcaaagcaaaagaggatggcataatcaccaatgctgaatacatagctattcaacgcatgattgtagatttaagacctaaagaactttcacctgaagacaaagcagctgcggaacggagcaagctcttgagccagttataa

SEQ ID NO: 61744 - DNA, 483 bp, Acinetobacter baumannii
gtgattaatcctgtcgaattgtatttttgtgaaaaaaattcacaacctaaaaacatagttaaaatagccttgttgttattagatcctagtatcctaaatatgaatcaccatgaatataaaatcgaacatatcaagcaacgtgcgttatgtgccaacctttatatcgttgatgaaaacgcatcatttttaagttttaaaacatatgaagataaaccagctcaagaccgtcttgtacttgaaaacatcaccattgctgaagcgatgaaattagctgaaaacaatggattctttaaagctaagtaccaggtgcttaaagtgattcaatattttgatgttgaattggtactcacggcgtctgatgttgagcactgtgctgaattacaccagtttagcggtggctataacgtgacggtgcttgctgatacacctgaacaagatcttattgaaatgtggcttacagcaacaaaccaaaagggggcgtag

SEQ ID NO: 61745 - DNA, 360 bp, Acinetobacter baumannii
atgttaaaactatctagtatcttttctcatgaagctagtattgaatcccttgttattcaatttgaagccgattatcaaactgcactaaagcagggattagatatttactttggcgttggctatacaactactgaggatagtcaatctatacaggcgtatcttgtgaaagataaggagatttataaaaagcattactggagttgggaatacccaagaacaccacacaaaattgaaaaaactaaagctgagcaccgccattggttaaacctagctgatgtacgaaacgctgcgctcgaggcgaatattacaaatgaagcagatctacaatctgttttacaacgttcattcgctacaatataa

SEQ ID NO: 61746 - DNA, 378 bp, Acinetobacter baumannii
atgattaaaaaaaatgtggattttgaacgtgcttctgatgttcaagccatcgtttactcagtaaaagatggatctgcagtttttgtcgtaccaaatggctttgtgttgctggaggttccattgtcacaaactcaagccgagtacttcaagatgtatgagaagtcacctaatgtttttgtgttgcacggtaaggcaaaattccattacgtgtgtgattgtgaagttgaactggttggctttagtatggaaagatctaagctaacaaatcaattggtcaatccaagcttatttagccacattgataaacctgcagtcagtatagattgcatctatgatgatatgtctgcaccaactataagccctggcttttattgttaa

SEQ ID NO: 61747 - DNA, 975 bp, Acinetobacter baumannii
gtgaaaacaaacatcattttgtggaccttaaccgtcctaacttgttttgcgtggattgcctttacgtttattcaaccagttggctacaccatgacttttcttgttattttaatcttgatgacagtagtgctcagctggtgcttggcaacaccttatattaagaccaaagaccgaaccaagcgactagacgaaaactttatgctacttatgctctctgttgctgttgttccattcctaatgtttctactgtcatatggttttatatggtgtttcaaaacgctagaaaagaaacagttcaaccatgaccatattgctgcgatgctaccgggtagcaacttcaatcaactacaaaagtttgccaaggaaaactacaacgcgccacttgtgttaggtgactttaacgaaagttgggctttaacttccttggatataccgcaagcttctccagcttcattaagatctagtacaggatattgcctggtgaatatgtctaaaaccagcatgaacaccatgtataaagcagcaaaaaccgatgtaagctacaacgattgggaaatgctgatattagcgcacgagttatctcactgtttagatcgtgcgaccgatgtgcctggtgaacttggccagccacttaaagcattaaattcaattgcgccgtctgatcggtccaaagtaaagatggatgatgtatctacctttgtaacggctgaaagtagcggtaaaactcaactatggcgagaatcttatgcggatctgtttgcggtaggttttatgtcacttgatccaaaatacgatactgcagcgttaagagaaagcctgattaaattacgtgaaaaacgtaaagcactagatccaacccataattcggtgtgttggttgcagtattctaagagtcagcctttcccacaaaaaggttcggatgtttattcttgggcaaataacatcagaattaaagcgccgtgcgagttgaaataa

SEQ ID NO: 61748 - DNA, 513 bp, Acinetobacter baumannii
atgaacacaactctacctattcttattcatagcgttattggtggtattggtgaacatccagatgctaaaaaacgaagcttaggatacggcgctatcatgctgtatataccgattgaacatatggtcggttcaggtgtacttaagctgatgattgatgtgaatacactgtcgatctatgcgtctgaaaatcctaattacctaaaacaaccacataccatcaatgaagcttctcacttgtggaatgcattgcgctttgacagtgcttctaaagccagtcggaaggtcattcatgataatgggtatgttgagtgtttgttttccattcctatgaaggttcttgagccatttatggatgctgaattgattcaaaacgaattaggacttccatacatggccatcgatcaaagtgacaagtcgaaatgcatgccgatttggtatgatgttgttagtaagtctaccaatcaattaatagatggcaactacaacgattatcctggtgtgcaggcatcttaa

SEQ ID NO: 61749 - DNA, 453 bp, Acinetobacter baumannii
atgttagaaatgttccaaaatcaaaccatgcgatatatctctattgccattggcgtgattagtatctttatattcctgtacctacttaaactcggtgaggggcttgtcattagccttatggttgctttgttcatatgtggtttgagtttattgaaactgaaaaactactatgaaaaaaataacccatacatcaatgcagaacaccttgcttggctgtatggtgaattgcaagaatatgatcaggatctattcacaactgtcagcaatctgaccaagagtactggacgtttagaattgagccagcttaaatcaatccgtaaccgctatgcttcctccatgaacgaaactcaactacaagcattggccagtgaacatactgaagaaagcaaatatcgcttagaccagtacaactactcaatttatgtgatggatgaagtcattaatcaatattaa

SEQ ID NO: 61750 - DNA, 420 bp, Acinetobacter baumannii
atgacgggaattgaatattttcagaagtatggctggagtcacgccgtccagtccgttagtcgaattccaagtgaatacaacgaatattcaccagatctcaaaactgttgttgtaaacggcaactttcgttatgcgatggctgcggaaatcagcaaaaagaaaactgaagtctatgtcactgagctcaaacaaatcattgagagtgaaaagttactagaagacttctttaacttgaatctggttggtatagaaaaaggcttaagtaatgctaagcgtgaaatgcaagacatggaagaacaggggattgttgaattcaaccatcgttttgatgacgacctgacttgcaccacggaacgcatgaaacttgccatcgctcaaatagaccatctttatcaaaacaacattacaaaaagtgagtaa

SEQ ID NO: 61751 - DNA, 372 bp, Acinetobacter baumannii
atgattactgttcaaatagagatgtgtggctttgggattaaacggcgttgggagtttggagatccgcgccgtgcgccaattacagttttagaaatgggcttcattaaggtttgtaaaatgcgtggtgatagcaaactggttgagttcatgaggggttatgcagacgacaaagaattcaactggcatcccaaagttcgccttgcacgtagaaaagcagaacgtaaagcctattcgtactatgacaaccactacaaacagcagattagagaacttttcgatcgccaaaatatagaccgccaaaaacaatatgaattggaacgccaaaacaaagcgttattggctgttattgaacttaaaaaagaacaatcgtag

SEQ ID NO: 61752 - DNA, 2607 bp, Acinetobacter baumannii
atgaatattgcggcccagcctccagttcaggcagatcaaacagtttatttaaaagattatcaaaaacctgcgttcttggttgaatcaattaatcttgatattcaagtctatgacgataaaacaattgttgattcaacattggtcatgaagcgtcaaactgctggagacttagtgctactgggccgtgatcttgagttgcaatctattcagctaaatggccaagatcttactcctgcacaatattcactcgatagtgaacaactggtgatcactgatgcaccagatgaagtcattttacaaactcaagtgattattcacccggaaaccaacactcagcttgaaggtttatataaagctggcgacttatttgtaacacaaaatgagcctgaaggtttccgtaaaattacgttctatccagaccgtccagacgtactttcagtttttactacacgtgtagaagcagacaaaaaatatccggttttacttgcgaatggtaacttgcttgaaacaggtgaagttggtgaaaaccgtcactttgcgatctggcaagacccgactaaaaagccaagctatttgtttgcttgtgtgattggtgatttagctgtattgaaagaccgctatacgacttcggaaggacgtgatgtcgctttagaaatctatgccattgagaaagacattccaaaatgccatatcgcaatggaagcattaaagcattctatgcgctgggatgaagagcactatggccgtgcctatgatctcgacaactatatgattgttgcggtgagccagttcaacatgggtgcaatggaaaataaaggtttaaatatctttaatacctcatgtgtacttgccgatgaagaatatacaactgacgcagcgattatgcgtgtacagtctgtgattgcccatgaatatttccataactggacagggaaccgtattacttgccgtgactggtttcagctgtgcttaaaagaaggcttaacggtattccgtgatcagtctttttcggaagatttacaatctgctgcggttcaacgtattgacgatgtcgctgttcttaaatcacatcaattcccagaagatgcaggtccattgtcgcacccaccacgcccagaccactttgtagaaattaataacttctatacagcgactgtttatgaaaaaggtgcggaaattaaccgcatgatgtcgacattactgggtaaagaaaaattccgtcagggaacggatgaatatttccgccgtcatgatggacaagccgtaactgttgaagactgggttgctgcactctctgcaggttcaggtgttgatttatctgcattcttaacttggtataatcaaccaggtacaccaaagcttgaagcgaaaggtgaatatgatgcagcagcgcaaacttatcgtttaagctttaaacaaagcctaaaagcgcatccgaaatatccaaatttaaaagctgtcccaattcctgtagcgttggcattatttaatgcgaaaacaggtgaacaatatacgctccaaagcgaaagcctatttgtaaatggtgttaaagatggtgtgtatttgtttgaccaagacgaggcagctattgagtttacaggggtaactgagcaacctgttgtttcactactacgtaatttctctgcacctgtaaatctggtatttgattacagtgatgaagaattagcattcttaattcaacatgaaacaaatggttttaaccaatggcaagcaacacaaaccttgcttgaacgtattttgttagaagatcactctgcggatacctatattcaagctattcaaagcacattgcctgaattagttggtcgtgatccacttttagcatcgcgtttgtttgatgtaccaactgaaggttatttaggtagccgtattgatcaaaactatgcaccagccgatattcatgtaaaacgtgaagccttactcaatcgtttggctcaagagctgggttcgttctggaaagatacgtaccttacactggaccctgacttgcaaaaagaattttctttagcgatgggtgtacgtgcattaaagaacattatgctcatgatgatggcgcgtcagggtgaccaaagtgcatttgaattagcttacgatcaatatcaaagcacagggaatatgtctgaacgtttaggtgcgctgcgtgtactagtgtggcaaagtgcgcctcaagcacaagaagccctagctgatttctataaccgctttaaagacgaagcattgtctttggaccaatggtttatgattcaggcagcaaacccaaatgccacagttgagacaattgaatatctaactcagcatcctgattatgacttaaccacaccaaaccgtattcgcgccgtgagtggtggtttgtcaaataaccctgaaaatacatggggctttggtgtagctcactttattaatcttgcagaatatctggacgagaaaaacccgattttaggttcacgcttattacaggtgttatctcgctggtatacgcttgccgaacctcagcgcactcaagtgcaacaggctttacaagcattgcagcctaaagtgaaatctaaaaacgtttctgaaactttaaatagtatgctgagcgtttaa

SEQ ID NO: 61753 - DNA, 258 bp, Acinetobacter baumannii
atggaattaaaagcttatttacatcgactagaaaacattaaagtgattcatgatctagatgcagcaggactcgaccatcatgtgattgccgtgttcttgtccgccgaaggtatttcaatgacagctcaggaggtaactactatcgttaatacttatgacgccttaggtaaagtgaaattaccaagtaaaaaagtgcaggcactgatcaatgccaaaaaacttggacaaaatgatgagaccttgccgtgccctgtttaa

SEQ ID NO: 61754 - DNA, 1158 bp, Acinetobacter baumannii
atggccttacaaattctacaaaaacagctagatgaaagtagccattgccctctctgccaagcgtcgatgtactgggtagatgccgaacaatttgagcaagacgttcaatttcatgaatgtagccattgccaacaccgtgtatttaaagacacaaaaatgacgtgtcattgcgaccaatgcactgaacaaagaaaaaagcttttacagcagaccagattacaagaacaacgccagtttaagtcaaaagaccaaccacaacgtagtctggaacaactgagttttttacataaactttttttactgagcctacttgatgactatgctcgtgatgacgttgcacatgacgaatacattcattgggaccagataaaatatcagccgattacccccaactggatgttccagaaccatctcattaaacagcttcataaagatgggattttaaatgcacaagatcaaaccgatgaaccacagtgcttttatttaaatattcgtttagatggttatagcgacccgagtttatttagtgtagctcagcaattacgccactggttctatgaaaacctaagtcttggtattccatttcgtaatgccgatgaagtgaaagacgtgctgtttcaggtgctctatcaagaaattattcagttcactcagttctattgccgaacttggggtatccaaattgcaggaagctctaattttcaagccttttgctaccgtttaatggactcattggcgattggtcaaatttattatcttattcagactgcacttgaatatctttataaacaaaaggcactacagccacgaaatgaaaagtttattaataccaatctattaaagaaaactttagagcaatatcgggaacgagctttgactgaaaagtgggaaacttcgatgttgccccgcccttacaatattccttacagtaaaatgagccatatattatttaaccgctttttaggttatgacgaacagatatttgtacaacctgtatggaaagcatggcgaaaaatcgcacctcgtttaaacttttactcggttaaacgttgtatgtactgtggttcaaatgatctaagtgttgactatgatgcagcagattatgtgtcgttgatttgccaaaattgcaaacatcaagatcactattttacccgttaa

SEQ ID NO: 61755 - DNA, 828 bp, Acinetobacter baumannii
atgacttcgacatccaacctcattgaacaggtgattgaagcttggcaaaacatgcaggcaaaaacgccgctggtacaatgtattaccaacagcgttgctgccaactatacagccaatgtattacttgcttccggtgcttcacctgccatgattgataatccttatgaagcagaaagctttaccaaaatttcatcggctttaagcattaatttgggtacaccgacttcagagcaaatgcaagccatgcaaatctctgccaaaacagcacagcttaacaatattccttgggtacttgatccggtaggctatggcccaattttagcttggcgcagtcaaatgacagacgagcttttacaattcaagccaagtgttattcgtggtaatgcttcagaaatcagtacgcttgcaggcaatcaagttcaatctaaaggtgtggatagtaccttaagtagtgatcaggcctatcaacaggcttatgcactattaacacatgcagactgtatcgctatttcaggtgagtcagattatatattgtctaatgaaatagatgctgtgattcaagtaaacggcggaagtcctttacaacctaaaattactgcaacaggctgtgctttgggtgcattaattgcagcatatagcgctgtggcaacaccaactattgcggctctttcagctcatgttcattttgcaattgcaggtaaacttgcagcaaatcaggcgcaaactatgggaagctttagtagcatctttatggattatatccatatgttagatgacaacctgattgaacaatatgcagatatcaaacttttaaacatacaggcataa

SEQ ID NO: 61756 - DNA, 360 bp, Acinetobacter baumannii
atgccgcacgttgtagttgattattcagataacttaactggactaaatgcaaaacaattacttgaagaaattaataccacgctcattgaaacagagttgtttagtccagaagacattaaaagtcgtgcgcgtagagatgaggtttttctgattggcttaggggttgatcaagcctatatccatgtaaaagcctatattttgtcgggaagaactgctgaacaaaaacagcttgtgggtgagcaattattagcggcgctcagcaacaaaaaatatctaccacaagagtttaataaagaaattcaattgtgtgttgagcttattgacatgccaagagacgattatttcaagcaagttgtataa

SEQ ID NO: 61757 - DNA, 1713 bp, Acinetobacter baumannii
atgaaacaggaaactgcacttaaactgctaaaagcaggtgaaaatgtttttttaaccggttcggctggtgcagggaaaacctatacactcaatcagtacatccattatttaaaagcgcgtaaagtacctgtagcgattacagcgtctaccggtattgcggcaacgcatatgaatggcatgaccattcatacatgggctggtattggcatcaaagatcatctaactgacgatgacttgaaacggatgaaagagcgtaaatatctcaaggaacaccttgaaaacgcgcaagttcttgtgattgatgaaatctcaatgctccatgcgaagcagcttaatctggtcaatcaggttttaaaatattttaaagaaagtgatgaagcattcggtggcattcaagtgattgtggctggagatttcttccagttgccgcctgtaggccgtaatggtgaagccaaccgtgacaaattctgttttatgtctgatgcatgggtcgaagccaaatttcgggtatgttatttaacagaacaacaccgccaagatgatgaaattctgaatcagatattaaatgcgattcgtgcgcaaagtattcaaaccgagcatttgcaagctttgcatcaatcccgtactcatgacattggcgaaacctttactcgtctttatacgcataacatggatgtcgacaatatcaattatcagcacttaaacgaaattgataatgaaggacatcaatttaatgccgttttagacggtaatgaaaaattattagaaactttaaagtcttcagttcgtgctccggaagaactcacacttaaaaaacatgccaaagtgatgtttgtaaaaaacaactttgatatgggttatatcaacggaagtttaggtgaggtgatcggttttgaagaagatgacgaaaatgggttattgccaaaggtaaaattaaccgatggtacaactttgctggtagcgcctgaaacatggtcaattgaaaatgaagcaggaaaagtcattgcaagttttcagcaaattccacttcgtttggcatgggcgattaccattcataaaagccaaggtatgactttggaagctgctgaaattaacctgatgcatacctttgaaaaagggcaaggttatgttgcgctctcacgtttgaagtctttaacagggttaaaattattaggttttaatgaacaagctttggagttagatagtctggctgtaaaagctgatcgccgttttcaagagctttctaaagaagccgaagataattttgctaatgtcgatttaacggctcaacataaagcctttattcgtcattgtggtggaaccttaaatgaaactgagatttcaagaaatgagaaaaaactagcgagaggcgagaagcaaaattacgcctcagcgactttggatgaaactcgtgcattgtttgaagaaggctacgaaattgaagatattgcacatgaacgtggtctaacacctgcaaccattattaatcacttggctcgactgcataaagaacaaaagctagatatttcggttgcccatcctggtgaagaagtggtcgaagaagtacgtaaaatttataagaagttgaaaaaacgccaaaatccggatcatttttctgatgatggttcgatcaaactaagaccaattgttgaggcaaccagtcctcgaatgggatatgatcaggttcgattagctttattatttattgaataa

SEQ ID NO: 61758 - DNA, 1173 bp, Acinetobacter baumannii
atggcttttaaaaatattgcagatcaaacaaacggtttttatattccttgcgtatcactctttggaccaggatgtgccaaagaaattggaacaaaggcgcagaacctcggcgcaaaaaaagcattaattgtgaccgatgaagggctatttaaatttggcgttgcagatcttatcgcaagctatttaaccgaagcaggcgtagcgagccatattttcccgggcgcggaacctaacccaaccgatattaatgttcataacggtgtgaatgcctataacgaaaatggctgtgactttattgtgtcgttaggcggtggctcatctcatgactgtgcaaaagggattggcttagtgactgcgggtggtggtcatattcgtgactacgaaggcatcgataaaagtaaagtcccaatgacgccattaattgcagtcaatacaacggctggtacggcatctgaaatgactcgtttctgtattattaccaatacagatactcatgtaaaaatggctattgtggactggcgttgtacccctctcattgcgatcgatgacccgaaactcatgattgcaaaaccggctggtttaaccgctgcaacaggtatggatgcactaacccatgcagttgaagcatatgtttctacagcagcaaacccaattactgatgcgtgtgcagaaaaagcaatcaccatgattagtcaatggttacaacccgctgtcgcaaatggtgaaaacatcgaagctcgtgatgctatgagctatgcgcagtacttggctggtatggcatttaacaatgcatctttaggttatgttcatgcaatggcgcaccagttgggcgggttctacaacctacctcatggtgtatgtaacgcaatcttgctaccacatgtatgtgaatttaacttaattgcttgtccagatcgttatgcaaaaatcgcagaattaatgggtgtaaatacgcacggtctcaccgtaacagaagctgcgtatgctgcaattgatgccattcgtaaactgtcttcttcaattggtatcccatctggcttaacagaacttggcgtaaaaactgaggacctcgcggtgatggccgaaaacgctcaaaaagacgcatgtatgctcaccaacccacgtaaagcaaaccatgcacaagttgtggagattttcaaagcagcactttaa

SEQ ID NO: 61759 - DNA, 1191 bp, Acinetobacter baumannii
atgttcacaaaaaaggatttattgcagcaacggatgttgattgatcaactgcgcacgcaaaatagtctctctcctcagaacgctgccaaactcggccaaagtattgcaagctcgtgggaacgatcagcttctgctgcgattcctaaagaacgatttgcagcacctctacttgaaagaaaatctgcttcacaaaatgctttagatctggcactaagccagtgtgctgatgacttacgtcatattgcagagcaatcttctatggtcattgctgtgggtgacattggtagtaccattatctggacagcttccagtgctcaaatgcagagtgctgctgaacgtgtacattttgtacaaggtggtcaatggcgtgaagaatttgtaggtacgaatgcattggcgttatctttaaaaactcaacaatcaagctgtgttttttccaatgaacattatatggagtcgattcacgattgggtttgttatgcggcacccattatcgatccatactcaaaacaaaccttgggcgtggtagatttatcaaccacatggaaaaaccataataccttgggcattttggccgctgagcgttgtgcctccattattcaatctgccttgttagaacaacagcgccagcacttacacatccgggcattttcgacgccacaagttaaatttaacggcaaaagtttattattgacgccgcgtcaaattgaaattttaacgatattggcactatgtccgcatggtttaaccttagagcatctctatcaggcactttatggtgagcgtaaagtaagcatgggtacgcttaaagctgaaatgtctcaattgcgagatatattgggaggtttgcttggttcacgtccatatcggttacttgtgcatgttgaggccgattttttacaagctgaacaagcgcttgatgctgggtatgtcgcctctgcgttgcagctctataccggagtttttctggcaaaaaccgaaagtccgtttctgtgtgcatggcgcgactgccttgagtcacgcttgagtgatgcgatttttaaaacacaagaaacagatttattacttaaacatttagctcattttcccgaagcaatcgatgcggtagaacgtcttatggagttattaccgagtgaacatcctgcgcatcaattgctggtgaaatatattgactcacctaagctaagttag

SEQ ID NO: 61760 - DNA, 1512 bp, Acinetobacter baumannii
atgcgctatatcgatccaaatcaaccaggctcaaaagttcaatttaaatcacaatatgaaaattttattggcggtgaatgggttgcacctctaaagggtgaatattttgataatgtgtcaccagtggatggaaaagctttcacacgcattccacgctctagtgctgaagatattgaacttgctttagatgcagcacacaaagcaaaagcttcatggaataaatcttcaccgactacacgttctaatatacttttaaaaattgctgatcgtttagaagcaaatcttgaaatgcttgcggttgcagaaacttgggataacggtaaagcagttcgtgaaactttagcagctgaccttccacttgcaatcgaccatttccgttatttcgcagggtgtattcgtgctcaagaaggcggcatctctgaaattgatgaagataccattgcctaccatttccatgaaccactaggtgtggttggtcaaatcattccatggaacttcccgattttaatggctgcatggaagctcgctcccgctttggcggctggtaactgtgtggtgattaagccagctgagcaaactccggtaggtattttgttggttgccgaactcatccaagatatcttaccgccgggcgtacttaatattgtgaatggtttcggtgcagaagttggccgtccgttagcgacaagcccacgtattgccaaaattgcgttcacaggttcaactcaaactgggcaaatggtgatgcaatatgcgaccgaaaatattattccagtcacgctagagcttggcggcaagtcaccgaaccttttctttgaagacatcatggataaacaagatgacttcttagaaaaaacgctggaaggttttgccatgtttgctttaaaccaaggtgaagtatgtacttgcccttctcgtgctttagtacaagaaagtattgctgatcaattcttagagttggccgtcgaacgtgtaaaatgtattaaaactggtcatcctcttgatactgaaaccatgattggtgctcaagcatctttgcaacaacaagagaaaatcttacgttgtattaatacgggccgtgaagaaggtgcagaacttttactgggtggtagtggccgtaaagaagtaggtgatggtttctatgttgatccgactatttttaaaggccacaacagcatgcaagttttccaagaagaaatttttggtcctgtactggctgtgacaacatttaaagactttgacgatgcaatcaaaattgccaacgacactatgtatggtttaggtgcaggtgtatggtcacgttcagcccatatttcttaccgcgctggtcgtgctattgaggcgggtcgtgtctggacaaactgctataacatctatcctgcgcatgctgcatttggtggttacaagaagtctggtattggtcgtgaaaaccataagatgatgctggatcactatcaacaaaccaaaaacttgttggtgagttattcaaccaaaccaatgggcttcttctaa

SEQ ID NO: 61761 - DNA, 1437 bp, Acinetobacter baumannii
atgaatcaaccagaaacagcttccgttatttcttcaagtgcagaagtctcatcagcagaatattttgctcagcgtcaacttaaacaaggtaccgtgggttggttactcctgattggtttaggcgtagcgtatgtgatatcaggtgattttgccggctggaactttggtattgctcaaggtggttggggtggtatgtttattgccactgctcttgctgctttgatgtacctgtgcctatgtctttctatgtcagaaatgtccaccatgatgccgacagcaggtggcggttatagttttgcccgtgctgcctttggaccttttggtggttatttaacaggcacagcgattttaattgaatacgcaattgcgcctgccgctattgccgtattcattggtggttattgcgaatctctatttggtattaatggctggatgatttacctcgcctgttacgccatttttatgggtatacatctcaaaggtgctggcgaagctttaaaaatcatgtttgcgattacacttgtcgccgctgttgcccttgtcgtgtttattggggcaatgattccacactttaatgcacaaaatttatttgatattccagttagtacaggtgttggcgcaagtctttttttacctcatggctacttgggcatctgggccgcggttccttttgctatctggttttttcttgcagtagaaggtgttccgttagcagcagaagaagcaaaagatccagccaaatctctgccacgcggtttaatcggtgcaatgctcatcttaacagcatttgccatgcttattttgttcttgggtgcaggtgcagcaggtgcaagtactttacaaaactcaggcgctcctctggtagatgctttggttaaagtttatggcaccaacacttggcttgcgacattcgtaaactttgtgggtttagctggtttaatcgcaagtttcttctcaattatctatgcctattcgcgtcaaatctttgcattgtcacgagctggttacttacctacttcactctctttaaccaataaaaataaagccccttatcttgcaattattattccgggcattatcgggttcttactttcacttaccaaagaaggcgattcactcattttaatcgcggtttttggcgcaactatttcttatgtgctgattcttttatcacacatcaaactgcgcttatctaaacccgacatgcctcgtccttataaaactccaggaggagtcatcacttcaagcattgcactagttttagcagtcgctgctgtgatcgcaggttttgttgttaatccgaaagtgtggtttattgctgccggtatctatgtcgtatttattgcttactttttgttctacagccgctatcatttagtgaaaggaacaccagaagaagagtttgcaaatattaaagccgcagaacaagaactataa

SEQ ID NO: 61762 - DNA, 231 bp, Acinetobacter baumannii
atgtttgaattaatcccaattaatcgaaaaagtaagctgcgagaaattagaattattaaagcctttctaatttttgcatttgtattgtgtcttttaattttatatatcgaatatcaaaagtatgcacatataaactggaaatttgtatatattacctgtctatgtatgatttgggattttgatttaaataaaaaaattaaagaattgaaagttcaaataaaaagtgattaa

SEQ ID NO: 61763 - DNA, 654 bp, Acinetobacter baumannii
atggatttattaaatacggttaaaagtcgctacactaccaaagcgtacgatcccgagaaaaaaattcctcaagaaaaattcaataagttattagaaattttacgctttaccccttcttcagtgaatattcaaccttggcatttcttggttgcagacaatcctactgctaaagaacgcattgccaaagccttaacaggacgatatgcctacaatgcacccaaggttcttgagtcatcacatacccttgtattttgtacaagaacagatatttcacccgaatatttaaaccagttacttgaacaagatgatttaagtggtcgttttaaagatgagaaagccaaacttggtcaaaaggatactcgtcatggctatgttgagttttaccgtaatgagcaaaagaacttattcggctggatggaaaatcaaacttttatcgctttaggacaactactgtttgcagctggtcttgaaggtatagatgcaaccccaatgggtggctttgacgaagatgttttaaatgaagaatttggcttaaaagaaaaaggtttgcgtagctctgtaattgtttcactgggttatagaagcgaaaatgacttcaatgcgaaattgccaaaatctcgtctgccggatgaagttatttttacacatttataa

SEQ ID NO: 61764 - DNA, 858 bp, Acinetobacter baumannii
atggtattaatatttgctgcagcattgtgcagtgttctggtttctgtactacttaaaaatttaaagaaaaagggatatcaacccatgcaaatgattgcatggaattacgcaagtgccagcttgctatgttatctgtggtttaagccagatattcagcatatttctatacaacatacaccttggtggctaatagtggctttaggcgtcattctaccgagtatttttttgtgccttgctaaatctttagagtacgcaggtattgtcaaaaccgaaattgctcagcggctgtccgtggtactttctttattagcggcttatttctttttccaagagcagtttaattctcttaaattattagggataggtttgggaatttttgctgttctcttaattttattgggtcatttcaacgagtcttccagatctcaatcaaaaaaagcaatttttgctttgatgagtgtctggtttggatatgccgctgtagatatcttgttaaaatatacgagtagcttaggcctacagtttactttgactttaaatctaatttttataacggcctttgttttatcgattatttatttaatatttcaaaaaaattcagcatggcattttaaaaatacttttgctgggttaatgctaggcgcactaaatttttcaaatattgccctatacgttaaagcgcatattttactcaaagattctccggccattgtctttgcgagtatgaatattttggtcgtgttacttggaatagtttgtggcgtacttttatataaagaaaaattaaaattaccaaccctcgtaggaattattttaggaataagcggactagtgagtttagccttagctatgaaatag

SEQ ID NO: 61765 - DNA, 1056 bp, Acinetobacter baumannii
atggctgatattcgggatttagtacaaattactcaaaatacctatcaacgcttaaccgatccaacaggaagcaaagatttaaagataagtggcaacttagattttgtcggctatgcaaaggatgaacgttctgatcatggtggcattgcttattatgacaaggcaaaaaaagaggttgttattggtaatcgtggaagcgctacagcaagagactggttagtgactgaccctcagattgtattaggtgtacgtgagacattggcagatatagcagcaaaacgttttgctgataaagttatcaatgacctagatcgaaagaaccaaaagattgaaacaattacgtgtgtgggccatagcttaggtggacaccaaagccaaatggttttagctcacctaaccgacattgctattcctaatgtcgagtgtcaaagcgtaacgttcaatagtcttggcgtacataaaagtcttaaacaggaaaatacagaatacaaccatgtcaatttgcaagttacaggtaacggaaaaattgcatttgcttcaacagaccttgtaagcgaaatcagaacacagttaggtcaaaattttaatgttcccctaaatgttggtaatccaatatcagcccataaaatgactacagcagcaaagatgctggatgaatatcctgaaaccagtaaacttacagcaaaagaaatgctcaaactcattcaacaaggcatgaacataaaaacgattgaacaacaccaaaataaaaatcaggtttatgctggcaaccaaaccctacaaaccaccgttgcaaccgcccccctttccaacgtaacgcttattccagctacaccaggactacatacaggcaacatcatatctgaaaacaaaacacagatatttcagcagttagagaactctcagaaatatgtcattgtgcatgaaaaagataagttagatcacatacctaaagttggtgaaaaagtaagcattagacataatgcaaatagccaaatcaaatctaaagttgagaaagtggaagcaaatgaaaatacaaaaactagagggcgttaa

SEQ ID NO: 61766 - DNA, 873 bp, Acinetobacter baumannii
atgaacacacaaaagaacgcagcatggtatcggcatcaatcatggcatcgccaaaccataataccagctttaatgccatgctcaaacggtgcttggcgcttcctcccgttgccagatcgtgccaaacacaaacaaaaaaaagcccgcaattacgcgggcttagcggcatttcatgccatcaggtgcctggctgtgccagacgcggaatcattccgagaaattgttgccatttcacactctaaagataatttcatggtggcctgtcaacgcccactacttcaaacattaaacggaaaaattgcagaagatatttttatttacgattctaatgactggacattaaaacagaccgtttctagcaactcccttatgtttgatgcaaaagtatctaatcaattactgcttacaatcgcattagatgatcaagacggcctttttaagcttgccgtgagggatttgaccagctcacaggtaaacacgctagaattgggcaatgacgcttatacagcgcaactagcaacaaacgatcaaagccacatcatttctgttattttaagaatcaataatgatgaagatggatcaatgttaaatacattgttcattatcgacttaaacaccaaagaaattatttataaaaatactgttaccaatggcgacgactatttaaattgccaagtaattaataacaataagctaattattgatttctatgatcatgctgtacaaacatcctatttgaaattaataaatagccagggaatggaattatccaagcgcaaagtcaatggcatcacaacctacggtatagctacagcagaaaacatagttgctttggctgtaaataactatattgaatttatggagctaggctaa

SEQ ID NO: 61767 - DNA, 396 bp, Acinetobacter baumannii
atgaacagcattagagaagaatttgcagtcacgtccctggcaatggacttgaccaaagatttaatagccactggttgctactccgaaaacaagatccacttttggaatgtaagcaaccaaacaaaaatcaaaacaattcgcttcgataaagcatttaaccctattaattcaatacttttctttaagaacaatattgctttcattgccaattcagctgcaaatgcggtaatcctgcacggtgaaaatttcaacgaaatacaaaagctaaatcgtaaagaaaacccactctattgtaaacaagacatttttatcttttatattcaatggcttattttcctgctaattggtaataccatgaaaaataccatgctcagaaaaggcttaacaatattttga

SEQ ID NO: 61768 - DNA, 201 bp, Acinetobacter baumannii
atgaatagtgcagttaagttagaagaagctttccgaagtgctaaaggtatcgtagatcacgaattttcccaggaagttattgatgcttgccaggctgcggatcaggcaagacagcaacgtattttgaatggcgaaacaacctttgaacaggaagatgctgcattaatggcggaatggaaaagacttaatgcttccaagtag

SEQ ID NO: 61769 - DNA, 984 bp, Acinetobacter baumannii
gtgagcgagtattcagatcaagaacgacaagaattttacgcaaaagtaaaagaaatattaaatgaacctgttacatcgagagaacaggctgatagcaatactcaactagaatatctaattaccaaaaaccgtactgaggcccttgaaattaacccaatcaagggaaattacgattttaatcatttgtcgcaaatacatcataagttatttgatgggattcaagattttgctgggaaacaaagacactttgatatttataaagcaataccctcaccagaggggaaaaaggaagtcgggtacttcttaaaggctaaagatattcatttttcttttgaagacttcacaaaagaaattaaagatagcaattcattaaaagggctgaataaagaacaattcattgataaatttacaaacttatacgccaacataaatgagattcacccttttgaggaggggaatggtcgggcaactaagttgatgatgaagcagttggcgaatgaagctgggtatcaggtcaattttgaccaggtggaaaagcgtgagtggaactatgcgtgtaaacgagctttgagtgatcaaacactttttcatggctcggatcagattagaatgctaaaggatattcagttgctaaaggatgtaatgactaaaattgtgcattccttacaaataaaacaagataatgttattgatgagaaaaaaacattaaaaaaaacagcacttgatttagcgcctaacgcccaggtacacaaagcaagtcctggaagatatgaggggcgtatagttgctgaaacagaaaatcttgttgcccaaaggttaggggattacagtaaacactttgtagtccatgaaaagaaaagttttgatcaaacacctaaagttaatgaagtggtttcaattacgcataaggctgatactaatactgcaaaggtagaaaatatgcaaaataaagagttatctaaatctaaagaaattaaacgttaa

SEQ ID NO: 61770 - DNA, 612 bp, Acinetobacter baumannii
atggtaactagaatttatgttagagctagtacaaaagatcaagatgcagaacgtgctttacaaatgctaaaagactttaccactggcgaattttcaacctacatcgagaattatactggaacaaaattaaatcggcccatcctgaataaattactagaagaatctaatcagggggatattctgcttgttgaatctgtagatcggctttcaagattaagccaggacgatttttccatactcaaggaaaagattaaatcaaaaggtctcaagttaattattcatgatctaccaaccacacatatcaataatgagaccagcgataaaatgacaagcgaaatattaaatgtcattaattcaatgcttatcgacttactagcaacaatggcccgactagacaatgaaaaaaggaaagagcgaattaagcaaggcttagaacgagctggccataaaccaacagggaaaaaacctaatctcaaaaaacatgaacggattaaagtgctactggctcaaggagctatgaccaaagaagaaattgcattagctgtaggcgtaggagaagcaaccgtatatcgagtacaaaaacaattaaacccaagtgtgcaagagcaataa

SEQ ID NO: 61771 - DNA, 417 bp, Acinetobacter baumannii
atgactggccctaaactatttcaaccaacacagcaagacctagacgcaatgaaaggcaaattgttccagcgattgaaccaggaagaatcgtttaaacaagatgcccaagcaaagggtgtaccgatcctaaaacgattagttgaagtggcaaaatctgatacagggcaaagccttgtagttcgtaaatttctgcttggctgctatgacggtcaaagatttccatttgacttaacagattttcgtcaacttgacttgaacctgtttcaagactgcatggctatcctagctatggatcgctctccaacaagagaagtgcatgagtatttagatgggcctgaatataaggggttggtgaatggtggcgcattgtttgaacaatgggctaagacagttaaaaattttagctctactgattga

SEQ ID NO: 61772 - DNA, 243 bp, Acinetobacter baumannii
atggcactggttatagataatggtcatttactttatgacgaaaatgatgatcgctgtaaagtttttgtaaaacaatctcaaggaatgcttttcggttttggggtttttattgataaaggctgtcctagtgagataaaaaaatattggggtaaatgggattggaataaccaagaaaaatctttgttaggcatcatggaaagtggtggaaaatgggatggttgggaagttaataatgttaattaa

SEQ ID NO: 61773 - DNA, 258 bp, Acinetobacter baumannii
atggtttatgagcctttagcatttggaaaaactataaatgactttttaattgtaaataccctcaccccttttgataatttaaattttgttattaagtgggcctttgtaattctttattattttggattattttgtgtttatctgaaatatgtaagttttcttaaaaatgtgggttataaaaagtatagatttttaattctgctttccccagctattcttttaatggtttattattctattgaatggctatttagttaa

SEQ ID NO: 61774 - DNA, 258 bp, Acinetobacter baumannii
atgaagaaattaattttaatactaacaatcttttcaaccactgtatttgctaatgaacaaccaaggacaaatcaaaataatattaagcaaatagaacaagaacaaaaatcaaagcaacaaaaggcttttgaagacggaatcacttttgcaaaagaaaacaaagaaaaaattattcaaaaacaggaatacaaagatggagaaaagttcgcaaaagagatgtgcgaacaatatcctatccaatgtaatatcaagaaataa

SEQ ID NO: 61775 - DNA, 183 bp, Acinetobacter baumannii
atgaaccaattcaacagagctgtattagagtttgagaagtttactgaaattgcttcaaatgctggaagaacattatgtttggttggtaagcagtacaaacctcaagcattaagtaaggttgaggagctgaagcaaaagattacgcctttgctcccattcgaagaagacgagatgcaagcttaa

SEQ ID NO: 61776 - DNA, 342 bp, Acinetobacter baumannii
atgaatatgcttattaaccaagaaactttaattccagttgttgatagagatattggcggagaggttcagccttctgttgatgcacgtgaattgcataagtggcttaaatctggggaaatgtttgccacatggataaaaaaacggattaagacctataaatttattgaaaatgaagactatattagttttttggtaaaccccaaaaaacctaatggtgggcgttcttcaagagaatacatattaactattgatatggctaaagagctgtcaatggttgaaaacaatgaacaaggtcgggttgcaagacgttattttattaactgtgaaaaagcattgcgataa

SEQ ID NO: 61777 - DNA, 1056 bp, Acinetobacter baumannii
atgagctttgtctacgtaccaatactacaaacgaaacaaaatgagtatgctgcattaaatgaactttcagaagatgtcaaaacagctattaaacctttgttaagtttaacagaagttgataaggaaagacgttcaagagaaattccgagacaagttgctgaaaaatggggaaattatccatgttatatagacttaaataccagtgaagacttccaaattgaagaagagaattattttaaatggatagggcaaaaatgctcagaaagaggcttacaaaatatcgattttattttatctttagactctactcaaacagcaatacaatctaccgcctcaataataagtacttatggtttcggtttagcgctaagaatttcaattgcagaattaaataccgaaaccaactctaatattgaagcccttctagctagctgtaataaaagacatgatgaaatagatattattattgattttgctgagaatgtagcaaaaactagtttcattcatcaacaatcgattgctcaagttttaaatactattaataaaatctctttattcaaaaatattgtaattgcaggcagttcaattccaaaagacttgccaagagaaagttacaatccccatggttttgaaccacgtacagagtggatctcatatttaagtttagttaccccctatataggacaggcaaactctagaattccagtttttggagactatgcaggggttcatcctgaagaatttctctccaacacccctgtaaaaccaaatgctaaaattaaatatactcatgaagataattatatggtagttgtccgatatcaagctcatgtgcatgatgatgggtttggacaatattttgatatggcaaattatattgttaattctggatatttttatggttctaattactcaagtggcgacaaatatattgatgattgctccaaaagaaaggctggtcctgggaattttggaacatgggtcaaagttggcgtcaaccaccatataactttggcagttagtcaaaacgccaagctacacgggccttcaagatag

SEQ ID NO: 61778 - DNA, 588 bp, Acinetobacter baumannii
atgagtatcaataaaatgctcgataaggatgttaggctagcagtcaaaaataaggttttaaaagaccatataaatgatccatctaccttagtaattgatgagctgggcttagattatggccgtaatcgaattgacatcgcggtagttaatggcgaacttcatggatatgagctaaaaagtgattctgataccttaaaaagacttccttctcaggcaatttgttactctgctgtaatggataaagttactttagttgttggtgagaagcacgctaaagaagcaattgaaatggttcctaattggtgggggattaaagttgctgtgaagggaaaaaagggtggaattcatttaggtacttttcgacgtaataagaagaatactgaaataaatcctatggaagttttaaagttaatatggaaagaagaagcacttgaattgctatcaaactatgaagaagtcgactggaagataaaaaagcttcaaaaaaaagctatctatcaattaataatagataacttaagtattgatgaaataagagattctgtacggtctatcttgaaggcccgtgtagcttggcgttttgactaa

SEQ ID NO: 61779 - DNA, 552 bp, Acinetobacter baumannii
atgtttccgcgctgtcttttgagtcttaacatatttgatgagtttgggtttcggcctgggaccgacaaagacggttattatcaaggtaacccagaatatgcacattatcctttatttgaagatgtccttgatgattttggagtgacggaggaagagcgccggagttatcaaccaacagaaattgcacatcaggtgagagagtttctagaaaattcctataaagactataaagccgtttctgctttattagctgtagctgaagaagaagttattttgtacagtccacctttacgaaaagcaaccagtgctgtaggtatagcggtcgagggtggtggctattaccatgtgcatggagtatctgaagatgaaactgctgaggcagcagatgacgatcatgaagaagatctatggtttattttaatgcaagcttgtacagaagaagactacacttatttagaaaacctatgcctcgaatattgtgatttatgggaaaagttttgggatgttcaaatagaaagctcaaaatcaatcctgaaacaaaatttagcttaa

SEQ ID NO: 61780 - DNA, 2076 bp, Acinetobacter baumannii
atgagtatttcaccattggcttatgtagattcattaagaataggaactgttgattttgtttcacctagcgaaattaaagttttactcgatattgaagcccccgaaggaactgcattaaatacaggaacaccaagatctttcccaagggttaatggatatgttcttattgctagtgatgctggttatctagttggacaagttgaatggattactatagaacgctcacaatacccaaaaagaaaaggaatgcaggattttggtttagttgatttaccatatcctttgcgtaaaatgagcctaaatccattgggctgtctggtttatgataaagaagaaaatgatagagtttattataaatttcaaagaggtgtagaaagctaccccacagtgggagcacctgtcattttgccaactcaacatcaattacaagatatagttgaatctggtgataatcgaagagtttgtattggcaccagtccattggcaaatggtgcaaaagtgatgattgatccagatcgtctttttggtcgtcatttagcagtattgggcaatactggaagtggtaaatcttgttctgtagctggtttgattcgctggtcacttgatgcagcagaaaaagttagacatagtcagccaaatgcccgatttatcatattagatccaaatggcgaatattcagaaacttttaaagacaaagtaaacgttcgaatcttttctgtagaacccaaagatgaggacatacagcaacttcaagttcctttatggctttggaatagttctgagtgggtttcttttacacaagcaagccttaagacccaacgtcctacattaattcaagctttacgttcggttcgggaaggtgtttttaatattgagcaatctgcccatcaagaaatgaaacaatatttaagaacactcattagcattacccaaatcgaaattaactcaggttcaccttggggaaactttcccaaagcgaagaatttttttgaaaagttaaaaaaatggagaattggattaactgatcaagatgtatttgatagtaatcaacaaacttgtttaacagcaattacagataagataacccactttgaacaagcacgttcagcacaatacgcaatatttgactttgatagaacagagattaatgacttcttacaattactaaaaactgcctatacctcatttggtggcagtgcaatggatgcattgccaatagatgctgatattccaagaccattttctggtgaaaatttattaaaaagtattgaaggaaatgccgaattgctaggtgtctcagaatatattgataccatgcaaatgagaattaagactcttctctcagatactcgaatgaaagtcttaacaagtcagattgacggtgcaaaagaaatgactttggatggttggctttctgattatatcggggataacaatgcttcaaatggaacagttacagttatcgacctttcattagttccagcagaaattgcacatatcattgcagctactatagctcgaatgacattggaatccttacaaagatatcgtcgaatgaatcaagggcaagtacttcctacagtattagttatggaggaggctcatacttttgtgaaacggtataaggatgataccgaatatcacaattcatcatctatatgttgtcaagtttttgaaaaaatagctcgtgaagggcgaaagtttggattaggtatgatgctttcgtcacaaagacctagtgaactctcaccgactgttctttctcagtgtaatagtttcttacttcatcggattagcaatgaacgggatcaagaactgatacacaaattggtgcctgataatctccgtggattattgagagatttaccctcgttaccttccaaaaatgcaatactacttggttgggcttcggaattgcctgtattagtccaaatgaatcatctttcggctgaacatagaccaagatcagatgatcctgattactggaatgtttggactggacaagatcagaatgggaatccagttgctcgtgaagtaaattggaaagaggtagctgatgattggcagcaggtttag

SEQ ID NO: 61781 - DNA, 1356 bp, Acinetobacter baumannii
atgattaatattataaaagttagggatgatcactcacctattcaatttaaacaggattctactgattctgcgaaatattctttatgtgacggtgttgagtgtgcttggctcaatcccaatgaatcattttcttataaagaacttcgatcaagaattgagccatggttaacggctctatttcaatcggagcatctttctttgcttgcgggttctggtttaactcatgcaattcattatttagcagcagataaagctgctacgggtatgaatgctttaacacttaataattttaacaatgaagtaaatcaggcagcaaaaaaatcctctgaagcgactggtcgtaaaaagggtaacttagaagatcaattacgtgtagcaaatgaattgcttcgtgggctagaaattttgaatgatgataaagctattgcccttaaaaaagaattagaaacagcaatgcaaggctttgctaattcaatattggttagtgaaaatggtattgccacagcaaactttgaaaaaagagaaaatgctttcaatatcttagttacatttctaatgagctttgctagtcgtactggtgtacgagataggttaaatatttttacaacgaactatgatcgacttatcgaagctggttcagaattagcaggtattcacttacttgatagatttttaggcaatttaatgcctatttttaggtcatctcgtttagatttagacatgcactataatcctcctggtatccgtggagaacctcggtatcttgaaggggtggttcgatatacaaaacttcatggctctgtagattggcttcaagctggaaaggatattaggcgaattggcttaccatttggagcaacgtcaataaaaccatatcttgaagttgctgggtacgaagagattacaccacataaattaatgatttacccaaactcagcaaaagatcaagaaacggcaaactatccttatgttgagctatttcgtgatctagctgctgctatttgtcgtcctaatagcactctagttacatatggctatagttttggtgatgatcatatcaatagagttattcgagatatgttaacgatcccatcgactcatttggtcattatttctcgtgatgacaatatgggaagaatcatgaaattgtatgaagagttgggacgtcattctcaaattagtttacttataggtcctgcactagcagatctaacaaacttaacacaatattatttacctaaagccgcaattgataaaaccacttctcggatgagtgaacttttaaaacaaagactaccttcaaatcaagaatcttctgtttcagatgcctcaagtaaaattaatggggatatttaa

SEQ ID NO: 61782 - DNA, 288 bp, Acinetobacter baumannii
gtggaagattttagctggcttcaagagatgattgctgatgatgacttaggtcttttaaacgtaaagaaaaagacgtctgctctaacggctgatgaacaattagtctctaagtttaatgaaattaataattttgtgacacagcatgggcgtgtacctgcgaaaaatatggcaaatatcactgaatatatgctcgctagccgcctagaagcgatgaaagccaatccagagcaatacatggctttagcagattatgatgaacataatttgctgccacaacatcaggattaa

SEQ ID NO: 61783 - DNA, 141 bp, Acinetobacter baumannii
atgcccgatgacttattaaaggcacatcaagatttagataatattattgaatcactttatcaaaaagagagatttttgacagatgagcaaagattacgtgttttattgagtatgtataaagagttggtgggtaaaatctaa

SEQ ID NO: 61784 - DNA, 228 bp, Acinetobacter baumannii; identical to SEQ ID NO: 58456

SEQ ID NO: 61785 - DNA, 936 bp, Acinetobacter baumannii
atgagtgaattaatcgtaaaggataatgctctaattcaagcaagttataccttagatacagttgaacaaagactgatcctattagccattgctgaagctcgagaaactggacatgggataactgaaaatagtcttttagaagtacatgcaagtagttatataaatacttttaatgtcgagaaacataccgcttataccgtactcagagaggcatctaaaagcttatttgatcgctatgtcacataccatgacattaatcctaagacaggtaaggatcgtagctttcattgtcgttgggtcgacaaaattgggtatgaatctcaatcaggaattattttcctacgattcacccaagatatcgttccactcataactcgacttgaagaaaatttcactaaatatgaattgcagcaggtttctaggttaagtagctcatatgctattcggctatacgagctattaattcaatggagatctgccggaaaaacgccactttttgatctatctatctttagacaacaacttggtgtcaaacctcatcaatacaaaacaatgagtaactttaaaacatatgttttagattttgctcttaagcaggtaaatgagttaaccgatataacagctaaatatgagcaacataaaaaagggcgttctatttcaggtttttcattcactttcaaacagaaaaaaatgagtaatctgccaataaaaaataagcgtgacccagacactatagatattttctcaaaaatgacagatgctcaacgccatctgttttcccacaaactgtcagaacttcctgaaatgggaaagtattctcatggtacagaaagctatccgcaattcgctgtacgcattgcagaaatgcttcaaaacccagaaaagtttaaagaactctatccttatctccaaaaagtaggcttcaaagctgcatag

SEQ ID NO: 61786 - DNA, 519 bp, Acinetobacter baumannii
atgaaaagccttacagttcttgagctttctaagctttacaatattaatcgacaaaccatttacaacaatataaagaaaggtattttaagtaaaaattctgacaataagattgatcttgcagaagcgatccgggtatttggtgagccagtacaaaaacagagtgtaaaagaaactgtaaaagtagacagtccaacttcggcagaagttttactccttagacagcagatagacctactaaaaaatcagctagatgatgcaaaaaatagagaaagcttctatcaaaatcaaattgaaactatgcaacgcctattggaagctccaaaaaccaatacaacacaatctgatgatcctggatcaacacaggcagaatccacagtagaagaaaaagaggacgtcatagctatgcctcctaaggagtcagaggttatcgagaataagcgtattccagtccctgaacatattgagccagaaccagaaaaaaggggcttctggagccgttttttcaagccctatggatga

SEQ ID NO: 61787 - DNA, 1674 bp, Acinetobacter baumannii
atgtctaattttattttagaggatttagaccagttaactaagcaatgtagaattgattataaaaatttaccaactaaaattgatattcctatcacacccgaactgaaaaacctattaattaaaaaattaggtaacggtgtggagatttcagaatattctattgaatacacaaatgataaaaatcagtatggaatatttccttctaaatggttttgggtagcttccgttttttacaaactggcgcaggcttatgagccatatagtgagattcttgcacacctaaaaaaaataccagaatttaataatgaagattttctgaaacaatatccttttgaacatgaaccctcatctaaaactcaagagcaattagattttgaaaaagaagctctttcatttataacctctaaagatccattaactgccattcaaaattttgatttatttaaaaaatttatttatgaacggtcttggtggaatcaaggtgaagtatctacgaaaaaagataaatcatctggaaagaatttttggcggacaaacaaggatttgtttaaaagtacgctattaacagcgactcagtttattgtctcaacttcagacaagctaactacaattatttatgccgttgcagaagagccattaattcttaataagctacaaaatattattaataatataaatgccgtaaattcagttaaagctagttcgggaaaaccagtagaaaatatcattttctacggtgctcctggcacagggaaaagctttgcaattgaagaaaaagtcaaagggcatatttcaatacgtaccgtttttcatcctgaaactcagtatagtgattttgtaggatgtctaagaccttctatggatgacaatggtattgagtacagcttcaaaaaaggtccttttattgaagcacttcttaaggcacttaaagaccctgaacatcactattatctaattattgaggaaatcaaccgcgcacctgcagcagccgttttcggagagctgtttcagttacttgatagagatagtaatggggaaagtgaataccggatcgatattaatgacaaggatcttctgaatttattaaataaagaacatccgggaggtttccctgataataaactttatatcccaaataaccttagcctctacgcgaccatgaacagtagtgatcaggctgttatgccccttgatacagcatttaaacgacgctggaagtttgaatacatgccacttgatttctcaacctcaccatcaggttactttaaaatcaatacagaaagtggagaaaagactgttagctggtcacaatttgcccaagtagtaaacttaatattatctaccctatcaattccggaagatcgacatctaggtccatggtttgtaaatgaaaatgaaatttttgatcaaaaaaatgccaagaaaaccctgactggcaaagtccttatgtatatctgggatgatgtacttcgacatagtgagcgatcagctctcttcaatacagatattaaaacctttgggtctctcgttaaaaaaattgagaataatgaaattattttttctgaaaactttttaaaggttttagaaaaagaaatcgaaaaaactaatgctgaaactcaaaatgagaacttaaagccggaaattactgaggaagaggatactggtgaaaactag

SEQ ID NO: 61788 - DNA, 1233 bp, Acinetobacter baumannii
atggaagaaagttttccgttagatctaaaagaagaattatctgaatctggtgagaaaattggtatcgaagcggaattagaagaagatactattcaaccatttgatcctcaagagatttcaatccaacaacgtaatgttgcaatggatgtaattatacgccgtttaagacaaggttcgattcaactagccccttcttttcaaagaaaagaagtttggaatagcaccagaaagtgcaggttaattgaatcattaatgttaaaaattcctcttccaatgttctatgtggcagcagatgaagaagggaattgggaagttgtagatggtttacaacgtttatcaaccatacgagattttattattggtaacaaagatggagttagacttcagctcaaaaacctagaatttttaggctcaaaatatgatggaaaaacttttgcagctattgaaaatgatattaatgaacaaaaattggttaatgatatttatgaaaccgaaatgcgtttcaccgtgattaatcctgggactcctgaagctgtaaagagaaatatctttaaaagaattaatacaggaggaatgcccttaacttcgcaagaaattcgacatgcattatatgaagggaaatcatctcaattactccaagagttaactaattctaaagaattcttaaaaacagttggtagtaaaatagatgatagtcggatgggtgctagtgaattaatattaagattattatcttttatgctaattgatcgaagtttttataaatcaggaatggataactggcttagtgacacgatgagaataattaacttatttccaaacccaaaggatatacagttaattaaaatctttcaaaacaccgagatgcctattctaaaattgcaaacaattgatgaaataaagtctaaattcgaacttgcaatgcttcgtagtgcaattattttcgatggtcatgctttccgaaaatctttaccaggcgatactagaaaaagccctataaataaatctctattcgaaatttggggaaatatactttcagaactttcaaatgaaagttttgtaaaattagaaataaataaagaattgttgcttaaagaatatgcattactatttaaagatttggagtttaataatgcaattagtagacattcctcgtcatctaaaggggtaatggatggctttagccgtataaaagttttggttgaaaaaattattaatggggaagaaagttga

SEQ ID NO: 61789 - DNA, 816 bp, Acinetobacter baumannii
ttgattaagcaattagaaatcaaaggatataagtcaatagttaatcagaaaatcgatttttctaatttaactttacttgcaggattaaataatagtggtaaaagttcgattattcagtcattgagaatgtattctgcagcctataatggaagctctcctttacttggcggacatggaaatatatcggatcttcgttcagactttgttaatgccaatgattctattgatataaaattatcttttgaagaaaatattattagctcattatgtctaggtgatcatgaaatactagaatcaccaataaaatgtcctgagtttttttatgtaggtgctgatcgtttggggcctcaaccattcctaccattaaatgttgctcttgatgccaaacctaaggttggagatagaggtgagtatgtttttgattttattaaaaaactggaggagagtggatatttattacctgagcaaatgattcattctctagcacagggtaaaacatttgagtttgttctgcagggctggcttaatgaaatttcaccaggagttcagttttctttttctaccaatagaaaggctgacatttcccatgctgagatagataattttcggccagccaatgtgggatttggtcttagttatactctaccaattattgcagctacattgggagcaactgcattagcacctagttatcttttggatgattggcttgtacaatgggaaaagcataaaaaagaaaacggagtgttattagttcttgaaaatcctgaggccatcttcacccacaaggtcaaacggcaatggggatattattag

SEQ ID NO: 61790 - DNA, 276 bp, Acinetobacter baumannii
atggggatattattagcctatgcagcttcttgcggtgtacaagttatagttgaaactcatagtgaacatgtgatggatggtattcgtattgctgtcaaggaccagattctaaataataataaagttaaatttcattatctatcaaaaacaaatgaaggactaacgaaacttgaaactcctacgatggatgaagaaggtaagataaacttctggcccgatggattcttcgatcaaacattaaaaaatagatctaaattagcgaaaaggagtcgctaa

SEQ ID NO: 61791 - DNA, 885 bp, Acinetobacter baumannii
atggatcatacaatatgtataaattctaatagttttccggctagttgtttagaccaaggtatgattctttttgaggatgctattcaaggtgtacttcaattatatagagataaagatagattcttctttttcttagattctaataatgggggactttttgattttaaaatatctgaagacttaacttatgaacaatttattgaaaaatgtggtgataatgatttacaaacttttttatatgaaatagaagataaaagtccggcattagattatctaaacgaagagcaattggataaaattgtagaatataagttttttgttgacaatgaaccctaccacgaacaacctgatgtatttggtttagcatgggttatatcaggtattctattaagtattaatacagataagtgttggagcaacagtgaagtaatcattcgtaggttagatgaacaaactggtgttccagtagaggacacactttctttaaaaaatatttctacattagatcatggtattgaacattttaatttaatgaatgtgcaagatattgatgagctggttcaaccgaatatactttctgaaatcttaaaaaattggtataacaatgatcttagtagagagaataaacatagggtgttagaaaagcttaagttagcttgcgaaaggaattttcagggtggagagcctttatttaaatctttagaagatggttttagagaaattagatttgatgcacataatggtggggctattagaatcttattcaaaaatattaaagataatagtcatgcattattagttggatttattaaaaaaagtgattcagaaggttataaaacagctaaaatacaagctgctgatatattttctaggataaaaccttaa

SEQ ID NO: 61792 - DNA, 1014 bp, Acinetobacter baumannii
atgaaaaaaaaagacattcaatttaacctccggattcctgaggatttaaagttaaagattgatgaagctgctaaggtaaatcaacgatctattaatgccgagacgatgtctcgtctatatgattcttttgttatggataataatattcatctagaagcagctaaagtcattgaaaattttctacaagcaagaacaccgacccagcgtaaaaaagatgtagctgagagacttaactttctttttaatgagattaaaaaaagtctgcatttcaaagaccttacagttgctgaattagcatataagattggggaaagctcagcagatagtgctgaatcttggttcagagcagaaatggaaccaacttttaaccaactagaacagatcgcaaattttttatctgcgaattcaaattggttactctttggaaaggaaagaccattcaaagttgagagcttccgtttcgatgagaatatagataaagatataagatggttattgacccctaatcctgaaaaagagttcttaaaaaatcagtcagtcaaagaagttaaatttattcgctgtcttaatgcggaagggtcactaattgtagctaagctgtattcaaatcaatatttagagtgtttccataccccttatcatattagtgatatcactggtgtcggtggatataactctctactttatttatgcttactgtttaaaaccttaaaaaaataccatagttcataccatcatccgaatatatatagcttcttgatttcagaagaaatggcgaaaaaaatatgggcagaagaaacacatcccttgccactgattgatcaactgcgtcatataccttggatggatgatctcgcagatgcattacctaatcgctcattagatgaattctattggcaggggtttgatgtgcttagatcaagattaataaaagattttaatgaaaaggaattcattaagcatcattggaatgattcagaattccatattaagcaccctatgaacttcgattaa

SEQ ID NO: 61793 - DNA, 1545 bp, Acinetobacter baumannii
atgaaaatacctgttgtagtacaaagaaaaatttgtgagttcttggcgcaaggtaatacacatcgccaaattgcaaaaagagttaatgtgtctccaacaacagttggtgttattgctaaaaaattaaatgaaattgaaatacctattgctgaggtgttgaaagcatctaatcaagagtttgtagatgttgtgcaaacaggtgttgcaagaaatatcatgaagtgcaaaccgctaccagactttacatatatcaatgatcaaatgaagatcagagatatgacacttaagcaattgtggattgagttcaaagaaacagagccagaaggtgtttcttattctcgatttatgaagttgtataaacagtggttgaaaaaattacacccctctatgcgccaacattatactgctggtcagacattgcttgtcgacttttgtggtaaaacaatgccaattcacgacattaattcaggccaggtgaggaatgttcaaatctttgtaggtgtattgggtgcttcaagtttaatcactgtgattgcagccgaaactcaacaaacacatgactggttaaaatgtttcacagccacttttaatcgtataggtggtgttcctagagaagtaatcacagataatctgaaagcggctgttattaaaacagggcgtaatggaacggttttcaataaaacatttgaacaatttgcggactatcatgattttgcaattctgaatactcgcccacgtactcccaaggacaaagggctagcagaggtttgtgttcaaattatccaacgttctgtcttggttaaattaagagaaagaaaatttttctcacttgaagaattgcaaaaagctatcgatgtagaagttgatagaatcaacaatggtgtcactaagcgttttcctgaaagtcgatcagatcgttttcatcgatttgaaaaaaatgaattgcttgcactacctaaacatccatatcctttttcaaaatggatatttcaacaaaccgtttcagagttttatcagttcaccattgatgggaatatttattctgttccctatactctgataggtaagaagttagatatcggtattacaagtcatgaagtgcaattctattatgagaatgaattaattacttcgcacagtttattagaaggctatggtcaagcaagtattctagacgagcatatgccagccaatcataggctttataatactttaagcccagcaagtattaggcagtgggctaaatctcttggaaactatgtttatgagtttgtggaaaaaattctaaataagtccaagcaactcgctcgtaatattaagtctttaaataagcttagagattatattttagaaaataagcttgattctgtccttaatcaggcttgtgagtatgcattaaaatataatctattagcagttacagacctcttgtatgtactcaaaaatagaaaatatatccaacctctaaacaccactcaaacaatgaaaccctatacacacgcgaacttacgtggtgctaattatttcggaggggatgcaagatga

SEQ ID NO: 61794 - DNA, 747 bp, Acinetobacter baumannii
atgactacaaagagcgttattgcacaaaaaatgcaagatttaaaacttaatggttgtttgaattgctttgttgatcattatgatgaaatggttaacagtaaaaagacctcattagaaattctcaatgaattactaatcgccgagcaaaatgaagtcagcaatcgaaaaatcttatcattgctaaataaatcgaatatacgatatccgacaagtagcctgacagaaatagattgttccaataaaaaagggcttacaagtgatattttacaaagctttgctgattgcgagtggatcaagtctaaacataatctaatttttacaggtgcaactggtataggtaagacatggcttgcctctgcatttggaacaaacgcatgtaaattgggttttaaagtcatcttttataatacaactgagttgttcgaagatttcaatactgcggtaaatttgggaactatctcgactttaaagaagagattactttcctgtaaattgctcattttggatgattttggtttatcacagatcaataattcttggttagctcattttattagtgttattgataaacatagtgacaatggttcactactaatcacaagtcaatatgaaaccaatctatggctaaaccactttgaggaccaaacggttggtgaggcattattagatcgtattgttcataggtcccatattttcaatttggcaggtgaatctatgcgaaaaaaacgaggtaaaaaaatcgagtaa

SEQ ID NO: 61795 - DNA, 216 bp, Acinetobacter baumannii
atgcctaaaaaatttgaggactttaataatcctaggaaaaaagcacttgcagggatgaaacaaagcatttcagctgaactttgggacaaaaatcttaattttttaactcaattaagagccaagatcacgagacatccagtattgcaaaatcaacacttacttgaacacccattctcatccaagttggacactttaataaacttatacgtaaattaa

SEQ ID NO: 61796 - DNA, 279 bp, Acinetobacter baumannii; identical to SEQ ID NO: 53640

SEQ ID NO: 61797 - DNA, 462 bp, Acinetobacter baumannii
atgtaccaaaatctactaattagtattgtatctggaaccgttattgcaatagtttcatcgtatctgacctcaatctggactatgaaaaagttctatacagaaaaatggtgggacagaaaagagcaagcttataccgaaataattaacgcactttatgacatgatacaattttataaagtttataaagaagattatggacaagatgattttatttctgacgagcgagctacagacctaagacagaagtattcagatggcataaggaaactatatagagcgacagacttagcaactctttatgtatctgaggaagccgtgaatgtattagtaaagttacgtaatagagagattttagatcaacgctcaaatcctttatgggaagtttatgaattagaatataaatactataatcaatcactgactcaacttcttataattgcaaagaaggatttaaagaaatag

SEQ ID NO: 61798 - DNA, 513 bp, Acinetobacter baumannii
atgtctaatggaacaaattatttcaaatatattgggcttgaatttattaaatttttgataccaatttctataaccttcttaacagcttgcttcttctcaaaacttttttcatcaaaagaattatttgaaatttatgtttctgcgaaaattaatgctcatcttacaaatgaatttttctcaattctaggagctattacaattcttcttggaattttattcatgataaaaagtctttctggattcaatgtgttagataaatttttaaccttaatattagaggaaatccctaaaaatataacaatttttggtggagcaatcactggttctatatatgcattatcatggtattcatatagttacgacatagtcttaaagcaaacaccaatgcaaatattttttttaggtactttttttgctatcacgttcttcatatatgccgttgctcttcaatatcttattgatcaaaagaaaataaaggacagtcaacaacaggtaaactctaataatggttaa

SEQ ID NO: 61799 - DNA, 360 bp, Acinetobacter baumannii
atggataaacaaagagttttcttttgtgggaattatctaattgaaaaaagagaaaagtctcagattaaaaagaatgcaaaagcaggtgatgtgaagtctatgctagatttggctagatattattacgcaaataaaaaaattaaaaaaaccataaagtatgctgatttagcagctttgagacaaggtagctatactcaatatgaagttggaatattctactttcagctcgagatacattataaagccgttttttggctcactatagctgcaaagaatggtgaccttgatgcaattgaagatattaagtctatatataacattaatttaaatttttctaataattttaaagatgccgcataa

SEQ ID NO: 61800 - DNA, 210 bp, Acinetobacter baumannii
atgtctaataataaacctttgaaaaatagtactaaattacttgttaacttagacaagtttatatttttagtcaatgctgccgatagcctagaagaaattgaaattattagagatttatgctgtgaatatttttcacattgtaagaggccaagctattacattgatatttttgacaatgcttattggataaaatattacgaaatagcttaa

SEQ ID NO: 61801 - DNA, 513 bp, Acinetobacter baumannii
atgaatagtgttcatgaaattatagaaaaaatacataatgaatgggagattgaacctaagaaagctattcagagaggtatggaatgtccctttcctttgcagtgttcattaaacctaaaaagcaaaatttacccacaaataccccaagtacttttaccaaaagtattagagaatttttatacagtatctaatggtgcagatctatttaaagatcaagaatacggacaatggggcttaaaattatattctattgaggaagtaatttttgcttcaaaaatttataaaagtaatcgtaataatgacgctcttcaaagtgacttaattattggagaattctatggagattcagacttattgttagttcgatgtgatcctaatagtgatgattacggctctatttttgttgtcttacctatagatcaaagacaagattggtacattgttgctaatacttttcaagaattcattagtaaattttatgaaactcagggtgataaattctgggaaccttaa

SEQ ID NO: 61802 - DNA, 429 bp, Acinetobacter baumannii
atgagtactctctattcaactcaagtcaaagcagtcggtggacgttcgggaacgattcgtagtgaagatggtatcttagaactaaaattggctttgccaaaagaattaggtggtaaaggtgatgcaacgaatcctgaacaattatttgcagctggctatgctgcatgctttggaaatgcagtgatccatgtaactcgtagcaataaagaatataaaatccgtgataacgatgtagaggtcctgagtactgttggaatagttgctaatggcaatggtggatttgccttgacagtacacttagatgtcacgctttcaggtatttcacaagctgatgcagagaaaatcgtggaacaaacgcatcaagtatgtccttattccaatgctattcgaggtaatatacaggtgtctaccactgtctataccaaataa

SEQ ID NO: 61803 - DNA, 432 bp, Acinetobacter baumannii
atgtccaagaatcagctttgcttagatgagcaactatgttttcctatttatgctgcatctaatttaatcgtaaaagcttatcgcccttttcttacacctctcggactcacttatcctcaatatttagtgatgttggttttgtgggaaaaagaatgtgtaagtgtgggtgatcttggacaaattttacatcttgatagtggaacattaaccccactattaaaaagaatggagacatctggtctaattaatcgatcacgtgatcctaatgatgaaagacgagttcttatttcattaaaagataaagggcgagacttatctgctgaagcagaaaagattcctaaagagcttaccaagaacattgagtttgataacttaaatcaattacgagatgaattaaaagtattagttaatctattatcagaaagaatttga

SEQ ID NO: 61804 - DNA, 228 bp, Acinetobacter baumannii; identical to SEQ ID NO: 58456

SEQ ID NO: 61805 - DNA, 531 bp, Acinetobacter baumannii
ttgctgtttgaagagttgaataatctgcctcttaaaaccgagtatgaacagaagtttttagatctgtatgaactttttcaaaagaatgcactagatcagatggaactaaatattttaaaaaccttggcgacacggtatctgaattttaaagcgcaaaagcttgaatacagtgatttagaattgtatttgagtcagctacagaagaaggatgctgggaaaaaacgcaaagctgaaaatcaacgtaaatttgaattaggtggtgctgttcttgtcgcatttaagaaactcaatattgatattagcaatgatactcctcaacagattaccaatcggattgtgaatacgacaaagtttcataatgaagtacgtaaatctttaatttttaaagatgttaagacatatgaaaatgaatattttaaagcaaataaactttttattcaggtgttagaaggattacatacctggcaaaagggcggagaattattgtcagtaattgaaattaaaaaggccttagaaaaaggcgaagagtag

SEQ ID NO: 61806 - DNA, 177 bp, Acinetobacter baumannii
atggcggtttatggcgtgtggcttatttggcacgcacagctcttccttttgctgctatctatggctttgcagccgagaaatttccatttaggaaattttctaaaaaataatgaagttgaaagcccaattttagaattgggcttttttgtgcaattaattgctttggctatgcgttaa

SEQ ID NO: 61807 - DNA, 825 bp, Acinetobacter baumannii
gtgaaattattatataaagatggaacaaattttatcaatggattattttacaagcacaaacttcctatggaaaaaggtgagttaaatcatagtattttgaatggagtgattccattagattgtttgttaaatgttaatttaacagaaaaagatgaagataatttatcaattgaaacttttggaaataattcaattttttatttaattgatcagatgtctaatgtgcaaaatccgagtgtcagcctaaataatttagggcaatttttcgaatatttaccaaatatagatctaatgttatgtacagatatgggaactgagccagcggattttattttatcttcaaaagataaggttgtattcgtacatgttaaatgtgggaaaagtccgaaatcaccggaatcctcagcaggtgcaatatatgaagtgggaagtcaagctctaaaaaatctacattatttattaaataatagtccttcacgttatgccaatattacaaatattaaaggggcatggcctcgaccaaatggtaacagtaaaggaatatgtttaaataatcgtattcggttgtttaataaaaaatttgatatgcatcattctttagaagatgttattgaagtgattgatgatcgtcgaaaaaatcctttggtgtctaaagaaatatggttggtcatgggtaattctttttcatataagcattttaaggatcagttaagtagtccaagtatggcttgtgctgaaacagttcaagcttatcaacttttagacacatggtatagccaaacatctaatcagaatgttgaaatgaaaatatttgtttctccatag

SEQ ID NO: 61808 - DNA, 375 bp, Acinetobacter baumannii
atgaaaaacgtcattattttaacttctatattgttattaagtgggtgcacaattaattctaagttattatcaccagcaaaaagtgatgatgacaaaattattgtagaagcagaaaagtacaagcaacaatatcaaaaaaagatctttaaaatttggaatgttccgccttcttcagtgggaatgagtgctagcgttaaagtctttttaagtgatactggtgagattgagcaaattatttttctagataaagaagaccaaaagtttaagtcgagtattgaaaaggcgatatggcgtgcaagtccctttgttttaccttctaatccggaagttagaaaacaagtaagaaagtttaatattaaatttactgcaaagtaa

SEQ ID NO: 61809 - DNA, 141 bp, Acinetobacter baumannii
atgttatacggagcgagttcaccatatttaaccaaaacttctgcatctacttcatcggttttagttagaactgagataccagcagcaaacttacgtactcgcgcgggattagcaacacaaactttaatgttattagagtag

SEQ ID NO: 61810 - DNA, 483 bp, Acinetobacter baumannii
atggttcaggaaaatagtcaatttttaaaacctatttatgactggttttcaaacaccctctctgaacaattttctttagaagacacagctaaaagtattcattcagatgagaactttaaaaaaaggtttcttaaattcttagagaatcaggatattgatattgttgatattaatgtcgacaaaggatccctcgctgaacaaattatcaaaaataataattttacgcctgaagttcaggaaaaaatcttagaagatttaaaaaatcgttattattatgatattaaaacttatcatagaaactccgataatgagctagaaccttttgatttagaattagaatcccaaggtactcgtaaacttttcgcgctttcctctttgctactaaataattataaaaaatttgagaaaacattttatgttgatgaactaagttcagctttacatccgcttttagtaaaaaattattttaagcgatatacatga

SEQ ID NO: 61811 - DNA, 285 bp, Acinetobacter baumannii
atgatcgattttgttaaagaactatctgcctgccgtgttgagggaacaaaacttcctttttatcctgaaaaagtacaaggttatactgagaaagaggtagagttgattgctaaaaatcttaatcttgatatacatggacaatttagagaatttcttcttcaaatggggaggtgttctgggggattaatatggagtgatgagttctatatgtataaaaatttatggaacccaaacaagtttagacatgctcaacaatctgaaaaaggcgatccaaatattaagtaa

SEQ ID NO: 61812 - DNA, 393 bp, Acinetobacter baumannii
atgaaaaattttgattgggatcgttgggttggaaagaatagtttcaacaagatatgggaaaagacgccgtatctttcaacgataagagcaatacctacatgttttaatgatgagagaacattggtgtatctatcatccgtggatttagattgtgatgttcaatctataaaagatctagagcaaattttggagcatattgtaagtgcatataaaacgaaatcatctcaggtgaaaacggcacagtcagcgcttaagttggctttatatcaatctgactttaatgtaatttgttcactcttaaatgatattaaagttacagatgattatgctgtttttagtaaagattatgattattcgtttccagatgatttatttgaaaatttaataaaatga

SEQ ID NO: 61813 - DNA, 354 bp, Acinetobacter baumannii
atgcaaaattctaatcataatgaaactaatggtatattagtaggtcctgaggtttctagaatttttgcagaaattatacttcaaaaatttgatgttaacttggctttgaatatagaatcaaactgtagtttaaagattggttcagatattgatttttacagatatatggacgatattttagttttttcaaataaaattgaaaatttggatttaataaaggatataatatctgacgaattatctttttttaagctgcatctcaataattctaaagagtctcttattgaaagaccattttgtactaattttataatcataagcgatagtaaattctttcctaaatgcttttcctag

SEQ ID NO: 61814 - DNA, 171 bp, Acinetobacter baumannii
atgaaaattctttttttaattaattctttgaagagtaaatctggttctgaacgagttgcagttgagctggctaataaaatggcagcaataggaagctataatattactcttttgaatagggaatctataaaagaaaatgcagcttacccattctcatacctatcagcatga

SEQ ID NO: 61815 - DNA, 171 bp, Acinetobacter baumannii
atgctagacggctactcggcaaaacattttgcaagagcttttaaaaaaaatgatatccaacgattccaattatcaggtattgaagttgaggatttttttaaagagttagtacaaagatgtcagagtaataagtctgtctcttatacacatctccgagcccacgagacgtag

SEQ ID NO: 61816 - DNA, 204 bp, Acinetobacter baumannii
atgaaccaatatcaaatagaacaatatgctggcattgatcaagaagttgctcaacacatgatgaatagcggaactgccaaagcaaaacatgcaatgagcttactaagtatgtgtgtttctttgcctgacaactgtgctctgactctacttaaagaggctgtttcagattgcaagaaagagatgaaggagccctctcatggataa

SEQ ID NO: 61817 - DNA, 612 bp, Acinetobacter baumannii
atggataactacaaaatcaaagttaaagatgaagctctgttttttggggttggcttcaagactggcaagtacaaatcttatgacggcaatactcaaagaaaacagtacaccctttggttgaatatgttgaagcgttgttactcaaaatcaagtttgagtgctcgcccaacttaccatggatgttcactttctgagaatttcagaaactacgacttcttctatgagtggtgcatggatcagaagggttttggtgaaaatgactttcaactggataaagaccttatcaaaaagggcaacaaggtttactcggaagactactgtgtattcattccaagagaagtaaatacagccctgatcaccagaaaaagcttacgtggcgatctacctattggcgtgtcatatcacaatagagataaacgattttcgtcaaagattaaagttaaaggaaacgaggtggttcttggttactttaaggatcaatttgaagcgtttaaagcttataagtcagcaaaggaacaataccttactgatctagcaaactcattcaaaggtctgatagatccacgtgcttacgcagctcttgtcaattatgaggtggatatcaatgactaa

SEQ ID NO: 61818 - DNA, 1323 bp, Acinetobacter baumannii
atgagttatctatttttgtcgtgtacagagaaagatctatttaaatactggattaagatctttgccgttgcgtttggtatgggagttgtttccggtgtcgtgatgagctatcagtttggtaccaactggagtgagttttcacgagtagcaggaagcattactggtcctttacttacctatgaagtcttgagtgccttcttcttagaagcgggtttcttaggaatcatgctatttggttggggccgtgttggtcctagagcccatttctttgcaacgcttatggttgccatcggaacatgtatttcgatgttctggattttatcgtccaatagctggatgcaaacgccgcagggttttgccatcgaaaatggcattattgtgccaaaagactggctagctattgtcttcaacccgtccttcccttaccgctttgcgcatatgggtgctgctgccttcttggtttcatctttattggtagtgggaacatctgcttggcacttggtaaaaggccgtcgtgatgaattggtgaaaaaatcattctcgatgggtctttggatggtacttgtgacttcttgtttacaagtggtgatcggcgataaccacggtttaaatactcgtgagcatcagcctgccaaacttgctgctatggaaggccactgggaaactaatcataacgagcctatgccactactgttatttgccattccagatatgaaagaagaacgaaatcactttgaagtgggcgttccatatttgggtagcttaattttgactcacagtttagatggacaagtgactggcttaaaagaattcgcacctgaagaccgtccaaactcgaccattattttctggagtttccgtgtcatggtgggtcttggcgtccttatggtcaccttatcactcattgctctttggttacgtaaaagaggaaaactctatgaaacatcatggtttcataaatttgctgtagtgatggggcctgcaggctatgtggcaatgttggctggatggattactaccgaagtaggccgtcaaccttgggtggtatatggcattatgcgaaccaaagatggtttatcacatactgtttcggcagatcaggtgggtctaagtctctttatttttgtggtggtttacaccatcgtttttggtagtggaatttactacaccttaaaactcattaataaaggccctgtatttatcgacacgccaaatatggaagcaggcggcgtaggacactttaaaacaccgatgcgtccacttagtgcagttgatgaaaatattgacagcaaacaaaactctggggagaaccgtcatgattga

SEQ ID NO: 61819 - DNA, 1443 bp, Acinetobacter baumannii
atgtcagaacagcaattaagaaaagttaagggaatttggtgtaaatttaacaatcaaaatagaatgtcaacggttacccttgatgagatgcgtatatgttgtataaaaagggggatagagattattgagattgaagaatgtacttttggttttaaccaaagcattccagcaattaagatttcaattgtaaacaatgtaacggctttattacctcgacagaaactatcagaaattcaaatttatcagaacaatattataccattccaaaaacaagaagaattctgggctaaagtagactggttcccaccagtctttatgaatcgagaacaaataggtgaaggctttaaagtagctaatttgaaaattggttaccacgagtttttgcctaaagaggagttacaaaaacgttttcaagagtttttcccgactgtatataatttctccaacattattcccatcactgtacaaactttttcagactcaatagctatatcaaagcatgtaccattaattaaagaatcaattttagctttttatagcggaatgagagtagcttctatagcatccttaattccgatgatcgaagatattttaaatactatcattgaggattcctttgagaatcttgatttaaaaactaaagttgatcgatgcataaaacgtgctaaacacaatataaaacatgatcatatattaggtgcagattggattcccgaagagtatgttcaagatgatgtgctgaaagtaatgaatgtgcgtattagaattattgaactaataggtaattggcttaaaaatagtttttatgagaataccgaaaactaccaaaatacttcaggatttaatcgacatttttttgctcatgctaaatctgaaatttggcaaaatcagtctaatttttttcgcgccatgggtctaattcaagcattggcatttattgaatgttttgccatgaaagagtctaagttatcaattttcccaccaactccagatataagatcagaatcttttcgtaacgatgtttttgcttgcttaaatttacaagtcatcaaaaatactcttttgcagcaattacaaatcgatgggtgcttacctttcaacccaacagcttcagatgatggttggttaggtcgctctgcaactttatcaactaaaatgaatgatgaaatagttaaaagacttagagataatggatggcaatgtcattcttttgggcaacctgttaaatctggtggatatataacagtaagagcatcaaagcttggtaaagaaattggtatagctctattgtatagttgtgctacagataataaagtttataaagagttggaagtaacaaatgattatattctctatcaaggagcaccttatcaacaagaatcatttgcatatggaatcaacaagtatgtgggtccattgaatgcttggttagctccggattag

SEQ ID NO: 61820 - DNA, 756 bp, Acinetobacter baumannii
atgacctttaaattacaccatggtgattgtctcgagatcatggcaaatatcccggatcaatccatagatatgattttatgcgacttgccatatggtacgacttgttgtgcttgggatactgttatttcatttaatccactttgggcacattacgaacgaatcatcaaacctaatggtgcaattgttctctttgctgcaaatccttttgctgcagttctggctacttcaaatcttaaattgttccgttatgaaatgatttgggaaaagcctgcagcaacaggttttctaaatgcaaaaaaacaaccattaagggcgcatgaaaacattttagttttttacaaatcacagcctacctataacccgcaaaagactacaggtcacaaacgtaaaacagccaagcgtaaagatattggctcagaacattacggcaaacagttaaatatcaaagattacgactcaacagagcgttacccacgttctgtacaacttttcagtagtgataagcagaaatcaaatttacatcccacgcaaaaaccagttgctctttgtgaatatttgattcgcacctacacaaatgttggagaagtagttctagataattgcatgggttcaggtactacaggcattgcttgcatcaatacggatcgcaaatttatcggtattgaaaaagaagctaagtactttgaaatagcaaaaaaacgccttgctgatgctgtggaaattaaacaaacagaattatttagtgaggtggtatga

SEQ ID NO: 61821 - DNA, 288 bp, Acinetobacter baumannii
atgaaaattcactctcaacctatggacctaagagactatttcgccacagctgcaatgcaaggttttatctcaactggtttaaaagatcgtgcacatatagctgaagtagcataccaacaagctgatgcaatgattgaagaacgtgagaaaggcactaatgaaagtgtcgatgcaatgaaacaaaagcttattgaggctattcaacgtaagcattgtggactacatccaaatatgtatatgacagtagaacatcttatttttcaacttgaaacaggccagccattttag

SEQ ID NO: 61822 - DNA, 477 bp, Acinetobacter baumannii
atgaaaaaagttatgcaaactaaaacaggcttaggtggcaattgccaatctgcaacgatcgctacattgctggaaatggatattaatgacattcccgacttttgggaaggttgcgataaatccaaaccagaatgtcctgtaaatggtcaaatctacaatgataactttgaccgtttccttgaaacaatgggtttagtttctatcagcttaggaacggatggtgaagataattctgaatgggttacagcaattagcaaaaagctatcagacactaaactcttagtgaatggatactccccgcgcgggtatatgcactcagtaatctggttgaatggggaattatggcatgacccgcatccagagggtggcggtgtaatccctgcaaacatcacatttatcatgcctaaatttgtgggtgatggtgcagaagcattgtttgccaaagagaaagtaatagaaggagctgaacagccatga

SEQ ID NO: 61823 - DNA, 153 bp, Acinetobacter baumannii; identical to SEQ ID NO: 61079

SEQ ID NO: 61824 - DNA, 336 bp, Acinetobacter baumannii
atgaacaattcacaacatccaattatgacagttacaggcatccgtaaggctgctggagactttacagacgataaaggtaaaacaatcgagttttcaaacacggttgtaactgtattacagaattactctgagcgtgaacttgaacaaggtgcaatcggattcaaatctaccgattataaaatcaaaggcgctcagttctttaatgattacatgcaccagaagctaccagccgaggctgcaatgatctttgattgggatttcacaggtaagcagccaaaggctgtgttagtggcgttagatttcaatgcgaagaaacaggaagttaaatcgctatga

SEQ ID NO: 61825 - DNA, 1221 bp, Acinetobacter baumannii
atgctagatcatatttgcataaatattccttttgatgcttcacatgttgtttgtgatagtgaaggacgttatgcatttgttgattttgatattcatctgtttgacatccctttagcttctcgttccgttcatcgtaatgatgatggttcaattgcagcgaatgctttgtttcatccttatgagtctttaccaactcattttacgggtatggctgtcaaagtatttttcgattctatgtatcatccatacgttcaaattaaagcttcgcctgcaaagttgttacagggtcataacgtatttggaagtgacaatatagagcagggtgcttttgaaatgattggttatttatcagaagcttatcctgttcttactagcatgttacatgttcccagtgcttgggtgtcacatattgatgtgacttactctgcacgattgaaagaccaaagcacggctaaaaaagttttggatttcctgagtaatgtcagtaatggccaaactcgtttaagtaacaagcgtttcgacagttcagtttattggggaggtcagacttcacgccttgtaaatcacaagtgctatatgaagcatgacgaatttatcgctcaatttgaagagtataagcaacttgcaaaaaagaacgataaagcagctcaacgagttgttgatgtcatgtccaattcggatctgattaactggactgtcggtcttttacgttttgaatcacgtttaaaaaaacgttggctcgaacgtaacggaataccaacaaatctctttgatttaattaagtttcaacgtcaaaacccaaatttacttcaaacactctggaaccaagctactcatagcatttttgaagccctgcgaggtcaatctatgaaactaacagatagtgatagtgtttttaaagctatacagaattcttcagttgtacttaatgctaaaggtaaagtatctctagctagagttcaaaaacttgattctttccatgcacttattaaagagcatggttatgacgttattaaaactagatattcaaagtctgagttttatcgactagttaaagatttatgtgaatgtggcttttcaaaggcatatttgcagaaccttcatgatgagaaggcatcaaacatcattccgttcgtcaagcttgtagaaattgactttaaccaacaattgcctgactggtatgaagaaccagtatcgcaatttaattatcaaatcgcatag

SEQ ID NO: 61826 - DNA, 198 bp, Acinetobacter baumannii
atgatctctgtacaaagaagaatccgtttagacctgatggataaagtcgaaaacgtaaaatgggaaatcaagtacaagttaagacttgaaatacaggacacagatatattgaatgccctgatttatcatcatctaaaggatttaacagccgaagaggtattggaatacagaagaaaataccttggaaaggatgattaa

SEQ ID NO: 61827 - DNA, 363 bp, Acinetobacter baumannii
atgcacaaattcaactttgaggaaacatggcaactaatttcctcacagttcgacactgtgactaaaacaggaagaaaatcccaaataagatcaaggcacttaatacaattcttgactgtaggtattcaatcaggaataagtgtcttaaagaaaatgtaccctcctcaatcatataaatcgtacatgacagatttaggaagatgcggaattactgaagacctaatcaacgaagaatacgaaaagaagcaatttaagaagaaaaatcaaaaggttgaattcgtagagttagtgtttaccaaccaagtgccagaagactataaacaaccaaaaagtaaatacagtcttaaagacataatggagtaa

SEQ ID NO: 61828 - DNA, 144 bp, Acinetobacter baumannii
atgatgattatttggcaatttattaaagataatttcggcctgtttttgtattttattcttgcggtagttgtctgtatacaatttgctctaaaaactcttcgcgagattaaatatgaacaagatgatgatcaatacatcccctaa

SEQ ID NO: 61829 - DNA, 336 bp, Acinetobacter baumannii; identical to SEQ ID NO: 61824

SEQ ID NO: 61830 - DNA, 1221 bp, Acinetobacter baumannii; identical to SEQ ID NO: 61825

SEQ ID NO: 61831 - DNA, 198 bp, Acinetobacter baumannii; identical to SEQ ID NO: 61826

SEQ ID NO: 61832 - DNA, 363 bp, Acinetobacter baumannii; identical to SEQ ID NO: 61827

SEQ ID NO: 61833 - DNA, 516 bp, Acinetobacter baumannii
atggctttaaaagtcggaattattaaaagctcggacgtatcaaaatggtgcgaatacaaaggtgctgatggagaggtacaggcagaatttaaagtccgtggtatcgcttataagccttttcaggtagctattgaacgagcaggaaaccagatctcgtctaaaggctacgatgtaatggtaaaagatgaagatgccaagctttatcacgagttgttaatggatgcatgtgctgcccatttaattgaagactggaagggtgtggttttcgccgaaatcgtagatggtaaaactgttgagtctgaaaagccatatacacctgagaatgcctcaaagcttcttaatcttggtgatattggtatttcaatctggctattcattaaagaacaggcccagaagattcaggaagaagccgacaaggacaaggctttaattctgggaaagtcatcgagctctacaaataccaaaaaacgtatgcgtcgaaaacgccgcacgaaattgaacaaatcaaattcttag

SEQ ID NO: 61834 - DNA, 1059 bp, Acinetobacter baumannii
atgaaccaagccaactcccacgaactcaatggacgtcattttcaaaatgagccgatctttactgatcataatttggtgttcgatcaccacgatttaagcgaaacctgccgaaatgtaggccaaatttttaaaccgcatgatcttaaaatctctcatcagaagcgagatttcagtgcaactatgcaccatgttaaaacaggcgcattgtctattagtcgcttggaatatggcgcagatgtcattattgaaccagatcatctggataacttttacctaattcagattccaactcagggctatgcagaaatcgagtttggttcgcaaaagtttatttcttattctcaagttgcttctcttatttcacctcagcaatctttacgtatgcgttggcatgcgaactcaccacagctcattctaaaagtttcaaaggatgattttacttaccattgccgtcaacacattgccgattcagaaaataacttactcgtttttgaccctaaattagatttttctacccaaggtggagcctattttttacagctcgttagaacattgatggatgctttagcatgtgatcagcacccgctccatcatccattagcctttaaacagtttgagtcaaatctatttaatgcattgatttatggtcagcccaacaatgcattacataagcttgatcattataaagaaaaaacggtatctccttatttcgtgaagcgtacagaagcctatattaaagaacacttgcatgagccgcttaatgtcgaaattctggccgagcatgcaggcgtgagcgtaagaaccctatttactggttttaaaaattatttggggacaaccccaatgtcttatttaaaagaattacgttttgaacaagcccatttagagctcatgcacaatgaaaatctatctgtcactgacgttgcatttaaatggggatttacccatttaggccgtttttcacaagagtacaaacgccgttatggtgagttaccttcgtctactcgccgatctggacagagtgaagggtcaggcatcattacttcaattttttcgtaa

SEQ ID NO: 61835 - DNA, 2577 bp, Acinetobacter baumannii
atggaacttttagcagatgacgaacttgcgttaatgcaagatgacccacggtataagcctaaaaaccaacgaggaaacgttcttgatgttgttttaggggcagcgtccggtgttgctatgggtactgtcgaagtggcaactgcaccagatgcattaattcgcggggataaaaaggccgcagctttacgtgcacaaaacctaacaatctttaagcctgaagaccttggtacagcgggtgagcttacattcggtttaacaaaggatttcactagaattggatggaatgccctaacaactataggtactggtggatacgcatctttaggattaaatgcgggcctatttggggcgcaatcatacgaaactgaaaaagcagatttaatcaataaaggtgcagatattgacactgctagaacaggtggtgcaattcgaggtttaactgatgctgcagggtttgtgttgccggttcatggtatagcaaaaaatgctattgccgatgctgttgctacaacgggtttagcaacagcgggaggaatcgcgggggattatgtagagggagactatcttaagaacaacaaaaataaaaaagtagcagaatacggagaacagctacaggaaaatgctacaagtccgcttgctctcggttcaaacgctactatggctttaatgctcaatgtttttgcgaataaggctaaacttagacctgagcaaggtacagaacatgatgcagctgatgctttaaatgatgcagcccaagtacaagcaaatattgatcatgctgaaggcctaaacccatttgaaccaactaatgcaaaagacgccaatgaccattttgacgcacttgattttgctcaagaacaagcattaaacgatgagcttgtatctcttggtcgtcctgtgagtggtacacccaaaaatattccagtacccgcgaaggtaacacaccctttatcctttaaaggtaagtctgcaactatccagcaaaaaatttatgatacggcgttatcaagtggactaagtgattcagaagcaagagccgccttggcaatagcacactttgagagcggcgggagctttgatccaaacgttaccaacccaagcagtaaatacaaaggtatttatcaatttaagccaagtacatggcgctctgaaggtggtacagatgctaactacactgatcttgataaacagattgaattaggtattaagcatacaaaggggaacatcgcctatattaaaaaagaaacaggcgtaactttgaccggttctcaaatttacttgccgcatcttttaggccgcggcggtgcaaaagcagttatacgggcgataaagaatacgcctgatgcacgtgctgaagatgtgttgcgtaaagtttatggtaaagacactgatgctgtattaaaaggtaatgctattaatcctgatgattcaattcaggcggctatgggtaagtttacttctaaaatcgataacctaatagcaactcaatatggtggggatataaaaaaaggaaatttagctattaggggtagtgactctgattttccagaattcgaatcgtcagttgctcagatacctgaatataaacgcgaaggtgatgttttaattgatgcttcgccaaatttatttgtaaatcgattaaatagtgaacctgaaaaattacttgaacttgaggaagactttcaccgtctgtcagaaccccttaattcagaagatattgagtacttaagagaaacagcacactaccagccatatgatggcaatgtgaatagagttgccttcgaagagccccaaattaatctatcgggcgatagtcgtagtgcgcaacgtggattggatgagttaagcagccaattacaacggactgattttcagggcagtgaggtaaatacctctccgataaaagttttaaaaaatgttgatgaagagccgcgtcaaccacgtttagatgagggtcaatcagaagtagatacggcaagtacctcacaaattcaggcgccaatagaaggcgttgaaaattggcaggctacacgatcagcagattatataaaacgtgaaaaagctcaatcggacggtgtcacagttcaagaactttataacaataaaactggcacattatttcaaagaagcatcaacggagatggcagtgtttcccctataaaaatttctcgttctggaaaagagttttctgcaaaaggttcaacggatggggagagcaataccccattgagcaatcttcagagtaaagcagctcaagccattgagcgagaattttggaaaccaagtaaagagaaaattacagggacgccaaaacttgaggtagaaggcaaaactgagtttggagcatttactgaaacacctgacggacgtgaagctgtaaaggccatgattgataatcctgatatggaggttaccgtaaatcgtttggatgataacggtaatgaagaaaccatctcaatgactgctcgagattggcttgactacattcgtgagcaagaagaaattgctaaagatgaaattcaagctgtacgggccttagcaagttgcgcattaaaatttgggagtgaagcagcatga

SEQ ID NO: 61836 - DNA, 1176 bp, Acinetobacter baumannii
atggaacatttttcaattgtattggcgttaggacgcgcagctttggagcatccaaactcagctgttatgaatcatatcaagcgactaattaaggcattagagaaaagtggtgagctggagcaagctgaaacgcttcggaagttaactgagagaaatacaaaaatagtagaaatgcagcctagccgaattactttatcatcttccactcttggtggagaagtcttaactcctagtgtaaaggcacccgtagataaagaaacaagtgctgttttagctgagatagtacatcctcatgaaaatcaacacgtaaaacctatttttgagcaagatttattgtacagtattgataatttgttggaagaatggcaaggtgttgataaacttaaattaaatggtattgatcctgctctttcacttatgttatttggggagccaggaacaggtaaaactttattagctcatcatgtatctaaaactttaggatatcctttaataattgcaaaattagatgggttactttcttcatttttaggtactaccgcgagaaatattgctaacttatttgctttcgctaatagatataaatgcattcttctactggatgagtttgatgctatagcaaaattaagggatgatccgaatgagcttggtgaattaaaaagagtggtaaatacacttttacagtgtttggatgagagaagtaaaattggttttacaatagccataacgaatcatgaaaatcttctagacccagctatttggcgtagatttgatattcgtgtcaatgtacccaaacctagtatgatagctcgagaaacgattataagtaatcattttaaagatacaattaaaataactgatgtacagttggagtttctagtatggttaacaaaaggatatagtggttcagatattgaaaagctagctaattttttaaaaagaaaagctgcgttacttggtaataaatttgaatttttcttatctattaaagagtatattaggtttagtgctaaaccttctgatatggggcaatatagagaaaaacttcttgataaaccagaagagttaatgattgagttaagtaatgataatgaattaaaaatgtcacaggctcgtttagctcaattatttggaaaaacgcaatcaacaattagtagagtagtttcaaaaagataa

SEQ ID NO: 61837 - DNA, 612 bp, Acinetobacter baumannii
atgcataatccagtacaaatagtattaaatgctcagcactatattaatagggttgatcctttaccaggagggggtaataaagatttttttgaaggattggatgacgattttaaaaaacataagcaaaacttagttgaagaattgcaaagtctgtctgtagaaaagtcttttaatgaagatcctctaatttatgctcgtgtagaactacaaagttctgcatgggcaaaaagccataggccgactactcaaatgtttcctacaaataaaatacgtactatgagtggaaacgaattagggagtttaattgtagaacttaagaaatcagatattgctgcaatacaagaaaaggtattgtcagcagaagatgaaactaattgggttataaatgagaaaactaagaagttagaatctaaaccacgaagaatcagaagtgaagtgggtgcaattactcatattcaactttattctagttcagataggcgtaaattttctattgaacaagctatgaaatggcttaacgatcctagaacaggaaattcttattacatcgaaacttttttttctgaaaaagcatgggacaaaaataatgaccatgagaacgtgcagagttag

SEQ ID NO: 61838 - DNA, 489 bp, Acinetobacter baumannii
atgtctaaactgactttacccttttaccatgaattttttgaaatccttgagagtaatgaaatattgaattggagagcaaatgatttcgtccaagccatttttgataaaagaaaaaacatgggagatcaggatcgccagttaatctacagaggcctagttattttggttgagtgtaaatatttaaagcgtgaaaagaaagccgagaacaataggatatatagatatagtgaggctattcgacttaaagtacataaggaaaatattcagcaagagaaaataaaagaagtattacttaccgagcaaaacattattgaaaaatcattgcagagaaacaaggtagaacaaattcttattcaggatattgtccataagcatcctgactttgaaaatttcttacataaatatgatcgatgtatttctaagagaatagttgagctggaaactaaagttctttttattaaatctgtattgaatgatattgatttctaa

SEQ ID NO: 61839 - DNA, 393 bp, Acinetobacter baumannii
  misc_feature (364)..(373): n is a, c, g, or t
gtgtcaggaattattgactgttggcaaagaacaattgcttcaccgaacaaagcaacaagttgcatgttaattgctgaaggtgggcttggtaagactacaatttgcaaaaaagttctacagagttttacctctagtttagtcgaatatagcgatcattctatacgcaaaaatcctgcattttacatacaaatcccatcgggaagcacgattgattcacttacaatattaatgctgtataagctgaatgatatcaatccaagcagtggtacacggagtgaccgagctttccgactaaagacaaaattaagtgagagctgtactgagttaataatatttgatgaatttcatcatatatattcaactnnnnnnnnnnagttcaaaaatgaaatttag

SEQ ID NO: 61840 - DNA, 498 bp, Acinetobacter baumannii
atgaaatttagtaagtcaaatgaaaacatcgcgaactggatcaagacactaagtgacgaaaataagatatgtatttgtttagtttcactacctgagtatgttgaaatttttgagagagacagtcagcaaagccgccgatttaaaaataaatatattcttcatccactatcaataaaaatcaattcaaaaaaagttcatataaaaccttttttagcagaagttgatagatttattgataaaaaactagggcttaattctttaaaactatcagaagatgcgatggttttaaaaatatatatagcgactgctggttaccatgattatgtgatgagtttagtcaaagaagcaataaaatttgctcttgaagaaggcaataacacattaaaaattcaacatttttcgttggcgtgggaaacagatattactgcttatgtacgattatctgagcgaaaccctttcgaaatgcaaatcaaagaactaaacaattttatgaactaa

SEQ ID NO: 61841 - DNA, 435 bp, Acinetobacter baumannii; identical to SEQ ID NO: 49446

SEQ ID NO: 61842 - DNA, 666 bp, Acinetobacter baumannii; identical to SEQ ID NO: 45666

SEQ ID NO: 61843 - DNA, 537 bp, Acinetobacter baumannii
ttgctttcagcgatttgtgattcttatttagaggtcggtaaatctgcaattaaagtttctttgcttgaacttctcgatgctccaattgaggcaattacttgcttagagcactatgatctggtggctttagatgatattgagtcaattagtggggtgcctcactggcaaaaagctgtttttcatttaatgaataaccatgaaggacaacttgttttctcttcacgtgttgcaccgattgaattaaaactagagttaccagatttacaatcgcgacttacacaagcagtgagtgtaaaagtgccgagcggaagtttatatgctgaccgctatgctttagtcacttctgtaatggctagacgtgggatccattttgatcagcagattgtagactatttacttttacatgggcctcatcaagcttctattctattgcaaaccgtagcacaattagaaaaactccttaaaggtgagaagactaaactttcaaatgcaacgttaagacaaatctatgctttaattgatgaatatcaacaataa

SEQ ID NO: 61844 - DNA, 246 bp, Acinetobacter baumannii
atgggaaaaatagctattttaattatggctcataaacctataaagtattttgaaggtttagcaagagataatcagcaagttaatttttttgtccacatggatataaagactaattttgttaatcctgaaattaaaaatttatattttttaaaagatgagttaagagtagatgttaagtggggaggattttcgcaagtacaagctaccctcaatgaaatctttcttggtaataaaaattttatctaa

SEQ ID NO: 61845 - DNA, 312 bp, Acinetobacter baumannii
atgaacagctttacacagcaaatcaaagattctcgccagcaaagtgaaatccaatctttctatgagcctgcattgcgagtacttgggcacctatttgaggtgaaaaagcaaaatttacgtaacaaaggttatgacgaaaataatgcagcggtaacacgtgatgagtttatgcaaggcctagttaatgatcatggtgtacacggcataaatctttatcacgcgggtgtaattatctcgagtctgtatagggctaaaaaaattcgatatttgggtagcttcatccaaattattgaaggggatggtggcgcgtga

SEQ ID NO: 61846 - DNA, 180 bp, Acinetobacter baumannii
atgaataagttgtctaaaatggagtttgcttctcaagacaaagcagttgacttagatgctttgtgccaagaaattcgtgagcgtgcctgtgcaggtgaatttgataatcaggcctatgtgagccaagacattatcgaaaaacctctgtacacgataaaaatagataactcattgaaataa

SEQ ID NO: 61847 - DNA, 960 bp, Acinetobacter baumannii; identical to SEQ ID NO: 50950

SEQ ID NO: 61848 - DNA, 222 bp, Acinetobacter baumannii
atgaaaacatacactgtaaaactatatgaaggcgttagtcgggagaaagttaatgaaactttgaaatactaccctgtaattaataataaattgcaattaacactaaaagcatttgaaggaatcgacgttataactgccaatgatctaatgattaaaatcgttgaacgtttaaaagcttctcaattagtagaaaagcataatttagacttgttgactgtctag

SEQ ID NO: 61849 - DNA, 381 bp, Acinetobacter baumannii
  misc_feature (366)..(375): n is a, c, g, or t
gtggatatccgccaagtttcacttgcatttgaacagtctggccgtattcagaaacttttagttcaagagggcgataaagttcaagcaggtcaagtactggcgacccttaataccaatgcattacaaattcaggcaaagcaagctcaagcacaacttaaagctcaacaagaggcaattgttaaacaagaggttggagctcgccctgaagaaatcacccaagcaaaagctcaacttgcgtctgcccaagctgagcttgataaaaccaataaaaacttgcaacgcttacaaattttggtaagtagtaccgatggtcgagcaattagccaacaagaactcgactatgccaaaagtaatcaacatagtgcnnnnnnnnnnacatag

SEQ ID NO: 61850 - DNA, 1017 bp, Acinetobacter baumannii; identical to SEQ ID NO: 51504

SEQ ID NO: 61851 - DNA, 540 bp, Acinetobacter baumannii
  misc_feature (514)..(523): n is a, c, g, or t
atgagcaaaaaaattacaattaataatcgtgatatcggtacagactttccaccgtatgtgattgctgagctttctgcgaaccataacgggcgtttagaaacggcactcaagattattgaagaagcgaagcgctgtggtgctgatgcaattaaattgcaaacatatagtgccgacactattacattaaatagccaaaacgaagagttcatgatccgtggtggtttatgggatgggcagtctctatatgagctttaccaaaaagcacaaatgccatgggaatggcataaaccgctttttgaccacgcgcgtgctttagatattacgatttttagctcaccatttgatcgtactgcagttgatttacttgaagaccttaatgcaccagcatataaaattgcctcttttgaagcggtcgatttgccattaattaaatatgtagcttcaaccggcaaaccaatgattatttcaacaggtatggcggataaagaagaaattggtgaagcaattcaagctnnnnnnnnnnattcaagctgcttatga

SEQ ID NO: 61852 - DNA, 930 bp, Acinetobacter baumannii
  misc_feature (368)..(377): n is a, c, g, or t
atgacattggaaaaatataatcctaaaaaaataattattttttctcgcgatgaaatgaaacaatgggaaatggcgaagaaatttaaagatgataaacgtgttcgctttttcattggtgatgtgcgtgataaagagcgcttatatcgtgctttagatggggttgattatgttgtgcatgctgcagcaaccaaaattgtaccaactgctgaatacaacccttttgaatgtatcaagaccaatattaatggtgcaatgaacttgattgatgcatgtatcgataaaaaggtaaaaggtgttgttgccctttcaacagataaggcaagcagtccaattaatttatatggtgcaacaaaacttgcatctgacannnnnnnnnntggtaatgcatactctggtgaacatggtacaaaattctctgttgtacgttacggtaacgtaatgggatctcgtgggtcagttattcctttctttatgtcaattaaagataaaggtgtgctaccaattacagatgaccgtatgactcgctttatgatctcgttagaacaaggtgtagagcttgtttggcatgcatttgaagatatggttggtggtgaaatttatgtgaaaaaaattccatcaatgaaagtgactgatcttgctgcagtggttgctcctgaagctaaacaagaagttgtaggtattcgtccaggcgaaaaattacatgagcaaatgatcagtgttgaagacgcttattatacttatgaatatccagagcattataaaatcctgcctgtaatcaatgattgggcggaaacaaaagaacgtattaaagacggtaaacgagttccagaaggtttccactattctagtgataataatactgaatggatgagtccagaagatttacaacaatggttaattgaaaacgctgagaaagtaggaaatatctaa

SEQ ID NO: 61853 - DNA, 720 bp, Acinetobacter baumannii
atgacattaaaggaacttgaatactatatcgtttattggattactaaagtttatcatcagaagaagcattcagctttaggaacatcacctattgttaaatgggaagaaggtgtttggggaacgaagacgacagcaggaacaggtttgaaagaacgtgtatcagatgaagataccttgtttattgattttctacctgaatttgaagcgaccattcagcgtacaggggtgcagaaagataacttattctattttgcagactgtttaaggcaatgggttaattctattgatccagacgacaataatcgaaagcgcaaaagaaaattcttatttaagcgtgatccgagggatatttcacagatttggttttatgagccattttctaatacctattttaaagtacccactgcaaagcgagagataccaccgattagcttatttgaatatagacaggtacagaactatctcaagaatgggcgtcaggatgttcagaatcaggatgagatttacaaggcgattttacatctacgtgagcagcttaatcaggctcgaagcttgactcgaaagcaacgtcgctcaaaccaaagaaaaaaggaaaatgaaaaagccattactcagctatccgaacagaatcagtctaaaaaggctgtagtttctgaaagccttcagacaagtgatgatttgtggagtactcctttaactgcatttgatgatttaaggtga

SEQ ID NO: 61854 - DNA, 618 bp, Acinetobacter baumannii
ttgcaagaatccgtaagacatttaactaaaaaagatattgaaaaaataattaactatccaactcttacaggtcgttatcctagctttgaggagcaacttcctaaaccgccaccaacttacctttctttaaatgaagcagcaaagaaactccatatcagtccaaataaaactgccagattagtcgaaaaaggcgtccttgaaaaagatacatcacataatttaagtatttcaatcagtattcaatctttaaacatgctaatcgcaaacctgcataatcctaaattcatatctgtaaaacaggcacttatacaactaaattgttctgcaaactggtttcatgagtattgggttgaaacaggttttattcatattcatgattttctatactggcattttgttgaaagaaatgagcttaataaagtactaaggttaaagaaaagttatcttacgggcaccgaagcaagcactcttcttggcatgcacaaatctcatgtgacaaacttagagtcccaaggtttaattgaacctgtttatttcggaacaccaaaaataattaagttatttaaacgagaagatgtcataaaattaaaggagttaggatatggggcaatcaaataa

SEQ ID NO: 61855 - DNA, 234 bp, Acinetobacter baumannii
atgagcctattacaacaacttgcaatcaaacatccaatttttctggctccaatggcgggcgtctctactcctgaattagcagccgaggtttcaaatcaaggaggccttggatcattaggcttaggagcaaacacaccgcaaagtgcacgtgaacaaattttaaaaactcaagcgctcacggaaaacccatttcaagttaatttttctgtcatcaatcgactgagcttaatgtag

SEQ ID NO: 61856 - DNA, 864 bp, Acinetobacter baumannii
atggataactacaaaagctacaaagttcgtgtagaaaacgatgatcaattgtttgaaggcgttagtttgtttgaagctcttggttataaacctaaagggtcatcaattcttaaatctgacaactttttgtttgctaccagttacgggctgttacagagctgtgagaatgcaatcaattcagatggctatgagtggattaccctccctcagcttcgagaccttgttgctcaaagtaagtcaaacttgcgtgagtatttagattcatacgacaactacaagttatgccttatcaatccttctgaagcagctcattggatgattgaagttccagaaggtgccgattgtttaatgcagtggcctacaggtcataaagttttctataaagataattttgctaaatcttggaatagtgcttatagggaatggcaatttgtcagtggtgatgatgggattgatcaatcaagtacgctttggaaacgcgccacccaagacccagccttgattagcggtgcggaggctaagcttgcatgggctaatggcgaaattgttgagtactttagcaaaagccgtgatgaatggtttgaagtaaaagggaacacatttgtttctgtgtttgatagtgcagaaaaattaagaatcaaaccccaaaccatcaagcttgaacttgagctgccgaagccttttgagccagaagaagattgtcacgtttacatcttagatgacggaaaaacagatggctatcgtcgttattcctacgaagttcatggtgataaaggaaatacatttattggtatttggcgcaccgaagaagaagtaaagcaagtcgtagagcaactcagaaagatacgaggtactaactcatga

SEQ ID NO: 61857 - DNA, 255 bp, Acinetobacter baumannii
atggatactaagtacgattggtcaaaagttccaagtgaagtcaaatacattgcaactgatgctgatggctatggatttggttacttccgaaaacctgagctaaataaatttaaggaaggctttggcaaaaaccgtgatgttgcaaattttatgatttccccaaagaaaaacccatttgttgactattcaaatggctggaattggaaggactcacttgaaaagcgccctgaattgaaggagccctctcatggataa

SEQ ID NO: 61858 - DNA, 348 bp, Acinetobacter baumannii
atgtgggtaactgcgatggagcctcctcgaatggaattggcatgggatcagcatgtaggtccagttatgcgctttgatcctaaggaagaaaatggctatggtaaatgggtttacgatacgaaacgtcctaccatcgcttgttctcgtggagacatcgtgctacttgaaataccactcattgattatgatattcaaaaagaatttggtaaacctgagcctgatggagcgaatgcacgttttcgcccgagtgagtggggtgttcaacaatgcgaaaaaggtcaggggccgattaaagttagtcctgcgtatactgggactgcaccaaagaaaccttggtttcaactttga

SEQ ID NO: 61859 - DNA, 738 bp, Acinetobacter baumannii; identical to SEQ ID NO: 56144

SEQ ID NO: 61860 - DNA, 297 bp, Acinetobacter baumannii; identical to SEQ ID NO: 56313

SEQ ID NO: 61861 - DNA, 795 bp, Acinetobacter baumannii
atgaacagtatggtttctaacaatcaaaatgcagtagcacatatcaattcagcaaaagttgttggaatcttcaaagcgattgcacctcgctcatttgagaaaacttttgaaggaattgcaacagagcaaatcaatcatgcaatgaagatctgtcttgatggccttactcatgagcaagtgaacaaaggcttatcaatggtccgtgataacggctactgtccagatcctgcaatgtttcgcaaatggtgcttagggattgagggctttggatctgagcaacaaagagcgattgactcatacaagggtaagaacgcagcactagcaaacattcttagatggcgtgcagatcaatcagcaccaatcacaaacgctgaaaaagaagcatatgaccgttgttatgagatgtttaatgcaattgagtgggcttacaactctgataaagctgcatatttagcatatgacgcatttaaagaaaattatgtggaagtggttaaagaactagtcgcaaaaggagaacagcaaggcatctggacagcaccaaaagcaattagctccaaagttaaacgaatggttagttatgcccaagattacctaaacagcaaagatggcgtgcatgcatattttgcaagtgcagcaggaatcgctaaagaacaattcttctcgattactagagcagaagtcaaagagcatcaggatagaaacaatatttttgcatatgacaaagctttgtacgagttgatatctcagaagcttaattctcttgtctgggaagaagaagagagaggtgcagcgtga

SEQ ID NO: 61862 - DNA, 357 bp, Acinetobacter baumannii
atgagcaaattatctaatgaccttactgcaagagccagaaacacaagagctttagttatgcaggctcttgcatcaaaaaataatggcgaaattgcggacagactcggagtagatgcgagcaccttatcaagaatgaaaaatgataagaaatccaatggcttgagtgaaattgagaacgcttgtgcattattggatgcgcttggattaaaagttattcctgaaaattatgagtgttatgaccgtcagtttgttgagtcaattttctttttagcacgtctttctatggcgcgtgcttcggacatcaacgattaccaacacacagatttatctaagcgtttatcagagcttggatattaa

SEQ ID NO: 61863 - DNA, 402 bp, Acinetobacter baumannii
atggcatccttaattcataatactttatcacgtaattacacattagttattgggcgaatagttttatcttcattctttttaatcgctggtatttttggtgtgtttaactttgatactgttgttaatgaaatgattggagcaaatttaccacttcctgaattatttgcttttgcaactatagccattcaacttataggatcaattctacttatttcaaattttgcagggcttacatggttgggtgcaggaacactagccattttcactttactttgtattcctattggacatcctttttggaaattagctgaaccacaaagaactcaggatttccaaattgtattagaacatattgctttaagtggagggcttctattagcagcaatagccaccaagaaataa

SEQ ID NO: 61864 - DNA, 522 bp, Acinetobacter baumannii
atgatggctggtattgagcattttactgcggtacttgccgaatacatgatgaagcacgaaaagaatttctactattcagatgatgccaaaagccgtgctttatggatgtggcatatgcttgaagaatctgagcataaagatattgcctatgatgtatatcaattactcaatggtagctacccactacgagcttctggcttctttttagcattcttcactattttaggtctaatccctgcgactaccttgtttattccggttttaagaaaaccgcaggaaatgttgactagaaaattctggaaagacgcgcgccgtggtgtaggacttatttttggtccaaaagatggtgtattcggtagcaccattggccagattttcgattatttacgtcctgacttccatccaaatgaccatgacacgaccgaatatctggagtactacaaagacaaattactcaaagaaggcggcgcgattgcaccttactttgtgaaggaatttaccccacctgtacgcttgtcttaa

SEQ ID NO: 61865 - DNA, 138 bp, Acinetobacter baumannii; identical to SEQ ID NO: 50167

SEQ ID NO: 61866 - DNA, 2820 bp, Acinetobacter baumannii
atggcagtaccagaacagacgccatttatagaatatacagcgaatggaaccactacagtttatccgcttacgtttgactgtgataaatctgaatacttgattgtatctcttgatggagaagaggcaccagttgggtcatggagccttactggtgagtcaataactttcaattctgcacctgctaatggtgtgctcattacaattgaaagaaatacgccattccgtagaacaactgagtatcaatcttataacaactcatttcgtccatcacctgtaaacaaagactttgatttaatatggtggaaacttcaagaacttggctatcgtgatcaagtaatttggctcgctttagttaaggagatttctgaccgtattgctggtgatgaggacctacaaaaccaaataaatacgattgatgaatggcttggcaatttacaagaaaacgtagatcaaaatacaaatgacattgagcagcttgttaatgatctttcaaaagaaattgctgatcgtattaagggcgaccaaattctaaaagatatgttcctctctatgattgatgaagcaatcaatgaagggacaattaatgcattagcagttacgcatgttgactccttagaagccttagaaggagtaactaatgtatgggatgggcgcacaatttatattaaggatcttggcaattatcgatatgatgcatcaaccacaacttgggtaaaagcctatcaagatgctgataatgtaaaagatgggtctgaatcacagatgcagattaatgacaagtcagttcgcgtttttgagtctattgctgatttattgacttatacgccaagaaaggatgggcaagtcgtttatgttaagggttatcacaacccaacaaattttgctttagctaaaccttatgtgggcgggggtcatcgtgtatatgttgcatcacgcaaagccgaaaacgatgggtttttatgtatcaatggttgggtattgcagcatgagaatgtttttactccatatcattctggttgcaagtgtgatggtgttactgatgatacgttaaattttgataagttaatgtatgcccttgaacgaaacaacttaaaagggcatgtaattattaatgatcccatgttctttaattcgcaatgccctagaatcggaaaattaattgatcctgttcaatttaatgaaaaaaatgctattcgtttggtttcaaatgtaaaactcgaaatcaattcaacattaacattcggttctttttactcgggttcaagtggtcagccaaaatgtaatattttaagcgctatgtatcgtgcagatgttgatgattggtacggaaaaaataggcatgaaaacattgaagtttttggaactggtacattagattttactgcaacagaatcagaatctgctatacaggatggctatcgttggattatcaaagcttcagttaaaggtatgaaagtccatggtcttaaatttattggtggcgactttgcaaatgcaattcagacttctaaaacttctcaaaaagtagaaatttatgataatacatttactaatttgatgtctaataagtctcaacttcatgatcattcgacaatttactgcataggtaaagatattaaagttcatgataatgtgttcgaatttactaatgtcaagggacgattgaatgcttgtgcatgtgaactacatggatcagaacagtggttctatgataataaggtgtttggctacccaaatcttgtatttagtgcaattttgcgtacagatcagtcgcttgatgaaaatgaagttgtatatgatcaaaaagtatttggaaatactgcaaatattagtcgaagtggtctcggttattggtcgattttagggaaaactgcaaaacttaatgacttaacttttaacaataatacacttaattttatagagcccccgacactaagcaagttcaatgatgcaaatgtaaatggcatgtcatacccgagttcactgcctgcttcaatatttactgtttggcacgagggggactcagttcctaatattacctttgcagcagaggtactacaaggaatttatattcatgacaatatacagacagcagtcaacgggttgcttcaatcacaagatgttagtttaattagatttgttggttgttatagtcgtgaaaatttaaaaattttcaataattcttttaaactaaatagattactaaatagagatgtttccacatcaacaactagtgattattttagtggctggtatatcaaaaacaatacctatgatttttctaaacataaatcagttatttatagttttaccatgtatctggaatatatgaagaattgtgtttttgattttgctttagattctaattttccagtaattgataaaacatataacttcttatactttgtattcgctgacaaatcaaaagttaaagataatgttataaaaattgatgtagaaaaatcatatgatgctctagatgcttggttcggtggaagcatgatgacttatactcgtgctgagatgagactccagaataattctattgaatcaacatcgtattgttacattaaagaaagtcgagttgctactactacggttgcaacaatgcagattgtaactaataacataccgctatctgttcagagtggatttattaaaagatatatggatgaaatgataggttctatttattatccaagttcatatacattagattattctgccgggagcaagctcaaagcagtagcaacatctgcaagtgttttcccagaatcaactgaatccgatagaaacgcatatattaagtttatatgctaa

SEQ ID NO: 61867 - DNA, 360 bp, Acinetobacter baumannii
atgtcatcggataaaatccaagaagctaagaataaatttcttaatagtgttaagccgaaatatatagaactttatggcgcattagagcctgatttattatttatagataaatctttgtttgatgaaaatagtgtggtttctattgatgctgaaataatctttgtagataaaccagaacatattgcttggcacaagaagaaacacattgaggatttgataaaaatgggaagtgatggttctatggataaaggttatgccttaactgagtggtatgagccgggtacgccaagaccagaggatatatttaatgacgtattttgcgactttgaaattaaagcgtatataggtcaaggatcataa

SEQ ID NO: 61868 - DNA, 312 bp, Acinetobacter baumannii
atgagtttgttatttgatttaattaaaaaagaaaatattgatgatggcgcttcagaagaatttgtggatagtgctgcatatattgtggagtcagcattaaattattggattactcttaatcaagcaataccagagaatgaacaagatgttttagcaattggcacatattcatctattggaaaaaatgaattaatgcatgctgttgtaaaatacaaagcagatggaagttattttttacttggtgattctgtatttaaggtttttggatggaggccattgccaggattagagcttagttcttttaatatttga

SEQ ID NO: 61869 - DNA, 309 bp, Acinetobacter baumannii
atgaatcttaatagcgaattagtgaaaggaatgactcaaattgagtttgaacaagagcttgcgaggctacttagaaaagatagagatatggtttctgaccaaatgcaaaaggatatggaagctctgcaaaaacttaatagcggcaattatgtgattgtgccaaaagaaccaactcaaagaatgctaaacgctggtcatgttgcaatgaatccagtcaaaggctcagacgtccattcagggactaatcagaagcgtcgtgagtgctacaaggcaatgttaagggcttatcaggagtacggtgaccaatga

SEQ ID NO: 61870 - DNA, 255 bp, Acinetobacter baumannii
atgaaaccagaacattttattcgatggtacggaatagaagatgcaaagtatctgattgagcaaaatattaattgcaatgatttcgagttttctttggacgacctcaagcgtcttgtggagtcggttgatcgtgtcaatgcatttggtggcttaaaggacgcaaaagcagtcgtaaagatgggtaagcactacaagtacttgaaagcccacattagcaattacgaatcaatatacggaggcggggatgatctataa

SEQ ID NO: 61871 - DNA, 909 bp, Acinetobacter baumannii
atgaatttagcatacaaacacgactctccacaaggtgaagttatcgagtttccaaaacatgagcgacaagttatgtcaccaaaagcagaggggtttaccccaatgcctaatttcttggtagatgagcgttatatcgctgaattgccagctgaggcagtaaagcttttagtgatacttaatcgacacattgttggataccaagaaagtgaaaaggcattcagcacttctttggctatggaattagcaggcattaaggatgagcgcacagcaactaaatatctaaaagtattagctgagtggaatcttgtaattcctaaaaaatcacgtgggaaaactacagtgtattgccttaattttaccaatccaaaagatactaactttaagaaactacccacatcaaatgctggtggactacctacacaacatgtacctgcatttttaggtaattttcaacaaccacctgcacaagatgcaggtacaccacctacacagcatgaggggggagtacctacatgtcatgggggtctaataaataaacttaataaagaaacttctaaagaaaatttatgtgaggaaaattcagttgattcggttttaaaactttgggttccaaatttggatgcgttgaatgcttggttgcaaagatcaggtatcacaaaaatgactcaagccgaggttgatggttggttacttgagatcaacgggtactactcaacaaaacttgaagcgggtttgcttacagatacccaaatgtacacaaacttcgtgaagtggattaaacgcaatttctcaagtcgtaagcctgcacagcctcaaacatcacgcaacgttaacgatgcttgggctaataacccagctcaatacaccaagacgcttgaagaagctgaaataccggaggactgggtatga

SEQ ID NO: 61872 - DNA, 537 bp, Acinetobacter baumannii
atgatgagctataaagatattccacctggcatcaatccaccagatgatttctacagtattattgaaattcctcaaaatattgacccagttaaatatgaaatgaataaggaatttgattctattttcattgaccgctttttaacaacatcaatgttttatcctgcgaactatggttatattcctaaaacgctgagtgaggatggcgatccattagatgtattggttatctcaccttatccagtagcaattggtgcagtaatcaggagtagacctgtgggtgtgatgtatatggaagatgaacatggcattgatgcaaaaatcattgcagttcctcacactaaactatcaaagctttacgatcatattttagatatcaatgatgtagatcaacttactttaaatcgtatccatcatttctttgagcattataaagacttggaagaaggcaaatgggtaaagcttaaaggttggggaaatgttgaaaaagcacgagaagaaattttaagctcaatacaagcctatcctgatcatcattga

SEQ ID NO: 61873 - DNA, 330 bp, Acinetobacter baumannii
atgaacggatatttagtcacattttataccgagatgaatcaaaggcataaaaacatccccatccatgaatggctcttagaactgacaagagagttaggatttaagggtgctacagtcattcatggatcagaaggcattgaccatacagggcgattacattcagctcacttttttgaattagttgaccagcctgtgcaagtccaacttgctctgagtgaagcagaatcagaacaattgtttacacatctgaatcaagaagatgtcagaattttttatgtaaaaactcccgttcagtttggcactgtcggtactcaaaaaggaaaagaatga

SEQ ID NO: 61874 - DNA, 381 bp, Acinetobacter baumannii
atgtacatctccttactttcaataggtcttggtgctgttctaggtgcttggatacgttggggaattggtcttcaatttaaccactatttcccaaatattcctttaggcacagtcctagtgaatcttgttggtgcattcgttattggctttgccgtcactttttttgccagtagctctttgaatcctaattacaagttgttcctcattactggtttttgtggtgctttaaccacgttctcaacattttcaatggaagttgtttctttacttcaaagtggcaaatttgaatatgccattttgacaattacagtccacgttttaggttcattgctatttactttgcttggcatatttacctatcaactaacgactacacattag

SEQ ID NO: 61875 - DNA, 363 bp, Acinetobacter baumannii
atggggcaggctaaaaaacgtggttcactagaagaacgaatcaaacaagcacaagatcgttactatggtcaagaatctactattgaagaagtcagacaggctctcggtcttcccgaagatgctcaagcacttggatatataatccatctacccgatcaagatgagttcgtttcaactatagaagacaatgacagtatattttcagtaggctatgcaaaactaccagaattagcaaaagtatatgatcagcctgatcaagcaattactgatgccaaaaaaattaagaaacacaaactattggtttgtgttctttttgaatcttctaagcaatattttattaatgatctatgggcaaattattaa

SEQ ID NO: 61876 - DNA, 1431 bp, Acinetobacter baumannii
ttgactgaaaatgttattgaacatgactgtcatggatgcaaccagtcagtttctttcataaaaaaacgatataaaggcaagaaatattgttcgacttgttatgctcgtaactttaaaaaacgattatgcccaagttgtggtgactttgcccgactccctagagatgatgaacaagccatttgtaatgaatgtattaagaaacaaccctgtattcgatgtaatcagacaaataaaccaataggtaagctgaccgaatatggtgtggtgtgtaatagttgttccgtgtattttagacccattgagccttgtgaacgatgtggtacgccatcacaaaaattgactcaaatttcgcgatttaatgatgatctacgggtatgtccaaaatgtgcgacacgagattatgagacatgtccatcgtgccagaagcatcgcttattagagtctgatgcatcaggacaaagaatgtgcaaaaaatgtagaaataagcctcagaaatcctgtaaagcatgtcattgtatgattgcagcaggttgtgctgatttatgcgatgattgttattggcatcaaaatttatggaataaatttgatcaaaatcagaaagtatttgagtctagttacttaaaacagcagtatgaaaactatacaggctggttagaaaagaaagtgggatcacataaagccgcattatatataaataaacatatccatttctttatgaaaaccgaaatagattggaatcaatctgtgcctaccccaaagcagttattagtaaggttacgaagtagtgggcttagaaaatttgaattggtgatgcaatggcttgaagaggtgcatgacattcgaatagatacggataacaaaaaaagttgttcagaacgagatcagatggaaaagcttgtgcaacatattttgcaaccatctttggcttatgatgttgtactggaatacaagaataaattagaagaaaaaatcaaacgaggcgatacctcaatacgttcagcgaggttggcagtaaagcctgctgttgcgttaatgctgtcaattgagcaagaggatatccaattaccaaatctagagcatatcaaagcctatttgtctgactattcaggtcaagctgctgcactgacagggtttattaattttttaaacgaaaattatggtacttcaattgattatttaacacttaaaaagtctgaatttttaaatgttaaacgaaaactaaaattggaaaataagattgctgaattaacccataccaatttagcaaatagtaatgatatggttagttgggttaggagtggtctcagatatttccatcaactcccatatgtggatgctgtaaaggtaaaggctgaaatggttagggaagttgatgatggatatgagattgaattaaaggggcagtcttattggctgcccaaaaatcaataa

SEQ ID NO: 61877 - DNA, 252 bp, Acinetobacter baumannii
atgttattcaaaaaattcgctgttgctgctgctgttgccgctactttagctttcgttggttgttctaagaaagaagaagctccagctgctgctgctgcttctgaagctgtagctgctgcttctgaagctactgctgctgcttctgaagctgctactgctgttgacgctgctgcttctgaaactgccgctgctgcttctgacgttgctgctgctgctgctgcttctgacgctgctgcttctgctgcacactaa

SEQ ID NO: 61878 - DNA, 882 bp, Acinetobacter baumannii
atggatgctgattatgtattaagtcattttgataagtatccagatattccagtgattgtgaacagtgaacttgcagagcagctaggtaatcatccgatggtgttagtggataccactttaagctatgaagctgttcaggaaactactggtgtaggactagagcaagtttcagattttgcggatgtaggagatatgctaccaatcccactattaacgattggtttagcggcatatcgtaattatggtgattttaattcaggtaaagtggatggcgagcaatacttaaaaaatgttggcaaagaaactgctgcaattgctggaggtgcaatgacagggtcaatgctactcggcgcattagcaggtcttgctacaggtggtgttggagtcattgttgcgagtggtattggtgcatatatgggaggggttgctggttctacaggtgcaaatagtatgaatcgagaagccttgtgtaatcagagagatatcgtagtgaaattactcattgaattcgcagcgtggttcaatgaaaatttattggttcatcgaacaaatgtgctattcaaacagctacaaagttttgaaactcatatgttgaataatgctgatcgtattattacttttagtactttattgatctatcaacatgaagcttatatgcgtgcctatcatctgaaccaatggatattacataagttgcaaaaaggtaatgaaatggaaaaggttcaagctggttgggtggctattgatgagtcaagtaattttatatcagttgatctacagccaaaaattaatgaaattaatcgtcaattagagatttatagggaacttgccaaacctgattcagcacagcctaatcgtactcatcagcttaaacctgcttga

SEQ ID NO: 61879 - DNA, 492 bp, Acinetobacter baumannii
atgtcaaatattaatttcccattttcattagcagaagagatgttcgataacaatgtcgaatttaataagattctgcatgtaccaactctaaatgttggtgaaagagttcctgaaggttttaaagagtttttaggagacatggattctaaaaatggtgaagaccctgtcgaacagcaccctcaattgaaacagtttattgatgaagttagagaatattcagacagtgagtggaacgaagaacatgcgacacgtttgattcgtcatcacaataattttgaatttctaattaaccttcacattgcaatccctagagattttagctttaccgaagaagggaagtttctatcttgttctattggtgggcattaccgttgccaatggatttttgcaacttctatgaaagatgcagctgagcaagctaacaaattagccgaacagatccatgatcatgaagaaacaaaagcacgcaaagagcaaggtttggaggagtaa

SEQ ID NO: 61880 - DNA, 792 bp, Acinetobacter baumannii
atgactgcatataacaaattaaaaattgccattttcaccattatgtcttcgccttgtgtttatgcgattacattagatcctattcaaattcaatctgcacctggggaattactttatgcagaaatgaattttcagcaagcggatccaaataccccattacaagtcagtttagccactcaagaagatcttaatagtttgggagtcactcaccaacctcctggtaatctgaacttttatacacgccaaaatggccaaggttctggcgttattgtgattacctcatctcgtcctattattgatcctgaattgaatattgtcgtaaaagtcagtgaaggtaatgcaactcgtcttcaacatattaaaaccgttttaaagccatcgcctataaaaaaagtcgctgctaacgaaagtccactttcaccgcaatttatcgtaaatgaaaaagacatcgcgttaaacttaccggaaagtactcgatacacacctgctgagacagcaacagccgtagcagaaactccagctaatgagcgcaatctaaacattagcactggaactgctccaactttaaatagctctgctcctatggcttctgttacagaccaatcttcagctcaagcaccacagcaaacaatagcaacaatgagtacagaaccatctgctgtagacaagcaaccagttgctcctctcaaaacgaacaatggcaatcaagccactacagtcaaaaaagcagcccaacctaagcctgctcaacaaaaaaatctattagggtttgttgacatttactgttcataa

SEQ ID NO: 61881 - DNA, 378 bp, Acinetobacter baumannii; identical to SEQ ID NO: 58515

SEQ ID NO: 61882 - DNA, 1200 bp, Acinetobacter baumannii
ttggagcggaacaaaggtatcttacaaaggaaattgtcagaaccgagcctaaaagtttctctagaaccattagaacctattattagtaaaatcttagatatgatccaagatgtaaatcaaaagattatgctccacaatcaagttgtccagaacctctcgactgaaaagcaaaaccttacaaatcaagtttggaaatacattataaatgagttagatagtgacttgagtagttatttaaaaaataagacgagactcgaatctactattaacggaatgaacaatagcttaaagcaaaaaagagaaattttaggtaatttagaagctcaactaaaagtatttgaaaagaaagctacgtcaacaataccgacagtaaatgaaataaacgatcttctcaaatcattcggctttacctcattctatataagccctgtagatgaacaaggtcattatagaatttgccgagcaaatggagatgatgctagccgatctttgagtgaaggagaaaagacatttataactttcctctatttttattcacttgtaaaaggttcccattcttcatcaggaattaccgaaaatagaattgttgtctttgatgaccctatttctagtttagatagtgatattctctatattgtaagtagcctcataaagcgtgtatttgatcatgttcgcactaataatgctttgattaaacaagtttttgttttgacccataacgtttattttcataaagaaattacttttaataacaaacgaagtcagaatcagatcatgggcgatgaaaccttttggatggtcaagaaaaattctagcggatctactattgaaaaatgctcagagaatcctatccgttcagcctatgagctactctggtcagatattaaaaccaataatcagtcaaacctaactattcagaatacattacgtcgaattcttgaaaactatttcacaatgtggggtagtatgaaaaaagatgaaatttgtgatctttttgaagggaatgagaagctaatttgtcagtcgttatttgcatgggtcaatgatggttcacactcaatccatgatgatttgtatattaaccacggacagcaaactaatgaatcatatttatctgtttttaaagagatttttaataggtctggtcaaatggggcattatcaaatgatgacaggtactttaacagatagtacgtcttga

SEQ ID NO: 61883 - DNA, 672 bp, Acinetobacter baumannii
atgcctgatattaaaaaacaaatttctttttccattcaaattagaaattttcttaaaaagaaaagtaaagatcctgattttaagtatactgattggtctgaaagtgacttagaagaggtacgtaaaattataagaaatttttatcgagatgaacaaaatggtaaatgttcttattgtcgaaaagatatatctctacaatctgcaagtaattgccatgttgaacatatcttaccaaaatcaaaatatttaaaatttatatttgaacctaaaaatttatgcgttatttgcgccgattgtaatgagattaagagagaaaaggaaactttcgactactctaatgaaattttaaaaaatacagatattaaattataccctagatcaagtagttctttcttaatagtccatcctcattttgacaactacaatgatcatataaagatcttgaatggcggaaattatattgatctaagtcccaaaggtaatagaactattggcgtatgtaaactaaataagattttacataaatttggctggccagatgaaccaagtactttagaagaaatattaacaacggctaagaaactatttgagaatgatgaccctctaactcaaataagagtaatcaaacaattaggggtacaaattaatagtaattcagatatcttaacctaa

SEQ ID NO: 61884 - DNA, 534 bp, Acinetobacter baumannii
atgggaaagtataaatattttaaattaaaggaagtgcaagactgggctggtgagtactgggatgcttatgaagagagaaagtctttatcaggcctgatgatttataaaggctggccctattcattaacccctaaagatgggatcggtggtcagttctcagttattttaacacctgaaattgtggaattcctaaaggtccatcctattacagttgctgaaaaacaactaggtttatctaacagccttgtggctaaattcagacggactttgggcatccaaaataaattcatttatcgtaataatcagtggttattagaacatcaagatgagcttttacatgacagtcttgaaacgttgcaaacaaaatatgggttaaatcgaaatcaggtttatcaacatagaaagtggttagctgaacttattgaacttcctttaagaaaaaaattaagaagaagtaaattagaagactttcaggaagagtggttcctaaaaaataaatccaagatgattaaagaggtggatcaggaaatttga

SEQ ID NO: 61885 - DNA, 438 bp, Acinetobacter baumannii
ttgaattatttaaattacctatctccagtcatttcattttttactaagcaaaatgtagttatcaaaggtcgagcactaggtcgtaccacttggtatttagaagttttatcaagaaagtggccagaacttgattgggattactctaaagacttttgttttaacccaagaaagataaaaagaattgcagatagaaaagccagaagagctttttatcaatcattttcgcaatataaaaaatcatttaaaccacgtccaaaacccaaattgaagattttcaaagatgaatggccatcatttgagaaatggaaagcttcaatgctggaggcaacgaaaacggctgctaaaaagtttagtgatatgacggatgctatgtcttatgcatttagtgccgtgcataacggttattggtgcgcttgggatccagcagaagaggtataa

SEQ ID NO: 61886 - DNA, 225 bp, Acinetobacter baumannii
atgcaccctgaagaactttttgaactgttttataaaaatgttcgtctagacatgaatccagttggttttcctaaatattattcagaagtcatgaagcgtttctggtatgagcgttttatgaatgcatataacaatgtacgagaggaggtgggcttaatgagttgggcagaggcaccgcaaatgtggcttgcaggataccgagaaaaacaaaatgaagataactaa

SEQ ID NO: 61887 - DNA, 198 bp, Acinetobacter baumannii
atgcaagtcatgattatggcctatgagtctggcaaagtagagcacacttgtaatctacttgccgatattaataagaaaggtgaagtcactaatctgtatgattacagtggaaatgaattaaacattaattttttgcgtaatgaagtttattacaaaaagatttggtggcaattctcgcctaaagtagagaatttataa

SEQ ID NO: 61888 - DNA, 762 bp, Acinetobacter baumannii
atgaataacttaaaaaatagaaaagtttctattcccttagcaattggtatttttatcgctccaattttttttgcatggtttacattaagacaaggctataccaaaactgctcgaatcatcagttttggatatctagcacttgcattcttggccttttttgctttacctaaacagccgcaaaaggtagagcatccaactgtacagactgaatctaaacaaactgttccagttaaaactgaagcggaaatgactgttgaagcagatgccaaagccaaacaattaaagcagcagtttgaagatcgaaaagcagaacttgaggaagaagataagccacattttgaatggccaaaagtcgactatacgcagccagtggctaaagtagatcttaaaaacgatcaggcaattattaaagcagtgggtaaacctatagcggatcaggaaaaacttactaatgaaaatggtgagccagctacgacttattattttagtaaaactaacgctagtggattagaagtcactctaagccgcgaatttattgatgttgcatggcagttcaatgataaagaacctgaaaaagctgctgaatttttcaatgatggccaacgtattacacgtgcccttctcggtggtaaagaaggtgcagctctttacgagaatatcgccaagggtggcaaagttgattttctaagcttagatgatggtatcgagattcataatgcccgttgtggtgcgtatatgtgtcgataccaggtagtgagataa

SEQ ID NO: 61889 - DNA, 201 bp, Acinetobacter baumannii
atggaacaaatgagcgaagaagagaaaaaacaaatcagaaaaaatcttgttccaacatattttagtcaagcaaatgaggggaagtattcttcaaaaggtgatgaagttacattaccagcagatttaaaaggaattgctgaaaaaatgattgatgtcggtaaaggattactcaataaagcaaaagatgaaccaaaaacctag

SEQ ID NO: 61890 - DNA, 867 bp, Acinetobacter baumannii
atgaagaaagtcatcagctttagtggtgggcgtacttctgcttatttagttcacctatttaaatcagatccagatgctcactttgtatttatggacacgggcgcagagcatcccgcaacttatcagttcatcaaagatattgttaatcattggggcattgatcttgtttgtttgcgtactgtcgttaacccagaaatggggaaaggctgtggatatcaagtagtcaaaatcgatgatttaaaacaggacttgaagccgtgggaagaaatgcttagtaaatatggtgcacctgcttatgacctaccctactgtacagctcgcatgaaaacagagccttttgaaaagtattgcaacgacacctttggtaaaaaccaatttgaacgttggatcgggattagatttgatgagcctaaacgtctcccaatagaagttcttaaaaaactgaatttaccaattcatgcacgagcaactcatcaaaaatcaggctttcgttatttagctgaaatttgtgatctggaaaaagatcaaattcttgattggtgggagttacaaccttttgacttagccatcactgaacatctaggtaattgtgttttttgcattaaaaagcatttgaacaaagtcgcacttgccgcaaaagatgaacctgaaatggcagctaaatggattggtttaacagaaggtccaactgttagaacaggaggtcgcaaacataaccataagcggatgtatcgcgaacgcttacacatgagtgatgtagttgaagccttcaaggatcataaccgggatgaactttataaagcccttcgtagtagtaagcgttatgagtcaggttcatgttcagagtcatgtgaagcgattgtctga

SEQ ID NO: 61891 - DNA, 1122 bp, Acinetobacter baumannii
atggcgttaccgattattactgctgaccaaactttattggttcaagcaattattgtgtacctatacgctgatccgggtttaggtaaatcatcgatgggctttactgcggaaaaagtaatttcttttgactttgaccgtggtgctcaccgtactggtgaattacgtcgtggtgcggttgtacaggttcaacaatggagtgatgttgcaaaccttactccgcaggacttagcaccatataaaaccgtagtcattgataccgtgggtgcaatgcttgaatgcattaaaacccacctgttacttacggcaaataaccgtcaaaaagatggttctttaaagttaaaggctcaaggtttagcgaaccaaacattcaagcaatacatcaatactttgatcagtttaggtaaagatgttgttttcattgcacacgcatcagaagatcaaaacggtgatcaaattatttaccgaccagatctaggtggtaaaaaccgtaacgagctttaccgtatcgcagatgtcatgggttatctaacaactgttactacaggtgaaggtaaaaatgcccgcgttattaatttcaaaccttcgcctacacatcatgcgaaaaactcaggtgctttaggcggtgaaactggtgaagtatgggtacctgatcttaaagcacatcctactttcttggctgacctgattactcaagctaaagatcacattaacaccttaacgcctgcacaacttgcagcagctaaagcccaagaagagctagaaaactggaaacaaagctgtgaggaagcagagcatgcaggtgaccttaatcaattaactgagtcgcttgataaagaacatatgtattaccagaacatgcgccaagcaatgttaatgagagctaaagcattgaattgcacgtttgataagcaacgtggcacttggattagtccaccagaatttaacggtatctcagttcaacaaagagatgaacttcaaaacttcatagctgaacgcggcctagacgtgaaaacagtttgtgaacacttcggcatagatgcccttatccaaattgaagcggcaaaacttcaagcagttaaacaagaaattgaaatattgtctaaaacaggtattagagcatga

SEQ ID NO: 61892 - DNA, 639 bp, Acinetobacter baumannii
atgattacactacatcatttagatcaatcacgttcttttcgcattttgtggttacttgaagaaatcaagcagccctatgagctgaaaagctattatcgtgactcaagcacgcatttggcccctgaatctttaaaaaacatccatcctttagggaaatctccagtattggaatgggatggcaaagttattgcagagtcaggcgcaatcgttgagttattaattcagaaacttgcgccgcatttagcaccagatatggatgaacctacctatgtcgattatctacagtggattcatttctcagaaagctctgccatgctgccatttttattaaaaacgtttaatgcgattgaaaccaagcagggtacgaagttggtatttctagaaaattatactcaagttgagttcgataaagtattcggccatttaaatgaatatttaaaagataaagaatttctagtggcagaccgtttaaccggtgctgactttatgatgggctttggactacatgctttagtttatcatatgggacaaggtgaaaattatccccatatccaacgttatgtagcaggtttaagccaactacctagctggcaagccgcagtacaaattgaacaaaatggtgtgaaaagtcaaaaatag

SEQ ID NO: 61893 - DNA, 1059 bp, Acinetobacter baumannii
atgaatttattaaagcgcttaacactttgcttattaacagcagtttcttttagtgcgtgttcaaatgttgagaaagaacaagaaggaattaaagtgattgattatagtaaccctaagaaagtatgttttggtcgaattgaattaacggtccctaaagagactgaagttgagtacagcaaattcaactataatggcagtgatatagaagttgatgaaagtgtaaaaacatacgaagcatatcaaaaattgattaatgacaagattcagtatttaaagtatgaacctcatgaaacagagggtgttttattaaaacgagaaatacaaggccctataaacaaagatgggcgggtcgtaagcaatattattatttatagaagtaataaatttaccactgaagcatatgaaattgatggttacctatatttcccactaaaagggttgttgattctaaaaagtggcgcagataatgatttattggataacgctattgaggacatgaaacaaacattgaaaagtataaaaattagatcggctaaaggagaagaacaagctggtttgtgttggaaagatttttttattttagatgatatgagtaaaaatattccgtttacaggaggctatttacattttagatttccaagttatccaagagttcgagtagatatagagcatcgagctcgactggaatctgatcgtccattaatcgagatggttaaggaaaatgaagcaaatgctcctgccgtttttaaagctatgatgagcacagaaaatttaagagagcaaaagaaagaaatcaatggtttagctggtgaagagatatttggttatgcccatcgtagaggcttctctgagcgtggttttgagtcagcagcttggcaatatttgggttcagtggaaaataataatgatccatttattcattatagtttagaaagtgctgaacttgtccatgatgacgagccgcttcaatctactgttagtcaaaagaaagttttccaactacatgactttattttaaacagcatccaaatatcccctaataataaaaaggaacaatga

SEQ ID NO: 61894 - DNA, 759 bp, Acinetobacter baumannii
gtgggaccacctcttaatttgtctgctcctgaaattgcagtaacttatgatattagtttattcctcgcaaaaaaattatataacagaattcgtcaagagcgtggtgagttaggcttttcagaggagttccaacataataagcagagcaaatctcaatggcttctcgatcatcaagatgcattactaaattcagaaaaaacagttgcagaactggctgaacaatttgataaaacaacaggacaaattcttcgagcaaaggtcaaattacgccaaatattaaaaatcccgaaagttaaagaacagaagcatgcatggttattgaaatataaagacactttattcaatccaaatctcagcaatgatgagattgctcaaattctaaatatgaataagttacaggtcattagaaaaaaggggcaattaaaaaaattattgggattacctaaccataatgatcagatacaagcatggcgtttacacaatcaggaaatattactttctttacatttgccgatttccgaaattgcaaggattttagatcgtaaagaagactatattattaaaaatcgattgatattaagaaagttcctaaatatttcattaaaagatcaaaaaagagattgggtactcaaacatcaaaatgatttagaacaattgagtattaataagtttcaagaaaaatataaacttacatattctagagttcaatcgtacaaaaagttattaaatgagttgaaacaaaaacacgaaataacctaa

SEQ ID NO: 61895 - DNA, 1173 bp, Acinetobacter baumannii
atggccagctaccatttcagcgtcaaaaacaaaaataaaggttatgcaatgggccactacctctatatttcccgactgatgcaatacgaaaacgtccgcaagaaaagtgacgaaattttagaatacgttgaacctggcaaatgcatgccgtcctgggtaaaagatccaattgagttttggcaagccgctgatacttttgagcgagccaatgccaaagtctacatcgagtatgaaattgcccttcccaacgaattcacgccagaccagcgtaaaacgctcatagagacgtttttagacaaacatatagctccacagcaatatccacattcatacgccatacacaacgttaaatcgcgtctcagcggcgaagaacagccccattgccacctcatgttctccctcaaagccgatgacggcattgaacgcacagccgaacagtactttaaacgctataatccccaagatccggccaaaggcggtgccaagaaaatccagctccaggatggccatgctgattacaccacttacctcctgcatatccgaaaagcttgggaaaatcacctgaatgacgcattggcagaacatagcccaaccgtgacttaccagatcgatggccaggagatccaaattaaaaatcaagtttcggcagacaactacgaaaaatacaacgagatacacggcaccctctacctaccagaacccaaactggggacaggcaaacaaaatgaaactgtggaatacctgacggaaatccagaaaatcagacaacacaatgccaaagaacgagaactggaacagcgccaacaacactttgatcaacagcatgaatactactacagctgctcaaacgaacccttcagctctcctgaagtgatgcactacctcaatcacctcattaaaaaagccagcaacaaaaaagaactgggccacgatatcaacgaaattattcaaacccagcaaccgatcctgcatcacgaaaaatgggatatcgataccatcaattttaatctcaacaacgccaggttataccctgaaccggacatggagtttaaagtcctatctgtacaaccaaaaccagtgattgaaccaacatcacagccgaagccaaaacctgaaatacacccctcacagcttgaaccgaaacgaaatgattatgatggtctgggtttttaa

SEQ ID NO: 61896 - DNA, 924 bp, Acinetobacter baumannii
atgaaagacttagttgtcaaagataatgctctaattaatgcaagttataatcttgatttagttgagcaaaggctagttctactagcaattattgaagctagacaaacaggtaaaggaatcaatgctaatgatgctttagtaattcatgcatccagctatatagagaatttcggtgtagagaaacatacggcttatgctgttttgaaagaggcaagtaaggtcttatttgataggaggttcacttatcaatctttaacagataaagggaatgtaaaaactactcatagccgttgggtaagcgaaattagctatattgataatgaagcatcagtaagtcttatcttttcaccagctgtcgtcccattaattacaaggcttgaggaacgatttactagttatgaactaaagcaagtaagtcaattgacaagcagatatgccactagactttatgaactactagttgcttggcgtagcactggtcaaactccagtatttgagatttcagaatttaggcagcaacttggtattgcggatgatgaatatacgcgctcagataatttcaaaagaagagttctagatatagctatatctcaaatcaatacttttacggacatcaatgttaagtctgaacagcataaaactggacgatcaatttcaggctatagcttttcatttaagccaaagacgtcagttaaaaatatttctaaaacaaggagtgaacaactagaactgattggccaattgacagataaacagattcttttgttctcaggtaggttagcttatgaacccacattcgcatcaaaatatagtaaagcaggtgaaagctatgatgactttataattagaatatctagagacttaacagatcctaaaaaaattaaagaatattctccatatcttaaagaattaggattcaaatag

SEQ ID NO: 61897 - DNA, 450 bp, Acinetobacter baumannii
atgatgaagaatagaagaagtaaatctttaaaggattcgactccaaatccagattcaagggatatgaaaacaacagctaatgataattttataaacattagctttaagtactttaaagatacggataagtctccagcacagtcaataagtacatggagtaatgaagatagaattttagatatgatgttagctctcaagtacatcacttctgaaaatataactaaagtacaatctactgaaaaactttcattgtataaaaagtttccacctaaagataaaaatgatttttcttgtcctgacggtttacaggaagatttgaattggggaactatacaaaacattggtggtcagaaatccagaattgctggttttctaaaaggaactacattttatttagtgtatttagatagagatcatcgtttttggataactaaaccaaggaatacctaa

SEQ ID NO: 61898 - DNA, 1308 bp, Acinetobacter baumannii
atgcttatcaacttttctttagagaatgttagttcttttaaaactgctcaaaatatttcaatggaagcatccactttaaagaaggattcttttcttgatgagaatttaataaaaaataaggataaaaattacgttaagacagtcttaatgtatggggcgaatgcaagtggtaagacaaattttattaaaagcattggtaagctaaagcgaatagtgctgtcatctcatgatcttaatcataactttataactgatatttccccatttcttttagctacgggagacatacaaccatctgtatttgaagtaacttttattgaaaatgagattaaatatagatatggtctcgcaatttctttaggaaaaattgaagaagaatggctatattttaatgaaaatattagagaaaccccattattttacagagaagaacaaaatattgaatttaataaatctagtttcgatgaggctaatatttttgtagacgagagtagttcaggagtaggagttataaaaaggacttctgctcatactccttttatttcaacattagcggcttttgaaagtctacatagtacaaatgtaattaatttttttaaaaaaattaatattctttctggtatagaggatagccagtttagagattatacatttgatttaattaataaagactctaattttaaaaaatgggcattaggggttcttaaagatttttatatagaagacattaatatttcagaaaatcaaatcaatgatcttgaacaaataaagacagataacgaagatattaataacttactagaatcattgcggaaagtggcaacatcagcaacatcaagaactgtagaaataataaaaagaattccttttacggaagacagaattagttttcccttagatttagagtcttctggaacgcaaaaaatcctccatttattaggtcctttttatgatacttttaaaaaaggaaatattttattaatagatgaatttgattctaaatttcatacattgctatcaaaagaaatatttaagttatttcataagcatagtgatactagtcaaatgattgtgaatgtacaagatacaaatttaatggatactagtatatttcgtagagatcaaatttggtttgtgcataaagatcctattgtacaagacagccaaatatattctttaatggaatacaaaaatatcattaaagaatcttacagtgaagactatctaagtggtgactttgatgctattccactctttaactcttttcagtctgttaaagatcttatggaaggtaatgatgaagaatag

SEQ ID NO: 61899 - DNA, 1077 bp, Acinetobacter baumannii
atgtttattaaaaatgcatggtatgtagcttgccgtccagaagaaatccaagataaaccattaggtcgcaccatctgtggtgaaaaaatcgttttttatcgtgctaaagaaaaccaagttgcagctgttgaagatttttgtccgcatcgtggtgccccactctcactgggatatgtcgaagatggcaacctcgtctgtggttaccatggcttagttatgggctgtgacggaaagaccgtttcaatgccagctcaacgtgtaaacggtttcccatgtaataaagcatatgcagttgttgaaaagttcggctttatttgggtatggccaggtgaaaaagctttagcagatgaagcaaaactgccaactttagaatgggcagatcatcccgaatggagctatggcggaggcctgtttcacattcagtgcgactatcgcctaatgatcgacaacctaatggatttaacccacgaaacctatgttcactcaagcagtattgggcaaaaagaaattgatgaagccctgcctgtgactaaagttgacggtgaccatgtcataaccgaacgctatatggaaaatgtgatcgcacctccattttggcaaatggcccttcgcggcaatcatttggcagatgatgtacctgttgaccgttggcaacgttgccacttctttgcgccaagtaatgttcacattgaagtaggtgtcgcacatgctggacagggtggttatcacgcaccaagtgacaaaaaagtttcctcaatcgtggtcgattttattacgccggaaactgaaacatcacattggtatttctggggaatggcacgcaacttccagccagataatgctgaactcaccgatcaaattcgtgaaggccaaggcaaaatctttactgaagatttagaaatgttggagcaacagcaacaaaacattttaaataatccacatcgcaaattactgatgctcaatatcgatgcaggcggtgtccagtcccgtaaggtcattgaccgactacttgccgaagaaaataaaacacctcctgaaacattcacacagaagtttccaaacattcggattatttaa

SEQ ID NO: 61900 - DNA, 783 bp, Acinetobacter baumannii
atgacccaggaaaaagcaaaaaagcgtggtagaccagctcaacttttacaaatggcagaattacatgctttcgttgagtttctattagaaaaagatcctcgctctgaactgcaaaatcaggttattgatgcactacaagctgaggactttaattttgacatgttgtctgaagctcaacagatcctggtgaaagaggctttaaaaccttatcgggaacatctgaagttgaaattgttgtttgaagagttgaatactttacctagaaaaactgagtatgaaactaaatttattgagctttatcagcagtatcaaaaaaacgaactagctataagtgagttgaatattctgaaaacgatgtgtactcgctattaccgttttaaagctcaacaattgcaactcaaggatcttgaactttatttaagtcagatccaaaaaaaggatgaaggtaaaaaacgtaaagcagagaatcagcgtaagtttgaagtcggtggtggtgttttaagtgcttataaaatcaaaaatgatgatgcgttagataccgaaaactttttaaagcgggttcaggctgatcgctatctagctggaaaactccgtcaaacaaaaatttatcagaaggtatgggcatcggatcttaataataaggaaaaattagaattactttttgaggtgctcaatcaacttgcactatatggtaataaaggtgagaacgtaaaatttgtggactttgctattgaggcagctcagacaaagctaaagcaaaaaactaattcagttgccgagtaa

SEQ ID NO: 61901 - DNA, 465 bp, Acinetobacter baumannii
atggtagacattgttgatccatctacacgcagtcgtatgatggctggaatcaaaggccgtaatacaaagcctgaattattagtcaggcatttgcttcataaaaaaggatttaggtatcgtcttcatgtaaaagatcttccgggaaaaccagatattgttttgccaaaatacaggtcagtgatttttatacatggctgtttctggcatggtcatcagaattgttatcttttcaggttaccggcaacgcggacggaattctggcaggaaaaaatctgccgtaatcaggcgaatgattccagagctgtagatatcctgcgcgctagtaattggcgagtctgcattgtctgggaatgcagtattcggggagccaaaaaggatccggaaaaagtagtcagtacaattgctgactggcttgcaggtgacggacagtttcttgaaatacgggtcactccagaagacagatga

SEQ ID NO: 61902 - DNA, 1320 bp, Acinetobacter baumannii
atggcgactatcaggcagatgtcacagacaatgcaggccctaggggcaacccggatcctgctcaaaccgctttccaataatgacaattccaagcagcagatctattttgggggaaattttgaagttcttcaggattttccactgggagagatccgcgcagatggagaatccagcaagggtccgatattcaaggcacctctcaaactgttctggatcacaccggaaggtgaaactgaagaagccgcaggttcccaaattattctctatcccaaatatccggaaataagactttccggattcctccgtggctgctcgcttgccccaagcaaaatcatgaaaccaccgacaccagaagaacgtgcactatatgccagccggaaaagaggcatgattctaggattggctgaagacaaagtctttgcctatacaggatcatgggatgagaaaatttcaggggaaattcaggaatataccgaacagaaccaagacaaacaggtactttcggttttttatgaatacttctccagccttgcagacagtcaggatcttttaattgaaaaactcaaagatatctatttaaaggggccaataagatccaaaagattggacaaagacggtactgttatcttctatgaggcatctaatggagccggttttaccctcgagtgcgaattcggcatcattccaaacggaaatgccagtccggacttcttggactgggagctaaaaacaagatcaaaaagcagtaccaccctaatgactcctgaaccggatatcggactctatcgtgacagctatgcaaattttatggatacccatgcaaaccgcagacaaccacatcagctttactttactgctaaacaccaagctggaatccgaaatccggaaacccatctgactctttttattgaaggatatgatctgaagaaaaagaaaattaccctgagcgagggtggctattttctaaaaaatgacaatggagaaattgcagctggatggacattcactaaactgcttaatcactggaagaacaaacataccaagacctgctatgtttcatacactaaccttaaacttgaagggtctacctattaccagtttggcccaaaggtgtcgctggcaaaaggagcaagtattgagaaattcctagatgccttggcgacaggaatagtagttcatgatcctggatgcaaatatgccctggatgtgaatacaggcaaatggaaacagaaaaaacgtaaccagttcagagtgtcagcagtcaattcagcttgtctatatgatgaatacaaggaacttgatctgtcatcagataaataa

SEQ ID NO: 61903 - DNA, 1446 bp, Acinetobacter baumannii
atgaaagagtttctctcccaagctgatgacctgcatgaaaagtacctgatccaggaaaatcagaaaattgaagaacacaagatgctggtcaatcaggtcctggagtcctacgaccagaaaactgttgctgaaatacttcgtagggtaggacaatatgactggacccgtgaaacactgaataaatggctcaatggaaagagtgcaccacgggcactaagtgaaggcgaagtagaaatgcttcagcaaaaaatgcttccaaagccaccagcccaccatccggactataaattccgttttattgatctgtttgcaggtattggcgggatcaggaagggatttgaggaaatcggcggacaatgcgtttttaccagtgaatggaacaaagaagcagtccggacttataaggccaactggtactgtgatcctgagcagcataaattcaatgaagatatcagacaggttaccctgaccgaagatccggatactgatatcaacgaggcctacaggcacatcgataacgagattccagatcatgaggtattgctggcaggttttccatgccagccgttctctctggcaggtgtttcaaagaaaaactcccttggcaaggcacatggttttgaatgtgaagcacaaggaacgctgttttttgatgtggcgcgtattattgccgcaaaacagccagctattttcgtactcgagaatgtaaaaaacctgaaaagccatgacaagggaaataccttccgtatcatcatgaagacgctggatgagctgggctatgatgttgcagatgctgacgcgagtggtccgaatgatccaaaaatcattgacggcaagaacttccttccccagcaccgtgagcgtattgtactggtaggctttaaacgcagcctagatatcaagggcgacttttccctgaaaaatatcagtaaactcttccctgaagtccgtccgaccatacaagacgtgttagaaaaggaagtagaagacaaatacatattgactgaaaatctctggaagtatctttacaactatgccaagaaacatcaggctaaaggtaacggttttggctttggtctggtagatccgaaaaatcctggtagcgtggccagaaccctttcggcccgttatcataaagacggttcggaaatcctgattgaccgcggctgggatatgcagcggggagaagaagattttgatgatcctgataaccagaagaaccgaccgcgtcgtctgacaccacgggaatgtgccagactgatgggcttccaaaaactggatggagacgacttcttccgtattccagtttcggatacacaggcctacaagcagttcggtaactcggttgtcgtgcccgtcttcactgccgttgcaaggttgctggaaccttacattttacgagcagcaaaaattaaagagcataaaaaagataagatttctgcgtaa

SEQ ID NO: 61904 - DNA, 489 bp, Acinetobacter baumannii
atgcgtaaagatttgcttttagaattatcagagttcctggaaaaactagatcctgaccgttttgatatccgtacctggagaagaccaagtaaaaatacagttggcttcgttagtgaggatgaacttttaacagactgtaatactgttgcatgtgcaattggctgggcaactaccttaaagaactggaaagatgccggtttctatatggattctttagaaattacccaagaacagttaagtcatccaatgagtaagccacatactatggctataattaaatggaaaggtaaccctgcaattgactcttatgaggcaattcaggcaggtctgaaccttcctataggaatggctgaggttctttttgactataacaattatgcagatgaagaacttacaagtccggagacagtagctgagagaatcagggaattctgtgaagttcctgatgatgaacttcaggaacttatttgtgcctatgacgatcactaa

SEQ ID NO: 61905 - DNA, 240 bp, Acinetobacter baumannii
atgagtgaacaacaaatatatgatcggattcgatcagtaatcaatgaagctccgcgcaacagacaaactgctgaattgcatttgcagatgatcaaatatgcagatgaattaaaaagcattacatctaaagaattttgtgaaggtgttggacttcccgccagttatggaacagagtttagtaaaatgaggaatatcactgagcgattaaaagcagcaggtcttgatatcaatttgatttag

SEQ ID NO: 61906 - DNA, 1782 bp, Acinetobacter baumannii
atggctaatcaattttcattattaacacctaatattttacaaaatagtaaaattagagaaccacaaatagaatcgtataaaaatattctatcgcattttagcaagccctcatttgaacgagaagttggtattgtacttcctgttgggtgcggtaaatcaggagccattggtttaactccatttgcattaaaggcaaaaagagctttagttattgctcctaatttagctattgcagaacaactttataaagatttcacttactctagaccagatacattttataaaaaatgtgaagtattagttgatgattttcctgaacccgctgaaattagaggaaaaactgtaaataaagctgatctaattgaagctgatgtagttgtaactaatattcagcaacttcaaggtgagagtaataggtggctcaatagtttagagcctgatttcttcgatttgatcatatttgatgaggcacatcataacgttgctgaaacatggcaaaatttaaaaaatcattttcctcaagcaaatattgtaaattttagtgccacacctttacgtgcagatggacgtaaaatggcaggagatatcatttattcatattctgttcaagaagctataaaagcaggttacgtaaagtcattaagggcaattcaactaaaccccgaaaacctgaaatttgttagagatgatggaaaagaacaagaggttcctttagatgaagtgattaaactaggtgaagaagattctggatttagaaaatcaattattacctcaacagaaactttaaatacgattgtggatgcatcaatccatcaactttataaaatgaggaaagaggcagattgtaataaattaaaaattattgcatcagctcttaactatactcattgcaagcaaatagttgcagcttataaagcaaaagggttgaaagcagattttgtccactccttagaagatactaaacataatgaaaaagtttataaaaagcttgagagtcatgatctcgatgtaatcgttcaagttaggaaattaggtgaaggatttgaccatccttatctctcagttgcagcagtttttagtatatttggtaatttatctccattcgttcaatttattgggcgagtaatgagagttattgagcaaaataatccacatagtattctaaatcaaggggttattgtttatcatgcaggcggaaatatcatcccaagatggaatgattttaaggaatttagcgcagcagatcagcagtattttgaatcactattacctacggaatatgttccgattacaagtggtaacggggataatgatgattatattagaactgacagagaagaaataaatgttattgcccaaacgaatgtgaaaattaaaacatcatatcttttagatgatgaatcaattaaagcattagagcttttgaaggctaaaggtgtaattccagagaattttaatccagatgaggaaattcttcagaatattaagccaactagagtacagcaaagacaagcaagaagaacgttattagatgatctgataaaaactaaagtaggatacatattatctactttaagtttaaatgccgaaggaaaaaatctagataaaagttatatagcaagtaattttgttttcttaaagtcaaaattagatcaaaagattaattcattaattggcatcgaaaaaaatatgagaaatgaaatgactattgatcagatagaattagctatacgttcaattgatgagattgcagaacatattattttagaagagaaaaagtga

SEQ ID NO: 61907 - DNA, 228 bp, Acinetobacter baumannii
atgcatagtttttctgtaaaagaattagatcaattaattgaaaatgatttaaaagcaaataaaaaatcaagtaagttattgattggatataaactatttcacgatctgatgaatgatcccaaatttcatgcagaagtcaccaattcagctcttagtgctaccaaacgaaaatataaaagtctaaagataaaaataactacagatgaatatcaacttcactttgaataa

SEQ ID NO: 61908 - DNA, 585 bp, Acinetobacter baumannii
gtgacctaccagattgacggccaagatatcaccatcaagaaccaggtatcagccgacaactatgagaaatacaacgagatccacggcaccttgtacctcccggaacccaaattaggtgctggaaaacaaaatgaaaccatggaatacctggctgaaatccagaaaatccggctgcacaatgccaaagaacgagaaatggaacaaaagcagcggcaacaaacgcaacagcatgaacatttctattcttgcctgaatgagccgtatacctcactcgaggtcatgtattacttgaattacttggtcaaaaaagccaaaaaccaaaaagaactcaaccaagacttcaatgaaatcatcaaaacacagaagccaatacttcaggccgaacattggaatttgaataagatggattaccagctaaaaaattcactccaatatacagatcctcaaatcgagtttaatcctgttactgtcttaaaatcacaggttgaacaacctcaagttgttcaaggcaatcaacctactcaaccatccatacagcctaagccgaaaaataatgattacgattttggtggtcctggtttttga

SEQ ID NO: 61909 - DNA, 201 bp, Acinetobacter baumannii; identical to SEQ ID NO: 54996

SEQ ID NO: 61910 - DNA, 537 bp, Acinetobacter baumannii
atgttggaaaatttgaagaatcaaatcgaatattacgagctagattatttagatattaaggaaataagagagtttattcttgagcaaaaaataatagatgcgtataaattaatctcaaatatacagaaatatagacctattccaattgaaaaatcaatcgaattagattgtgtacttgttgagttggtggaaaagtataatctcttagttgtaaataacatgttaagttaccatgcggataaagttgcttcaaatttatatagtttagagcatagagagcgcaaggacagagatcattattttgtaaataaaatgtttattgcgagaataacatcttatttagaatattgtaaattaaataataaagttccatcacatatacgaggtattgggtcaaattggagttatacttctttagagtactttgttagcaaaagcataataaatgagggactatcttggactacttttagcggtgatgagttaattcataagtggttgaatagtgaaaaggtaacgattaaaccagacctttaa

SEQ ID NO: 61911 - DNA, 603 bp, Acinetobacter baumannii
atgttcagtaaagggcacgaatatacggttcaaaatggcagtaatagatctaatattggtaaaactatttatgcgatagccgcttttttggctggtggattatcattagtttttatcgaatactttgcttggttccccaatatccctaattttatatcaacagcaattttgacagcactattattttttgtcatttattactctttcaatcattggatttggaaagttaaatatatttctaagtttttaaagtttccaaatatctctggtgactggaattgtaatgggattagtagctttgaagagttttcttggactgcaaaaataaaaattactcaaacttgggataggttaaggatagtttttataactgagaattcaagttctgaaagtgtctcagcagcaattatctatgatgatattaaggggtatacattagtctataactatagaaatcaacctgatagtctagatgatgagcatttaaaaactcacataggttttgtagaactaaagcttgatctagataaaaatcaagcaataggtaattactataatgttagtggtagaaaaacatttggtaaatttatttggactaggtag

SEQ ID NO: 61912 - DNA, 1626 bp, Acinetobacter baumannii
gtgggtatcagatcacccgaactttcggatgaaggatttccaatctgcattgagccagaagatggaaaatgggatttatcaatttttgataatttttgtgaaaaattatcaaatgaaattgaaaatcatccacttaaaaatatgttttattcgaatgataaacgagcgactagggaaaaacctgaacatattagaagagattctattagtaaagcaataaagaattcattaataacttatgatcaaaataataatgtagaatcctttgttggattaagcaccttagtaaatgagtattatgtaacccccattattcagttgcctaaatcattatttgaaaagtatccacgacttaataaaaaaatatataaaaatgggaatctaagccaaggacatttaagtttcattgatgctgtaattggaaaattattaaatgaaatgactaaacttttatcatcaaaatatccaggccaagatcttctaggtaaaattaatagcagagaaattattagaagtgctgcgaataattttctatacacaccctcaactgctatatatgaaagatatgcatatatcgaactttttgaagcttttaatttaatttcatctttattctatgaaggggtacatagcataggtaaagtaattcttacagatccagaacatcaatctattatattcctattacagtttaaggatccaattcgcatcagtaattctaggtgggtaagaaaagtattagaaatgtcttcaaatgatttatcgttaattattgataatgaatatatttatggattaggtcacttatctgaagattataactttattgatcagaaaatttttacagtaaatttcttagatcactattattggcaaataacttgtggagatataactctcttacaaagtaaatataatcaaccaaagctccctactgtaccaatcaaagatgaattagttctttcaaatttaagaaggctttatccttacactacagaggttgagcaaaaaaatattttaaatttgattcacagtttaactacttttaatcatggaagtatgttggtcatagctgaagatgctgaaacagaagtcttgcgactttctacacttggaacaccaatcattccaagattaatgactcccgatctcttaaaacaagtcagtggtattgatggtagtgtaataattaatcctaaaggttattgttttggaataggaataatattagatggagaagctaatactcaatgtactccatcgagaggatcccgatataattcaggagtacgatatgtttattcatcacaggaacataagcgtctagcgattatttattctgaagataaaaccatagatattgtacctacacttcgtccactcatgagttatacacaaatagaaactaatataatccaattagaagctgcaactttagagaattatcacaagcctagagcgtgggttgatgataatagattctattttaatgctaatcaatgtgtaagggctaatacagctttagagcgaatagaaaactctgaaagcaagattggacaaataataattcaaactccaagattaacaccacatatagaaatggatgaaagttatttaattgattaa

SEQ ID NO: 61913 - DNA, 492 bp, Acinetobacter baumannii
atggaaatgagtttttgtagttttaattgggaactagcttctaagtttgttccattaataacccctattgtatcagttgccctagcaacatttgtataccgaatatggcataagcagaaaggcaaagaggttgtggctaatgaggctaaagaattcataatcaaattggcaaaattacagtctttgcaaatggaagtcataaagtcgataaatgtagaaaatcttaataaagaaagctttaatcaatttaagatagtaaaaaaagaaatcagcgattctgcaacttttctaggcttcgcattagagaaaaataaaaaactttcaaatttatcaagcactgtattatctcaagcaattttgttcattgaaaacgtgaatgaatggtttgaaatcggtaagccactggatttaaagaaatcaattcagccaagtgatgcattatggcttacaaaagaattgctgaaatattcgctataccaaaaatcattctag

SEQ ID NO: 61914 - DNA, 1677 bp, Acinetobacter baumannii
atgactgaaaaagatgaacaacaacaatatgaagaaagactcagataccgtttaaaaatttttcaagagaatttaaaggctgaaaaaattaacgttgctgaacacctacaagaagaactttctcacagtattggtaatattcaatatgatgataacggtgaaatcatattatcgtctgtagatggtcgtattcgttctatggctctagcaatagagcactttgatactagagataaattaaaaaaacagatttcattaaatgaaattcaaaacttatattttgagcttatagagcaaaattttggtgaattttacgttaaaatgaatgagctaggagaaacccctaataatattgctgattttttatctaggaatgaagattttgttgatggaatggttgatcagataccaagttttatggatgcaattttagaattttggagaaatgtcggtgatgttggatattggcatttagaagataaatttgaaaatatcacgggagtatttgggggcgatttgttccctgcgcatgatgaaaatattgcatccaaatgtggtatatacacagatactatagttttacctgatccttacgttcgatctatccatatatttgaacattactctaaggaaagcaaagtatattatcttattaaacatgctctcaatttattaaagtataagaaattagcatgtacagatactgacactcctattgttgttattcttccagatctgccaaatttagaagaaaatggtagagattttatttataacttatcagaaaatgatgctctgactcacgcaagtaaattgtttgatatcaattttgaaaatattgatgagtttaatgagttttgtctaagtttagataccgttgaaaaaacaatcaaagctattaaagataaaaatagggttctatttgacacaaattggtgtggaacccttgaggagcaaataataagagctctaaaaggtgatgaatttaaagcctttaataggtccgaacctggtcttttacttcaaatgcaaactgtcgggagaatgtctgtaagtaatgagttattacttaaagctcgacaattatctggcacaccacttattgaagcagaaacttcttggcaattttttaactggaaattagagtatgatgcagaaaaagcccaagaatattatggatctgaaaatttacatattacaaaaggattaagtgatttatcccaaacagacttaccttggctaggaaatattccacctgaatcattattagagttaagaaaacaaggggctttagaagaaattaggagtattttaggtaataatattagtgagttagtaaaaactaatcctacgaattgttttagaaccagagatcagattctagaaaatattgaacaaagtttcgctaagcaccgcgagaagctagatgaattgaaagctaaaaattggaaatttgcgggtaaagatatcggttcatggatagtaatgggtactataggaattggagctgcattaactggtactccagcttgggcacttgctgcacttgctgcagatcaaattcttgatacacctaaattgagggaaatacctcaacgataccgtgatttgatagaacacaatagagaagtaaaacaatctccagttggtatcctttttaaagctagtaaatattaa

SEQ ID NO: 61915 - DNA, 255 bp, Acinetobacter baumannii
atgaaggttgttacctattctgatttacggaagaatctagcacatgtacttgatagtgttattgatggccattctcctgtacttatcactagacaaaacaatcaaacggctgtgttgattagtctagatgatttcaatgcatatgaagaaacggcacatctacttaaaagtcctacaaatgcgaaaaggttgcgtgactcaattgttcagatcgaaacaggtaaaacaattaaacatgagctgattgaagaatga

SEQ ID NO: 61916 - DNA, 294 bp, Acinetobacter baumannii
atggattttaaaggcatagtggtaaataccactgaaatatgcaggtcttggactaaaatagtccaatatattaaagaaactcatgaacctgttctcgtattgaagagaaaaaggcctgaagttgtagttatgagctatgaagatttcctgatactccaagaggagattaattgggggtggaaagaagcatgtgggaaaaaaatggtagctgacctaattgaaattgcggaacttgagaacaagccaattcctcatatgcaacttgataaaaatggtgtttttcgcaaaacttga

SEQ ID NO: 61917 - DNA, 2457 bp, Acinetobacter baumannii
atgaatgaatcaaactttcaattttttagggagcttcctgaaattgggcaattagaaaaactgagtgataatgaaatttttggatttttgaaacgttactatacggatagctatcggcattcaattactcaaaataggaaaattcataaaggcatatttcgggaaactatcgaaactttagaaagactgtatgagcgtttagagttagttgaaaaatttattggttatgagaaagtagattgggaagatgcctgcctttcaaaaaatgaggtgagaaaaaagcagatagttgatttttataatggtctagtagtagatgttgcacttatgaaattagcaactccatattacaagttgccagaaaaaattcatgctttcattaattttttagataaagaaggatcatgtatcttcagaagtgaaattcaatcagacaagtggaaagttgaagactttcctcatgaggacgcctttgaaacgattgatcaatataagcagtatttaaaagagcaaaaaaactacaaatttaatttcgatcaagataaaggcgatgagattgcgcgtgaaattttggatgtgctacatggagctaagaagattagacaagcgcttgtgttggtaaaatttcaggtacaagatttctctgataaggagattaaaaatctaactcaaattgggcaagtaaatgacatattagctactgcttcggtcgaaagaaaaacacacttgttagtagaggagttgaatacccttgaactaggaagaactcatttaccttggttatctatccttacaaaaggtgaaatagaactgaatggtgaagttcgattaatgcttggatttattctagacagttcaacatacaaaatagataccaatcaaatcaaggattcattacatcgtgagttaaagaaattttttcgtagtagtgagattgctccttttattcgatcggaaattattgcgattgatcaaattctcgatcacttaggtgtaaaagaaataaaagaattcaaactccctaatcgaaaaaaattagctctcatgttgaagtggtctgttggattgttttatggaatgggaaagattattagtcctgataatcacactgccgagagtcaattagttgatacgcctatacgtctaattacaagaaaagctgatggtcgtttaaaagatcgaaatgataagagaaagtcaaaaagacaagaaaaagatgatctagagaaaaaaccatatgattttaattcaatctgggatgatgccagtttagttaaacgtgctccagaatatgcgaagtctatacacaaattttacgagatgctgaaatattttgatgagttagatgcacagcaaataaaactattgcaaagggttaatttgttcctggcttatttggagcatacatatattgacagtttatcaacttctctatcgatcaaccaagatccctctaaatggccctgtgcagctaggatgtatttagccttattgggtaacggaattgatattaatttttctatatgggcatctaattggactctctacaatactttttcgcttccggtaagtttaaataattcatcattaacgtatgacttacacgatataaatctggcggaagtaataaatctaatagcgccagagctaaagctaatcaaacagcgtcatatctcaattccccgaagcagattagcttatatggaaatgctagtgcaaaaaaacacgagatcagcacagtgttatttagagacaagttttaaagagagcacgattttactacgctttaaaattgataatagccagagtcgattagatatcagtaccttaaagacaattgttactcaattttttaagaaagcgaaacgtgcacccaagagtataggagcatatttagacgcttatatcggatattttgtttttaaagatggctgctattctattgactgtacagctatttgttaccttcgttcagatgttgttgctgatgaggtaaatttaaaatttaaggattattgggggaaatttactaagaggtatactgctaagcaaaaagatatcccagaattcccggacttgagagtaattcctagtttgtggtttaaggaaggcggatctcagtattttgttgtaaataaaagagacaagctcattccacagctgataaatgatcttgtgaatttctatactgcatatgaatatttcaatggatataaaaatacaggacatcgcaatcataaaagaccagagctatttttgaggggtagaattaaagaagctatacctaaaaaaacggatgaaaagaatactccacaagatgaagtgagtgcgcctgaaaatgaaaaaagcgtaaatgcaatcaatgaaaattcatctcaagagggggcgaataagcaggctgatttttatgagagaagggcagaaagattaatacgattactactacctctatcgtaa

SEQ ID NO: 61918 - DNA, 774 bp, Acinetobacter baumannii
atgagtaagtcaattaatgaatctaaattaaccattcaacttgaagtcgtcactgagctatggattagagctcatcgtagaccgcatgatttctatttagaatttgctgagcttctgacggaattagatcaagtgtacatacggtcttacgactacttcggatatatcaatgcatggtgtaattggttggaacagaatgatattcgtggtctaaagttaaatgaacttattgaagaacttaaaagaaaatcatttgttgagtatcagcgatattttaagaattatcaatctgaacatcgaagagctttaagacgtcatcgtgaaaatgagacacggaatattcgatcactagaaaggaaagctaggaatgctgtagagcgttattcaaagaccgaggttgttcgtattgatttaggctacattaaaaaatatcaacacttgatcaatattgctgatttttatgaggatatgaaggagttaagagtgcagatgagcaagcgggaaaagccatttaacgccctgatagattttggttgggcgttagagcaaggagtggataagggctatcactgtcatttggtactgttttttaatgggcacgttaagcaggatggatggggtattgctcatcaagtcggaaaggaatggcagaaaatcacaggcaagctaggatacttttttaactgtcatgatcctgagcagatccaagagtacacagaattgggtattttaggtattgagaggtggatcaggaaatttgaacaacacttataa

SEQ ID NO: 61919 - DNA, 405 bp, Acinetobacter baumannii
atgcactggttaaaaacatgcctttcgctgtttttatcatttgctatcctcatcgtaggatcggcagcagtagcttcatctgtacatagtccatgtttaatgtcatctcaagatatgcaatccatgcaaatgatgaattctgaagatcatgaaaaagcaagtgctatgcacatggattgtatgaaagctgaagtacagattaagaagcaattacatgatccatcatgtatgtctaagcaagattgtattatgtcattttctaaaattgcatatacatctacagcactaggtgttttgcaatctatggtttcttcccctgtggaacagtctgctttttctccattaaatcaaaatttcacctcatctgatccttccaatttatggaaacccccacgctctaattaa

SEQ ID NO: 61920 - DNA, 399 bp, Acinetobacter baumannii
atggcgcgtataacagttacacaagcatcaaaagactttaatatcagtcgaaacactttgtataagaagataaaacaaggacatttgacaaaagattcgaatggattacttgacgttaatgacttaattcgtgtcatcggtgcacacacagaaagtacatctaaaaacgtcactttaaacactagtgacattcaatctgttagcagtgacacacagctacaacaggcgaaaagtgaagttgaacaacttaaacaattactagctcaaaaagaaattttcataaaccagctacagcagcaaattgcagacctacgccaagacaaagaacaactctacaaccagattaaccaaaagcggctagaacataaaaaggggttacttggcaggttttttggatag

SEQ ID NO: 61921 - DNA, 1302 bp, Acinetobacter baumannii
atgccaaatagtgtaaatcttacagtaaatttcacaaaacccacgaaaaccacactttttgttaaaggcgttcctgcgtcttctgaaggctcgtctgcatcaaaatcgggtggtcttggtaaacttactaaatctcaggccacgcccgaaaacaaaggctttcagcctccttactgtacaaaaaataaacagggtgtaggggctagacttcacagctatattcttcaagatcaatctgcaaaacttttgccgcaagaacgtgtttgtaattgtttaaaaagacgtatcgataaacataaaaaccgtactgtcatgtttaatgaagcacggaaaaaaactaactggggcaatttgcaacgctgtggatcggtctggtcatgcccagtttgtgctaagcagattactgaagaacgacgtgttgagatgggccagttaattaaatattgggaacaacaagaaaattcagatattaaattaatgactttgacatttagtcattcaaaagatgagccgttgaaagtccttttacgcaagttaaaaaatgcgatcactatgttttttggtggtcggcagttcaaagatttatccaagctttgcaagattcaatacaaagtccgtggtcttgaagtcacttatggttcaaacggatggcatccgcattttcatattcttttattgaccaaagatactgacgatttagcctatgcgtatagggacagactcgcaaaatactggatgcattgttgtgagtcgaaaggattgaaaagcccatctatgaagcatggactggatattcgggatggttcgtatgctcaagaatatgttgcgaaatgggggctggattacgagatgacaaaaggtcacgtaaaacgtggtcgtaaagaatcattaagtccgtttgatttgcttcagttgtcgattgaagatcaggaaatttttgagaaattgccaagtaagttatggcaggaattcgctatttctatgaagggtgctcgtcaattggtttggtctcgaggtctcaaaaaactggttgggattggtgagaagtcagatgaagaaattgcaaatgaaacagatgaagaaagtatcactttaagagaagttgatcagatcacttttgatcttttaattaagtataaaaaacgccatgagttcttggagtggcaaaaaagggatttcttaaacggctgctatggcagcggagaaactgaacaaaatttaatagcactttttgaacgatacattgcagagctacccgatgggcaaagtgaatttattcacgcttgcaaatcgctggtgtag

SEQ ID NO: 61922 - DNA, 228 bp, Acinetobacter baumannii
atgaattatgaattacatatcccgactaaaactgtgaagttgggccagcaaaaaatacaagtttcatctgctgaccaagtacatttcgatggttatcaaatcggttcacagcgcttttttttatatcacgttgatccattaacgaaaaaagaaacgattacgactatcccaccaaaactggctcaagatttaattaataaattgcatttatttgctgtatttgcctaa

SEQ ID NO: 61923 - DNA, 867 bp, Acinetobacter baumannii
atgcaaatttgtgatcgaaataaggatggatcacatacaacgcaagctaatcgtagagcgatgttgtcacagatgacagaggacttaaaaagtctcggctataaagttaagcatatgcaacctagtgatctaaaaggtagacatatcaatgccttggtcaaaaagtggaaagaggatggaaaaagtattggaacgataaaaaaccgaatggctgttgtccgctggtggtctgaaaagattggtaaggcagatatggtgaaagataacagcaattatggaatagagaaccgtgtctatgtaactaatactgataaatcaaagactttaaaagatattgatttaagtggtgtttcaccttacatcagtcagtctttgcgattacaagatgcctttggccttagacgtgaagaagctatgaaatttcagcctgaatatgcacttgatgggcagtcgattgatacagccaagtatatacggttgaaagaatcgtgggcgaaaggtggtagggctagaacgattccagttaccagcgaaaagcaacgacaagagctgaagagtgcactggctttagcaaaggatggttcgttaataccgccagaaaaaacgtataaggcacatttagccacatgggaaaaggtcactaatgcccttgagatcggtcaaacacatggtttaagacatggctatgctcaaacacgatatttagaattaatgggctttccttgccctgctgttggtggttatcgagagctgacagaggcagaaaaggttaaggatggtgaggtgcgtatgcagattagtgaggaattagggcatagccgtataaatattacgtccgtgtaccttgggtcatggagtaaaaaataa

SEQ ID NO: 61924 - DNA, 240 bp, Acinetobacter baumannii
atgggtattgcatccgagatacgtgggaatctgccgctttgtggtcgttgtattaactgtaagttgttggtttgggaagaaaaagcagaattaaaaacaagttcaaacttgataaagtttaagtctttggattcagcttattattatatggttcgttgttcttggttaaaaagtcctgttaatgagccacaattcttggaaatttgcgaaggaaaacaagaatatggagcaaaaggatga

SEQ ID NO: 61925 - DNA, 1947 bp, Acinetobacter baumannii
atgtacattaagtttctgaagcacggcaagggcgaccctgcaaaggctgccagttatttagttgatgacgttgatcacctcaaccgtccacggccacatattgaggttttgaggggagatccgcagacctttaccgctattgctgaatctattcaaaacgaatggaaatatacgagtggcgttattgcttggtcgaaagatgatgcccccactaatgatgaaattaacgaggtactagatacctttgaagcacacgctttttcaggcttaaagcctacgcagtatcacttcacagccgttttacatgaagaagatgatggctcgaaacacgtacattttttagtgccgaggctagaacttgaaacaggcaaggccctcaacattgcgcccccaggtaatcagaagtatttcgaccctttgagggattattttaattactcaaaaggctggtcaagacccgatgaccctgctttacagcgagacacacaaaagcctgactatgtgcattttgaagacgctgctgcacttcgagcaggtttaaaaaataaggctgtaaaagacattcgtgaaatcgttggaagttatatagaacaacgtgttgagcatggttttattagagatagaaaagacgttttagatgctgtttcagagttaggaacagtgacccgaacaagtgatcaattcatttcattaaaaattgatggttcagataaggcgatacgtttaaaaggtgcattttatgagtcagaatttagtgtcgaatcttacattgagaatcgaacaagaaaagaaaatgatgcaggagcatcaaatacaagtcgattcatttcagaacaagacaaagaatatgctgaagaactccgagctagagttacagagcttgcaaaaaagcgcgcagcatacaacgagcagcgttatggacttggctcaacaagctcaagagagcatgactttagtgcagtcagagagcaagaacttagctcaatccttacaagctcaagcccaagcaacaaccgacctttgttcacagcagatgcaacagctacaacagctcaaagcacagtcagcgcagttgagcaatatcagtcaagacatattcaagacagcaaagctcaagaaagccctttttacatcaaatgtgattttagcttcgatagctcttattttgcttatcagcagttttgcactcgcatacgtcagcaagagcaaatacagcgatatacaagcgatgcaaaacaaagtcgagtatctaaaatcgcagggcgggagcatgaatatccagaagtgcggaacggagaaagactggcgttggtgcgttcagatcgacccgaccgagaagccatacagcaacaacatgcgagtagtgaaggaaacaaattaaatgaatctcgaatcgcagttattgaaaatcatcgaagaacaacagcatcaattgaagcaacaacagctagaacaagagaaagcactgcaacttattcaattgcaatcacagacaatcgagcagttaaagagctacacgagaactttacaagagaagcacagcgaaacagtgaagatcgtgcagaaatatcagcagatcgtgcagaatctatcagaacagactatttctccaaatttttcgaagaaactacacgaaaatttggaatctcagcttcaagaacatttgagcgaattagtgatgagtttgaatatagattcagaagtgaagcaaataattcgcaaagagctaccgaagttagtgcaagcagagatagagcaacaattgaagccgatgacagatcaaatcatcaagagaatgaattcagtagagcaatatcaacaaaaattagcggaattaatccaacaggtatcttcacggctttagatcaaattgataaacgcagggaattgcaacgagcgcaagaacgtaaaaatgatcgtggctatgattcacccagtccattttaa

SEQ ID NO: 61926 - DNA, 498 bp, Acinetobacter baumannii
atggcaaagaaagaattgaaaaccgtagttaaacgcttgcgtttaactgaacttgaagccaagcaattagaaaaatatttagatgaccatgaccagaattttagtgagttcgtgaatgctttgattggtcaaaaagttatgtctgagtttccaacggtttctgccgattctgccgaaccgttggacgttgctattgaaacgaagaaaaagcgagagcaaatcaagcagccacctaaagcagacccagcagtactttttcaaattggtcgaatcgggaacaacctcaatcaactagcgaaatcgttaaatattctcaggcaagacccaagtgtttctacgttttcatttcttgagtgctttcacttattgagtcagatgcaaggcgatctacatcactggcttggtgagctaccaaagattgagcgcagccctgaagctgtcaaaaaggcgagggagcgagcaatggcaaaaaggagggttgacgaggatgtacattaa

SEQ ID NO: 61927 - DNA, 891 bp, Acinetobacter baumannii
atgaataatgctcaattaacagatttttttattaatcttgctcataaaccatactgtgcagatgagttattgtatggcttaaaaataagaccgaaaaaaacggcaatcaatatgcaatacatacaagggaatcagccttgtgtgcttcattacttcttttttgacatcgaccgttcagatgcagtcatggcatggcatgatgaaaatttaccaatgccttattggacagcacaaacacaaaaaaatggtcatgcgcatatctgctataaactagaaattccactgtgtaccagtgagtttggcagtcaaaaagcactagcctacgcatcaaaggtacaagcaggactagccaacaaacttggtgcagacgttggctacagtcatctcattacgaagaatccatttcataaagattggcgtgtcactttttggagtgaacaagcgtatacgctcgattatttagccgattttgtagaactacctaagaaattaagcaaaaaacaggaatttttaggacttggacgcaactgcactctatttgataacgtgcgtaaatgggcgtatgaagcgattagaaggcatagaagcagtacctttgatatttggtacagtagggtactggaagtggctgtaaacgcaaatcaggcgtttttagagccattaccgtatagcgaagtcaaagctactgccaagtccattgctcgatattgttggaagaaagacggctatcactatcaggagtttatagaccgtcaaagtcgtaaaggtgcaatgggtggtaagaagtctaaacgcttgcctgttgatggttcagaagccagtacaaagccgtgggaatctatggggattagtcgagctacattttatcgccgaaaaaatgagactggataa

SEQ ID NO: 61928 - DNA, 387 bp, Acinetobacter baumannii
ttgggatctaattggtctttaaaaatttctttaatacgttctaaagaagctttggcacagccaattgccattgcggcaactaatggtcgtgtattgtcaaaagtttccattacaccggcaaaaccttttgcaacatcaatttcaggattaccaagcaagttttcagccggaacacgacagtcagtaaaactaataacggctgtatcagaagctttgatacctaacttatgttcaagtcgttcaactttcattccgggagtacctttaggcactacaaatgatttgatggctgcacgtccaagttttcggtcaagtgtagcccatacgaccaccgagtccgcacgttcaccagaagttacgaaaatcttttcaccatttaaaatatag

SEQ ID NO: 61929 - DNA, 1527 bp, Acinetobacter baumannii
atgaatgcacctaccaataaatgtaagactactagttccttagctaatttttgtcgttctattcgagaaatatatgaatggctatgctttgaaagaaagtgtttttctttatctgaagtaaaacaagaagatataacgtcttttattgagcatgtcgctgcaaaaaaattgactgaaagtacggtcttgaataaattgatagtaatttcgtatgtttattctcatcgaaaatatttgagtgaatcttttaaatttaatccatttaaatcaaaaaaaataacagctttagctaaagcttattcaatagaaaatggtcatacaccaacattgtatcctcaagaaatatttgggttgctaaaccatgccttaaaattagtaaaagaatctaaacttacattacaactatttgataaatacatgaaaatccattcggatacttccatggctcatagatcaatgtatttacgattttttaaattaactggggtgaaatctagtgacctacaaaggcaggtacgagctttgtatggggcagctataacaataatattaattttacttgctgaaaggaaacatgaattatctcttacaaaagaggaagatgttatagatttactaaataaagatcttgatattcttgttggtttagaaatgaaaacagcaggaacaattacaggtaaaaaaacagaaagagcagttattcaagaagttaaagatgctttaaacgttatattagaattaactaaatatacaaaagaaaagtctaggctagaaactattctattaaaattaccttttagccattctgtaaatggaacaggagagaaaagtttctatctcactacaaatggattgtatatggttttaagatatttcgcgaattctgcaaaatttaatagagttgatctaagaccacatatgtttaggcgagcatacgcaatgctatggacttggagatatgaaattggtgatcttgaagaattaagattaatgttaaaacataatagtttaaattttactcagaaatatactgatgatgaaaacgtctgggagtttatggggaaaaatgaacaggatttagcttttgatttgttgaatagggcttttcaaagaaagattgttgtcgcaggaaaaatgagtgagactttggaacgatacagtcgcatcatacaagctaaatctacattacttgatgctgtgactatagcggatcacatagatgacatcataataaatactggtttacgtgtggtagctcatgctgatggattttgttttataaatcatacaagtctggaaaatgctttatgtcgaactgaagggataggtttagatcctgttaagaggaaagacacaatatgtatgaagtgccctaacttcgccacagataattctcgtaaatcgtattgggagaaaagaattaaattacatcaagaagttgttgaatcaagcaaaaatgagcagcttattgaaggttcaaaacaatttattaaaaaggcagaaaaaatattaaaggatatagcttag

SEQ ID NO: 61930 - DNA, 657 bp, Acinetobacter baumannii
ttggtatgggattcagcggacgcttacaatgaagatggctctgttttcggtacattatgtgctattgatccatcagtacagcctaaaagtatagaacaatatagtgatttattagaattatttagtttattactcagtcgaattttacagaacgaaattaaaataaatgaacaaaaaagaattagcgaaaaacttgaaatggagtcgctaacagatcacttaacaggagctttcaatcgtcgtgcttgggataaatttttagatttagaagaaagtcggtgtaaaatttacggacactcaacaacaattattgtcatagatttaaatgatttaaaatatataaatgataaatttggtcatttaaaaggtgatcagatgattcaagaaacagtccaaattatcaaaagaactgtgcgctctaatgatttagttgcacgtttaggaggagatgagtttggtattttaaatattgaaactaacttagaaaatactcaaaaactagcaaatcgaatttcagaatccttaaaacaggctggaattaatgctgctattggtgttgcagcacgtcaaccagggacggatttacaacaaacagtagttgaagcagataagcaaatgtatagacataaacgtcaaatcaaagatatgtctcaataa

SEQ ID NO: 61931 - DNA, 378 bp, Acinetobacter baumannii; identical to SEQ ID NO: 58515

SEQ ID NO: 61932 - DNA, 144 bp, Acinetobacter baumannii; identical to SEQ ID NO: 58524

SEQ ID NO: 61933 - DNA, 330 bp, Acinetobacter baumannii
atggaaagaaatctaaatttagcaaattcaattttcgaaggctttaatgataaaaacggattaatgatttgtggctatgaatggggatggtcaaaagaagatcaaaaactggatgaaagcgatagccgtcccacagtagatatgagcattgaatgtacatttagtaataaatccctaaggtatggtccttcttccaatacttggccttatgataaaaatatcaaaaaatggtttaatttttggggacacccattaaacgatgaaaatttaggttcagactttgataaatgtattaagaggtggatcaggaaatttgaacaacacttataa

SEQ ID NO: 61934 - DNA, 219 bp, Acinetobacter baumannii
atggatgattctttaaatatgtatactataaactcgatatatgagcagaacaatcctgctgtttggggagtattatctaaagaatttaaacctgggtacaaaattaataatggttttaaatttaagttgacaaaagataataaaattaaatgtgaagatttaaaaggttcaactctagaatgtaatgaaggttttatgcaaattcagcaaataaagtaa

SEQ ID NO: 61935 - DNA, 378 bp, Acinetobacter baumannii; identical to SEQ ID NO: 58515

SEQ ID NO: 61936 - DNA, 447 bp, Acinetobacter baumannii
gtgcacttggcgcagtggtatcgacagttaccacggcattgcctgtacccacattacctgccgggtcagtcgctgtcacagtcacagtatgcggaccgtcagtcaacactggaagtgtattgtctgcaagggtccaggtgccatcaccattgttcaccgctggataagccacaccatctacagtcaccacaactttcgctgtcggatcgttcactgtaccggttaatgcaggtgtactgtcattggttaatgctgttgttactgcaactgttggggcaactgcatctactacacctgtgccaggtaatgacgggttacccgctgggtcagtcgctgtcgctgttactgtttgaccatcagtcaggtcacctgggtttggtactgtccacttaccatccgggcctgcaactacagttgctgttgtgccatccgggaagctcacggtaa

SEQ ID NO: 61937 - DNA, 447 bp, Acinetobacter baumannii; identical to SEQ ID NO: 59945

SEQ ID NO: 61938 - DNA, 447 bp, Acinetobacter baumannii; identical to SEQ ID NO: 61936

SEQ ID NO: 61939 - DNA, 447 bp, Acinetobacter baumannii; identical to SEQ ID NO: 59945

SEQ ID NO: 61940 - DNA, 447 bp, Acinetobacter baumannii; identical to SEQ ID NO: 59945

SEQ ID NO: 61941 - DNA, 447 bp, Acinetobacter baumannii
gtgcacttggtgctgtcgtatcgacagttaccacagcattgcctgtacccacattacctgccgggtcagtcgctgtcacagtcacggtatgcggaccgtcagtcaacactggaagtgtattgtctgcaagcgtccaggtgccatcgccattattggttgccgggtagttcacaccatctacagtcaccaccactttcgcagtcggatcgttcactgtaccgcttaacgcaggtgtgctgtcattggttaatgtcgttgtcactgcaactgttggggcaactgcatctactacacctgtgccaggtactgacgggttgcccgctgggtcaatcgctgtcgctgttactgtttgaccatcagtcaggtcacctgggtttggtactgtccacttaccatccgggcctgcaactacagttgctgttgtgccatccgggaagctcacggtaa

SEQ ID NO: 61942 - DNA, 726 bp, Acinetobacter baumannii
atgactaaatatcttaaatttatagtttttacttctttcatgattggatctactgaggctttatgtgccgattttggttttattcaagataaagatgggtacgtgaatgtaagggaaaattcaagtttaagttcgaaagttatatccaaattaaataacaatgaaattgtttcttgtgcaatcgatgaagggacaaataatttttgtttagttaatgcaagcaatggtgtagctggatttgtctataaaaacagaataaataattttagtggttacacttccattaatttatctcaatattctaaagaaaaggttgtctatagtgataaaaatataatagtagaagtatatgcaaaaaaagctatttcagatcctaaactgtataaaacttttaaaggtgaatataaatattttaatgataaaaagttctttggtacagatggtagtctacctgacaataattttttacaacttgataaaattattgttaaagaaaaagataacacaatagaaattagtagaactgagcttgagcaatattttttccctaaagatggtatcgatgggggcaagaatgagcttgctgattttaaaatatattacttaaataataatatttttattctaaatacttttaatgatggtggtgccgcagcttataatatcgttttaaatttaaaaaatgggaaaatagttattaataaagcttggaaagttgaaatttga

SEQ ID NO: 61943 - DNA, 378 bp, Acinetobacter baumannii; identical to SEQ ID NO: 58515

SEQ ID NO: 61944 - DNA, 378 bp, Acinetobacter baumannii; identical to SEQ ID NO: 58515

SEQ ID NO: 61945 - DNA, 378 bp, Acinetobacter baumannii; identical to SEQ ID NO: 58515

SEQ ID NO: 61946 - DNA, 447 bp, Acinetobacter baumannii
gtgcacttggcgcagtggtatcgacagttaccacggcattgcctgtacccacattacctgccgggtcagtcgctgtcacagtcacagtatgcggaccgtcagtcaacactggaagtgtattgtctgcaagggtccaggtgccatcaccattgttcaccgctggataagccacaccatctacagtcaccacaactttcgctgtcggatcgttcactgtaccggttaatgcaggtgtactgtcattggttaatgctgttgttactgcaactgttggggcaactgcatctactacacctgtgccaggtaatgacgggttacccgctgggtcagtcgctgtcgctgttactgtttgaccatcagtcaggtcacctgggtttggtactgtccacttaccatccgggcctgcaactacagttactgttgtgccatccgggaagctcacggtaa

SEQ ID NO: 61947 - DNA, 255 bp, Acinetobacter baumannii; identical to SEQ ID NO: 47851

SEQ ID NO: 61948 - DNA, 297 bp, Acinetobacter baumannii
atggatcagatcagaccatttcctccaactgattttattgaccaagcagatgaagaggaagcgattcgcatagtagaaaaagattattttttaagcttagttcttggtttggtagggattaatggttgctcaaaggtggaaaaagagtcaaaagaagctatcttaagcaccttaaaagatcctgattcagcccaattccaaaatataaaaggatattgcggagaggtaaattctaagaatagctacggtggttattcaatttgcaataatttgggaagcacactgcactccaaataa

SEQ ID NO: 61949 - DNA, 408 bp, Acinetobacter baumannii
atgaaatatgaaaaagtaaagatgctatcaaatagtcagtttaaacgactgattggaatacaaccctcaacctttttagaaatgcttgaagtattagagtcaagccaagtcaatactcaacgaggtaggccttcgagtctttcacttgaagaccaactgttaatgacgctaagttattggcgtgaatatcgcacgctctttcatgttgctatgagttatggaatccacgaatcaactgcgtccagaattattcataaaatagaaaatattttaataaaatctgataaatttcatttacctaagaaactaccgcatggtgcagggatagattggaatgttgttattgtcgatgcaactgaaatgacaattgagcgtccaaaaaaaacagaaaagattctacagcggtaa

SEQ ID NO: 61950 - DNA, 396 bp, Acinetobacter baumannii
ttggcagcgcattggacgacagcaggtggtgacgatgctttaaaccagactgttccattctgctattctccaaacgttctatttcattcttctcatgacctcaggcatactgcggtcatgaatacgctgcctgacttaagccaactgacccatgaacaactgctggaattcaccagacagttggcaatgcagcatcagtctctggcagaatcaaatcaagagttagaaaaatcaaaccagcaattggatgccaaagttcaacatcttgaagtcaccaatcagcaattagattctaaagttcaacatctttctattctcaatcaaaaatacgagcatgagcttgcactatttaaacagcataaattcggcagtaaaaatgaacatctatgtgattga

SEQ ID NO: 61951 - DNA, 336 bp, Acinetobacter baumannii; identical to SEQ ID NO: 54574

SEQ ID NO: 61952 - DNA, 558 bp, Acinetobacter baumannii
atggcacatgcacgtcgtaaatttcatgaactgcatgtgaccgggaaaagtcagatcgctgaacaggcattagtgctgattcagaaactgtatgccatagaagcagaactcaggaaaaagaccgatagtacagcagaacaccgccgcgaataccgacaacagcacagccaaccggtgatgcaacaactgtatgaatggctcaaccaacatgatctgacggtgccatcgagttctccaaccgccaaggcgatcaattacagtctgaagcgttggccagccttaagccgctatctggatgatggcaatctacccattgacaataactgggcagagaactcaatgcgtccctgggcattgggccgtaagaactggttgtttgcaggttcgctgcgcagtggacagcgagcggcaaatatcatgactttaatccagtcagcaaagctgaatggcttggatccgtatgcctatttaagtgatgtgctgaaaaagctaccgacacataaagtgacccagattgaagagttactgccacactgctggaaacctaaatcgaattaa

SEQ ID NO: 61953 - DNA, 420 bp, Acinetobacter baumannii
atgggataccgtgccaagccttcaacagtttcaccaatattttccccgccaatcgctgatgagacgatttgctgtacatctttaatattgagaccatatcgcgcagcctgcatacggttaatatcaacatcaacatatcgaccacctgtgagccgttcagctaaagctgaactaacaccgggcatctgtttagccacttgttcaatttgctgtgctacccgatcaatatcttgcagatcatttgctgaaaccttaatcccgattggacttttcaccccagttgccaacatatcaatccggttacggataggtggcacccaaatgtttgttaaacccggtacttggactgccttatctagttcttttatcaatttgtcaggtgtcatacctgaacgccattcagaccgtggtttgaactga

SEQ ID NO: 61954 - DNA, 168 bp, Acinetobacter baumannii
atgaaaaaatctaatcatgtcaccgcgcacacacctatcaccttagatgcattcaaaaagcgtcagaaacaaatcaaactttctaatttccttaaaaaactctatgaaggaacagcatttatttgtatgttcgcgtttacattctctttctttttcttagggaaataa

SEQ ID NO: 61955 - DNA, 417 bp, Acinetobacter baumannii
gtgagctggaaggactacaaagctgtaacagcaggattgaaggcgatctatcaggcaagtacagaggaaaatgctttaaagtccctagatatcttgtgcgatcaatggaatcaccagtatccaaaaattggagaatcctggcgggcaaattgggaaaatatccgaacgatctttagctatcctgctgaaatacgtcatgcgatttatacaacaaatgcaattgaatcattgaatagcgtgatccgccattcaactaaaaagagaaagatcttctcttctgatgattcagtgaaaaaggtcatttatttagcaacttcaaatgctgctaaaaaatggaccatgccaattcaaaattggcgtttagcaatgaattggtttacgattcagttcgatgatcgattaaaagatcatttataa

SEQ ID NO: 61956 - DNA, 384 bp, Acinetobacter baumannii
atgactacaaatcaccagacatccatcgcatctcttgcgaaaaaacgaagaacatacagtgctgaatttaaacagcagatcgttcaggcttgtaaagcaccggacgtttcaattgcttcggtcgctttgcaacatggattgaatacaaatcttgtatccaaatggattcgcttaattgatgctaagccagggaatgatcgctcaccactaccgaataaacctgcatttattgccttatcttgctctgcaccattagatcctactcctactaacatgttaaaggttcaaattactttaccccactcaaaagcagaaattggcttgaaatggcaagtatcagaaatatctgctttagcagaattactcaaggcacttgcaacatga

SEQ ID NO: 61957 - DNA, 246 bp, Acinetobacter baumannii
atggaaattgcagcgagattggctaaagttactgcgctgattatcagccgagatgtcgttattgattatgccttatacggaactccagagttagccctcgttgcgaacaacaaagccagaaatcctgcagttccgcggacgctgataagtagacagattcctgacacggaatactataacttacatcacttaaataggatgcataagttatgcaagttacgccacttaaataagttaaggcgctaa

SEQ ID NO: 61958 - DNA, 279 bp, Acinetobacter baumannii
ttggtttctttctttataaagcaatcatctcattatcaaagtttagctgatcaagccaaccagactcggttggaaatacaagcatttccaacttttgtgactggaattgaaaaagctgatgaagttgcaattcgcaaagaactcgcacttaaatattttggacgtgaagttgataaaactgctcataaagatatgggtaatttagtttctgaccaaatgaaaagtacaactgaaatggttaaagctacaacagaagcaattaagaatttaaaggggtaa

SEQ ID NO: 61959 - DNA, 858 bp, Acinetobacter baumannii
atgatagaaatgattgagcaagatggttatttgtctactttaaaagaaatgagtccaacaagtggcggtatctctgcaaaaacatatttagctgaagttctatggccagatggtgaagtcattgaatcatttgttaaactttttcctgtaaatactcgaattaaagaaattattaatgaaagttttggtttcttgctagctaattcagccaatttgcgacaatcaagtcgtgcagctttgatcaagcttgatgtaagtgaattttctattgatacctcaacggatagttttgctcagaccaacggttttgtatatggatgggttacatcaagtcttggcggtaaagatctaaaaaaggtctatcttaagaatccgcaggagattgctaatgatgaagcacaacagattatttcattactcgattcttggccgaactttaaatctttagttgcttttgatgattgtattgggaatattgatagaaatattgggaatctaatttttattaaaaaggatgacattggaataattgatcatggtcaaatttttggtgtaattgattggcagtatgaatcaatcgacccaacattcaattgtacaaactacatgctcaatgcattcaaagcacaatacaatggaacaattatccaccctgctatttatcaacctatattagatgttgctgctagaaatagcagtttttatgataaagacaaagtagatattcatggttgtatcactcatattgatcaaacaataggtagcaatttagataaaaagattgatgattttttcaattattttgaagtacgttttgctaccatagcaactcgtttgcctcatgcattagctgcttaa

SEQ ID NO: 61960 - DNA, 834 bp, Acinetobacter baumannii
atgtcaaatataattaaaggtgaatggtcacttgtgcagtggaaccctgatatagctactgaagaatatctaaatattggtgtttcatttaagcacaatggtagaaattacttcaaaatgcttgatagtttcaatcgcgtaaattgcttatatgatgaggatactgtacagcatcttcaggatgttattgaattatctttaaaagcttttaaaggagataatttttatttttcagaccaaattcgtttgatagataaaggcttagctaagggccttaatgaagaaaagattctggaaagattgtacactcgtgttgttactttaggcaaaactcatgcatcaaagagtaaagtgaagaatgattttaagtacattaaaaatgagccattcttaaaacgtgctacaactaacctcagacaaaaaattaaaagtaaaaatgaatataagcatttattagatctattccctgaagatagttatttaagaaaaaataatagtgatttgtatgtgcctatgcgaagttcttctaattacggaagttttgtttctgtcgtcacaaacaatgtagataccatcaatacaaattacttgatgttggcaacagatcttttaacagcatctcaattagatcaaaaaggcgcaaacttttttgttttaagaccttctgcagaagagttgaagaagttagatgaggaaaaggttgatgaaattggagagaccttagataaattagatttcaaatttaaaggctataagtttaatattgaaagtgcagattctgaagaagagttgaatgacaaaatgttattttggctaggtgaagaagctgcatga

SEQ ID NO: 61961 - DNA, 3300 bp, Acinetobacter baumannii
atggcagccctttatcactcaatttttacagaaaaaggtttagagcttcttcgagaggccattcaaacaggagctaaactaggtattacccatatgtcatttggtgatggtggtgggtcattacctactcctgatgcaaaatttactcaaatggtcaatgaggtttaccgagttcagttaaacaggcttgctccgtcaaaagataatcctaactggttagaagctgacggaatcattcctagtgctattggcggcttcaatattcgtgaagttggcttatgggcaggagacgtaatggtggcttatgccaattatccaccaacatacaagccgtccggtgatcaaggcacagctcaaatcaaaacaattcgtattgttctacaaattgataatacggcaaattttgagttaaaaattgatgcttcaattgttatggcaactctgcaatatgttgaggatgcaaaagaagaagcaaaaaaatattctgatgaaacaaagattcatattattagatctatcaatgaattattaaattttgatatatcagatatctggaatggaagaaaagtctctgtactttcttatcatgatggcttgggcaaaggtggtggctactttgtttattctagcgataaaaaaaatataaataatggagtaaccatattcaacggttgggttcgtgaaaagcaaacagaattatccgtttatgacgctggtgttattggtgttttaaacgaagaagattacaacgatcacgatgctctaagacggttagctgaccttgttacatctgataccacgacctcttatattattgactttgaagatgctcaaattactgtaggacggcaaactttagataccactaagactctccaaacacaagaacatcctttccgccttgatttctctgccaagtacggtgcggcagtagtaaacaagaaaattattattaaggcgaatggtgcaaaaatcgttacccgaagtggtttaagaatcggtgtttttaaaaaagatacattagaaccctataccgatattacttatccattttatccaggaacagctagctataacgctattaaagattcagtagtaatttataactcccttactcatatctactgtaattatgttgattatgtatcagtaagtggatttattgagttagatggaaattcaaatagttttatcgttggcggcggatatggtgataaggattggcagctaggtggattaggtctacaacttatcaaatgtaacaaacatgaagcctcttcaatatattctcatcaccatacagcagatggtttttacctatcaaacaacgtagaagaaggctgctatgcaaaatattcgaacttgataggctactacaatggaagacaaggttgcagcctaacaggaggaaagaatatcgcatttaaaaactgtgatttcagacataatggtatttcgactcttaaaacaccttcatcaccacgtagtaatttagatattgaagcggaatcaaaccctatttctaacgtactctttgaacaatgtgcttttgttgatgctggatatgattctattgtctctgatacagggaatgtaagtgatatttacttccgaaaatgtgagattgcgaattatcgtgcactctggatcactaaaccgcgctttgtttttgaagaatgttcaataagtggtacttctattaagctttatggtacagatgaagaattaaatagaactcgtttcttatcttgtacttgggatgatctgttggcccctaatactaatgggtatcttatcacagcaacaaatggtaatcccattttcgaaaaatgttcgataatttgcacaaaatccaagtggttctggtctactcgtacttccattactaaaggtggactattttcctttaaaaattgctcaattagcttaagtttacaaaacacagatccggcttatggtgcatatattttcgaaaacgttacgattattgattcaagaccagatccaaccttacctttaacggtttatttagccaccatctggctggctggcctaagtgtgtggtcaccagttggtgaaagtgcattagctttttctttagttcaagcttacaacccgctgcctacaggagtgctaaatgcgaaaaatgttgttggttatccgaacattacaaataatttagaactatataaaaatatacatgtattagggaatagtactaccttaaagcagtcttctataaataaattaatgtttgcaaaaaccacgtcaaactttcctaccaactctgttttttataatgttggggatatcattttttgtgttgccccactctctaccagttatgtaacgcattggatttgtacggcagcaggctattacaatacctctccttggtctccatctacggcttatgcaaatggaacttatgttaattcgaatgggaatgtttatcagtgcacaacggctggtagttcaggcactgtttctcctaaccatactagcggtacagctaatgacggaactgtgacgtggacatatataggaagtttggccacttttataagtatgggtggctcaaatcaagcctatgctcaaacatttgcaaatacgtcagatagtagcagttcttctactggatctgtaattattgcaggtggattaggagtagcgaaatcagcttactttggggctacagtggcgccaaatacagataacttacagaatcttggaacttcatctaaaagatggtcttcaatttatgccggtacgggaacaatccagacttcagataaaaactataaacaagaaatagcagtacttgatgaagctgaaaaacgagttgcccttcaatgtaaatctttgatccgaaaattcaaatttaaagatgcatacaatgaaaaaggccaagatgctcgcttacactttggggttattgcccaagaagttaaagcagcattcgaagcggaaggcttaaatggtttcgattacggagttttatgttttgaccagtgggaagcagagtatgagcctatttatgctgaaagagaagttgagaatacatactatgtagtagtatcaacatacgaaaagattaatgaaaaaggtgaagctgaaacagttattgaagaaattcgaataagtgatgatgaggtggctgaccatactaaagctgagcctagaacagaaatagtcaaagaggaatatgatactggtgaaaaacggattaaaagtgaggcaggttcacgttattcaatccgttatgatgaattagcgatgtttatcttggccgccttgtaa

SEQ ID NO: 61962 - DNA, 705 bp, Acinetobacter baumannii
atgaaattaggggttatttgcgaaggtcctacagactttcatgttttaaaacatacaatacaagcttattttaatcctatacaaattagggatatacaacctccattaaatgcccaacaaactcaaatagcaatagatgcatggggaggatgggaaaaagtcagtgaatacctcaaatcagaggattttttaatattactagaaaatatggactacgtagttattcaaattgatacagatgtttgcgaacatagaaattttaacgttagtcctattagtttagctaatactgatcacaatgaattttatgaacttataaaacagaaactattagaatggattgattccgctggtgtccctcttaacaaaaagaaggctaagagatttattcattaccaaaaacttaaaaatcgtaaaattagtacggattatattcataaaataatttttgctatttctgtacatagcttggaatgttggctacttgcttatcacgacatacgacaaagaagttgcaaaattactggctgtgaaaatgctttaagtagatattttacaagcgttagaaaaactattaataaaaatgcgaaggactatattcaacatagtttagattttaaagacgctaggaatcatcctcgaatatgcgctaaatctgaaagctttaagatttttgtagatcagttggcggcaatttcagcttaa

SEQ ID NO: 61963 - DNA, 1281 bp, Acinetobacter baumannii
atgtttcatcattttcgaatttcatcatttaaatccataaaaaacctagaaatttcagttggccatgtaaatgtaattattggtgaaaatggtgctggtaaaagcaattttttagaagctttggcagtatttagtgctggcctatccaataaattagataatgaatttttaactgctagaggaattcgagtagttagcacagaaactatgttttcaattttctcaaatcaaccatcaactagctcatctattttcgcttttgatccattaggtggtgtagctgttatgttggattatgataaagaaagtccatatccaactttaaatcataatataggctatgctacgactgatattgaaacagataaaccagaatttttttatacagatgatggagatggcttgttaaatcagaaaatcgaagaattgtacaaaaatattgctgataaatatggatcagttgacgaatacgataaaaaattacgtgatttaatgtcaaaaaatccaaataaaattaaggcacctaattcaattatagaagacttatttaaaatatctccatatttaaatattcaaagctactttgaatcatataaaaataagaaagaactccgaaaaaaaggagattttgtaatttattcacctgaagcatctaaacttcgaatatttgaaagtgagtcccaaattgaaccacttggagtaaatggtgaaggattactaaaacttttaagagtaatgaaagaacatgaaaatgaaaaatacaccaagattttagaaatagcctcaatgtttcattgggtagataatatttttatgggtgaaaaggaggattcaaaaactgccaataaaattgaaattcatgatcgttttatggattttaaaattgatcaccgtagtgcaaatgaaggctttctttttgttctgttttatgcagccttatttagttctaaatttactccagatttttttgctgtagataatattgatgcgtcattaaaccctaaattatgtcgtgtcttaattaaagaattaattaaattagcgaaagaaaatgataaacaagcatttgttactacgcataatcctgcaattttagatggcttagatttacatgatgatgaacaaagattgtttgttgtagaacgcgatgatgagggagcaactcaacttagacgtgtgggtgtagatgacttaccaaaacctactcgttctggtcaatcaattaaattatctgaaagttttatgcgcggctttttgggcggtttgccaaccaatttctaa

SEQ ID NO: 61964 - DNA, 132 bp, Acinetobacter baumannii
atgaaagaaaattttcaggcaccaacttgtctcgacataatttgtcttcaaagattaacttctttagatttcgcccaaaaaacaaattttaaatcacgcatcattcgttggatgaaaggcggtgcgaaatga

SEQ ID NO: 61965 - DNA, 600 bp, Acinetobacter baumannii
gtgcagaattcatcacctaagaaaacgacatttaataacacatgggtttttttggcagtttttctatatttgttatttgttttagtttactcaatttcattttattttagtgaaggtaaaaatatattacttgcttcaaatgaattaggtgatttcttggctggggcttttgcgccactagcatttttcttccttttattaggttacaaacagcaaagtattgaaattcaaaaaaacactcaagaaagactagagcaaaaaagacaatctttattactttcccaaccattttttcatttcaaaagttttagcggatttataattaattcagatgattcattttttttcaatttaagtctctctttaagcaatagtcgagcaatttgcaggcagcttttccttcttgtaagttttgaagatagtttagtaggtcaaatccctactggagatacttcatttggatttattaataagattaattacactgatctaaatgatttaattcaaatgcaatccctaaagttacttttcaaaaatgataaagatggttcctattcatttagtcattatattgtggacaggaatagttatcagaactaa

SEQ ID NO: 61966 - DNA, 789 bp, Acinetobacter baumannii
gtgcagaatcaaaaaccagaaaaaacacctttctataaatcatgggtattttgggcagtaatttatggcgtattaattttggcgtataacttagcatttattttcatagatcctgaaaataaagttctactgacttcaaatgaattgggtgattttttggctggtgtttttgcacccttagcattcttatttttatacttaggatataaacaacaaggccgagaacttcagcaaaatacacaagccttaaatcttcaagctaaagaattgcaaaatagtgttgagcaacagcgattattagctgaagcaacaatcgatgacctaaatattactaaagagcaaattcaaactcaaagaagaaaagagcttattgaagctcaaccattttggcacttttcggttcacagagtctataaagaaagacccgataatgtgttcggtacgaaaatatctgattcatcttataaatctattattatatctgcttccttggacaatagtagagctattgccagagaggtttccgtaatccttataaagtctgatcaagttattcaggaatttgattttccaacttttgaaaaaccatccaaaccacagaatattagtgttcgattaccatatccagattgttttgatgataatggagagctgaaagtaaaatactctattgtttatcttgatgcattggataatcctcaatatcaaaattttgagatcatagctaaaaggaaaactgaagttgaaactcaagaatctagcgttgatcgaatagatcgctcgtattga

SEQ ID NO: 61967 - DNA, 375 bp, Acinetobacter baumannii
atgtctgaaatgttcaatgtacataagacacctgaaataacaaatgagatttcttcaggcgagtttgaaacgatcttcaacatcaatatttggagtcgttatgatgatgatcgtgagttaggagaaatgctttggttttgtaaatatttaaataaagcaggtctcacttcatatatcgaagaattattttatgattcaaaagctgatatatgctctattaagttgattaagcttgaagaagaagatatagctgaaagttatgaaatagaagccatccgagtaattgctcagctgaccatcgaccaatttgaaattaacggtgtagttggtcataagaacccatatttatccagcatacttaaggtagtcatttaa

SEQ ID NO: 61968 - DNA, 1953 bp, Acinetobacter baumannii
atggctcaacaatcaattgttattgaagtacccggcaaatcaattagtgagcttgaacctacttcaagtctttcaccagatgatgttttgccagtagttcaaggcaacgaaaccaagaaagcacctttagagcaagttgcagatttggttaaggctggattgggttctgctgcttttaaaaatgaatctgattttgctacgcctcttgtcgtagctcaagtaaatcaggcaagtcaattacgtgacgatgctcagaatgaacgtatcgataatgttgaatttgaagttgcactcgctcaagctggtgttgaagcttcatttgatagttatgcaaaaatgcttgcatatactccaaccaaaccaaatgtatctgttcgtgtaaatagtgatactgatccagccaaagttgggacttatacttgggatggaactcagtatattcttggaatggatctagttagcttaattaaaaattgggttaatagtaatccaaactttaaacttaaagttctttctgggccaattgattttaatacgttaaaaacacccggcgcatatgcaatctcgacaactgattttgtaaactcaacaaataaaccgtcattcgatgttggtggaattataattgttgagggttctggagcagattattatacacgacataaattttgttcaattgataatcaggaagctagtagatcacttaaaactacgtggggtgcatgggatgtagttgttagagcatcagatttgaaagctaaagcaatcaatgaacctattgattttgatgattttaaatcaccaggcacctatacgatcacgacagcgatacttcttcagtgtactcataagccccctgtgactgctggtggtacttttgaagtaaaaggtactggtgcaaactacttaacagctcacatttttagatcatatgacaatattgatgtctcacgtgcttataaaacgtcgtggggagcttgggatgtccacattaaagcttcagacttaaagccaaaggttgtctcgtcagcaatcgactttaatgcatttaatgtaccgggtccgtactcaataactaataatgttttagcacaatgcacgaacggtcccccaacaccaaatggtggaattttccagaattttggtacgggagctgcttactatacacatcgtgaatatgtaagttataaaggcgaattttttaaacaagcccttgaaacaacatgggggccatggaaaaaaatagcaacaactgacgttactgatgcactagctacgttaattgcatctatacaaataccgggaacaagtttagctgataaaaacttgggtgtgctgggtgattcgattatgtttggtttaaacaatacgaataaccgaagttgcgtagatattcttgcagagcgctatggcgctcatttaacaaaacatgcattttcgggcgcatggataagtgctggaactggggctgttggtccagcaccaattttatcgcagtcatttacttcactaccaaatagtgcaaatttcgatttgatcattattgcagcgggtactaatgacagaattgatggtgtaaacggaaatctaggcacttttgcagatcgaacaaatgaaaccttttatggtgcgcttcatgtgctgatcgcagggttaaaaagtaaatatccaaacgcccgcatgctgtttatttcgcaaatccctcgaactggatttcgatttacacctagtggtgcgacggaggatattgataagaaatacaaagcaatagttgatgtatgtgactactactcagttccagtttgggcgggccacaaaaactttggttttcaccctgatgacaacgctgcatttaaaacaaaatacatgccggatggattacatcctagcgacgaaggtcaaatctggtatgcaaatcgtttggaacaaatagttctaagcattgccaagtaa

SEQ ID NO: 61969 - DNA, 234 bp, Acinetobacter baumannii
atgttattcaaaaaattcgctgttgctgctgctgttgctgctactttagctttcgttggttgttctaagaaagaagaagctcctgctgctgctgctgcttctgaagctgtagctgctgcttctgaagctactgctgctgcttctgaagctgctgtagctgttgacgctgctgcttctgaaactgctgctgctgcttctgaagctactactgctgctgcttctgctgcacactaa

SEQ ID NO: 61970 - DNA, 192 bp, Acinetobacter baumannii
atgcaaattatgattaaggtctttcatcatgcaactaccagtgttttgagtttgcctgctgaggttgatcaaaaaggaaatattataaaaatttatgactataaaatgaatgagttaaaacttaattcagatgataccgttacatacaatggtaagcgttggaattttcaacataagcagaatatctattaa

SEQ ID NO: 61971 - DNA, 363 bp, Acinetobacter baumannii
atgacttggattttattaaataagcgttggaccgcaatcgccattttacttgtgctgttgctcattcagacggctatcacaaatcactatgtaaataagctaaagcaagctgatcagcaatgcctggcacaaatacaagacatcgagcgcaagcaagtgaaagcccttgctgaagcacaaaaccaaatcaatcaagtgagcgcagactatgagcaatataagtcagaacaacgcacaaaagtcgagtatgttgagcgtgaggtgcaaaagatcattgaacgtcctgtttataagtctgcttgtgttgacgctgatggcgtgcagcaaatcaacgatcttatcaaagccggtaataccagctaa

SEQ ID NO: 61972 - DNA, 513 bp, Acinetobacter baumannii
atgaaaaacaatcctaaattatgggtggtgggattagcagcttcggctgctttttttacgtctttaatagaccgtgaaggttttacttcaaatccagttatcccagtgaaaggcgataagccaactattggtatcgggtccaccaaatatgaaaacggtactccagtcaaaatgacggataaaccaatttcacaagaacgtgcggtccagatcgcgaaagctcatatctcaaaagatgaagcttattttcgcaagtctttacctggcataaagctgtctcaagttgaatatgacttgtacctcgattttatgtaccagttcggtcaatcagcctggtctggctcatcaatgcgtcgattgattttgcagggaaaaccacgccaggcatgtgatgcattgctgaaatggaaatatgttgcaaagcgtgattgttcaattcgttccaatggttgttatggggtttgggtacgtcaaattgatcgatatcaaaaatgcgtaggggctaattcatga

SEQ ID NO: 61973 - DNA, 1836 bp, Acinetobacter baumannii
atggcgattatcactgaagaaaagatgcagaatcttgacactgatattaaagatactggtgaagctgtaaatgaagataaggtgatttaccctcgctatggtctgccatttttttctttgcctatggtttcacgtttgggtcaggaaagctttgctgctgcaattacaaaaattgaaaatattggggggattatttcagctccaagcttgagtgtattgaatacaattgttcctacgtataattatcagttagcaagagttgttgaaactggaaatgattattattgggaccctactgcaaccccttctccagcgtggaaaccaactggtagaaattggttcagtgaggtaattgcttatgtaaatgccaatccgaactttaaagcatctaccatcaatgatccgtttgattttgataccaagttaacaatgggtcaatatgatgtttcgaattctgttttaaacaactcaacgcataaaccaccctttgatgtcgggggtattcttattgttgagggatcagggaaagattacttttcaagacagcgtttctgtacgattgacaaccaagaagcagtacgtacaaaaaaagatgtatggggggcatgggatgttgttatcaaggctggagatttaaaagctaagccaataacagctcctattgatttcaacacttataagaagccggacacttatacaattacaacagtcatccttttgcagtgtacaaatagaccacccgttaatgccggtggtgtttttgaggtaaaaggtactggagctgactatcttacatctcatgttttcagatcatatgacaatattgatgtttcacgcacttttaaaacgacttggggagcgtgggatgctcatattaaagcttcagatttaaaacctaaagttatttcttctgcgattgactttaatgcatttaatgtgcctggtccttactcaataaccaataatgttctagcggattgttcaaacgggcctccaactcctaatggaggcatttttcagaatattggtacaggtgctgcttactatacacaccgtgaatatacaagttttaaaggcgaattttttaaacaatccttagaaacgacatggggaccgtggaaaaaattagccactactgatattactgactacttggctcagctgatcgcggctatacaagtaccagccactagtttagctggaaaaaaatggggggctttgggtgactcaatcacattcggtttaaacaatacagataatcgcagtcatgtaaatatattagccgatcgctatggggctatccttacaaaacacgctttttctggtgcatggatcagtgcgggtacaggggcagtaggacctgctccgattttatcgcagtcatatacatcactgccgaacgatgcgaattttgatttaatcacaattgcagctggaactaatgatcgcattgatggcgtaaacgggaatcttggtacttttgcagaccgcacaaatgaaactttctatggtgcacttcatgttttgattgcaggtttaaaaagcaaatatccaaatgctcgcatgttgtttatttcacaaataccgcgaactgggttccgttttacaccgtctgatgcaactgaaggtattgataagaaattcaaagcaattagtgaagtttgtgactactacggtgtacctgtgtgggctggacacaaaaactttggctttcatcctgacgataattcagcattcagaactaaatatatgcccgatggcttacacccaagtgatgatggtcagatttggtatgcaaaccgtttggagcagatcatcttaagtattgctaagtaa

SEQ ID NO: 61974 - DNA, 504 bp, Acinetobacter baumannii
atggctttaagaccatgtaaggaatgtggtactccagttagtgataaagcagatgcttgtccaaaatgtggtgcgaaagtcaagaaaatgggattgttgcttaaaataatattgtggttctttgcaataacaattgtaatcggtgttatcggtaattcatcaaaagataaaaaggattcaggtaaagataaagagcctgttgcttctagtgtagttaatgaagatgaaaataaagctgctggattatcatttatggttcaagatcgtatcaaaaatagtgctaaagacccatcttcagtacaatttagaaatgagcaataccatcatgataaggagtatggcgcaattgcttgtggtgaatacaatggtaaaaattcatttggtgcatatggtggatttaaaggctatgtagcagttgaaaaagatgaaaagttgtatattgaagatagtgttaatgcaaaggagtttccaaaaaaatggaataaattttgcgtaacacaatag

SEQ ID NO: 61975 - DNA, 792 bp, Acinetobacter baumannii
atgagtgctaaaactaaaattgttaagtttaatagtcaacaattacctgtctattttaaaaatgaacaaccatatgtagcaatgcgcccaatctgtgaaaatattggcttagattgggcagctcaatatcagaaaattaagcgtcaccatatacttagttcaactattgttattacgacaatggttgcacaagatggaaaagaacgtgaaacagtatgtcttcctttggggtttctcaatggctggctacttggtgtagatgtcaataaagttaaacctgaaataaaagataccttgataaaatatcaactggagtgttatgacgtactatataagcacttcatgcctaaacctcaaaagcaaattgatatggctttgtatgtaagcaaagaaattcataataaagttgctttgaaatatcaccgtatgtttagacagtacgacgacatgattgataatttgcgaaagcaagtcgatgaaatgcaatgtaagtgtagacgttatgattttcgtatgaaggtcaatgcaaaagagattcaatctgttgcgtttttatttggaacctcagtttcaaagattaagcaaatcttgatggatgagcagcttctggaagaacgtaatccttatgttgaaaccaataaaactgttctgaatgtcactgatagaggaagaaagcttgatttcttgtttttgcagtctgaaatcatgaatggtgatattcaggacattattatgatcactgatgacggtgtacagtttctagctggtttattggaacgaaaacttatgtaa

SEQ ID NO: 61976 - DNA, 480 bp, Acinetobacter baumannii
atgaataaattaagtgttgatgaaatattatctggcgcgttagttggcaaaccggaattaattgaagttgatatagtagttaatggtgaacctcggacctttgaaacccatattaaaattatggattatgaaacagccaaggctcaaatgaatgccaataatgaaggccgagaggggctagcctgtattttagctgattgtattgtgactgaaagcggtgagccaattttcacagaagaacaagtgcgtaagaactttaataaacatttgattcaagcgatttgggataaaatcctagaaaagaatttcttgggaaagtcgagtacaccgaagacgagtttgccgaactcgaaatctgggcggaactcgtccaaaacggcatcgcgggggcaacgatctgtgaagcaaaaaagaacctcagttacagagaattcatcttctggcaacaatataggcagcggagaggaagcctcaacttag

SEQ ID NO: 61977 - DNA, 312 bp, Acinetobacter baumannii
atgagtgactacatttcgctagagttagccaaatctcatttacgtgttttgcatacacgtgatgattcatacattgagttactgatcaaagcggctttaaaagcagtaaataactttattaatagaagttttgaagatgttcaggaaaagtgggggcttccagtaggcaccataccagaagatttaatctttgcagcctttttgattattggtgatatgtatcagaaccgtgcagcacaaatggatgcggctttatatatcaatcaacggtgcgaaagtttgatgttcccttaccgaaaaatgggggtttag

SEQ ID NO: 61978 - DNA, 1284 bp, Acinetobacter baumannii
atgactgcatatcaaaaattaccattagctcaacatatgaattcttttaaaggattaaatccacgtgatcgtcaggatttggaccaatatgcaattcaattgcgagatcgtatcagccaatttgaccaacttttagaacgttatcgaggccgactagaaggtttggaaggtttgccagaagatttacgtgctgatttagaggctcgttcaaaacaagttgaagaaatctctggaatgattcaagacattcaacaacgaatggttgaaggtgttcagggggctaatggtacagagcaacgtaatgtacttgctgctttattgcgtaacaaagacgctgtagattatgcaaaagttatgcactcccgttcaggtaagaaaaaagacgctgtagtatttgaaggtattaacgcgcgtaacgttatcactttgaaatcaatgccagccaacgcggttaaagctgaaaatgatttaaaccgtactgctgtaacccaacctttaagtattattgacttaattaattggggaacaacggatgaagctattcattacttcttgcgtgaatcagcctttgacatcatggctgacattgccccagaaaatactgataaacctgaatcaaatctgacttttggtttagcaacgatgaatgtgggaaccattgctcattggattcgtgcttcaaaacaagttctagcagatatgacttcccttgcaacctatttggaagttcgtatggcttatggtgttcgtttaaaacttgaatactatattgttaatggacatacacctgcggctggtgaacaaaaaatctttagtggtctacttgaagaagataactttgtaaccatcactccagaagctgatgcaactgccttggacgttttaaatcaggcaaaatacaaagctgctgcctcatttgttctaccagatactatgattttgaacccagaagattgggggaaaattgagcgtattaagggtgctgatggacactatattttcggttcacctggtgcagttattcaaccagtattatggggtttaccagtagtatttgctgcttcaatgccaaagggtaaatattgggtagggaatattgcgattggttttgatggtgttattcgtgaagatgtttctgtaactatttccactgaagatggtaataacattactaaaaacttagtaacaatccttgcagaaatgcgtgcaacaggtgcagtggttttacctgacgcatgtgttgcaggtgatttgccagtaattgcacctccagcgggtggctaa

SEQ ID NO: 61979 - DNA, 735 bp, Acinetobacter baumannii
atgaagataaagcaactgcaagtgcgaaataaattttcgcctaacttgccaaaagtccagtgccggcgcatgcctattgctgttgaaaattgccgttttatcaataaagacgataaaacaggggtagttacagtaagtggttatgccgttaagtgggattcagttaattattatggtgaaaagttcataaaaggggctttcgctgatgtctgtgcagcgtttaatgctgggacaaagaaaatccattgttactacaaccatggttggcgtcagtggtatgtcgattcaaccattaccatgcgtattggtaagataattaagctacttgaagatgatacaggtttatatcttgaggtagagctaacacctggtcttgccttggcccaaaatgtagcagcaatggtgcaacatggaacagttgatggcttctcaattgcgttttatccacctaacgaaattgatatggagaataaaggcactcatgtagaaattaaacgtgctgatttatatgaaattagtattgttgacgacccggcagatgattcagcaagaatcattagtgatgatgctattaatgccattcaatctgaagatgacgcggctgaacttttaagatccattcttcctggtgattatgctgaaaaattcttggcacgttggacaagtgtgcatcaacctaaacaagacccagagcctaaagaagatccattttcttttttagataaaattgtttaa

SEQ ID NO: 61980 - DNA, 192 bp, Acinetobacter baumannii
atggctcaagagaatcaaatcaaatgggaagttggtgatcgttttatctttgttaaaaatattattggttctgactctgttccattgcgttttaaaggcgtggttgaagaaatttattacggatcagtgttttgtgatggttattcatttgagtttgaagaaatcaagaaaattatcacagttaggggatag

SEQ ID NO: 61981 - DNA, 387 bp, Acinetobacter baumannii
atgttccagaagcaaaatacgtacaataagagcttctcatgtgaacgatgtgaatggtcatgtgaaccatttcaacaaatcattcacacggtcaaagccttacataccaatgcatacaacaaccatgtgaatgatgtgaaccattttcttgcgcgcgcacgtgagagaaaaaatcacttattgcttaaattaagtcaatttaattcaaatatcgttcataaattaaacaatgttaaaaacactctcacgcgaggaaatatacataaatcattcacatcattcacatgtaatacaatttattgtttttactcatttttctatgtgaaccattgctcaaaatcattcacacaaccattcacatcattcacatggatttttgaggattaa

SEQ ID NO: 61982 - DNA, 210 bp, Acinetobacter baumannii
atgacccgcacagaagcattagagctacttcaatgtaaaaaactttaccagctagctgaaaagctggaacttacaacttctgcaattgctcaatggggggaagaagacatccctgattatcgtgaatatgaagtcagagaattagcggctggacgtattcctaaacgcctccaaaaagcaaatcagactttagtacatgcaaataactaa

SEQ ID NO: 61983 - DNA, 306 bp, Acinetobacter baumannii
atgaaaaaaccaaacccttctaaaactcaattcgacatcatcgttgatgctcgtcttttttcatctgattttggtcaaccaaagcgtgattttgatttctatcgtgaaagatcgattgatcagatcgaatgcgctatttccaacatttctaaagcaaccaatgcaaatgacttagtgattgcaattgcccaagctagtgctttcattgagtcagcttataaccttgaatttataagcattgttgaacagttcaattggactgaaaaacttcgctcaactttcagcaattctttgttggaggcttga

SEQ ID NO: 61984 - DNA, 360 bp, Acinetobacter baumannii
atgagctttccaatctttgatgaatataaagaaattgatcgtttggaaaaacaaattcaggctcaaattctcaaaattgcaaaagatgcagttgtcttaaattctagggattttcaaattagttgtgagattcatggttttgttcacagcattaacctttatgtctttattggtggaagtaacgaaaaatgctccaaccaaaccaacattttgaattgctatacacggccttttacatatgactcactcaatccagagttttggcaaaaaagacttgatgacttaattgctggacaaaaaaaattacgcgaactgaagaaaaaacaaattgctgaagcaaaaaaagcggaggccatttaa

SEQ ID NO: 61985 - DNA, 261 bp, Acinetobacter baumannii
atgttatatgtcaaagataatcttaaaactcaacattttattaaccttgaattagtgacaaatgtcattgtgactgatcaaggtgacggctcactacgtttttcatttcactatgccgggcatattgcaacgcaattaattgtagccgatccagaagcacaagaagatttattgctgtcacttagcttgcacaataaaccgttttttgaggatgcgattattcccgcagcagtatggcaaaaaactaaggaggacttatga

SEQ ID NO: 61986 - DNA, 711 bp, Acinetobacter baumannii
atgtttgatgaaacaatccgaccaaatttatatgtaaagccaagcttaaatgaggaagttgaaaaatggctcaagaataaaagtaatgaaattaccgttttaccagaaggttttaccaactttcccgacggaaaattacccttagcgcgtgtcgaggttaagcctttagacattgaaaaatataatgctgaaaaggtaactaagaaagctccagtcaaggcgaaaaagccgatgctggagaaaccaaaagttgcaaaaccaaaactcgtaaagcctaaaaaagttaagccaaagaaaccaacaaaattaattgtgtattcagagcgttcaatgatctatatgcacaattgccaagtaatacgtgaagcaagaaataataacgttaaacgctttgaggcactttgtataaaacatggctatacaacttataacatgcttggcagtcgtgctcgttgtatgaaatgcagcaatgaatacaaccaaagccataacgaagattacaaccgtatgcgattaaaccgtgaacttctggctgttgcagtacagatgggccaaaaaagttttaaaggtatttgtaagacgcataaggagactgatttctacattggcgcttcagaaaccactatttctaagcttaattacaagtgctcaaagtgtcatcaagccaatgtacttaaatttaaaaacaaacaagaaggaaaagcagcatga

SEQ ID NO: 61987 - DNA, 303 bp, Acinetobacter baumannii
atgagcagattacagattggcggtttagctatgattatcagcgacactgtttgtcatgagaatgatgggaaggttgtaaaaattattgcatatcatgatagtgcagaatgcagagacccaactggttatcatattgctcatgctatatgggaagtcgcttgtgaaagcggaattgtcatttgggatgggagcattaaatttgatggtggagttggttatgaaggtaagtatttattacctttaggagacgaggaaggcataaaactctacagcttaaaagaagaacaaaaggagcttaactaa

SEQ ID NO: 61988 - DNA, 834 bp, Acinetobacter baumannii
atgaaccgtttaatgctggattatgagactttggatgtagcagaatgccctgtcattttaagtatgggtgcagtagtttttaatgaacatggaataattgatcagatcagcgccaaaattgaccaggaaagctgtttaaaaattggttgtactatttcacaaagcacacttgattggtgggaccaacaaacacctgaagctaaagaaatggcttttggaggtacaacacctatcgatgatgcaatgctaaaaattatcgcactatacaaagaatattggtgctcagaagtttggagccgtggtgcaatagctgacattcgttggactaacaatattctagataaactaggttttcaaaaaccttggaaattttatgaagagatgtgctttagaacatttctaaagtattcaccagaagttaaatttaccccaactggtgaaaaacataacgctttagacgatgccattaaccaggctaatcaatggattgttattaataaatttaagaataatccagcaaatataattaatattgttgaggttgttaacaaactcttaaatattgaaaatataacaatatatgcaataaaagatgcagtacttgaaaaaggcttaatattcgagttagttgctggagatgagtcacatgcaacatatgcaatttaccaacatcctaaaggtaatattgtaaatattacaaaatgcaaatgtggtcatgtgcattccctagaggatatgtgtattagatgttttccagattatgaagataattttttaggtaatggaactccgataagacttcctgtttttgatgaaaatgacttgccattttga

SEQ ID NO: 61989 - DNA, 1167 bp, Acinetobacter baumannii
atgggaactattacaaaacgcacgactacaaaaggcgaagttcgctatcgagctttgttgcaaattcgcaagcaggacgcgaagtatacagaatctaaaacttttagtaaaaaatctctggccgaagcatggttaaaaaaacgtgaatctgaaatagaagagaatccaggcataatttcagaacttaagaaaaagttaggtgatgttactttaggcgaagcaattgagttatatcttgaagaggtcacgagttatggcccttcaaaaaggtcaacgcttaaacttcttactagatttccgctcgcaaaaaagcagatttcaactttaaccaggcaagattttgctgagcatatacgggcacgtagggaaggtaaattagaggattataaagttaaagctatcggtccagcgactgcaaacatagatttgcaatatataagaacgattttaaatcatgcagatttagtttggggcctaaaggtaaatctcgatgaacttgaaaaagctacaaaaggtttaagaaatgccagggcaataggtagttcacgtagaagatatagattgccaacttctgaagagttgcaaaaattgacaacaacagcttttcagtattatcacttgacgcaatacccggatgccccatttcatcttattctgtggttagatatttatactggccgtcgacttaatgaattatcacaactaagaatagatcactatgacagggaaaatcgtcgctggttgttaaaggctgtaaagaacccaaaaggaacaattggtaatgataaatactttattgtggacgaaagggcagaaaaaataattgatctattgcttgagccgaaattacgtaaacgtatgctaagacgcggtggtgatccagacctattattgccatttaatagtgatatattagatcggaactggcaaaaaattaaagatatggcgggtatagaagggctacgttttcatgatttgcgacatgaagcagccacaagactggctgaaaagggtatgagtattccactgatccagcaatatacattacatgaagattggaatagtttaaaaatttacgtgaatttaaacacaataagaaagactgtattagattttgatgaagctatagaaaatgctaaaaatgccaaattaggcgattttatataa

SEQ ID NO: 61990 - DNA, 1038 bp, Acinetobacter baumannii
atgaatcctagagcaactgcgccaaaatttattgcttgtttgactgcctatacaatagatcctaattatataaaaagctatcctctttgccattttgtgcattattctcaatcagatacagaatggcagtatcatctaattaagatatgtagttatctgaaacgaactcacaatttaccattacgtaaagacaaagctacttttcattatgatgttttaattgttacagctataaaagaagaatacgatgcagttataactttcttaaatgttgagaaagattgggaagttgtaagaataaatggggatgctcaaaaatatgctataaatctaataaatactgattttggatttcttagcgttgctgtaacacaatctccgcaaatggggatggcagcagcggcagttgccgctacaaaagcaattgagttcttttgtccacaattagttttaatgtcaggaatttgcgcaggagtaaaaggaaaaactaattttggggatattatcatagctgatccatcttttgatagcggaagcgggaaatggaaagttgattctgaaggtaatttattatttcatccagcgcattatcatttaagaattgacgttgaaattaaaagaatttgtgaagaaatttcaacagataaaaaattattaactaaaatatttacagattttactttagaagtaactcgtcccaatagagcacctaatgttttaattgaagcaaatgctagtggagggtcagttttgcaatctactataaaaatggaagaaattgtagctactcataagaatctaattggtttagaaatggaagcatatgctgtatatttagctgctagtaatgcaagacaacctcaacccaagtttttatcggcaaaatcagtatgtgattttggtacagaagataaaggtgatgctattcaccagtatgcttcttatacaagtgtatctttcataaatgaatttttaaaaagagctgactttctatctgaaaatttagtgaataaaaattatgaagtggagtgtgaataa

SEQ ID NO: 61991 - DNA, 225 bp, Acinetobacter baumannii
atgctatggggctcttaccggaagccagtaccgccaaaagataccggtactatgaaatgggggtatccttttgcatgggactggtatcttgaaatacgaaggggaatttatgaaaaagaaaactttagaaaaacagataaggcaagtcggattttggactgttatagggatattctcgtacatggtgatggcattctttctgaaaagcaattacccaatttatga

SEQ ID NO: 61992 - DNA, 1110 bp, Acinetobacter baumannii
atgagccaatggcaagcagatcaaccatataacgccttaccacatttgccaccagcccaagatgtagaggataagacagtcttaaaattatgtattgaggctagatcagcgttagccgaattaaagcaggctggtgagttgataccaaatcaaacgattctaataaatattattccgctattagaagccaaagacagctcagaaattgaaaatattgtcacaaccacagacaaactatttcagcatgcacagggcaatgatgaacatgcggatcatgcaactaaagaagctttaaggtatagaactgcattgtataaaggggttcaatcaattaaagaaagaccgctatgcacaggcacaactattgagatatgccaaactattaaaggtgtggatttaggtattagagcaaccacaggtacagcattaaagaatagttatacaggagaaattatttatacccctccagcaggtgaagatgtcattcggacattactatcagattgggaaaaatttattcattaccatgaagaactagaccccttagttaaaatggctatagctcattatcaattcgaggcaatccacccttttattgatggaaatggtcgtacaggaagaattttaaatattctctaccttatggattgcaacttattaagcttacctattctttatctaagtcgattcattattcaaaataaatcacaatattacgatttgctactcaatgtgaccaaagagggtgattggcgctcttgggtaatgtttatgctgcaagcagtaaagaacactagtgaatggactatatctaaaattacagccattaaaagcctacatgagcatacaattgaatatataagaactcatgcagataaaatttatactcgtgagctagttgatactatttttgagcaaccatacagtcgtatatccaacttggttgaaaaaaatatagctaagcgtcaagcagcatcaacatacttaaaaaaacttgtagaaattggggtgttacatgaactgcaactaggcaaagaaaagctttttattcaccctaagctattacgactgttgcaagatgatagtaaccaattcataccatacgaataa

SEQ ID NO: 61993 - DNA, 963 bp, Acinetobacter baumannii
atgagcttagacgctactgtgtgggcttggaaaaagaaattcactcaggaaaagggtggttcctctccagctctaaaaaaattagtgctgctttcaatggctgatcgtgcggatgagcaacactgctgttatccgagttctacacgcttggctgaagattgtcagattaataaaaaaaccctttttaagattctggatgaactcagttctgagggtttaattttcgatactggtgaaagaaaaggtcgaacaaagcaggtaattgtctatcgtttaattggtgtgcaaggtcgagaaaatacagtaccaacattggaacagttaggctcggaaagccttgatacacaaggggaaggttctcaaacagtaccaacattggaacagtaccaacatttccagcaaacagtaccaacaattccaccaaacagtcccaacgttggtacacggaatctatcaagtaatctttcagatgaatctaaaaataaaaaaacttggctttgttttaaaaaacttcgtgaagaaattcttttggcaactgatcaggaaacttacgagcagatcaaaaacgcgacttggttcgatcgagagttacgagcatttgaactctacaacgccgagaagaatctttgcgatgaactcatgaattaccactttgcagattggttaatcaacgcatgtggaaaataccaagcacgtgaacaatctaaaaaaccaaattctggaacgcaggtccgagtcccgcagggagaatcaaatactcttagttcaaaacagatttactcatttgctcaaaaactttctgtacatcctgagtttgcaagcaaatacgctgaaggtaacgagagctatgaacaacttgctgcacgtatcgcagtaaaactcgcagatcctgagcaacaacaaaaatggatgccttacctcattcaagttggatttcaacaaggcaaaggagcagcagcatga

SEQ ID NO: 61994 - DNA, 327 bp, Acinetobacter baumannii
atgcaaactaatttagcaaaccaaacagctaaaggcaatctgcaagagcagaaacgtcagcaaagttaccagtcgtggcatgaaccggctttaaaaactttgtcggatttgttggaagggcgaaaagcgaacttaaaaaagcgtaaccatgacgtaaatcaagcggcagttacacgtgatgagtttatgcaaggtctggtcgatgagcatggtgtgcatggcataaatctctaccatgcgggcgtaattatatcgagtctttatagagctaagcggatccgctatttgggctctttcattcaagtgaatgaagagggggataaatga

SEQ ID NO: 61995 - DNA, 399 bp, Acinetobacter baumannii; identical to SEQ ID NO: 58646

SEQ ID NO: 61996 - DNA, 174 bp, Acinetobacter baumannii
atgagtgagtttaacgatattgacatgccaactttacccaagccaattggaagcctgcaagagttacatccagagtttgcaaaggttcttaatgagaattttctagagttgataagtgacgactcacacacagaaaaccacatttcgccgaattgcaaagtggaggatgtttga

SEQ ID NO: 61997 - DNA, 294 bp, Acinetobacter baumannii
atgagtgtatcagtttggtattgcgtgccagaaagttgcaataaatcaagatatgaattgccactaaatagccatttccctcttgtaatgcattctcttgaattggttagtgaagtgtgcgctgaagactattgggataaccatgatggttctgaagcaagatggcctttagagtttcagatatttgagaccgaagaatctgagaatcctatagctatatttgaagtagacatagaagcgattccaacatttagttcaaatgctaaagaagttaaagcggaaagtaaggagtaa

SEQ ID NO: 61998 - DNA, 768 bp, Acinetobacter baumannii
atggctcagtattcatttggtgtgggtaatctatttgctacaccattatctgatgcatacggcgcacagattgccaaacccacatctttcgagcttggaattttacaagataactcggtggattttagctttgatgtaaaagagctttatggtcaaggacagtttcctgtagacattgcacgaggcaaaggcaagattacaggtaaagcaaaagttgctcgtttaaacggtcttctagttaatagcattttatttggtcaagccatgtctaccggttcagctacagcagtggcacgctcactgactgctacgccagtacctgtaggtggaaccgttacaccaaccccgccaaatgctggggtttttgtggcggatctaggggtaactaatgcaaaggccgttcctttgattcgtgttgagtctacaccagcagcagggcaatactcagttgatgagtctacaggtgcatatacatttgctacagctgatgccaatttgccagtgtttattaattatcgatactccacaacaatggccggtgcaaagtcttcaacagttatgaatttgccaatgggtgaggcaccgtcattctcgttagatcttcataaggaatatcacgggaaaatcttaacgctgcacctcttcaaatgtgtcagtacaaaaatgtctcttgctggtaagcaagacgattacgatacgccagaatttgagtttcaggcgtttgctgatgatttaggtcgtgtgtttaattggtcaatttcggagtaa

SEQ ID NO: 61999 - DNA, 570 bp, Acinetobacter baumannii
atgaataaactattcattcttttaactggactattgttttctgtttcctactcacatgctagtactgagttgcaagataaacaaaaaatattggagatgatgaaacaatattcaggcttagtttcttgtatgtcatccttttcaaatgatcctgaaaataaagaccctaccacaattaaagatattcaaacagtcgaatacgatcctaaacaatccacctttgtattttatgttttatggtctggtgatcatgggtgtggtggtggatcaggtagtatgtcaagttttgtgactgaagttgccaaatatggcgattggaagccatacacaatacaaactgattatgcttttggggaaaatataggctttaactatgtttatattgagtcaataagaaaaattaatactaataaatacgaggttgttagttgggattacgcagacgataaatatggcggcgaggatggtggaagcaattttcctgcaaataagtttaaatatactttagagcgcgaacggtttgaaccttggaaaattacccatcaagcactattagaacaaagaaaatag

SEQ ID NO: 62000 - DNA, 654 bp, Acinetobacter baumannii
gtgtctaacgttttatttccagagctacccggtcttgaatgggatacatcaattaccccgatgttcaataccaagatcatgacttctattaatggccgagagctccgtgcgagctttcaggccgcacctaaatatgaaatctcgttgtcttacgcattcttgcgcgaaaataaggggagaaaggaattgcagcaacttcaaggattttatttagagcgccgtggggcttttgattcgtttctttacaagatgcctgacgataatcagttcgattgcagatttgttggggacggagctacaacctcattccagttgtacaaggatatgtacacaagccaattgcctctaggtaatacagaggagcagattattagggatgttgaccccaacatgtggaatcaggttccagccaaaacaatgtggaatacaaaccaagaaaaactcatgtggaataacgtatctgctcaagtaacgagtgaaggtaaatacgtattatcggaaccacttgaagagggtattgagattaaggtggctggcactttctactatcggtgtcgctttaaagatgacactcaacagtacgttaacttcatgcataagctttggaaggctggaaaggttgagttagtcggatcactaggaactaagatatga

SEQ ID NO: 62001 - DNA, 1758 bp, Acinetobacter baumannii
atggcagttccagataaaaatgccttaatcgggcctacggtaacagaggcacaatttaaaactaatttgggcgtaattattgattttgtaaaaccaattgaattgcaaagtccttcttactcatccaccgcactattaacagccactagaccagcggaaagccaaagttacgctaaagctttagacacaggaaaggtctggttttggaataaacctgctggttctgcggatgggaattattggcaagttacaaacttaggtgatctagatcaagcgaaggcatttgctaatgccaatccgaattttaaggctagtgctctcactgacgcctttgatttcgatttacagctgacaatggggcaatatgatgtaagtaattctgttttaaacaactcaactcataaaccaccctttgatgtcgggggtattcttattgttgaggggtcaggcaaagattattttactcggcagcgtttttgtacgattgacaaccaagaagcagtacgtacaaaaaaagatgtatggggggcgtgggatgttgtaattaaggctggagatttaaaagcaaagccaatcacagcacctattgatttcaacacttttaagaagcccgatacttatacgattacaactgtaatcctcttacagtgtacaaataggcctccagttaacgcaggtggtgtatttgaggtaaaaggaactggagctgattatctaaccactcacgtttttagatcctatgacaatattgatgtctcacgtgctctcacgaatgtatggtccgcttgggatgtgcatattaagtcttcagacttaaagcctaaagttgttgcttctgcgatcgacttcagtgcctttaatgttccggggccgtactcaataacaaataatgttcttgctacatgtacaaataaaccgccaacgccctttggagggatatttgagaacaaaggaaccggtgcagcttattacacgcacagaacatatatgagctataagggggagttcttttttcaaccccttgaaactacatggggcggatggaaaaaggtagccactactgatattactgatgctctagctcagcaaattgcagctattcaaataccggggactggtttaacaggtaaaaaaattgcagtcttaggcgattccatcacatttggttataacaatacagacaaccgtagttgggcaaatattctagctgaacgctatggcgctgttcttacaaagcacgccttttcaggcgcatggattagcaagggtacaggaacaatatcaattcctaatgttctatctgagtcttttgcaaacttgcctgattctgcaaattttgatctcatcgctattgccgcgggcacaaatgatcgaattaatggcgttgatggaaatcttggcactcctgatgaccgaactaatgaaacattttatggtgcacttcatgtaacgctttctggtctaaaacttaagttccctaatgctcgcatgctatttatatctcaaattccgcgtattgggcttcggtcaaatccaaacaatcctacagatttagataagaagtttaaagcaatcactgatgtatgtgattattattcggttccagtttttgccggtcacaagaactttggctttcatcctgatgataacgcgacctttagaagcacatatatgcaagatggcctccacctaacagatgttggtcaggtttggtatgccaatcgactagagcaaattattttaagtgtagctaaataa

SEQ ID NO: 62002 - DNA, 693 bp, Acinetobacter baumannii
atgaataaaagtgcattttcaataagtatttttgtaataggatttatattattatcccttctttttagtatttttggaattttatatttctactggggatctcttaaagcatcgcaggacgcaatttctacgacagtaagtttatttggtgtgatcggaacattagggtccgccagtattgcagcttatttatttaatgactggagagataatcaaacaggcataaatagatctgagttggctaaaaacacacaaacatctttatataaacttgtaggttatcttgattattatcatgaatttgtaacgactcaaaaaacattatgggtaggtaaaaattacccagatgttagtcagagttttattgatcaagcagaaaaaatacctcaagagtgtgaagtaaaaagaagtatttttcgcaatgaatgtgaagaactctataaacaatttatgattgatttaaggatttatgaaaagactttcgacatcgaactaaatctagatatatctaaagtccgatattacagaggatctattggaggaatgcttagagacttgtcacaatctaaatcggaatttgagttaaataaaatgacaagtcatttaaagaattcagaaaaattatttaaagagaacatagttaatatcgtaactgctgaaatgtcccaatacattaatttaaaagtaaaatag

SEQ ID NO: 62003 - DNA, 132 bp, Acinetobacter baumannii
atggaaggtttagagatcgaaaaatattacgcttatgtagatagaagtagagcaaaccagcatttaccaaagctgaaccagaagatgccaacgcaagcgccatatgttcagcctgccaatggattagtttaa

SEQ ID NO: 62004 - DNA, 666 bp, Acinetobacter baumannii; identical to SEQ ID NO: 51886

SEQ ID NO: 62005 - DNA, 258 bp, Acinetobacter baumannii
atgggtcatcacggtaataaatatgaattattaacctttgaagaaataaaaacaaaaattattgattatataacaaaatacagtgaaaaatttataaacattgagcatcctgataaactatggtcagcggagcgtgaagaatatgataaattaaaatctcttaaaaaaattgatttcaaccatgaagtgtacatgtgtataaaatatggaataagtataaatgactatatagaacataaaaaatcaaatgtgaaataa

SEQ ID NO: 62006 - DNA, 219 bp, Acinetobacter baumannii; identical to SEQ ID NO: 53423

SEQ ID NO: 62007 - DNA, 249 bp, Acinetobacter baumannii; identical to SEQ ID NO: 53422

SEQ ID NO: 62008 - DNA, 516 bp, Acinetobacter baumannii
atgccacaacctgatcaacaactcgaaagaaaatacatcacccacgcagaattgcacgacctattcttcgtaatcagtcaacatataggcttcactattgaagacattgaggattacgaagaagacatctttaacctaatcgagctttggcgagagcaaggttacatcgatatatacatagaagatagctatagacgctacggcagagccaaaagtatggcttctgtacgaaattccgttccatactatctaaatatgtatcatgcccgcgttgttaaaggcgagtacgatcctttacttgttataacttttgaagataccgaccaagtacatcccgatggtcacgaaatgaaagtggcaagtattcgctttatggctattcatgatgatttatttggtgaacaagatccaagagtaaaattcaatgatgctgccatgaagcaaattcgaaagaaaattgatgcctatagaaaacaaggcgatcaatacaatgaagaaaagaaaggctcgcaataa

SEQ ID NO: 62009 - DNA, 174 bp, Acinetobacter baumannii; identical to SEQ ID NO: 53421

SEQ ID NO: 62010 - DNA, 252 bp, Acinetobacter baumannii; identical to SEQ ID NO: 53391

SEQ ID NO: 62011 - DNA, 171 bp, Acinetobacter baumannii; identical to SEQ ID NO: 53392

SEQ ID NO: 62012 - DNA, 231 bp, Acinetobacter baumannii; identical to SEQ ID NO: 53393

SEQ ID NO: 62013 - DNA, 2412 bp, Acinetobacter baumannii; identical to SEQ ID NO: 53394

SEQ ID NO: 62014 - DNA, 1569 bp, Acinetobacter baumannii
atgacccaagtacaactgcaacaattacaaaaacaactttggaatattgccaatactttgcgcggcaccatgggcgccgatgaattccgtgattacatactgggctttattttctttaaatatttatcagaaaaatcggttaattttgctaatgaattgctggatggcgaagaagtcagctttttagaattagatgaaaataatgctgagcatgtgccgtacatcgaagaaattaaaaagaatgccattgccgaagtcggttatgcgctcacacccaaacagctattccataccttagccgagcgtggtcgtcagggcgaattcattctggatgatttaacggcaaccttaaaatcaattgaacaaagcacgttaggcaccgactctgccgatgactttgccaacctgtttgaagatttggatctaaactcgaccaagcttggcaataatgccagtgaccgtaatgcactggtggcgaaagtcctgagtcatttagatgatattgattttgatattagtaataccgaagccgatgtactgggtgatgcttacgagtacctgattggtgaatttgcctcaggcgcgggcaaaaaagcgggggaattctatacgccgcaaacggtatcgaccttactggcgaagattgtcacccaaggcaaagaccgtttacgttcagtctatgacccgacttgtggttcgggttcgttattgctacgggtaaaacgtgaagttaaagatgtcgatatgatttacggtcaggagatgaaccgtaccacctacaacttggcgcgcatgaacatgattctgcatgacgtgcattttgccaagttcgacatcaagcaggaaaatactttaacccgtccgcagcatttagataaaaagtttgatgcggtggtggcgaatccgccattttctgcaaaatggtctgccgatccgttatttttacaagatgaacgctttgctgcgtatggcaaactggcgccaagttctaaagcggatatggcttttgtgcagcacatgctgtaccaactggatgacaatggcaccatggcggtggtgttaccgcatggcgtattgttccgtggttcgagtgagggcgtgattcgtcagtacttgattgagcagttgaatgtggtggatacgattattggtctacccgccaatattttctatggcacctcgattccgacctgtattttggtgttgaagaaaaaccgtgagcatacaggcaacattctgtttattgatgccagcaatgattttgaaaagcagaagaaccaaaacaagttattgcctgagcatttggataagattgttgcggcatttgaacagcgtgaaaatattgaaaaatatgcgcatgtggcgactttgcaagaagtgaaagataacgattacaacctgaatattccgcgttatgtagatacctttgaagcggaagccgagattgatttagatgcgattgcaaaacagcttcaagctttggaacaagacagccaaaaaaccgatgccatcattgcagatttctgcaaagagctaggtattgtttcaccattttcggaggtgaagtaa

SEQ ID NO: 62015 - DNA, 1233 bp, Acinetobacter baumannii; identical to SEQ ID NO: 53395

SEQ ID NO: 62016 - DNA, 663 bp, Acinetobacter baumannii; identical to SEQ ID NO: 53396

SEQ ID NO: 62017 - DNA, 2880 bp, Acinetobacter baumannii
atgacagtacaaagcgaatatcaacttgaaaatgaactgatcggccaactgcaacaattaggttatgcctcagtcacgctcaaggatgaaagtcagctactgtctaacctcaaaacccaagtcgaacgcgccaatggacttgcgcccctgtcagaaacggaatggaaacaggtcatcagttttttgaacacgggcacagtgtttgaacgcgccaagaatctgcgtgatctgttcccagtcaaatttgatgatggaaacagtaaacacctttttttcctgtctgatgacccaagcaaaaatatctatcaggtcaccaatcaaatcaccatcgaccaccgcgactataatggcagaaccagccgttttgatgtcacgctcttggtcaatggtttgcctttggtacagatcgagctgaaaaaacgcggtatggaaatttccgaagctttcaatcaaacgcaacgctatattcgtgaagcctattgggcagggcaagggctgtttggttttattcagctgtttgtcattagtaatggtgccaatacccgttattactccaacggcaccacaggcatcgagtttgcctttccttgggcggatgtccaaaacaaacacatcaatgaaattgtcgactttgccgaagcttttttcaatcagcagcatctgacccaaatgctgactcagtacatggtgctgctagaaaccacgaaaagcctgatggtgctgcgtccctatcagatttatgcagtacagaaaattgttgagcatgtgcaaaactccgatcagaacggctatatctggcacactaccggttcaggcaaaaccctgacttcgtttaaagccagtcagatcatcatgcaaatgcctgatgtggaaaaagttctgtttgtggtcgatcgtaacgacctcgatacgcaaacctcacgcgaatttaatgcttttaaagccgacagcgtcgacagcaccgataacacatcgaccttggtaaaacagctcgatcaacgtcatgacaaactgattgtgaccaccatccaaaagctcaatcgggccatcagcactgaacgttatttagaatcgattgattatcttaaaaataaaaaagtggtctttatttttgatgaatgtcatcgcagtcaatttggtgagacccatcagaacatcaaaaaattcttcagcaatgcacaaatgtttggttttaccggtacgcctatttttgaaaagaatagccaaagcaaagcaggtttaaaactgacaacagattacctgtttaatgaatgtttgcataaatacgtgattgtcgatgctatccgcgaccgtaacgtattgcagttccaaattgattatcggggcaaatacaccgccaaaggcatggcgacgaatgaaagttatgaggaagatgtagaaggcatcgataccaaagaactgtatgacaacccacaacgcctagaaatgattgcccgttacattgtcaatattcacgataccaaaacccgtaatcgtgaatttaccgcaatgttctgtgtcagttcggtcgaaacactgacccaatattacgacctctttgaaaaggtgcaggctgaaaagcaaattgaagatgaagcacaaggtcggatatttaaaccgttgactattgcaaccattttttcctatgcggcaaatgaggctgtaccgactgatgacttaactggcttgattcacgaagaagccgcagatattccaagtcaggtcaattcatccagtcgggataagctggattgctacattgcgaattacaatcgacagtttaaaaccaactacaattctggtgatcaattttatgcgtactaccgcgacattgcacagcgcgtaaaaaacagacagattgatattctaatcgtggtcaatatgttcctcacgggctttgactctaagccgttaaataccttgtatgtcgataaaaacctaaaatatcatggcttgattcaagcattctcacgcaccaaccgtgtctataacgataaaaaaccatttggcaatatcatctgtttccgcaacctaaaacgtgcaacagatgaagcactggcgctattttccaataaagaaacgaccaagattgtacttgttcccagctatgcggaaatcgaacaggattaccaagcagcggtgagcaaattgtttgccttaacgcccaattaccaatcagtcgatgatcttgtcactgaagaacagcaactcgaatttattaaagctttccgtgaagtgatgcgctataacgcgcaattacaaacttttattgaatacgatcaagaccaaacacaactcgataaacagcactttgcgaattttgcctctaagtatgctgacctatgtcgtaccgttagaaagaccaccaagagagacaaagtatcggtactggatgatgtcgattttcaactggatttactgcatagtgatcgcattaatgttggttatatcatcaacctgctacagcttgttgttgatacagactcagaggacaagcgtaagaagtaccaagcgcaaatttacgatttaatcagtagcgatattagcttgcacgataagcaagacctcattcaaaaattcattgaagaaaacatgccgaagatgatcaacggccaaagcgtccaaacagctttttctgaattctgggatgctgaaaaagaacaggcctatcagcatctttgtaaagaagaaaacctgaaaccagaagccatgaagcaggttctggagcattatgagttcaccaaacgcctaccacgtaaagaagagttgaaggacttaccaaactataaggttaagctgtttgagcgggagaacgtgtttagcaatttgctggtcaagacacgccagttgattgaaagattttatactggttttaattaa

SEQ ID NO: 62018 - DNA, 135 bp, Acinetobacter baumannii; identical to SEQ ID NO: 53397

SEQ ID NO: 62019 - DNA, 294 bp, Acinetobacter baumannii; identical to SEQ ID NO: 53398

SEQ ID NO: 62020 - DNA, 864 bp, Acinetobacter baumannii
atgaacgcaaaagctactaatcaagtaaaagatgatgaattacttatatctaatctttttgatcaacttgatattgatgaatcagaactcgacatggctttagagccaacagccgaatctgctgctgttcaagatgaaaagctagtcgatgaagagttgcatgatgttgagttattggacaacttaaataatggcgcgtttgacgatctgattaacgaggaagaacttgatttaaatcttgaagcagaagaaacaaaacagccaattgttccagaaaagcaaaatagcgcacctcagaaagtgacaacagaaaataaagctgcaaaagagaaacctaaatctacacagcaacgtgtgacacactacaactccaagaagtcagaagttctcttagaccgtctaggcggtagtgcagacatgattcttcttgaagcgagtgatattgatttaccaaatgacaagcttaaagaaaaacaagaaaacctgttacgtatcctgaacaaccaaccgacggtaattggtacacgaggtaatgttgagacagttcaaaagaaagtagctgagaaggtcattatcttgttcacctatttcaagaacggtggaaacttaaataaggtcatgagaatcgcatttgagacgattattacagatggttatattacaactggtaaaggtggcaatctatataacaacctgttgaatgcacattactcagaaggtacagcgcgagcgcaggcgggacagatgctccaaatgttccccctattgaaaattgcaacaaaagaaggaaataagctaattccaaatgagcagtcgctaattttagcgaagatgaaagctgatctctttccaagtgaaaagtaa

SEQ ID NO: 62021 - DNA, 132 bp, Acinetobacter baumannii
atggcggttacctatagtgaggacaatatttcaaaatgtattcatgagcgaattacggttgagaacctagaagaagaacaactaccttccatcaccttcaaaccgaaaaccaactttgattcagtgtggtaa

SEQ ID NO: 62022 - DNA, 249 bp, Acinetobacter baumannii
atgattattgctgaaagtatttttagccgtattggcaatctgcgcaaagttatgtcagaccctcaaatcgcccgccttctatcaggaaccaaaggtgttgagagtgagcattacaaagacttgattatcaaagtcgatgacatcgtagccaaatgcccgctacctatcaaacagacggccaaggcgacaacgcaatatgccaaatgcattacttcaagggagatagcgacgtttacatcgttgaattag

SEQ ID NO: 62023 - DNA, 777 bp, Acinetobacter baumannii
atgaaaattttattgatgaatgactcaagtgtgacaaccgttagaaaaacacatgaggctttaaaaggtagaaaactcattgcaagcggcatgttttcaggtgtctttgaaagcggaaatcccaataccgttcttaaattgactgcctgtccagccacttattacatgcttaacgacgaagcaattaagattgatgacattcactcacctaaattaatcaaaaactatggccaagttggtgaatacctggttggcaagaatgtgaaagaaacaaacctcacaaaaccaaataaaaaattagttccattatttctgtttgaagtagagcgccttgagaagatttcaaaaggtcctaatcgcagccttgccttaaaccttacatatgaattgcgccgccgtcttgcagggttagagcatggtataagtgtacgaggcgccacagctaaaattctcatcgaaatggcaaatcagcttcctcaactgaaggacgttcctaccctcttaccttacttcgaaaaactaaataatttcgtaggcagttacggtgatgcgttttatgacatccatgcggcaaatctaatgcaacgtagtgatggaaccattgtcttttcagatccagttggctcaattgatatttacacttccgggcatggcgaatttaaaccgatcgttagcctttcggacgtgaagtggaccgacgtcaaagaccgacaccgtaaagagttccaagcgcttattaataaaatcaaacccaatcagcaagcattgaatgcctaa

SEQ ID NO: 62024 - DNA, 777 bp, Acinetobacter baumannii; identical to SEQ ID NO: 52165

SEQ ID NO: 62025 - DNA, 531 bp, Acinetobacter baumannii
atgaaaagccttacagttctcgagctttctaagctttacaatatcaatagacaaacgatttacaacaacataaagaaaggaattttaagtaaaaattcccagaataagatcgatctagccgaggctatccgtgttttcggggaacctgtcaaaaaagaggatgtaaaagaacctgtaaaaatagacagtccaaattcggcagaagttttactacttagacagcagatagacatgctgaaaaaccagcttgatgatgccaaagatcgggaatctttctatcagaaccaaattgaaacgatgcaacgcctattagaagccccaaaacctaatatgactacgtttaccgatcaagaattagtgcaacccagcatagccaaaccagatcccgaacctgacacagcagaagctaaacatgacggattgactactccagagcggagggaaaataagcggattccagtgccagagcacattgaaccagagcctgagaaaagaggcttttggagccgtttttttagaccctatgattaa

SEQ ID NO: 62026 - DNA, 714 bp, Acinetobacter baumannii
ttggccggtagaaaaacatttgccttaacacaacaagaaatcatcgatttggataaacatattcgagcgctgccgtttaaaagacgaatgcaagatgcttttttagcaatgatttctgaacgagaatcaatgaaacaactgaatgaagaagatttaaaacttattcaacgatgtcgttatgagcgcaatacttataataaacgtatagttcaattacaactgatccaaaaaaccgagccacagaaattaaaaaaattagaattgaatattctagaattaagtaaaaaaacagatattgatgcttactttgcaatgcatgatgcattaaatgaagttttaaaaattaaaagaaatcagacttctgaaaagaatattacagcgaaggtcgaacgagttttaaaccctgagaaatataaccaggccccccttagtaaatctttaagaaaacagcaagaccacattaaatattttatcggatcactatatttaaacttattggaacaaagcggtttagagcgatcaaattcaaaccaagatttagatcgaatgctcgatttatttaagcaagcacaatccggagcagaaaagaacaatgcatttagcctggatcaaaatagaaaaacagatattttatcggctaaatcgctatatgaaatggagaaattgattaagcaagccaaagaagatccaaggaatcctttcaataaagcttag

SEQ ID NO: 62027 - DNA, 885 bp, Acinetobacter baumannii
atgttttatttaaatctaaagcataatattaaaaaagagcagagttctctgaatgcattccattatttaactcggacggcacattttgaaaatcaaaaagacaatgaaaaattagagtttatacggtatggaaatatgcccaaatgggcagaaaataaaccaaaacttttttggaaaagtgctgatcaatttgaaatttcccggggaagaacaagctctactttaaccattgctttaccaaaagagttaatactagaacaacgagcagaattggttcagaagttaatagatcagtttgccggacaatatcaatttccttataccgcggtcattcataatcatcccagtgaaattactggagaggatcaaccacatttacatttgatgtattcagaaagaacaatttcagatgatattgaacgaccaccagagcagttttttaaacagtatcgtcctaaaaatccaactcaaggtggtgcgcaaaagttaacagctgatgcattaggttttgggcgaaatcaggtcaaagtattccgtgaaaaaactcaagaattaatgaatttgtttttagaaaaatatgcaccaactaaaaaagtaatggtctatggtatagaaattgaagtgaaaaatcaggtcagttgcctatctaatgacgatttcaatcaaaaattcgggaccaaattacaggatgtaccacaaatccctcgatggaaactttatagcgctgatccaattattcagcttgatgttgaagctcaaaaaaacacaattaaaaaaattagaaatcagaacaatgctgaactttatggcaaggaatatgatttagaaatatctagacgccatgtgcttactcagaaaaaagatccaggctttagcttagattga

SEQ ID NO: 62028 - DNA, 318 bp, Acinetobacter baumannii
atgctaggtaaacatcatcattttttaaaaaaattttcgatcagtgatgctgctatagcgtataaaaaacctcgctcgactatacttaaatatataagaagcggagattttgaacttgactacaataacttgattgaatatagccagttagttaaaaaattgggtgaaattacttcccctatacgggacgaaagagatgaacaaatcaaaaaactaaaagatgaaattatgcatttaaaaaagcaacttaatttttttaaatatacttcaatctcaaacaaaaatagattattaatttctcataaagaccccatttaa

SEQ ID NO: 62029 - DNA, 288 bp, Acinetobacter baumannii; identical to SEQ ID NO: 55717

SEQ ID NO: 62030 - DNA, 312 bp, Acinetobacter baumannii; identical to SEQ ID NO: 55718

SEQ ID NO: 62031 - DNA, 216 bp, Acinetobacter baumannii; identical to SEQ ID NO: 47771

SEQ ID NO: 62032 - DNA, 228 bp, Acinetobacter baumannii; identical to SEQ ID NO: 47770

SEQ ID NO: 62033 - DNA, 198 bp, Acinetobacter baumannii; identical to SEQ ID NO: 47769

SEQ ID NO: 62034 - DNA, 321 bp, Acinetobacter baumannii; identical to SEQ ID NO: 47768

SEQ ID NO: 62035 - DNA, 273 bp, Acinetobacter baumannii
atggataacaacttatttgatgacctggttgcttcaatcaaagaagctggtgccatcaagcgtaaggagataaaggcaagtcgagtcacagagcttgaattaccggatattaaagaagtacgtgagaaaacaggcttaacccaggctgaatttgctgcacgtttgcatatcagcgcgagaaccctgcaaaactgggaacaaggccgtcgctatccgactggtcctgcagcgactttaattcgtattttagatgctcatccaactttaatttaa

SEQ ID NO: 62036 - DNA, 1107 bp, Acinetobacter baumannii
atgaagaatattactgaaaaatcactttttgatgtttttactcagcatcaagcttatctttaccgagcatcatcgcgatcggtaaatgaactttataagttttttaatagtgaaacgatggatatgcttgatcggttaagcaatttaatgaaagagctgaatgaaactgagaggtttgctcttgctggtggagagtatacaactcagcatctaaaaaacatccaacttgttatttcgaactggtttaattcaattagcacagttttaccggaaatttttactcactcggcaattgctttggctatatatgagtcaaactatatggccaaactatttggtaaggttattaaagatttagagggagagcagctttatcagtcaataaaacgagtgcctttggctggtggtgccttgattgatgaatccttagctcaaattgttgaaaatgcccttcaacgcattgaatatgctattcgggatggcatgaataccggaatgacgcctcagcaaatcatcaaacgtattacgggtacaaaacgccttaagtacgaagatggattgctcaacagtaccagaatcgatattgaaagaattattagaacgctacgtagtcatatatcaaatcaggtctatttatataatttcaaaaattttaattttgagtatgtaaggttcgtgagcgttttagatggcaggacttctaaaatctgtgcagccattgacggttctatttggaaattgaatgacccggcgaaaagagtgccacctttgcatccgaactgccgaagtattctggtccctgtaaataaggatggaaggcttattgggaaccgatctttcgttatggatgagaggaaagtacgagatattcctaaagatgagcggactcagttaatggggcaaatagacgcaaatatttccttcaaagaattttttaatctgactgataattttttccaaaaagaatggttaggccctaaacgttataagttatataaagaagggcaatttgattttgataaattttttgatccaaagggccggctctatactttggatgaattgagagaattagatgaacgaacttttaaaatacttgggttatag

SEQ ID NO: 62037 - DNA, 1005 bp, Acinetobacter baumannii
gtgtataagagacaggttatagctgtagttgccatcggcttttgggtatggggatataatcataaaaaacaattagataataatgtattaactttatatggaaatgtggatatccgccaagtttcacttgcatttgaacaatctggccgtattcagaaacttttagttcaagagggcgataaagttcaagcaggtcaagtactggcgacccttaataccaatgcattacaaattcaggcaaagcaagctcaagcacaacttaaagctcaacaagaggcaattgttaaacaagaggttggagctcgccctgaagaaatcacccaagcaaaagctcaacttgcgtctgcccaagctgagcttgataaaaccaataaaaacttgcaacgcttacaaattttggtaagcagtacggatggtcgagcaattagccaacaagagctggattatgccaaaagcaatcaacatagtgctgatgcagcggtccgtgaaagacaagccaatttagaattattaattaaaggtgcacgaaaagaagatcgtgaagcgaccagagcacagtatgaagtgactaaggctaatttagatttaattaactataatcttactcaagcagaactaaggtctcctgtaaatgcagtggtacgagctcggttgcaagaagttggcgacatgacaactgctcaaaaggccgtttatacattagccttgaccaatccaaaatggattcgtgtgtatgtaaatgaacaagatttaagttcaattaaaatggggagcaaggctcaaatcattcgtgatgcttatccgaatcagcctatgaatggaaaaattggctatatatcttcagtggctgagttcacacctaaaacagtacagacagaagagattagaacaacacttgtttacgaagttcgggtgtatgtacatgatccgaatgatcaattaaaaatgggtcaacctgtgacagtaaaagtcccacttgctttaagtgagaaagcccatgattga

SEQ ID NO: 62038 - DNA, 1758 bp, Acinetobacter baumannii
atgattgatagtaaagcagtggttcaagcccataatttattcatgacttttaaagccgaaaataaaaattcagcagatattagtgcaattgttgatttgaatatgcaaatcaaaaaaggagaacttacagctttagtcggtccagatggtgctggtaaaacaactttattaaggttaattgcaggattatataaagcgagttcaggttctcttcatgtgcttgggtttgatattgaaaaacatcctcaagttgtccaagaccgtattagttatatgccacaacgttttggactctatgaagacttaagtgtacaagagaatctaaatttatatgccgacttacacggcgttccaaaaaatgtacgtaaccaaagatttaaacgtttattggagataacggatcttactcagtttactcaacgtctagcagggcaactttctggtggaatgaagcaaaagctaggattggcatgtactctagttcgttccccagagttactgttgctcgatgaacctagtgttggagtagaccctttatcacgacgggatttatggatcattattgaacaacttgttcaggaagaaaatttaagtgtaattataagtaccgcttatatggatgaagcagaaaagtgcgcttacgtgtatatcatgcacgaaggcaaaattttaagacaaggttcacctgagcaattaaaagcgttagtacatgagcaaacatggaaaataaaaccttcagagcagattaagactcggattgtacaagcccagttacttggaaattctggagagattattgatgcagtgccaagaggagagcaagtaaactttattagtcgccaaaaagaactatcaacagatattttacctctggggctagtggcaaataggcgaccacctgaactcgaagatgcttttatgatgttgttacagcaaaatcaaaaacaacaaatctctatttctcagcaggcttttcgatcagaacaaaacaataattcgcaatccgaccaagcggtcattgtagttaaagatttagtcagaacttttggagattttactgctgttgccaatacgtcatttactgtacagcgtggagagatctttgggttactggggccaaatggagctggtaaaaccacgacatttcgcatgttatgtgggttactaccggcaagtagcggttacctagaagttgcaggtaaaaacttacggacgtcccgtgctgaagcaagagctaaagtaggctacgtctctcaaaaatttgcactgtatagcaatttaactgtgttggaaaacttaaagttttttggtggagcctatggtttatcgggcaaaaaactagatcaacaaattgataaagctttacagcaatatgatttaaagccgcaaattaaaagtggtgatttacctggtggttataaacagcgcttatctatggcggctgcattattacatgaaccagaaattttatttttagacgaacctacgagtggaatagacccgcttgcacggcgttcattttggtacagcattggtaaactcgcaaatcaaggcattaccatcattattaccacccattttatggaggaagcagaatattgtgaccgcattgccatacaagatgcaggaaagttattagccctaggttctcctcaacaggtccgcgaattggcaagtaaagataaacatattgttgatatgaatgaggcttttattgcaattgtggaacaagcacgtgcattaaggcatgcgggttag

SEQ ID NO: 62039 - DNA, 447 bp, Acinetobacter baumannii; identical to SEQ ID NO: 60969

SEQ ID NO: 62040 - DNA, 252 bp, Acinetobacter baumannii; identical to SEQ ID NO: 53391

SEQ ID NO: 62041 - DNA, 171 bp, Acinetobacter baumannii; identical to SEQ ID NO: 53392

SEQ ID NO: 62042 - DNA, 231 bp, Acinetobacter baumannii; identical to SEQ ID NO: 53393

SEQ ID NO: 62043 - DNA, 195 bp, Acinetobacter baumannii
atgaactcattcgctttcaagaacgcccctactcaaaattccgttcaggaacatactccagtcaaagacttggctgcattcaaaaaacgccagcacaagctcaaacgtcaaaaactcatcaaaaacatatttgatgctgcaatcttcctaagtattgccggctttaccttctcaactttgttttggggagcctaa

SEQ ID NO: 62044 - DNA, 894 bp, Acinetobacter baumannii
atgaacataactgactttcaaaaaaaaatgatatggggtgtaggagttctatctattgtttgtttatggatagcttttccatttatttttaaacttttaattgaagcttataaatttccaaaggacttcacggattttggaccttttggcgatatttatggaagtttaaatacgcttatctcatccattgctttatgtgcagttgcttattcgacttatttgcaaattacttctttaaatgaaacaagagtgactaataaggagcaattgaagttagctgaaaaatcacatcaagaacaattaaacgaatctaggaatgctatttttgctaatcagttctattcattgcttaattataaaagagaaaaatttaatagtattgttctagagtgtaggaataatgaatatcaaaaagaaataaaaaaggctagcggtttaacagttatgcaaattctaactacagattttgttgctagattaagtagtaacccactattttttgaaaatcttagcgaatccgaaatacgtgaccatttttttgaggtaggacgtcatttatttacggattcaatcagtcctgttgtctcttatttttttatctataaaaatttgattaatttaattaatgaatcagaaatttctgcaaaagataaggctcatttcttggatgtcctttgtaattctatgttccaagaagaacaaatggttctattttggattgcacctgtcttccctgatataaaaagatttattgagaatagttatatatttaatcaaatttggtatgacgagagtttaaagaattatggtttaagatttcataaaatcaaaactttccgtattagtggttgggtagaattatttaaaaaaaatgagagtgaaaacccgacctaa

SEQ ID NO: 62045 - DNA, 405 bp, Acinetobacter baumannii
atgattaataccgattatgtgcccgaatggtatatcttgccattccaacatgtgcagtacacgcttgctcgaaatcaactacacatggatttgttatttgaagatatggataaagccgatcaatttttggatatgggagcggatgcacaagttagtactttttctgatggcgcatatgcaatcgtccaaattggtgatacagcgaataaagacctacttcaagtttatggattgcttttacatgaggcttttcatgtctggcaaattgtaaaacggcgaatgggtgagcgcgagccgagtgtagagtttgaagcgtattcaattcaagcgatcgctcaagacctatttgaaatgttcgaagctagtgaggtaaatcatgggatggaaggggaaaaagccgactag

SEQ ID NO: 62046 - DNA, 837 bp, Acinetobacter baumannii
atgaataaatcatgggtattcagaactaaaaaaggaaagttaggcttagtaaaacaaacaaataatatttttacagtctatgtagaagatggtctatttcctaaaactacagaatgggattggaatgagtgggtgaagcattatgcgcaaggcaatacagaaaatctgactattgaagccgtttctcattacttaaaatataaaaatttctttgaagaaatagttgagttacttgaaatacaaaactctttggatgagctgtttaactatattgaaccatcaacaattaatttctcctcatttggtcacaaaattagagaactattaattttatcgtgtacagaagtagaatatttactgctaaaaatgttagttgataatggttacgcttcaaagtcaatgtacaaaacttgtgactatgtaaaatgcaaagatattctgaagttaagtagcttcgaagtcgaattaacccaatatcctaatataggaaatttcaaaccatttgcagattgggataagtccaatcctacaaaatcaattccttggtatgatgcttataatgctgttaaacataaccgaggtgacaatatagagaaagctaacatgaagcatttacttgattcagtagctgctattcatatcctattggaaagccaatatggcaataaaatatttactaaatggcaaagccttacagaggatagaagcatgttttttacaactaaaactccaaattgggatttaaaagatattacaatccctgaattagaaagaggatttaacataaaaatgaattggcattcttctaaaaaatattttgatgattatcctttataa

SEQ ID NO: 62047 - DNA, 180 bp, Acinetobacter baumannii; identical to SEQ ID NO: 56990

SEQ ID NO: 62048 - DNA, 354 bp, Acinetobacter baumannii
atgaacagtcaaagtataatatctgatgggagagaaaaagatacatattttgttacacccaatgatattataaataccttacctacagataaaaattattgtttatttctggatattgatggaacattagctccatttcaaattcatcctgagcatagttttattccaaataccaccttagaagttataaaaaaaattattgaattaaatatacccgtgattgctgtaacaggacgtgatgttgaaacagcaagtaagctacttcagtctattgaattacctatagcgggcttacatggtttagatatttattttgattctgatacttatattctgtctcttatacacatctga

SEQ ID NO: 62049 - DNA, 570 bp, Acinetobacter baumannii
atgaaaaaaattattttattagttgccgcagtcgctttttctgcctttgttcatgcctcatctgaattagaagataaacaaaatgctcttaatatggtaaagcaatattctgggcttgtttcttgtatgagttcttttgaaaaagatccggaaaatggacgacccactactattaaagatgtaacaacagttaattacgataaaaaaagtaatgaatatgtattttttgttttatgggtaggggatatggggtgttccggtggatcagggaccatgtctagctttgtaactgaagttgccaaacatggaggtgactggatgccttatactattcaaactgatttcgcttttggtcaagatgttggtatcaattatggatacattgaatctatcaaaaaaattactgctaataaatttgaagttataagttgggatcacgcagatagtaagtatggtggtgtggatggcgggagtaactttcctgcaaataagtttaaatatacgctagagcgagagcggtttgagccttggaaagttactcaccaagcactactagagcaaagaaagtag

SEQ ID NO: 62050 - DNA, 522 bp, Acinetobacter baumannii
atgaagaaaatattagttgctggtttaatcgctctgggtttagtggggtgtgcaacaccaataacatctacacagcaggcaatgcctgaggtatcgcaggtaatagaaattccaaataaatcgaaagatcagatttttgaagattcaaagatatggattgctcaatcattcaaatccgcaaacaatgtcatccaatatgcagacaaaagtactggttcaattattgggaaaggaaatattcagtatccttgtgatggttttatagattgtggcgcttttggcaacgataaagttaactttacgattaaaatcgataccaaagataataaggcaagagtaacaattaatgatgttactagaacaaatttgacctatgtacaaggtggttataacgtgaatatgggtaaagaagttccaatcaatattattcagcaccagcaaaaaattgctgtaaaacttaatagtgtgatcgatcaatacaagacagcaattacatcaactcagtccaatgcaaattggtaa

SEQ ID NO: 62051 - DNA, 297 bp, Acinetobacter baumannii
atggctgattatttagaacaaatagatgggattgttcgcaatcaaataaaagaagcactaaagaattttgaaccacaattatctatcttagaaagcaaagatgatcttttagcattcgcgtacaacaatgattatgatgcatgtgttggctacaagaaattatcagagttaattgtagaagaactaggtgttgtggatgatcacattgaaggcattaataacttcgaaagcttgtggttaaaattgaaagatgaggttgagcaagcaatagctgatgctaagaaaaacctagagtga

SEQ ID NO: 62052 - DNA, 813 bp, Acinetobacter baumannii
atgagtaatataattgcaccgaattatacacaggtgcctaatgttgttgttgatgagcttgcatctcagctaagcgattctgctttcaaattgtatgtggttcttatccgcaaaactaaaggatgggatcaatcacgtgatgctatttcaattagtcagtttgaaaaaattactggcaaaagccgtccaacggttgtgaaagcaattgaagagttggtgaaattgcgtttagttcgcaaaactggatgcacaaaatttggcaatgaatatgaattaaatttgagtttttcaattgatggaatactactaaatttcccaagtaaaaaatctttactagttaaaaaatttaaccaaactagtaaaaaatctttactgctactagttaaaaaatttaacacacaaaagaaactatcaaaagaaactatcaaaagaatagattcgggtagcaaaaaagactctaaaaaattctcagaaaattttgagaagttctggtctacatatccatcatgtaaacgaaaatcagacaagtctggcactgccaaaacttttgaaaagtacgaaaaggcatttgaacttgacacagtgatttcaattttagaactgcaaaaaattgatgaacaatggacaaaacaagatggtgaatttattccatcgcctacttcatggttaaacaaaaagcattgggaaaatgattattggatttcaaagatccaagctcaaccagcaacacaagtaaacaatggtccgattattgagcaacaacctactcaattcaaaggggtaagaagacagttcaaaggggttaatgcatga

SEQ ID NO: 62053 - DNA, 441 bp, Acinetobacter baumannii
atgaaccaaatcacaaatcttagtcaacaaaaacctaatcttaacgattttcggaatcttgcttttgaggtttcttgtcatctagatcaattggcggcttttatgctccaagcatcgagtattgaagaatatgaagatgaaattaaagccaagtacatggcccaagcggtttccaaaaccagcttaatacttttccaaaaaactttatcggttcttgaagaaatggaatctgtatttaaaagccaacaattagttgagtttagaaacaaccttgtttgtgttgaaggtgctgttttggcaatttctgaaaccgatctcacttcaaaacatcagtgcaactacttttatggtgtattcaacgtcataaaagagcttgaaaaagatattaatgacattgacctagaagcagaagaggctggtaaggagaagtcaaatgggtaa

SEQ ID NO: 62054 - DNA, 1131 bp, Acinetobacter baumannii
atgccaaaagtacacttgatggtacgttttgtacaagtagttactgtactatttgtactattaggctgtttcgtgatttttttatattcgccgttttattcaaaacttattgtagctggacttaactattttgttccggtagatgttaatgaagtggctgcggaaagccagcgaaaagcagcattaagtgaacatgacaacttagaaccggggtcaaatttatggattgctcgtcaggcttatttgaagttaacagaagatgctttacgtgaaaataagactgcagatttgggttacatacaagaaaactataaagctttgcagcaaattattcttttagaagaaaaagaacaagaactacaggaagagaaagaaacgacagctgtgagtgttcctttggttgcgaaaaactctgaaattgatgcggccgatgaagcaagtagccctatcgatgcagcactttctattaatagttctgaaaataaagcccttacagagcaatatacggagtttttagcaagaaaacctgtagtgccagagcatcaaaaagcggcgagtgagcctgagcagaaagttgaatatgttcgtaaaaaccctctgcctgctcaacctaaaaagttatcagaaccttatgcgattgtagtattgggcggtggtttaactttagataaaaatggcaaagatattgtagttaacagctatacgcggttaagactagaaaaaaccttagaagttgaaaagaaaaaccatctacctatcgtactaagtggagttgaagctccttatatgcaagcatggttgaaagcacgtggagtagatgcaaaattattagaaaagcgcagtatgaatacctgtgagaatactcgctttagttcattgttacttcaaaagaaaggtggtgcgcctacagttatgttggtcacagatgaatatcatatgccacgtacgcgccgtttatttgctttaaatgggatagaaactattcctgttactgctccaatgccaaccccgcttacacgttggcaaccgagtacacaaaactacgatcatagtcgtcgtgcaaattatgaattacttgcgacaattcgtgacatgttatttggttcaagtgattgtcgagaggtgccttaa

SEQ ID NO: 62055 - DNA, 729 bp, Acinetobacter baumannii
atgaaaacaatcgggttactcggcggcatgagctgggagtctacagcactttactatcaacaaattaatagaatggttcagaacaagttagggaaactacattcagccaaaatcattctaaatagtgtcgattttgaagaaatagcagcattacaatcgaaaggtttatggcaagaagctggagcctacttagctgagcaagcacaaaatttagaaaaagcaggggcagactgtattttagtctgtactaataccatgcataaggtagcacctcaaattgaagatgccattacggttccatttatacatattgctgatgccacagcaaaagaaattttaagtcaaaatatccgaaaagttgcactgttgggaaccgctttcaccatggagcaagacttttataaagccagattacaagatcttggaattgaggtgattattccaaatgatgcaaatcggaaaatagtacatagcattatctatgacgagctttgtttaggtgtgatcaaccccgattcgcaacataaatacacgaccattgttgaagagttgattgggcagggtgccgagggcattattttggggtgtaccgaaatttgtatgttgattggtgatatcaaattttctgtgcctctatttgataccaccaccattcatgcgaaagaagctgtaaattttgcattagagcaaaaaacggcagcccgttctattgctgctggttcggtataa

SEQ ID NO: 62056 - DNA, 393 bp, Acinetobacter baumannii
atgtttcatcattttcgaatttcatcatttaaatccataaaaaacctagaaatttcagttggccatgtaaatgtaattattggtgaaaatggtgctggtaaaagcaattttttagaagctttggcagtatttagtgctggcctatccaataaattagataatgaatttttaactgctagaggaattcgagtagttagcacagaaactatgttttcaattttctcaaatcaaccatcaactagctcatctattttcgcttttgatccattaggtggtgtagctgttatgttggattatgataaagaaagtccatatccaactttaaatcataatataggctatgctacgactgatattgaaccattgtttgaattttggatgctcagcaaataa

SEQ ID NO: 62057 - DNA, 885 bp, Acinetobacter baumannii; identical to SEQ ID NO: 45944

SEQ ID NO: 62058 - DNA, 1419 bp, Acinetobacter baumannii; identical to SEQ ID NO: 45943

SEQ ID NO: 62059 - DNA, 1509 bp, Acinetobacter baumannii; identical to SEQ ID NO: 46373

SEQ ID NO: 62060 - DNA, 300 bp, Acinetobacter baumannii; identical to SEQ ID NO: 46372

SEQ ID NO: 62061 - DNA, 1002 bp, Acinetobacter baumannii
atgaaaagaatagcaagaattgcagtcgctacatatatggggttggcagtaagtgctgtgcaggcggcgactacatttttaaatgtttcttatgacccaactcgagagttttatcaggaatataatcaggcatttggaaagttctggaaacaacgtaccggacaggacgtggattttaaacaatcccatggaggctcaggtaaacaggctcgcgctgtagcaactggtcttgaggcagatgtggtgaccttagccttagccaatgatattgatgaaattgtaaaagcaggctttatccagccaaactggcaaaaagaattccctaataattctgcaccgtatacctctacagttgtgtttttagtacgaaaaggcaatccaaaaaatattcgggattggaatgatttaactaaacctggtgtcgaaattattacgcctaatccaaaaacgggtggggcaccgcgttggatttatctttctgcatggggatatgctttaaagcagccgggtggaaatgatgctaaagccaaagagctggttaaaaaactttatcacaacgttaaggtgttagattcgggagcgcgaggctcgcttactacatttgctgagcgtggaattggagatgttctactttcttgggagaatgaagcactattggcaacgaaaggtctcgataaagataaatatgaaattgtttacccatcaatttcaattttggcagaaccatctgttgccattgttgacaaaacagtcgacaaagacggtaaccgtactttggcaaaaggttatctcaactttttatattcacctttaggtcaagagttggctgctaaacactatttccgtcctcgtaaccctcaagttgctgctaaatatgcagcacaattcccaaaaattaaattatttacgatcaatgatgtttttggcggttgggcaaaagcccagaaaacccattttgccaatggagccatctttgatcagatttatgatggaaagcagtag

SEQ ID NO: 62062 - DNA, 924 bp, Acinetobacter baumannii
atgtcgcatatttctgtcttactttttgagaccgttgaaagcttattggcagatcgcacaactggggtgtatatcgatgcaacctttggacgaggtgggcatacgcgcttgttattgtcgaaactcgatgaaaacgcccgagtatatgcttttgataaagaccctcaagctctggaagttgcggctgctttagcacaagaagatccaagatttacgattattcatgcaagttttgctgatattaaggaaaaaatgcaggaaattggggtgcaaagtgtcgatggaattatggcagacttaggtgtgtcctctcctcaactcgaccaggctgaacgcggctttagctttatgcaagatggcccgttagatatgcgtatggataactctaagggattgactgctgccgaatggttacttgaggtagaagaggaagatttggcaaatatcatttatcaatatggtgaagaacgatatagtcgtcgtattgctagagcaattaaacaggccggaaaattggatactacggcgcaattggctgaaatagtaaaaacagcccatccaaaatgggaaaagcataaacatccggcgacacgtacgtttcaggcaatccgtattgctattaacaaagaactagatgatattgaagtatttttaccgcaagctgtagacttgcttaaaccaaaagggcgtttgtctgtgatcagcttccattcgcttgaagatcggttgatcaaacagtttattcaaaaagaatcaactctagcagaagattctggttgggggatgcctcaacagcaggttgatacgagaagattaaagaaaatttcacgggttcgtgcgagtgaagaagaagtaaaagcgaacccacgttcacgtagtgcatggcttcgggttgctgaacgcttggaacaaaaaggcgcgtaa

SEQ ID NO: 62063 - DNA, 474 bp, Acinetobacter baumannii
atgcgccttacaactcgcggtcgctacgcagtgactgctctacttgatttagctttgcagccaactgaacaaacgatcacgctcgccgaaattgccgcacgtcaatctatttcagttgcttatttagagcagttgttcgcaaaacttaagcgtcatgggttagtttctagtgttcgcggtgcaaatggtggttaccatttggctcgaaacgctgatgaaattactgtgttagaaatcattgaagccgtaaatgaaaccgttgatgcaacgcgttgtgaccataaaggcaactgccaaaatggtgcaatgtgtcttactcacgatttatggcaagaactctctcatcatattgccgactatttagctaaaatcactcttgccaacctcattagccgagacaacgttcaaactgttgcattacgccaaaatgtaactggcacagattcagctcttttatcgggtacaggtatttga

SEQ ID NO: 62064 - DNA, 270 bp, Acinetobacter baumannii
atgaataaattaatggttgcggtattcgctggaatggtgacccttgccggtttcagtgctcaagctgcaacacctgagcaagaatgtcaaaaattgcaagatgattacaatttgatttatgcgtcaaaaggcttttgttttaaagaccaagatgctaaagaaaaatatggtaatgaaaactgtcatacgactaagccaaaattctctgataaagagcagcaacgtctagacgcaattaaagaacgtcaaaaagaattgaagtgtaaatag

SEQ ID NO: 62065 - DNA, 252 bp, Acinetobacter baumannii; identical to SEQ ID NO: 53391

SEQ ID NO: 62066 - DNA, 231 bp, Acinetobacter baumannii; identical to SEQ ID NO: 53393

SEQ ID NO: 62067 - DNA, 1569 bp, Acinetobacter baumannii; identical to SEQ ID NO: 62014

SEQ ID NO: 62068 - DNA, 1233 bp, Acinetobacter baumannii; identical to SEQ ID NO: 53395

SEQ ID NO: 62069 - DNA, 663 bp, Acinetobacter baumannii; identical to SEQ ID NO: 53396

SEQ ID NO: 62070 - DNA, 2880 bp, Acinetobacter baumannii; identical to SEQ ID NO: 62017

SEQ ID NO: 62071 - DNA, 135 bp, Acinetobacter baumannii; identical to SEQ ID NO: 53397

SEQ ID NO: 62072 - DNA, 294 bp, Acinetobacter baumannii; identical to SEQ ID NO: 53398

SEQ ID NO: 62073 - DNA, 864 bp, Acinetobacter baumannii; identical to SEQ ID NO: 62020

SEQ ID NO: 62074 - DNA, 132 bp, Acinetobacter baumannii; identical to SEQ ID NO: 62021

SEQ ID NO: 62075 - DNA, 249 bp, Acinetobacter baumannii; identical to SEQ ID NO: 62022

SEQ ID NO: 62076 - DNA, 777 bp, Acinetobacter baumannii; identical to SEQ ID NO: 62023

SEQ ID NO: 62077 - DNA, 777 bp, Acinetobacter baumannii; identical to SEQ ID NO: 52165

SEQ ID NO: 62078 - DNA, 465 bp, Acinetobacter baumannii
gtgaatcaggcttgtgaagcagccagtcaagcgtttaagacttaccgccataccacacctgaacagcgtgctgtttttttagaaaacattgccgatgagctcgatgctttgggtacagattttcttgaaattgtctcacaagaaaccgctttgccacttgcacgcttacaaggtgaacgtgcccggaccagtgggcaaatgcgtttatttgccaaagtgctgcgccgtggtgattttttaggtgcccgtattgataccgctttgcctgagcgtcagcctttacctcgcccagacctgcgccagattaaaatcggtgttggccctgttgcagtctttggggcaagtaactttcctttagcattctcaactgcgggtggtgacactgcttcggcactggcagcaggttgctctgtagtggtgaaagcccatagtggacatatggcgacagcagactttgtagcgtag

SEQ ID NO: 62079 - DNA, 231 bp, Acinetobacter baumannii; identical to SEQ ID NO: 53393

SEQ ID NO: 62080 - DNA, 2412 bp, Acinetobacter baumannii; identical to SEQ ID NO: 53394

SEQ ID NO: 62081 - DNA, 288 bp, Acinetobacter baumannii; identical to SEQ ID NO: 57573

SEQ ID NO: 62082 - DNA, 288 bp, Acinetobacter baumannii; identical to SEQ ID NO: 57573

SEQ ID NO: 62083 - DNA, 1143 bp, Acinetobacter baumannii; identical to SEQ ID NO: 50755

SEQ ID NO: 62084 - DNA, 756 bp, Acinetobacter baumannii; identical to SEQ ID NO: 45967

SEQ ID NO: 62085 - DNA, 927 bp, Acinetobacter baumannii; identical to SEQ ID NO: 46217

SEQ ID NO: 62086 - DNA, 798 bp, Acinetobacter baumannii; identical to SEQ ID NO: 60359

SEQ ID NO: 62087 - DNA, 1140 bp, Acinetobacter baumannii
ttgagcacccccgccattttagccctcgcagatggaacgatctttaaaggaacgtcaatcggcgcaacgggaagtacgactggagaagtcgtttttaacacagccatgacaggctatcaagaaattttgactgacccaagttatgcacaacaaattgtgacattaacttaccctcatattggtaacactggttgcaacgaagaagacgttgaatctggtcgtatccataaagtatgggcgaatggtttaattattcgtgaccttccactattacacagcaacttccgttctgagcaatcattaagtgaatatttgcaagcgcacaatgttgtcgcaattgctgatattgacacacgtaaacttactcgtattttacgtgataaaggtgcacaaaatggttgcatccttgccggcgaaaatattactgaagaagaagctattgctaaagctcgcgcttttggtggtttaaatggtttagaccttgcaaaagagtgctgtgacccgacaggctttgaatggtctgaaggttcgtgggtattaggtaaaggctttactcaacctgagttaaaataccatgtggttgcatacgattatggtgtcaaaaccaacatcttgcgtatgcttgcagaccgcggttgtaaactcactgttgtccctgctgaaactccggctgaaaaagtattagcacttaatccggatggcgtattcctttcaaacggccctggcgacccagctgcttgtgattacgctatcgaagctgtaaaaactattgttgaaaccacaacattacctgtatttggtatctgtttaggacatcaaatcttggcactcgcttctggtgcaaaaactgtaaaaatgaatcatggtcaccacggtgcgaaccaccctgtacaaaatcttgaagatggtacagtgatgattacatctcaaaaccatggttttgctgtagatgcagaaacattaccggctaacttaaaagcaacgcataaatcattgttcgatggcactctacaagggattcatcgtacagacaaaccagctttcagcttccaaggtcaccctgaagcaagcccaggtccacatgactgtgcacctttgttcgatcatttcatcgaacttattgaagcatctaaacagtaa

SEQ ID NO: 62088 - DNA, 1368 bp, Acinetobacter baumannii
  misc_feature (1319)..(1328): n is a, c, g, or t
gtggcggtatttttagacttcaaaagacagctcaagctttggttagaacatattgttcaccatgtttcagaccttcaagaagaaactattttatttatatcatttggccctaaagatcacagatgtagcgtatggcatagtgaaaaaacagtgcttacacaagcaactctacaattatttgattttattgatgatcagttttcgccagatcaacttccagactacataaaaattgatgttgcgtacaatttagaaaagcaaagttggaaccaaatagagcagcaggttcatcaccaatttcacaataatcattaccgcagaggtattggatttgatgattcctgttcgttagcttttctggagcaagaaatatatggaaaagccattattcggggcttaagttatgacaagccgaacttttttgatgaaacaaatctgaactatgcaattaaacaaaaatatcgtgcaacaaagccggaaattaaacttaagtcactacaagaagtgtggactttcgatacctatgcaactttttatgaaaatggacaatttattaatttagcgagtcgctacgatgcaaatggtattagagccattgctagcaataaaaaacagcactttagagacctcattgaaaaaaatgcagcgtttttacatagccagattcaagaaaatggcaaattcatttatggatattttcctgcttatgatcgtgatatacggaactataatacggtacgtcactgtacttcgctttacgcgcttttagagacttttgaagtacaagataaacctgaatattggcctaaaattgttgcagcaattcaatacgcacttactactttctataaagaaaaagacccaataactgcgtttatgattgatggtaaagaaggggagctagaaattaaattaggtgcaaatgccgcagctattttaatgttaacgaaatatcaagaaatcacaggaaaagatgattatttaaaatatgcagagaaacttgctcatggtattttagaattagtggatccggatggattaactactcatgtattaaattatccaaattatgatttaaaagaaaagttcagaatcatttattatgatggagaagcagcattagctttattaaggttatatcaaattaatcaggataaaagattattagacacagttaagttaatgtttgaaaattttattcataaaagatatgaaaaatatcatgatcactggttaagttattgtaccaatgagcttacaaaaatatgccctgaagaaaaatattttatttttggtttaaataattatttaaaacattnnnnnnnnnncatatgccactttattagaaatgctaatggcagcctataa

SEQ ID NO: 62089 - DNA, 285 bp, Acinetobacter baumannii
atggcagcctataaaatggtaaatcgtttaaaagagcaaggccataatgcactttttgaacaagcatatatgtctgagttaaaaaaactcattacatttcgagccgaatttcaaaccacaggttttttctatccagaaatagccatgtatatggctcgaccagataaaatattgcatgctttttatgtacggcatgatcgctttagagtaagaattgatgatcaggaacacaacctttctggttatattgcctacgtaaaagatttcgaaggaggggagatatga

SEQ ID NO: 62090 - DNA, 159 bp, Acinetobacter baumannii
atgctgttagctttgattgaagcaactgctgcccaattaactcaggtaaagcaatgcggaacaatgattgttgcccttgatcgttgtaacgttccatcgctattaaatgctcttcagctttttcagccaaagcaaaaaaatgttttccaacatgggtga

SEQ ID NO: 62091 - DNA, 705 bp, Acinetobacter baumannii
atgaataaagtttatgccaacgcagaggcagcactgaaagatgtaattacagacaatcaaacacttgctgttggtggttttggtttgtgtggaattccggaaaaactaattgttgcagttaagcaaagcggtgtaactggtctcacatgcatttcgaataatgcaggtgtagatgattttggtttaggtatattgcttcaaaccaaacagatcaaaaaaatgatctcttcttatgtgggtgaaaataaagaattcgagcgccaatatttaaatggtgaattagaagttgaactaaccccacaaggcaccttagctgaaaagttacgtgctggaggtgctggaattccagcattttacacacaaactggtgtaggtacactcattgctgaaggtaaagaagaacgtatttttaacggcaaaaattacattttagaagaatctttaacagccgatgtagctcttgttaaagcatataaggcagacaaggcaggtaatttagtatttcgtaaaactgctcagaattttaatcccgaatgcgcaatggctggaaaaattacaattgcagaagttgaacaggtggttgaaattggtgaattggatccggatgaaatccatttaccaggtatatatgtgaaccgcattgtattaaatgcatcacctgaaaaacgcattgagcataaaactttaagcacggaggcagtataa

SEQ ID NO: 62092 - DNA, 705 bp, Acinetobacter baumannii
atgcttcagcatggccaagtccactcaagttttgataatgcttttgctcattgctgcgcgattattaaagtcagtggtggtgagtttgctgaagatatgctcaaacttctgaacaagccaactgatgaagttgaagaagaaaagcctttagaaaatgaagttgagaaatcacctcaggttaatactgaaaaaacagtaattgaagagcctactaaagatttaaaagaggatctcgatagtgcaattgttgttactgaggggccttatgtttcatcatccgaggatctattagttccagaaactaacgagcctaaagtagatccagaatatcagcaaaccctagatactcttctacagcgtgtaaaagagtcaaaaacacctgcagaagtaaatgcggtttatcgttatacccgcaaatgggatgacgaacaaatgaagcctatccttctcgccactcacaaacgtcttgaagagctagaaaaagaacaggcatctgcgaatgagccaccctctttaatggttcagatccagaacgcaccagaccttacaacgctagatgctttggaaatagacgtggctgcacgagacccgcagattcaaccgaagctaatggggtatgtgagaaaacgccgctatgaattagagaatcctacacctacccaacctgaagctgatcctgattatctattagtggacggttactag

SEQ ID NO: 62093 - DNA, 888 bp, Acinetobacter baumannii
atgggtgcatcaattccaattattaagttgattgaagctatgaacgaacagccaatagcattcaacaagcactatgtatttttaggatgtgggatcaatggagctttgatgctctctcaattggtctactggacttctcgcactaaagacagtgaaggttggatcttcaaaacacatcatgagtggactcaagaaactggtcttactcgtcgtgagcaagatacggctagagcaacacttaaatcacttaaattcatctctgaaaaaaagatgggtgtgcctcgtcgtgtttactaccgtgtagagcatgaaaacctttatcaagctttgatcgaatactctgaaagcattgatattaatagtatgcacaattccgccacactgaatgcacagaacagccatactgaatgcacaaatgcgccagactgtatgcacaattccgccacactgaatgcacaaatccgcccatctaatacagagaatacatacagagaatacacagagaatactacagatattatttgtgctgaatcagcaccaaaaacacaaaaattcaaagcaaaagatttcttgttgaaaaacggagtatctgagcaaacagcaactgaatatcttgatcttcgcaacaagaagaaaaaaccagtaactcaacgagctttacaacttgttttcaaacaagctcaggaagcaaaactaagtaatgagcgtgtattccaaattatcgttgttcgtggttgggaatctttcaaagcagcttggaattggcaggagacaaatgcagagcttgagcaattagaaaatccagttgttgagcagcatcaagccatccctgaacaaccagcaacacaattcaaaggtgttgctaagaaatttaaggggatggattaa

SEQ ID NO: 62094 - DNA, 450 bp, Acinetobacter baumannii
atgagtaaaaccacaagcaatgcagggctaaatctcatcaaaggttttgaaggtaagcgccttaatgcttacgatgatggggtaggggtttggacaattggttttggaactattaaatatcctaatggtgtcagagttaaaaaaggtgacacctgtacagaacagcaagccgaaacttatttgaaaaatgatttaactaagtttgaagtagctatcaataaacttgttaaagttcccctaactcaaaaccaatttgatgctctagcatcttttacttataaccttggtgaaaccaatttagccaattcaactttattgaagaagcttaataaaagtgactatcaaggcgctgctgatcaattccttgtctggaataaggcaggcggtaaagtcatgaaaggtctagttcgtcgccgagaagcagagcgagcactctttttaaagaagtaa

SEQ ID NO: 62095 - DNA, 288 bp, Acinetobacter baumannii
atggaattttggaaattcattcaggagtttctacaaacttttggcacagcaatcacttcattttttatggggttcattatggcttatttccgaacgaagaaaaaactaggtaaggctgattgggcagagtccattatgtgtgggcttttttcagttggtgtctggtctttacttgagtggctaaatgtcccgcagattgtatctgttggtatcgcttctggcattggttatatgggcactcattttgttagcaacttaattgaaaagcgagtgaatagaaatgagtaa

SEQ ID NO: 62096 - DNA, 2004 bp, Acinetobacter baumannii
atggctctaaatgctgaaaagtttgcgaatcttgaacgcgatattgatgacacaggtaaagcgataaacataaaggcgattattacccctagatatggcgatccatttaattccatcccacttgtctctgagatattaatggaaaatggagggtatgagcctttttctactgaggccgaattgctcgcatcgacaccattgttaccaaaaagagcagctaaggcgcttgatactaagaaaatctggatttgggaggttcgcccgccacaaacgaagcctacttggtatgatacgggattgagtgaactagatattgctaaaaataatacatctgaggcattgctttctacactctccgatcttgatacttttgtaatcgatgagcattttgaaacatcacaagccgcacacacaaatggaactttatttgcaacgcaacttttacagaaagatgtaacagttacggacgttatgttcaaagtcattagttatggtggtttaacctcatttaccgccgcattatatctagttgatagcaaaatgaacattaagacggtgctatcaacccattcgataacagtgacaaataaccctgtttataaaatttcaggtctgaatattcttataccgaaaggtcagtttctagccgttggtattcctagcggtattgcattagcacatcgaacaattgcgcccaatcaaacaaaaggtttttactacgcccaaaacatatcaaacgcaacatcgttatcggttggatatacgccgcctacaatgcaaaacttaaacgctaagtgtttcgggtttaaactagttggtcgaaaaattcctaccgattattacgacattgagaagttaaatcatgttagcgatttaattgtttatgactatatttctaaagttgcaactaccacaaatgcaaacggtgaattatatttcattccgagagcatatccgtcagctaaagcgattaaggatatcactttaaaaattaaacgtattgttacagtcggcaaaacgtcggtaaaaatacgcccatattttaaacgaatttcggataacgtaattattagcgcaggcgaattgattgaggttacaggtatttccgagggttcgagccataatatacctttaaatatgacttttccgcctgattgctacttcggcataggtgttgaaactggtattgatttaggatattacaacaacgctttgggcggaactttccattattctgccacacaaggggcaagtgctttaaccgtagagcctaatcaaactaaagtaccgttgcagacaattgttggtgccgttggttttgcttttactgttgaaaatgacattttgttcaaccctgacaactatgttagaaagtcagacgttaaactaaatctaacgactaattatctttacggtaaaaaaattgtcgctatcggtgactctatggtacagggtcattcattgtcagacgcgtcaaatcaaacatggttagctaaacttgcgattcgcaacaatatgacacgggttaactatggtataaatggtacgtatctttcgaataaattatacgggtcgtatgaaggcgctgttattcgctatacacaaatggataatgatgcggattatgtaattgtatttgctggaaccaatgatgcacgtaattcaggcgtaccaatgggcacggatgactcaaccgataatacaacattcaaaggtgctttgaacgttttatgtaatggtttaatcactaagtatccgaacaaaaaaataggttttatcacgccatatttacgtgattcaaactatccagcttatgttgatgcgatagaaacaatctgcgcgaaatatggaattccagtttttaataacatcaaacaaggtggggtatgttggaccaatgcagcccagttaagtgcaatcacattaaatgatacatatcatctcaatgagtctggcatggactatgtaagctataagtacgaagcttttatccgttctctatag

SEQ ID NO: 62097 - DNA, 249 bp, Acinetobacter baumannii
atgaccttaagtggtgttatcaaaatgaacagtgaaccaaatttacaggaagttgtcttaaagctgattgagcagaataacaagcttatagaccatggcaacaaactgaccgaacaaaacaataagctgatcgaacagaatagcttgatcgttcaaatcaatgccgagcgatccgcacaactaaatgaagtcttggcaatgtttgaagacggcgaaccaacacagcgatcaggatcactagatgggtga

SEQ ID NO: 62098 - DNA, 276 bp, Acinetobacter baumannii
atgcgtgatgccaaacgattagccgaagttcgcaagctgccatgcatgagatgtggtgcaccagcaccaagccaagccgcgcattctaattctagtaaagacggtaagggcagatccattaaggcttgtgactctaaaactgtttctatgtgtttttcctgccatcatttatttgatacctaccaactaggcaacaggcaggaaagcgaagagctatttaataaatggcttaagcgaaccaacgcaatgcttgagtctgatgacgatttattttaa

SEQ ID NO: 62099 - DNA, 171 bp, Acinetobacter baumannii
atggacataagcgaagcgaagaagaatcttaataaatactctgatgagttgagccgctaccagaatttatctcgcaccgggttaagtcttgaagagctgcttacaattgatcgtattattattcgattaaaaactaagattgataatttacggtccatgttaaatgcgtga

SEQ ID NO: 62100 - DNA, 243 bp, Acinetobacter baumannii
atgaaagctaaaaaacttttagagaagctaggtgttaagggaattacaaagattcttgagaacgcacaccaagaagctgtttattacgtggacgaatggagcgagcattttcaagcacatggattttatacagataagtgtattgttgggattcacaatccacattcacactacaagttgtcagatctaaagcaggcattaggtggtgaacatggacataagcgaagcgaagaagaatcttaa

SEQ ID NO: 62101 - DNA, 309 bp, Acinetobacter baumannii
atgagtgagtttaacgatattgacatgccaactttacccaagccaattggaagcctgcaagagttacatccagagtttgcaaaagtcttgcacgagaactttctagagttgctaggcgatgaatccaacactgttcaggtggcaaaagatgcaattgaacatggtaacgacttagcaatggtgtcaattgaaggtgttgagcaggtatcaattgcacatgtaattaatccattcccatgtgaagagttaggcgacgacttccccaaagaaaaccacatttcgccgaattgcgaggtcaaaaatggataa

SEQ ID NO: 62102 - DNA, 939 bp, Acinetobacter baumannii
atgaatgcgccagtacaacactcaggacaaaacccttttgcagtaactgctcctacaactcaagcaatgtctacagttcaatctgatagtcaacgtgcaattgcagaggttcaagctgctttagttattgctaaacagttcccacgtaacccaattgaagcttatgaccggattatgaacgcttgccagcgtcccggtttagctcaatcggctgtttattcttatgctcgtggtggtacttcagttactggtccatcaattcgacttgcagaaatgcttgctcagaattggggaaatattcagtacggtatccgcgaattatcttcagaaaatggcgaatcaacggttgaagcatttgcttgggatgttgagacaaatacccgtcaaacaaaagtttttcaggttccacatattcgttatacacgcaatggttctaaaaaattaactgatccacgcgatatttatgaattggttgcaaacaatggtgctcgtcgtctacgtgcatgcatcttaggtgtaataccgggtgatgtaattgatgatgcagttaatcagtgcgaaaagacaatccatgcaagtgctgacacttcaccagaagctgtgcaaaaacttgttgtagcctttgagcaattcaatgtcaccaagaaagacattgaagactacattcagcgtcgtcttgatgctattacagcagccaatatcgttgcgcttcgcaagattttcactagcttacgtgatggtatgagctcacctaaagactggtttaaaaatgccactgtgaaggaagttggagaagttcaggaagttaaaccaactgtaccagacaatgagtttccagttctcctagagcaaatcaaagcggatgcagttactaaagagtatgtattagaaggctatgcacttactaatgcacagcgtattgcggtggaggctcagtga

SEQ ID NO: 62103 - DNA, 666 bp, Acinetobacter baumannii
atgggtgaagtcatgaaactattccgctgttcttctctacataaattaattggtgatggtcgctcaaaagcggctgtcatcagtgacacagcaaaatcagctatccgtgacatcgtgaaagaggacctatatggctttcgctcattcactggcaaccagtacaccgcaaaaggcaatctgcttgaagatatggcaatcgagatgtcaggcaagatgcggttcaagcaattcaataaacacgttggtcgtgttgagaatgagctcatcactggcgagtgcgacattttagacggtcgcaccatcatcgacacaaaggtgacttgggatattggcacacatccattctttgaagatgaagctttggagaaagtcaaaaaatccggatatgacgtgcagatgcaagcgtatatgtggctgtataactgtgatgtggctcatgtagatttctggctattcccttgccctgctgagcttttaaaagactgggatgacatcgagcaactggttcacctggttgaggctatcgacattcgagagcgcctgaccactgtaaccattcagcgtgatgaagcggtgatcgagaagatcaaagacaaaattccacatgctcaagagtactacgcaaagttatatcaagagcgcattaaagcaaaggtggcagcatga

SEQ ID NO: 62104 - DNA, 264 bp, Acinetobacter baumannii
atgggttctataaacaatactccaactaaacccaagtttattgaaacagagttaggtctggaaaagctgtgcaaacattgccaagaatattggcctgctgattcagaattttggttcatgattaaacaaaaatctaaagatggctctgttaaacaaagacccgattctgcctgtaaaggctgctatgacactgtctacagatcaagaaatacaaatcgaaaatatcaaaagcgatctttccatgaaaaaggtaaagcagcatga

SEQ ID NO: 62105 - DNA, 684 bp, Acinetobacter baumannii
atgaatagattaatgcttgattttgaaactcttgatgttggtgaatgccctgtaattttaagcatcggcgcagttgtatttaatgaagatgaaatcattgactgtattggcgaaaaaattaatcagcagtcctgcttagatattggttgtacgatcagccaggaaactattaagtggtgggaaaaacaaagcgttgcagcaaagcttggtgcttttggtggaacaaccgatatcggttatgcattggaattgcttgttgacctttacaaaagtcatggttgtcgtgaaatttggagcaaaggctctatggctgatatacgttgggccaacaacattttagaaaaatgcggtatagacaaaccttggaaattctcgcgtgaaatgtgcttcagaacttttctaaaatactctccacaagttgaattcatccctgaaggcgaattacataacgctcttgatgatgcctttaaccaggctaagcattggatagcaatcaataaaatagcaacgcttaatcaaaatattgcattccacgctgttgacttaggatctaaggatgattgggaagccatagtatcttttgatgaattaggcaagatgaagataacaccaatagaacgtctaggaaacgggctaccagttatccatattcaacctgaaattgacgacgatatgcctttctag

SEQ ID NO: 62106 - DNA, 237 bp, Acinetobacter baumannii
atgatgtctagaacttttattaaaagattcgcaagtactcaaccgaaatttttagctgaaagtatttctaaataccaacggcaagagtctgtagagattcatagtctttcaacatttactgttgatggggactcatggccctatcaagctttggtagtttttgaacgccctattattcagatcaaaataagcgatgaactacctgaatatgtaagaccaccaataaattgccgttga

SEQ ID NO: 62107 - DNA, 480 bp, Acinetobacter baumannii
atgaataaattaagtattgaagatattttatctggtgctttggttggtaaacctgagttaattgaagttgatattgttgtaaatggtaagccttgtacttttgaaacttatattaaaataatggattacgacacagcaaaagctcaaatggaagcgaacacagaaggtcgtgaaggtttggcatccattcttgctgattgtattgtcacagaagatggccaacgaatttttactgaagaacaagtacgacaaaaatttaataaacatctaattgatgcgctttgggccaaaattcttgaaaagaattttttgggaaagttgaatacaccgaagaagagttcagggaacttgagttctgggcggaactcatccaaaacgggatcgcaggaaaaacaattgcggaagcaaaaagaaacctcagttacagggagtatatcttctggcgaaagtatagagaaagaaggggaaccctcaacatag

SEQ ID NO: 62108 - DNA, 663 bp, Acinetobacter baumannii
atgattcttttaatagcgaactcaaaaggcggtgtttgcaaaacttctttggctacatcttttttagctgaattagcaaaaagtaaagctgtgatcggtgttgatctggattctgcaaataaaacagcctcagctatctggtcaaaggacagaacagaagaacaaggtaaattttattatttgtcaggcgatataacgtctgaattagaaaatgcccgtgaagattatgatgaagtagttattgatgcaggtggatacgataacaaagagcttcgtacagcaatgctatttgctgacgtggttttgattcctctaaaagtgggggcaaacagcaatattgaaggctttagaaatactgttgatttgcaagtacagataaatgaaacacgtgaaaagccagcaaaaatttacggtgttattactgccgctccgcatattggctcgacacctgaattaaatagagcgattcaggaaattgtagaggaacctgcagcagagactttacctgtaactattggtgatcgtacatggtatggccgagcactagatgcttctttaggcctaacagagtatgtatcaccaaatccacgcgataaaaaatacgttgaaatcgcacagaatgaatttatgaagttgtttgaggctatttacaatggtaaataa

SEQ ID NO: 62109 - DNA, 1590 bp, Acinetobacter baumannii
atgcatttgacccaagaaaataacttaaatgtagatgctagattgctaaatatagaaaacctttcaatctctacgcaagatcagcctttattagaaggtctcaatttacacttacaaactggtgatacgcttgcaattgtaggtgagagtggttcaggtaaaacgataagctgtttggcgatgatgggattattaccagaaaaattaaaaacatctggtcgtattattattgattcaaaaaatattttagaaatagatgaaaagacgcaaacacacatacgcggccgccaaattgccatgatttttcaggagccttctacggctttaaatccattgcatcgtgttgaaaaaattgtcggtgaaaattttattttacaaggtgggtcaaaagcgaaagttcaacagcaggtaattcaattattaaaagatgtaggaattgctaatccagagtacattttaaaacgttatccgcatgagctttctggaggacaaaaacagcgggtcatgattgcagctgcgctagctcttcaacctaaaattttaattgcagatgaaccaactaccgcgcttgatgtgattttacagacgcaaattttagaattattaaaatctttgcaaagcaaatatggtatggcactgattttaattagccatgatttaaatttggtacgccgttatgctgataagctgattgtattacacaaaggacaagttgtagagcaaggtcagcttcagcagatttttgaacacccaacttcaatttatacccagcaattattagaacatgaccttggtttcgctgagcaacgttcaaccagtcataaaattttatctgttcaacaactcaatgttaaatatccaatacgacgtggtttctttaaccgaattcagggttataccaatgcggttgaaaatgtaaattttgagcttgctcaaggcgaagcattaggcattgtgggtgaaagtggatccggaaaatcttcattggctttagctctggttcgattaattaaaagtgagggacagattaactttctagggcaagatataaaccacttagaacaaaaagctttacgcaagatcaggtcagacttacagattgttttccaagatccatttggtagtctaaacccacgtatgacggtagggcagattattgctgaagggttaaaagtcaaagcgataactgataaagaaattaaacagcaagttaaatcagctttgataaaagttgagttggcagagggctttcaacatcgctatccacatgaactttctggtgggcaacgacaacgtgttgctttagcgcgagctttagtagttcgacctaaacttttaattttagatgaaccaacgtctgccttagaccgaaccacgcaaaaagcgatgattcaattattacgacgtttacagcaaacagagcacttgagctatatttttattagtcatgatttaaatgtggtcaaagcactgtgtcataaagtgatggtattacgacatgcaaaagttgtggaatatcagccaactgagcagttgtttaatgccccaaaaactgaatataccaagcaattaattgcagcaagttgttaa

SEQ ID NO: 62110 - DNA, 399 bp, Acinetobacter baumannii; identical to SEQ ID NO: 58646

SEQ ID NO: 62111 - DNA, 585 bp, Acinetobacter baumannii
atgaaaacaatcggcttattaggcggcatgagctgggagtctacagcactttactatcaacaaattaatagaatggttcagaacaagttagggaaactacattcagccaaaatcattctaaatagtgtcgattttgaagaaatagcagtattacaatcgaaaggtttgtggcaagaagctggagcctacttagctgagcaagcacaaaatttagaaaaagcaggggcagactgtattttagtctgtactaataccatgcataaggtagcacctcaaattgaagatgccattacggttccatttatacatattgctgatgccacagcaaaagaaattttaagtcaaaatatccgaaaagttgcactgttggggacagctttcaccctggagcaagacttctataaagccagattacaagatcatggaattgaggtgattattccaaatgatgcaaatcggaaaatagtacatagcattatctatgacgagctttgtttaggtgtgatcaaccccgattcgcaaaacaagtatatgaccattgttgaagagttgattgagcagggtgccgaggggattattttgtaa

SEQ ID NO: 62112 - DNA, 258 bp, Acinetobacter baumannii
atgattgcccgtattattcgtttttcaattgcgaatcgtgtatttgtcctgttggccgctttaattctggctgcttggggaacttgggccgtaaagaatactccggtcgatgcattaccagatttgtctgatgtacaagtaattattcgaactaatttttctggtcaggcaccacaaattgttgaaaatcaggtgacctaccctaaaccagctttggacattaatttatccaaaaggaatgctgctcgtggcaaataa

SEQ ID NO: 62113 - DNA, 192 bp, Acinetobacter baumannii
atggtttacggaatttacgagaatcatagtttaaaggtagataagctgacaaaagcaactttaaatataagcacagataaagaatggtatattttagataagttttctgataacttaatactaattagtaaagataaaaatgatttaaaagtagtaaagattaatgatttaaaaactataaatattaaataa

SEQ ID NO: 62114 - DNA, 426 bp, Acinetobacter baumannii
atgaaaaaagaaatccctacacatttatcacataagccaattgttaaattggaaggttattctcagcttgatggtcgatttgcaggaaaaactgatgctgctggcttatcaattggattagctcagtggagtgattctcaaactatggatttatccgctaaagtttggcgatacacaggtgaaaaatggtctagacagtcagaggagttaccaatccatagagtatttgatttagctagccttttgtgtgcttctatgagttatgctcacaatgaaactttacctatatgtgaagattttcaaattgagttaacaaaaaactccgatcttattgatgttttaaaaggtgggatgttgaaagatcaaaagcatttagatgaatctttaaaaagactatctaaatacttaaagacccttggttattaa

SEQ ID NO: 62115 - DNA, 861 bp, Acinetobacter baumannii
atgtctaatactcttaaagcatttattcgtttatgtgatctcgtcattgatgattttgtccaagattacaatgttccgaatagagtcacacaagttggcaatgccttagaaaagtttgtacaaagcttatataacgatagcttttctttaaataaaacagagggtaatgcaggaaataaaacctgcttttcatatttgggaaatgcaaggaatccgccagacttaattttacagaatagtgatgctattgaagttaaaaaactagaaggaactccatcatatattccattaaacagctcctatcccaaagattatttatatgtggatgatacacgtatatcagacaagtgtaggagctgtgaagaaaccccatgggttaaaaaagatatggtgtatgcaattggatatcttgataaaaaagaaaaaaataaacttcgaggtttatggtttatttatggaaactgctatgcagcagacaaaaatatatatgaaaaagcatttaatagtgtaaaaagtgttttagatgattcagatgatctagataatagtgaaactaatgagttaggtcgtttaaataatgttgatctaacagaagctacatatctaagagttagaggtatgtggcatataaaacatcctaaatctttctttggttcattagttccagttattgattcaaattttttcacacacttggtcgtcacaaaagaaaaatttgaatctttcccattagaagatagaaatattttggaaaatattattgctaagaatcctaacgtgcaaaagcatgaggtacttatagatgatcccaataatccagcaaaagatctttcagctattgtcgtaagcctatctaaataa

SEQ ID NO: 62116 - DNA, 999 bp, Acinetobacter baumannii
atgaaaatagcttcctttttttctggtgcaggtggtctagatcttggctttaaacaagctggttttgacattatttttgccaacgaattcgacaaggatatttgggctacctacgaacataatcatcctgaaacaactttagataaacgtagcatcaccttaattgatgaatctgaagttccagactgcgatggtattattggtggtccaccatgccaaagctggagtgaagcaggatcacgcagaggaattgaggacaaaagaggacaattatttttcgacttcattcgtatactcaaagctaaaaaaccaagcttttttttagctgagaatgttagtggaatgttggctcctagacataaagctgcattagaaaatattaaaaatacttttctagaagctggttatgatcttcattttaagttacttaatgcagcagattatggtattgctcaagaccgaaagcgtgtaattttcattggttttagaacggatttaaatatccaatattcattccctgaaccagccaattatgtccgttgcttaaaagatattattcaagatatagaacatagcgttgttccagcacttaataagtctaaaccaaatccagaagtggttatagaaaaccatgaatatatgactggtggattctcttcaatgtatatgtcccgaaatcgagtaagaggttgggacgaaccatcatttacgatacaagctggtgggcgtcatgctccaatccatccaagtgccccaaaaatggtaaaacttgaacaagataaatttatgttttcaccaagtggtgaatacagacgtttaagtgttcgagaatgtgctcgaatccaaagctttcctgatgattttatttttaaatattctgatgtaaaccatggatacaagatgattggaaacgcagttaatgttgattttgctagaattttagcagaaagtattatgtatgccttagaccaaaaaaagtttatattgagcgcaggttaa

SEQ ID NO: 62117 - DNA, 147 bp, Acinetobacter baumannii
atgcaaaaagcaagcctacccgtatatacaaatccttcggatttctatatcggggcttgtcaggagggtatccctcctaagacctcccgcccatcgaagatgggcaagctcaacgcagttgagctaaaagcaaaagcctttcaatag

SEQ ID NO: 62118 - DNA, 489 bp, Acinetobacter baumannii
atgagaaccaaaaaaaagattttcaggctaactgatctacaactagaacaactcgaaacctacttaaaactagaacaagtgacattcacggactttattcacggcttgattcagcgtgaagtaatgaaggatgctgtgactgttcaacgcccacatgaccaagaaccgccgattaaggtgcgaactaaaactgtgcttgagatcgtcaagcggtatcagcataccgaccctgcgcttctgctagagctttctagaatcggcaataatatcaaccaaatcgctagaggtctgaatgttcttaaaaatgctgaccctgctgaacagcgacaggttaatatttttgagtgtcttcaagttctaaagagtattcagaccgacctagctgagctatccccagccttacccaaaatcaccaaacagccacctgatcgacttcagaagcaattatcttcactggatttagttggggagagcgaaagtgcatattaa

SEQ ID NO: 62119 - DNA, 2451 bp, Acinetobacter baumannii
gtgcatattaagtttttagaccatggtaaaggggatgctagttttgcttcagcctatgtactagacgagtatgaccataaagggaatttacgtgctggcgttgaagtgctaagaggtgatgcccacacttttaaccatgcttgtagcgcaaacccacatgagtggaaatacacctcaggggtcatcgcctggtccaaagatgacaatccaactccagaggaaatccgcgaggttttagacaagtttgaagaccatgcttttgcaggtctgcacaagtctcagtatcacctttttgctgtactgcatactgatgatgatggatctaaacatattcacgttttagtgccacgcatggacttagttagtggtaagtcactcaacatcgcaccaccgttgcatcaccatcatttcgatccattaagagacaaattaaaccttgagaaaggatggtcacgtcctgacgacatcttgttggccaagttcacacaagaacccaatcatgtagccaaaatcaacagtcaggcagaaaaactactgcctaattttgagcatttgaaaaaaaaccaactccgccacgtaatcgacaaccacatccgaagtcttctaggaactgaaatccaagaccgctctgacatcattcgggtacttaggcaactagatggagtgaaggaagtaaccaatggcaaacacgtaacagtggtacttaacaatgattcaagacatcggatgaaaggggcattttacgatgaaaacttcgaacttggagcttatagagagcgcatacaaagagcagcagaaagtgaaacaaatgaagctgagcttagagcagctatcagagcagctgacgaacttcttgatcttagtcgaacagagcgagctacctataatcgcgagcgttaccctattgaacggcttacagagcaaaatcatagccatggaatcgaccttgaacaacctgaacttccaagctctgacagaagcaatagcgagctatctagcgcaattagatgcaactcaaaagataatctcaaatacagatttatcgaaaatccaagaagtttctgtttcagttcaagcgctacaggccaaaatcgaccaagcaatcagcagcatttcaatagatcagaagatgattcaagcccaagtcctagaccaagtgaggcaagcgatcaaggattgtcaaagcgaaataatagaaacggaaattcagtcgttgctgggggctcagcaagcccagcacctgacttgggcgagtacagcgtttggagtgctgatgcttttaatcagcttgttcacaagttatctgtccgttacgaacttaaaaacaatcagcgcacagaaagaaatgatcctgcaaaactcgcagtcaatacaaagccaaatcaattaactaaacactttacggagataaacaatgaagacagaaatagatcagtacctagcgcagcaaaacgaattattgaatcaacaaaacgaattattagtggaacaaaacgcatcattgatgcaggaaatcagttcgttaaagaccaccttgaatttatacaagaaactagagcaagacttgaacaacaaaatcagcgacttagaggaagagaacagggtaagaaaggatttgatttctcagatgaaatcgaaaatttcacagctagaacacggaaatttttcagcagattttcagcagaaattaatagccaatttcagcactcaatatcaaaagttatggatgaaggtctcagaagagcaggacttagtgaatatgctaaaaaatatggtgcaaacggagctgaaagaggaaaagacgcagctaaagacagctctcttgaaggtgtcgcagatgcctgttccgaaagattacagcaaagaaattggggagatgagtacctcgctaagcgacttaaagacaggattggggaatgtaacgactttggtcaagaacttgaccgactagcaacagaaatcaggaaaatacgtccaaagccaaagcctgcaactgattttgagactctacgttatgacatttattaccgacagtacacatcttcgcataaggaattttcagcacagcaggactacgcttatcaaaatggtagaaaacttgatgttattcatataattaagcgaaagtcagaaaaactaaaagattacatgaatcaggcaagaaatatgctgtaccgaagtgactatgagctaatagaaaaaatcataaaaaatgatgaaagaatgctcaaatatttggaatgtgatgcggttttagagtctcaaaatgtgcatttaaaaacccaaagatctgactaccgagcaagtttagatacctttgaagagatcaaagcaacaattgaagctgtcaaatcgtcaaaacctaaaatcacgcctcaaagtaacgagttagtttcagatcaaagattagacctcaagccaccaacacaagactttgacttgaactcttaa

SEQ ID NO: 62120 - DNA, 234 bp, Acinetobacter baumannii
atgattaagaaaagggaaattgccaagacaacgccagatcttgaagccttcatcaatggggctaacgaacaaatcacccctaaactagatcctaaagcctctagaaaattcaagacgcatacgattccaatgaatgaatatgagtacaaattattgactgagttagctgaaaagtatggtcaaactcataatggaattattagatttgctttgaagaaacttagtgaagaatag

SEQ ID NO: 62121 - DNA, 630 bp, Acinetobacter baumannii
atgattgtgttaattggaagccaaaaaggtggatgtggaaaatctacaatagccatcaacatagctgcttatcttgctaaacataacaaagacatcgtacttgtcgatgcagatcctcaacaaagctcagcaaactgggttaaagatcgtgataacacagatctacctaaggttcattgcgttcagcgttatggtgacatcaagaacactttgaaagacttaaatagccggtatgactatgtaattgtcgatgttgcaggtcacgatagcaaagagcttagaacagcaatgttaacagcccattacatggtcgtcccattcagaccatcacaatttgacctggacactttacctcacctttcagaagtgattgatcaagcaaaatcatttaatgaagatctgaagccatttggcttactgacattggctccaaccaatccatcagtgtctgaagtacaacaagcaaatgattatctcgctgactttcctctgttcacagcattgtcatcagtaatccatgatcgcaaggtttaccgtgatgtcaccgctgaaggtaaaggcgttgtcgaatcaaataatccaaaagcgatagaagagtttgaggcatttatggaggaacttcttgcatga

SEQ ID NO: 62122 - DNA, 912 bp, Acinetobacter baumannii
gtgacaaaagagttagtagttaaagacaatgccttaatcaatgccagttataacctagatactacagagcagcgtctcattcttttggccatcgtacgagccagagagataagcaaagatgtggatgctaagagcaccttagaagtccatgcacagcactatatgaagcaattcaatgtagatagacatgctgcctacgaagctctaaagaacgctgctaatagcctgtttgagcgcaagttcagttataaaggtatccatgaggctacccagaaggaaaagatcgttaaatcgcgttgggtgtcaagaatagcctatgtcgattctgccggtattcttgaactggtttttgctccagatgtcattcccttgatcactgaattagagcaatcttttacttcgtatgaactgaagcaaataagctcattaaccagcaagtatgcgatccgtctatatgaattgttaattcagtggcgcagtattggtaaaactccactcttccttgttgatgactttcgcttcaagctgggactgggtagtgatgaatacaagatcatgagcaactttaagaagaaagtcctagatgctgctttggttcaaatcaacgaaaagacggatattgttgcggcctatgtgcaacataagtctggccgaaacattaccggattctctttctcttttagttctaagaaaaccaaagagactgagagtgggtctcacaaaaaactcagcgataaacagattaggctattcgcaaacaagcttgcccattacgatccatttgccagtcagaaagccgaagttggtgaatcgtatgcagacttggagaaaagacttctgattgagctgcaagatgttaaggctgtcaggaagtatgcaggtactctgaaagagttaggtcttgaggtataa

SEQ ID NO: 62123 - DNA, 147 bp, Acinetobacter baumannii
atgcaataccaagcctctgaaacattacaacaaatcttcatttctcaaaccaaaccaacttttttttccaaaaaccctacaaatggaaaagtcatttttttaaatacattacagtcgagagcaactctaacaagtttaatgtactga

SEQ ID NO: 62124 - DNA, 1152 bp, Acinetobacter baumannii
atgataaaaaatgcaaatccgtttgacttatttcaaaagaactttgtttttgaagaacaaaaaacaaaaaaaacagacctcgatgatgcacttaacatttttcgttcatctatttcagatgtctgtttattatggaagagtaaagtagcgctggcgggtgaaaaaccagtcatgcttcataaagatgatgcagatttttcaaaatttgcttatatgaaaatggcttctgactttaaaattggcgtcttggtgattgatatcgatcgccgaatcgcggattcgatagaagtgatgatctacagtacaccgaatgcaccgactcctaacttgatcatcaaaaattcggcaaacggacacgttcagctcgtttattgcttaaaaaattggctatgcattgatgtcaaaaatagtaaaggcaattacagcaaaaaagcacatagattctataaggccctgaaacagcacttaaatacgatttttggcggagatgattgttatcataattatattgccaagaatcctttctgtacacaatgggatgtggtaggtatgcgttctagtccgtatgaaatgtatgagctagctcgtatcagtgaattacaagtaataaatacaacgttcattgaaagattacagaaaaaaacaacagatcaagtcacagcagaagatttaaatttgctcacagtgctggccggaagaagaaatactgttttattccatacagtgcgtaaacatgcgtatggattatacaagaagaatgcacgggagtggacaaatgctcaatttgagagagttattcatgatttggcatgtgaactaaacacctcaaaatgtcatccaccgcttccaaaagcagaggttagtgcaacttgtcgtagcattataaaattttgctatgaaaaattagggaaatatgaaaagttcacgcagtcagaactgagtgaacttgcatcaaaatgcggaaaaaaaggcggtaaggcaaaaggtaaaaaatacgcacagcaacgtgctgaggccaggaaattagcaaaacgtggcaagaaagccacagacattgccaaacttaccggtttgtctctcagcgctgtttataacgcgattaagctagaaaaacagcataaaacgtcttcaaaaattaatgcaataagttag

SEQ ID NO: 62125 - DNA, 270 bp, Acinetobacter baumannii
atgtcaagaatgtcaaaaacaagcgccagctatattcgtattgcggataagattatttttacctatgcggaactagtacctggcaatcatcatgagttcaacaaaaaaaataaaggcgtaccagttgccgctgtgcattatgaaaaattagacgagtatataattttacgtgatggtcaggaacaaccgctgtgcattgatgacccgaaaaaatttatcagatcaattcgccgattaaataaagattgtgaaatcataaataagctatga

SEQ ID NO: 62126 - DNA, 324 bp, Acinetobacter baumannii
atgaaaaaatttttatacttcaattgcttatcttttatttttacttatttatctttgttttatcagaaatatacattagtggatcgtatagttgtagacaagcttggaaaagttaaagtcattggaggaggatttcccttacagtttttagtagatggtgaagtatctccaggtgggagtatagcgctagatcctttaaatattattataggaatagatcaatttatcttcttatattttatttttgattatttgttctggataagtgttttatttgctttttacataattttgaaaaggtacaaactaaaacagattttctaa

SEQ ID NO: 62127 - DNA, 423 bp, Acinetobacter baumannii
atgaaaagattagaatttattttattaagtttacttgcagcctgcagtccagttacagaaaaaattgaatcaaatatagttgttccacgtattcaatatacggggggagcagataatgcaagttatagtgaggctaagcttattagggaaggtaaatgcctatacctagaacatgctgatggctctaaagttctgccaatttttgctacaaaaactctagattgggatacggaaactaagagcctaaaagtagattcggatacttattttttaggtgataaagcagcatatggaggcggagaatcctatcctctagaaaaaaataattattcttggataactgaagtagatcatagctgtgatacctcaaaagttatagttattaatcgactcataagaccaattgaagaactaccaaaatga

SEQ ID NO: 62128 - DNA, 327 bp, Acinetobacter baumannii
atgaagaatagcctattttactgtcttacattagttctacttataggatgccagccatttgaaaaggatggatatatttttattaaaaatcagactgattatccaattacagaccttaaagtaacttatattagtgctcaaaaaacttatagcttaggtactctttatccttattcagaatataaatacgccatcaattacgagcggcacaatgaggattcaataatcttttcatatttagataaaaatcataaaaagattaatcaagaagtagctacgtatgcagccaaatatgataggaaaagttatgaaatagttattcaatag

SEQ ID NO: 62129 - DNA, 300 bp, Acinetobacter baumannii
atggacaaaaagatagaagagaaaactaaagatattaatgaaaaaattcaaaaattggatttagctatccaagaactaatagaaactacagacaatttttttattaatgataagtactatggaattgaatgtgcttttattttagaccatgcactaaatattaaaatgcactttttcaacaagtatccagcatttgcaccacctcacttacgaggagtagaaaattatgatcgaattatacatattagagaaaataatcctgaagataagctagaacaaatttctcctcttaaagactaa

SEQ ID NO: 62130 - DNA, 171 bp, Acinetobacter baumannii; identical to SEQ ID NO: 53392

SEQ ID NO: 62131 - DNA, 663 bp, Acinetobacter baumannii; identical to SEQ ID NO: 53396

SEQ ID NO: 62132 - DNA, 2880 bp, Acinetobacter baumannii; identical to SEQ ID NO: 62017

SEQ ID NO: 62133 - DNA, 294 bp, Acinetobacter baumannii; identical to SEQ ID NO: 53398

SEQ ID NO: 62134 - DNA, 864 bp, Acinetobacter baumannii; identical to SEQ ID NO: 62020

SEQ ID NO: 62135 - DNA, 132 bp, Acinetobacter baumannii; identical to SEQ ID NO: 62021

SEQ ID NO: 62136 - DNA, 315 bp, Acinetobacter baumannii
atgattattgctgaaagtatttttagccgtattggcaatctgcgcaaagttatgtcagaccctcaaatcgcccgccttctatcaggaaccaaaggtgttgagagtgagcattacaaagacttgattatcaaagtcgatgacatcgtagccaaatgccctgttacctatcaaacagacggccaaggcgacaacgcaatatgccaaatgcattacttcaagggagatagcgacgtttacatcgttgaattagacgttgctggtccacctcatactcaagcatatggagtaatcagacttaatggcggttacctatag

SEQ ID NO: 62137 - DNA, 777 bp, Acinetobacter baumannii; identical to SEQ ID NO: 62023

SEQ ID NO: 62138 - DNA, 777 bp, Acinetobacter baumannii; identical to SEQ ID NO: 52165

SEQ ID NO: 62139 - DNA, 192 bp, Acinetobacter baumannii
atgagtagtctcgattttgagcaactttatctaatggctctcatgaatagtaaaaagccaaagtacgttttgaattgggttcatgtctccagacatgggccaggtgcgacaaaagctacagaaatttgtgaatattttgggatagatccagaaggcactgattttagaaaagcggaaagtaaggaggagtaa

SEQ ID NO: 62140 - DNA, 225 bp, Acinetobacter baumannii
atgagtgattacatgcacatgactcttgagaagcttcggcaagaacatgctgaactacttttgtttaatgaagagttggatcgtcgttgcaaagcccacaaagcagatgcacaaaaatatcaaactaagtgctggcacattacaacgctattgatgaatccagttgatcaagacatgactttgaaagcaatccaaacagtgattgaaagggttggtgaagaatga

SEQ ID NO: 62141 - DNA, 519 bp, Acinetobacter baumannii
gtgtacggagaggcaactaagttatcatggagtgtcaattataaaaatttccacgcgaaatgtcaggaattgactactttattctgtaaacaagagtttactttcccaccatttaaaggaatatcagcgtctattcaagaagttgaaactcatcaagataagttgtttgtaaaaaaaattattgaaattgatcaccatgtaatgatttcagatgctattggtaattggcttgaattagtaaattctatgaatgaagagttggatggccatccattatttatagataaaactatagcttatcaagagcagttagttaagaggtttaagctcgcttattctaacgctcagcttgaaatgatagattccttaagaagttcaaaactactttataataatacaattagagaagttccattaaatatagataataacatccctccaatagaatataaaaatggcttaattcatgaagctatggatgatgaagatagagacttaaaatggaaggtggatccatga

SEQ ID NO: 62142 - DNA, 219 bp, Acinetobacter baumannii; identical to SEQ ID NO: 53423

SEQ ID NO: 62143 - DNA, 249 bp, Acinetobacter baumannii; identical to SEQ ID NO: 53422

SEQ ID NO: 62144 - DNA, 516 bp, Acinetobacter baumannii; identical to SEQ ID NO: 62008

SEQ ID NO: 62145 - DNA, 174 bp, Acinetobacter baumannii; identical to SEQ ID NO: 53421

SEQ ID NO: 62146 - DNA, 252 bp, Acinetobacter baumannii; identical to SEQ ID NO: 53391

SEQ ID NO: 62147 - DNA, 171 bp, Acinetobacter baumannii; identical to SEQ ID NO: 53392

SEQ ID NO: 62148 - DNA, 231 bp, Acinetobacter baumannii; identical to SEQ ID NO: 53393

SEQ ID NO: 62149 - DNA, 2412 bp, Acinetobacter baumannii; identical to SEQ ID NO: 53394

SEQ ID NO: 62150 - DNA, 834 bp, Acinetobacter baumannii
atgttagagattgctttaggctcagcattgatatattactttgcaacagaagccttcgaaatagaaaaaaaaccgccgggaactgtttattatacagagactgccgattcacgtaatttatcatttcatcgaaatcatattgaaccagttactataaaaccagctgttgaagaccagtttcgtggtattgttcggcaagcctacgattatagttgtggatctgctgcgcttacgactttattaaacggctatgttggaacaagtttaactgaacagcaaacaatgagtggtttgctgcagtatggcgaatatcaacgtattattgaacgccgaagcttttcgctacttgatatgaaacgctttgtcacagcaattggcttagagagtggtggttaccgaggggagttttctgatttagttaaactcggtcaacctgcaattgttccgatttcatatgctggttttaaacattttgtcgtatataaagcttataaagatggacgagtatatgtagctgatccagctttagggaatatcagttttgacgaaaatcgttttaaggaaatttgggataataatacgttatttgtaatttcagttcctgaatctcagcgtaaagacctactggccctaaaagatgcagatatgcgccatgtagaggatgcaacagtcaatagatatgcttttgttgatgtgcaatacccgacgtttaattatgaccgtttagcaaataaggcttctacgatgaggcgtgtcttagatgatgatgacaaatcgccaacttatggaaagccaatagaaacttatatgcgtctttattacaagcgtaaatag

SEQ ID NO: 62151 - DNA, 447 bp, Acinetobacter baumannii; identical to SEQ ID NO: 60969

SEQ ID NO: 62152 - DNA, 339 bp, Acinetobacter baumannii
atgaaacgcaacctttttaaattatcccttattgctgtaggttttgctgctgcgtgtaatgcgtctgcagttgtaacggtctcagcgcgacctatagtggtgtcacggccatctataagtgtttctcgtccagttaatacagttcgtaccactccgacacgaccaagtagttattcaaaaccaatcacaacaccacgacctgccagagttcaacctacttcgacgcatacaccagtgccggttctaactagaccacattatgagtattacccatttaaggactgtaagcgccatgtgagtggtggatttaatggttggaagtgtatagaccgttattaa

SEQ ID NO: 62153 - DNA, 414 bp, Acinetobacter baumannii
atgctgataaatgatttgggttttttgctatttagaagaatgcgactagagcaaatcaatttaattaacaaagaaattgaacggtttaataaagttctggaacgctggcgtgaatataacgatttattagaaatgtatcagtctaggcctaactatatggcttatgttccgtccccgtttttttgctgtccgaccataccaaaacataaggccattgaaaatattaaaaagctcgaagacctccttatatacaaccaagaaatgttagagctagaagatatgaagcggcaagcattgattaaagctgtattggtggtttttgtactttgtatttatgcctatgcaatgtggtctattagtgctgaaagcgtagttgagtttatgtttatgggcctagggttcagggtgctttaa

SEQ ID NO: 62154 - DNA, 297 bp, Acinetobacter baumannii
atgaacagctttacacagcaaatcaaagattctcgccagcaaagtgaaatccaatctttctatgagcctgcattgcgagtacttgggcacctatttgaggtgaaaaagcaaaatttacgtaacaaaggttatgacgaaaataatgcagcggtaacaaagattgaattttcagaagctatggctcgtcaatttcgcataacgcagtggttagcacagcagattgtaactagcttaaccaaggcgtgtttggttgattcttttggaggctatgttaagccaaaggatggtgaaaagtga

SEQ ID NO: 62155 - DNA, 432 bp, Acinetobacter baumannii
atgtgtaagcattgcgaaaatactaaaaaacttcattccagttttatggctagtcggtacaaaacggcttcgattaataaacattattcgcgtcttgaaagagaagctccacatgaggcatttatatttaaactgagtttagatgctggtgtaaaaactacaaaatatggattagttgcatttacattctgtatggaaaaacgtgcagttaaatatgtttacgataatttgacagctaaacacctaaatcaattaattccagtggttgaagaagttaatgcccttagatctgctttaactcttttgcaggccagacttgcactgtcagatgatcagattcttaaaggtatcgtggatgatgcaatatcacgttcatccactcccctaagtgtcaatgaattaaagaatgaactaaaacttttcgctcactaa

SEQ ID NO: 62156 - DNA, 297 bp, Acinetobacter baumannii
atgaatagtcaatttaagtataaacctgagtacaaacagactcaggaaattcagtccttctttgatccagcgttagtgattctcaatgagctacatgatcgtaaccgtaaaaatctaagagccaaaggttatgacgaaaataatgcggcggtaaccaaagttgaattttcagaggctatggctcgtcaatttcgcataacgcagtggttagcacaacagattgtaaccagcttaaccaaagcgtgtttggttgattcgtttggtggctatgttaagccaaaggatggtgaaaagtga

SEQ ID NO: 62157 - DNA, 837 bp, Acinetobacter baumannii
atgagtagtaactgggtggatatttcaaaagataccaatacgggtatcgaaacaatccgtgctcattttactggtcatgcgtatgatccccattggcattcaagttatttaattggtgtaactgaatctggcattcaacaatttcattgtcgtaaaaagcaaatcaatagtcatgctgggcaagtctttatgcttgagccagaagaaattcatgatggacatgcgcctgcatctgatggttttacctaccaaatgctttatttacatccagaatggttaaagcaacgccttcaaggtttgtttcacaacagccccgatcattacgaactagtgattgatgcgccattaaaatccgatgaacaactcgcaatcattacttcacaagcatttcgacacttacactataaagaaatgaatattgtgaaagacaatagtctagatgtgcttattcaatatattgcccaaggtaaatggttaaaaaaagcttctcaatcttcttgtattcatgtaccccaaatcgcccatcaaatccgagatattctgcatgatcatttatttgaagatattgggttagaagatatatcacgtatggtgggactagaccgttaccatattcaccgtatttttaaatcaacttttcatttagctcctcatcaatatcttattcaacttagacttacacgagcacgtgatttactcgctagaagtatttctccagcacaagttgcttctgacttatgtttttcagaccaaagtcatttaagtcgttggtttaaacgctgttatggactaacaccagccgcttacagaaaaatctgcacaaatcttcaagattaa

SEQ ID NO: 62158 - DNA, 225 bp, Acinetobacter baumannii; identical to SEQ ID NO: 60982

SEQ ID NO: 62159 - DNA, 1185 bp, Acinetobacter baumannii; identical to SEQ ID NO: 60983

SEQ ID NO: 62160 - DNA, 795 bp, Acinetobacter baumannii
atgagagcttctactgttacaattaaaactgaacaagatctagaaaaattaagagtttctgggcgtttggctgcacaagttttagaaatgataggggagtatgttaagccaggtgtaacaactgaatatttagacaatatttgtaatgattacatcgtaaatactttaaaagttatacctgctaatgtgggttatcatggattcacaaaaacaatatgtacttcagtcaatgaagtggtatgtcacggtatcccttctcaaaataaaattttaaaagatggcgatattattaatattgatgtagcaattattaaagatggctattttggtgatacgagccgtatgtactatgtcggtaacgtaaatccacatgctaaaaaattagttgaaactacttatgaagcaatggtcgctggtatacatgcagttaaaccaggggcgactttaggggatattggttacgctattcaatcggtcgctcatcgcgaaggatatagcattgttcgtgaatattgcgggcatggcattggtaaagtttatcatgaacagcctaatattctacattatggacaacgcggccaaggtcttgttttgaaaaaagggatggtctttacaattgaacctatggttaatgcaggcaaacctcaggtaaaagagctaaatgacggctggaccgtaattacccaagatcattcgttatctgctcaatgggaacatatggttgctgttacagatacaggatttgaattattaacgccgtggcctgaaggtgtgggaaattatccagaaatttaa

SEQ ID NO: 62161 - DNA, 591 bp, Acinetobacter baumannii; identical to SEQ ID NO: 56970

SEQ ID NO: 62162 - DNA, 603 bp, Acinetobacter baumannii
ttgagaaatttttctgaaattgttggtggtgagtgggatcctatttcaatatctagagagaaatttaaaattgaagggggaatctatcctaacaaaaaattatcagagatatccagcattcaaaaaggtcaaagtattacatctacagatgttataagtggtaattatcctgtcattgcaggaggtaaaacgagcccttacgctcataatcaatataattacaaagatgaaactattaccgttagtgcttcaggagcgtactctggttatgtttggtaccatgattatccaatatttgcttcagattgttgtgtaataaaagtcaaaaatgttcatgtattagcattatatctagctgaactgttaaaggttaagcaaaaagaaatttattatttacaaaaaggggcaggacagccacatgtttatccgagtgatttagcaaagttaaaaatagcaattcctccgttgtctattcaagaggaaataatttcacatatccaacgaattcgagatgaagctaaaaagttagaagatgaggcaaatttggtgcttgaaaatgtaaagcaagagatagaaaaaatgattcttggggaagcagtatga

SEQ ID NO: 62163 - DNA, 390 bp, Acinetobacter baumannii
atggttaagaaaaaatttacccctactaatgcccaaggtgatcttactaatctggcaaaaggaattgctgagattgttttacgtggccatgtttttgttaaagcaatgtgtagcgcatgtcagggaataggaaagctcgaaatttttaattcaaagggttttcctgatggttcaaagttttgtgaaaagtgtaatggaaatggtaagcggccatatacattaaatgaaaaaatggaaattgctaatattgatgcaactaagactgcttacattaagagttaccagaaatatgagcagcttggagaatcagtagttgcagaatgggaaaatgaaatacgcgaaagaattcagcgctcttttagatttgaacttaaaggtgaaagatattaa

SEQ ID NO: 62164 - DNA, 510 bp, Acinetobacter baumannii
  misc_feature (492)..(501): n is a, c, g, or t
atgattgtctatgaggattcttcacatacgaagccaatcataattgttgaggctaaaaaacaagaagttacacaggcagaatttaatcaagctattaatcaatgctttagttatgcaaatgcactttctggtacagtgaagtatatttgggtgtattcaacattacttagtgaaatttatcgcttcaacaaggaaaaaaatacacgtgaagctttaacagatttgcctcattttggttcggatactgtagcaccttatacctttgttaaaggtggggggaagcatgaatatactgatcctaaaactgggaaaaaagttacacaagaatttaaagatataaaaagagttgcagaggatgagttaacacgtcgttttaaacaagcacatgatgcactttgggctggtggtcaattaaacccatcagaggcttttgacgaactggataaattaattttttgtaagatctgggatgagcgttataacttagagggnnnnnnnnnnagccactaa

SEQ ID NO: 62165 - DNA, 1068 bp, Acinetobacter baumannii
atgtggaaaacggatttaaaggaagaagaaaataattactttttattaaatacagatgctcaatataagtctataaatttatatttaggcattccatattgtattcctactgatccacctcattgtggattttgtcttttcccaacacaagactataaaggtaagcgggaaatggacttttatctggattttttaagtagggaagcccacttatataaagaattttatcaaggagctaagcttgaaagtttgtatgtaggaggaggtacacctaatttacttcagcctaatgattatatgaaactgactaaggttgtatcttctctttttcccgatgctggtatatctagccctatagaaatgacattagaaggtatccctcaactttttaatgaagataaaataagagcaattaaagatgcaggttttaaccgtgtcagtatgggagtgcaacaggttaatgatgagttaatcactacaagcagtcgaaaacaaacgagaaagcaggtttttgatgcaattgaatggttccataagtattctttatcttgtaacgtcgatttgatctatggctggccaaatcaaacggttgaggcaatgctaagagacttggaaagtattgttcaatcaggaataaaacatattactcactatgagcttaatattgctggtcgttctgactttgcgacaaaacaaaagcaaaatacgccctctattgagaagaaaattgaaatgtataacattgctaaacagttcttaataagcaaaggctataaacaaaaaacagtatatgattgggaaaaagaagataataaccaattaatttcagagaaatatttatatgaagataaccttagagactgcttagatgccaatgggcaaagtaaaatgaccacaatgagtggactgggttatgcagccgttaatatgagactgcaacctaactcatcaagcattaaatctgtttcagcaatgaatcatcgaaacctaactgaatactacaatgcaatatctttaaataaacttcctgttgaacgtatgtttgttcatgatactgaagatgtatga

SEQ ID NO: 62166 - DNA, 723 bp, Acinetobacter baumannii
atgttaacgaatcttcgagaacaatggttctctaatgtccgtgcagatattctttctgggcttgttgttggtctggctttaattccagaggcgattgccttttcaattattgcaggtgtagatccccaaatcggtttatatgcgtctttttgtattgcggttattatttcttttgtaggtggccgtcctgccatgatttcggcagcaacgggtgctatggccttagtcatgacgcccctagtgaaagaacatggtcttcagtatttattcgcagctactattttgacgggcgtcatacaaattatagtaggatatcttaagcttgctaagctcatgcgctttgtctctaaatcggttgtgattggttttgtaaatgctctcgccatactcatttttatggcccagcttccagaactagtcaatgtaagttggtacgtctatctattagtcgctattggtttagcaattatttatctattcccttatgtaccaaagcttggaaaaatttttccatctccccttatatgtattgttatagtcacattacttgctatctttttgggccttgatgtgcgaacagttggcgatatgggagcactaccaaatactctacctatttttttaattccggatattcctcttaatttagatacacttcttatcattcttccttattcattggcgttaggtaagcgtccgctgaatcccatgcctattttttaa

SEQ ID NO: 62167 - DNA, 774 bp, Acinetobacter baumannii
atgagtcgagcaaaaacaagtacaattccacaagtgaataactcaatcatcgatcagaatgttcaagcgctttttaatgaaatctcagctgatgctgtgtttgtcacatatgatggtcaaaatattaaaaaatatggcacgcatttagaccgagcaaaaacagcttatattcctgcatctacatttaaaattgccaatgcactaattggtttagaaaatcataaagcaacatctacagaaatatttaagtgggatggaaagccacgtttttttaaagcatgggacaaagattttactttgggcgaagccatgcaagcatctacagtgcctgtatatcaagaattggcacgtcgtattggtccaagcttaatgcaaagtgaattgcaacgtattggttatggcaatatgcaaataggcacggaagttgatcaattttggttgaaagggcctttgacaattacacctatacaagaagtaaagtttgtgtatgatttagcccaagggcaattgccttttaaacctgaagttcagcaacaagtgaaagagatgttgtatgtagagcgcagaggggagaatcgtctatatgctaaaagtggctggggaatggctgtagacccgcaagtgggttggtatgtgggttttgttgaaaaggcagatgggcaagtggtggcatttgctttaaatatgcaaatgaaagctggtgatgatattgctctacgtaaacaattgtctttagatgtgctagataagttgggtgtttttcattatttataa

SEQ ID NO: 62168 - DNA, 312 bp, Acinetobacter baumannii
atggaaggatttgataatccgtatgatgacgatatgacattaacggaattgaaaaagactgaagaatacaaagcatggaaagcggaaattgatgctgaataccgtgaaaaaattaatgagcttaaagaaaagttagaagatttgtatttgcagaataagcaaaatggattgcctgattatccagtctttatggcgattgcggaagatattggctatgacgcaacaggtaagcagacgcaagtgaatgagcttgaactgatctcgactgaattagctaaattcattcaggagattgaaaatggttcaatttaa

SEQ ID NO: 62169 - DNA, 282 bp, Acinetobacter baumannii
atgcagccagtaataaaaaaactagataaatatcacttagagtgggaaggtaaattctatattaatagattatttaatggtcgacatcaatttattttcactaaaattgatgctaatacaactcaattagttcaagcagaagattttaatgggctacttgtacctattttaaattacattattattcaacctacaaagttaaattttaataaaatgaatagatccttcaaaaaacatattgaaagtcagaacttaaataataatacctgtaaaatatcctag

SEQ ID NO: 62170 - DNA, 795 bp, Acinetobacter baumannii
atgtctaatttagtacggaaattaggaggtgatttaaagtttgagaagaaatttactttttgtacacttgttactcgtttcgatgaatatatggaaatggtggagagtgcaaggcttgcaggatttgatgagaaagttgagtttctatatttcgataataaaaattccaatcaatttgatggctatagtgggattaatcgtgcattaaaagaagccaaaggagaatatctaattttctgccatcaagatattttgtttaaatatgatagtagagatgatttagagcagagaattttagagattgaaaacattgaccctaattgggctgttttaggtaatgctggtaagagtgaagctggtcatacatatgttcgaatatctgatcctgtatttccctatctgaaaaaaggaatacttccatcacaagtaatgagtttggatgaaaattttttaatattaaatagaaagcataatttatcaacaacttccagtatcctcaacggtttccatttttatgctattgatttatgtcaaaatgcaaaaaatttaggattgaaaagctatgttattgattttcacttgtatcacaaaagtccaggtaatgtagaccaaagttattttgatgtacaaaaagcttatatacagttgctataccagcgtaagcaatcacagtttttttgggctatgtgttctcagttctatgtttcaaataatgttttaaagaatattttttttaatttgaaaaaaattctacgtttatcaagaagtattatgaaaaagaggaatagaaattaa

SEQ ID NO: 62171 - DNA, 474 bp, Acinetobacter baumannii
atgtctaatccacattctattgttcattatggcattgatgctgagcaaaaaagtattgaccaagcaattgcgaaacagcaatgggttggtgctgctaataatactaagtggtcagaattgataacatttatgcaaaatgacgataaaagtccaagctatcgttactgctggatgccgaatcattttatcagtaattgggatgttgaatggtttggtcatattcctcgcccatttgcaggcgtgttatggctagatattggaacactagaagaagtggttgaaaaaccatggggacatcagaaaattatcgaccattctgatcgatttaaagaattactggtcaaaattggcttggaatttgaacaacgtgaggacgttattcggatttggggttatttacctaaagatgaaacggattttccaccccaagccaactttaagccacataaaattttttcggatacatggaaatga

SEQ ID NO: 62172 - DNA, 651 bp, Acinetobacter baumannii
atgaaagcttatacagttgaacaaggtatcgttgcaccattagatcgtgccaatgttgatacagatttaattattccaaaacagtttttaaagtcgattaaacgcactggttttggcgacaatttatttgatgaacttcgttatttagatgaaggttatccaggacaagacaattcagtacgtccaaaaaatccggatttcgttttaaatcagcctcgctatcaaggtgcaaccgttttaattgctcgtactaactttggttgtggttcaagtcgtgagcatgcaccttgggcattaaacgaatatggtttccgtactgttattgcaccaagctttgctgatattttctttaataactgtttcaaaaatggcatgttacctgtcattttgtcagaagaaattgttgatcagttatttaaagaatgcgctaccaatgacggatatcaattaacaattgatttagctgctcaggaagtacgtacgccaacaggtgaagcttttaaatttgaagttgatccgtttcgtaagcattgcttgttaaatggtttggatgatattggtttaactctccaaaatgcggatgcaattcgtgcttatgaagaaaaaactaaacaagttcgtccttggatattccaagagctagctaaatag

SEQ ID NO: 62173 - DNA, 1419 bp, Acinetobacter baumannii
atggcaggcaaaactttatatgacaaattgtgggatgaacatttagtctcacaacgtgatgatggctcatgtttactatacattgaccgtcatttattaaatgaagtaacaagtccccaagcattcgatggattgcaacttgcgggtcgtcaaccatggcgtttaagtgcaaacgtcgcgacaccggaccacaacgttccaacatctaaaaaagagcgtgaacaaggcattgctggtattgaagatgatacgtcgcgtattcctgtacaaacactcaataataattgcaagacttttaatattattgaatttgatatcaatgacatacgccaagggattttacatgtgattggacctgaacagggcttaactttgccgggtatgactgtggtgtgcggtgactcgcatacagcgactcatggtgcattcggttgcttggcgcatggtattggaacatctgaagttgaacatgtgttagcaacacaatgtttgatccagaaaaaatctaaaaacatgttagtgcgtgtagatggcgtattgggcaaaggcgtaacaccaaaagatgttgtgttggcgattatcggtaaaattggtaccgctggtggtacaggctatgcaatcgaattcggtggtcaggtattccgtgatatgtcgattgaaggccgtatgacggtctgtaacatggcaattgaagcaggtgcgcgtgttggtatgattgcagttgatgacaagaccattgaatatgtgaaaggccgtagttacacaccaaaaggcgaacaatgggagcaagcagttgcttactggaacacattgcattcagatgaagatgcagtgtttgatgcagtcgttgagttaaatggcgcagagatcgaaccacaagtatcttggggaacttcacctgagatggtaattccgatttcacaagctgtaccaactttagagcaagcgaaagatgatgttcagcgtaatgactggacgcgtgcttatcaatatatgggtttaaatgcaggacaggcattagctgatattcagcttgatcgtgtctttattggttcttgtacgaactctcgtattgaagatatccgtgctgcggctgaggtggttaaggggcgtaaagtggcatctaccattaagcaagctatgattgttccgggttcaggtttagttaaacaacaggcggaaaaagaaggcttagataaaatcttcttggaagctggttttgaatggcgcgaaccgggttgttcaatgtgtttagcaatgaatgctgacaagttacaaccgggtgaacactgtgcatcgacgtctaaccgtaactttgaaggccgtcaaggcaatggcggtcgtactcacttggtgagtccggcaatggcggcagcggctgcaattgctggtcactttgttgatgttcgttcattttaa

SEQ ID NO: 62174 - DNA, 138 bp, Acinetobacter baumannii
atgatagaaagaactcttatatttactcgaaataatgaaaatattaatgaagaaattagtagagtaatacaaaatacgataagtaaatatgcagatgaatacgacgttttctataactgggatacagatgttgtataa

SEQ ID NO: 62175 - DNA, 831 bp, Acinetobacter baumannii
atggctattctcaaaaaaattgatcctgcctctttggaatctatttgcaaaatattaggcgatacaatgaatggcctaacaggtacggaaatctctaaatacctaagtgagtgtaatatttctgatccaaaaataaattcaacaaaatggaagaagttatatgatgctttgaatctcaaacagaatgaagataagtgcgccaataatttaatcttttttattcaacatgtcatgagaccatcaaggcactttgataatgtaacatggtttaatgaaatacgaaacaaattaaatattgtgctttcatttgaaggattggaattagaagaaactggaattataaaacgcatcacagccatcaaaacacttactgaagcagaagaacgcgctataaatttaagaaaagtactaattgataggaagattcataatgacgttctacttttctgcaaagcagagctgttagttgataattattttcatgctgtatttgaagcaactaaaagtatcgctgaaaaaattcgtaataaaacgtctctcactacagatggatctgagttaatagatcaagctttctcattcaaaggaaaaattcctcatctggcattaagcaatttaatgacagaaagcgaagaaagtgaacaaaaaggttttatgaacttattaaaaggaatttttggtacatttagaaacacaacagcccatgctcctaaaattacttggactattgatgaacaggatgctctagatattttatctactatttccttaatacatagaaaattggataaagctattgaggcaaaaaaaatgtatgagggaaaattataa

SEQ ID NO: 62176 - DNA, 339 bp, Acinetobacter baumannii
atggcaaatacacttggtgataaaattagacttcttagaaaagaaaaaaaacttactttagaagccttagctaataatgctggattaagtaagagttacttatgggaactagaaaatagagaatctcagaaaccctcagcagaaaaattattatcaatagctcaagctctaaaagttgacgttgaattttttttagaaatggattcaagaactccagaggaaaaacatattgataatgctttttttcgtgaatataaaaatttaaattctcaagaaaaagaacaaataaggaatataatggcagtaattaaatcatcttcaggtaataagaatggatga

SEQ ID NO: 62177 - DNA, 744 bp, Acinetobacter baumannii
atgaaaactttattaaccgccttaaaagataataatcagactttggcaacggaattatgtagtcactttcaggaaccgaaaggcacagggattggatggacaaagaaaagttataaaggcagaggagctggagaaataaaagctgctaaattgctggaagcattaacttcttctgaagcagttatgtctggtgcaattgaagatttagaagaactaatattggttgttgaaggattaggtttagatactatctctgatataacaataaacctagggatgaaacattttatagagtttacgcaagaaaaatgtaatgagctaaatatcccattagagagaataaataaaaaagttaattacttttgtcatttagataatgagtggaaatcagatttttttgacttacctcatgctcttatcggtgaagaaaaagaaaaggggcaaattattttattgcctataaacactttagctaagcaatcagcgtatggaacttcatatttctttacaaatatcgcaaccccctatttcgttaatcaaggtatagctgctggtgcatcttttatcagagctacaaaatcaggaggctataaagcggatcttaaaaagatgagggaaaatgatcaatataaaggtggaaaaaaaagaatggggaaatttataactgatcacccagaagctctaaaggaatatcgagagaaagttgctttctatcgatataagaaaaatcacaaaaaggactaa

SEQ ID NO: 62178 - DNA, 249 bp, Acinetobacter baumannii
atgtctaaaaatacgaaacaaacatctaaagcagttagctcattagcatcggatgtattacgtaactcttcctcttctgcaatacaaaaacagttagctgcttctgccttgtctcaaacacattcaagtaaacaaacaggaagtgagatggagacaaaagcatcaaaagtattacaaagtgacaaatatagtgatactacaaaatcactagcggcatcacttctttcacaatctaataagcaaagataa

SEQ ID NO: 62179 - DNA, 303 bp, Acinetobacter baumannii
atgttcttgattggagatgttggcaaaatttttttacattacacaatgcaaaaaactggtgtaagaatagaaaaagcgaatttatacatcaaagaaccttatgccaatctaattgaattaccaaaactgaccactaaaaaactaagccaagaccaaatttttatttttaggggtatggaagtcccttttcaaggaattggtaaaaatactttagtttcttacagggtcaaagagattgaaaagcaaattgtgattcctaatgaatatattactgtagagcgaactgaaaagaccgataactaa

SEQ ID NO: 62180 - DNA, 1281 bp, Acinetobacter baumannii
atggattcaatgctgctactacatttgatgtctcaaattttccctcataagatccgaataatttacatagatcatcaactgcaatcaaaaagtgcagagtggggcgaactcgttgctaaacaagcgactcatttaaatattccttataccattcaaaaagttcaagttactgacggtaatttggaagctcaagcacgtcaggcacgttatcaagcttatctacaacatttacaagccaacgaaattttagtgcttgctcatcaccagcaagatcaagctgaaacagtaatattacgtttattgtcgggggcgggtgttgatgggcttgctgctatgcagtgtattgatcatcgtgttgatatgacaatttggcgcccttttttggatttaacccgtgagcagattgccgagtggactactcaagttgaaattgagtatatagatgatcctacaaattacgatatccattatgatcgggcgtggtcgcgtgaagaactttggcccttcttacaaaaccgttttccaaaaatgcagcaagcacttagtcgtactagctatttgatgcaagatgcttctgaaattttagaggaagttttaaaagttgatttgcaaaattgtggtacggacgaatgtttggacttaaatcagctattaaaactatcttctgcccgtcagcgtcaattgctttcggtttggatgaaaggtgatgggcaatatcgacctgcatttgaaatggttgagcgtttaaaaaatgaagtaattgattcaaaatctgatgcacaagcggcattacactggaaccagttttattatgttcgttatcaacatcatctttataggttgagtaagcaagtttttcttgttgaaaaattaaatccagttgaaaccgagatggagcattattttcaactaggggaaatagtggaatgcgcttcaggacaatttcaaattactcaaaaaaatatgggtttgtctgcatctttattaaataaaaaattaaaaattattcgacgccaaggtggtgaaaaggtccatttatatggtcgtgttgggcaatggccattaaaaaaagcaattcaagaagcacatattttgccttggcttcgtcatacaattcaaatattagtcatagataatgttatgcttggggtttttacaccgaaaggattttggttggctcagtctccgtattgtgagcaaggaggatggcaaccagatttaatttcttattcttgtaatctggtaaatggcgaagatggttatgacaagtgcagtaaatag

SEQ ID NO: 62181 - DNA, 258 bp, Acinetobacter baumannii
atgttattcaaaaaattcgctgttgctgctgctgttgctgctactttagctttcgttggttgtactaagaaagaagaagctcctgctgcttctgctgcttctgaagctgtagctgctgcttctgaagctactgctgctgcttctgaagctgctgtagctgttgacgctgctgcttctgaaactgctgctgctgcttctgaagctactgctgctgcttctgaagctactgctgctgctgacgcttctgctgcacactaa

SEQ ID NO: 62182 - DNA, 993 bp, Acinetobacter baumannii
atgattgatactagtaaccgaaagccaaacaatatttatactcagttagcagaacatgctagaaatgtcgctgctgcggatatatttagagtaatgaactcggaaattgaatcagaagctttattaaataaaatcagaggatcttcagatcaagaattaaattttttagcgaaagttgcaaatattcctgaagagcaacttgctgtttataaagattttgtcagaggcaatgataatgaagtaacacaagaattagccaaatttaatgttaataaaattctacgtcctggcgatatcatattgatgacgggtgtctctacccaatctaaaatactagttgcatcccaaaaacctgtttatttcaaagcagtatcaagccacgtagcaatagttcaatcggaacttgtatgcgtagatgctataccgaaagtaggtgttagtatgagatctgttatggatgtactagccgatgttgagcccaattggagggttattagattcaatgaagttaatgaaacccactatgataatattttaaaagcatgcgctttctatctgatgcagccatataagataaaacctaaaaagaatccaggaaaaaatttttcgtactgttctgaattagcaagaaaaatatttttagacttaaaaattaaaaatacaggaataccaaataatactattgtaaaaccatgcaattttgatcgactcgcagataaagaaaataattggattgatgtaacgaatgatgttcgtgactttatagtattttgccaaaaatataaggccatatttaactctatgtgtaagcttcaaatcgatggtattaaactaaaccaaagtcgttataaagaaagaagagagttattaaaaacctgtagagagaaagtatctaaaggattattatcaaaagaaaagtatatagaaatagagcaacattttgaaaaattggaaagtacaatgactttccaattttggaactatcagaaataa

SEQ ID NO: 62183 - DNA, 228 bp, Acinetobacter baumannii
atgcaatcaaatatatatccaagaccaaccatccttcgactcaaagaagtaattggctttacgggggtaagtcgttcagttatatatgaaaaattaaatgagaaatcgaaaagttacgatccgtactttcccaaacccatcaagctcagttcgaatgctgtggggtggtttgaacatgaattaattaagtggcttgagcttaaagctaagcaacgttttacctgctaa

SEQ ID NO: 62184 - DNA, 1311 bp, Acinetobacter baumannii
atgaatcagaagcaaaaagaactgcttaagacagcatgtctaatacgcactcaaagttttattgaacaagaatttgattatttttctctacttaaatctcagcccgaattattgaactcattgaaagagctaaatgaatacgttctgaatttattcctacaaaaatcatgggctactattgaggaaaacttacatccatctatgggtaaggtagaacaaatcctaaatctgaattctcaagattattttaattgtgaggtgatagcctgtttttgggggaatgctcaatatggacaagattttaagaatccgatccataattggtttaatctcaattcgactagagagtttcattcagcttatcttgaagtattttctttaattcgaaaaaatgctgattttaatgctatatatttagaggtacagcaattagctagttgctatgatttagctgctttgagctatcggactcaattagatttagataaatatataattcctatgtatttagagttttttatgggattgcagactctatcttgtagggaggaaaatttcgaaggttactatgctttagttaattttctcactccaatagatacattgaaacgtggtgctagttcagtattgctgcaaccactaaaccatctatcttggagtaacttggttgggcgagatagtgaaaataaaattgtggaaatgcaagaagggatcttgcattttcaaattcccataggtgaagactcttcattccatgaaatatttttttcaaattattatgctctatacttactattgaataaaaacttaacatctaaaatttggaaaaatattgaagaactagaagaaattcttgaatttttatccaaaaaactaacttcaaaaaaaaatgcacatatgaaagaaaagtccacattagttgcatatgaagcattaatactcgaatatttttgtatgtttaaaaaagatgaatattgtaaagatgggctatctgaaccaaacggttttaacaaatttttatatacggctttgactactgagcttaataaaatagcagatagtggttataagtttgagcatccgtcctacaaagagggactggaaggtgtagaaataaaattaaccaacagtgaggtacgtttatctctaaagcatgagtcaattagaaagaatcttgagagaagaaaaaagttacatcaatcaccccaaatattaaaacaagaaaaatccgttcaagataaatttcatgtagtgaatttttctaaaatttcagaaaaattaggcgattatcatttttgtgaacgtcagtaa

SEQ ID NO: 62185 - DNA, 297 bp, Acinetobacter baumannii
atgccgttatatgatttccgttgtgagcattgcgagggaatttttgaacaacgggttccaattgcccgtatctcaaccgatacgattgaatgtaattattgccaacagcagactttagctaagccgatgattactggccatcagcaaattaatatgaaaagcaaatggcgcccctcttctggcgccgaacaacttgcagggcctctggtagaaggacccggtaccaatcaaaatagcgcacgcagctcggttttacataattgccgcggcattaactgttctttatgcgatgtttaa

SEQ ID NO: 62186 - DNA, 1179 bp, Acinetobacter baumannii
atgcaacatattaaaattaaaccaggggttccgctggcagaacaggcggaaattggacataaccgctggcatccagatttgccatttctgacttcggtaaaaccgggtgaagaaatcctgattgaaagtctggatttcctggatgcgcagattaaagataccgatgacatttctgatgtcaaaaatgtcgacctgacccgtgcccatccattgaccgggcctttctatgtagaaggtgctgagccaggtgacttgctggtaatcgacctgctcgacattcagccaatttcagatgtcggtttctctggcgtatttgccaaggaaaatggcggtggcttcctggctgactatttccctgaagctgacaaagctatctgggacttaaaaggcttatttgcgacttcacgtcatattccgggcgtgcgtattgctggcttaaaacaccctggcttgatgggaactttgccatcgcatgatttgctaaaggaatggaatcgccgtgaagctttactggtgcctaaaggtcaggctaatccgcctgatccgcgtactgctgttctgcgtggcgtaacaggtgctgaattcgaccgtatggcagcagaagctgcgcgcactgttccaccacgtgaacatggcggaaatacggacattaaagacctggcagccggtagccgtatttacttccctgtttatcagaaaggtgctggcttctcgatgggcgatctgcacttctctcaaggagatggtgaaatcggtttctgtggcgcgatcgaaatggatggtgttacccgtgtgggcttcgatctgatcaagggcggtatggaaaaatacaatatcgattctccaatctttgtgccaagtaatgtccgtccggcttatgaccagtggctgacctttgaaggcatcagcgttgaagatggcgtaaaccactatctggatgccactgtggcctatcgtcaggcgtgtttaaaagcgattaaataccttgagaattttggttttaccggctcacaggcgtatatgttactgactgcggcaccagttgaaggccgtatcggcggtatcgtggatattccaaactgtgcatgtaccgtatctctgccaacttcaattttcgaacagaacatcctgcctcaaggtgcgctgaacgatgacaaattctgggggcataaacgctag

SEQ ID NO: 62187 - DNA, 1125 bp, Acinetobacter baumannii
atgacatttgccagcgaccgcatcagtaccaatcaggaaactctggccaaacagcgttatgagatgcagagcaaagaacgtattgcacgtacctctcgctttagctttgatcctgaaaaagtcatgcagcatgtccgtggtcatatcattgggcagcgtgccgcactggatgaaattgaaaacatgctcttaaccgtcaaggcagattttaatgttcctacccggccactggcagtcaccttgatgctaggaccgacgggtgtggggaaaaccgaaacggttcggctgattgctgaggcgatccatggcaagccagatgcattctgccggatcgacatgaacacactggcacaggaacattatgctgcagcactgacaggtgcccctccaggctatgtcggctctaaagaaggtaataccctgtttgatgaagcccatattcagggcagtttttccaagccaggtattgtgctgtttgatgaaattgaaaaagccagtaccgaagtcattcggggtctgctcaacgttctggaaaccggaatcttaaagctgaccgcgggtaccaaagtattggatttcaaaaactgcatgatctttatgaccagtaacgtcggcgccaaagatgctcaggcacgcttaagacagctggccaagcttccaaagcctattcagaaactggcccgactggccaaactggatgacagccagattaccgaacgcgccctgtacaagaaatttgatccagagtttctgaatcgtattgaacgcattctgaattatgaagcggtagaagctaatttcgtgccaacactggtcagcctggaaatcgagaaactgaatcagcgactccgcaagcagagtcgcacggttgaacttacacccgctgccaccctgtttctgtctaccggacatgatgttcgtttcggagcacgaggcttgagtcgccgttttcgggttttggttgagccacaactcgccaggttttttattcagcatccagaagccggtcagatcatcattgattatgacggcaaagcgatccaggttcagtcagttccggttgaaagcgtgatcgaagatccgctgttcatcatggatgacacgggcaataacatcaaaaactag

SEQ ID NO: 62188 - DNA, 1044 bp, Acinetobacter baumannii
atgcgtcacggtgatatctcaagcagcccagatacagtaggtgtagcagttgtaaactacaaaattcctcgtctgcacaacaaagcagaagtaattgataacgcgtataaaattgctgaaatgttgaaaggaattaaacagggtattccaggtatggacctgattgtttttcctgaatacagcaccatgggcattatgtacgaccatgacgagatgatggcaaccgctgccaccattccaggcgatgaaaccgcgattttctcgcaagcctgtattgaagccaacgtctggggcgtgttctcaattaccggtgaacaacatgaggaacatccaaacaaggtgccatataacaccttgatcctgatcaataacaagggcgaaatcgttcagaaataccgcaagattatcccatggtgcccgattgaaggctggtgcccaggtgataccacttatgtgactgaaggaccgaagggcatcaagatgtcactgatcatctgtgatgacggtaactatccagaaatctggcgtgactgtgccatgaaaggcgctgaactggtcgtgcgttgccaaggctatatgtacccggctgcagatcagcagatcaacatgtcgaaatgcatggcatgggcaaataacgtttacgttgctgttgccaactgtaccggtttcgacggcgtttacacctatttcggtcactctgcggtagtcggcttcgacggccgtaccttgggtgaatgtggtacggaagaaaatggcatccaatacgcacaattgtcactgcatgaaattcgtgatgcacgtaaatacgaccagtcacaaaaccatttatttaaattgctgcaccgcggttataccggtgtctataacaatggtgacggcgataaaggcgttgcagactgtccattcgacttctacaagacctgggttctggatgctcaaaaagcgcaagagaacgtggaaaaaattacccgctctaccatcggcgttgcggaatgcccaatcggcaatctgccacatgaaggcttggaaaaagaagcatcttaa

SEQ ID NO: 62189 - DNA, 699 bp, Acinetobacter baumannii
atgagcggattattagaaattaatgctttgtgttcaggatataaacaaagtcaggtgattcacgacctggaactgaagatccagccgaaggaaattgtagcgatcatgggccgtaacggcatgggtaaaaccaccctgttcaaaaccctaatcggcgatattaaaaatactaaaggtgaaatcaagctggatggcaaaaatctggaaaaactggatccttaccagcgcgtagaaaatggtgtggcttatgtgccgcagggccggatgattttctccaccatgtccgtactggaaaatatccagaccggtttaccggcttctgcgcacggcaaagtcccggatgacctgtatgagctgtttcctgtactttgggatatgcgcaaacgtaaaggtggaaacttatcgggtggacaacaacagcaattagcaattgcccgtgctttagcgactaaccctaaagtactgctgctggatgaaccgacagaagggattcagccctctatcatcaaggacattgccagaactctgaaagaaatccgtgaccagcgtgatctgaccattgtggtctctgaacaggtgctgagtttcaccatggcgatggccgatcgcttcctggtgatcgacaagggtcgctttgcttatgaaaatgtccgtaaaaatgtcgatgagaccaccatcagtaagtatctttctgtttaa

SEQ ID NO: 62190 - DNA, 759 bp, Acinetobacter baumannii
atgaataaagtcggcgtagaaatgaataaaccggtgctggtcattgaagatctcaccgtgtccttcgacggtttcaaggcagtcagtgatctcaacttctatctggataaaaacgaagtccatgtggtgatcggtcccaatggagccggcaaaaccacagtgctggatctgatctgtggcaagaccaaagcaacttcaggtacgatcaagtttaatgatattgaactgaccaaactgaaagagttcaatattgtccgtaaaggggttgggcgtaaattccagaacccgaatatttatgaaaatctgtcagtctatgacaacctggaaatgtccttcccgcgtggccgtaatgtctttggtgcgctgttcttcagacgcaccaaagatgtcgatgagcgtattcgtgaagttgctggcaagattttcctgactgatctgctggatacctccgccggtctgctctctcatggccagaagcagtggctggaaattggcatgttactcatgcaagacccagagctgctcatgctggatgaacctgtcgcagggatgagtgtgtcagagcgtgagcagacggcgcaactgttgcgggagattagcaaaggacgttctgtgctggtgattgaacatgacatggaatttgtcaaaaccattgcggacaaagtcacggtactgcaccagggtaaaattctggcagcaggcaaaatggacgatgtgcaaaatgatccgaaagtgattgaagtttatctgggacactaa

SEQ ID NO: 62191 - DNA, 1164 bp, Acinetobacter baumannii
atgaagaatctaatgaatgcctttttaggcggtaaagaaggtgcgattggtctggtgattcttgccgtactgatcctgctagtcatgccaatgttcctggatattttccgtctgaatctgatgggtaaatatttgacttttgcttttgtcgcaatcggcctggttctgtgctggggacacggtggtatcttaagtttaggtcaagggattttctttggcattggcggctactgcatggccatgttcctgaaacttgaagcttcagacatgcaatctacagcagcgcaaaccacgccaggaattccagactttatggactggaaccagatcaccagcttgccaggcttttgggaacctttccatagcttcgggtttactttgtttgccatcatcatcattccaatcttgcttgccttcatcatcggtttcgcgatgtttacccgtcgtgtcggtgatgtgtacttctcgatcatcatgcaagccattgtagcgatcctgaccattctgattattggtcaacaaggtttcactggcggcattaacgggattacagacctgaaaaccctgcatggctgggatatccgtaccgatgaagccaaatatgtcctgtactacatcaatgccctgctgctcattgcagtgatcatgatcagccgttttgtcctcagttctaaactcggacgtctactttctgcgatgcgtgacaaagaagaacgtgtacgtttctctggctatgacgtggccatgtacaaagtattcattttctgtttcgcagctgtggtgtcatctattggtggtgcgatgtttaccctgcaagtcggcttcatgtcaccaacgattatcggcatcgtaccttcgattgaaatggtcattttagctgcagtcggtggtcgtctgtcactgattggggcagtgtatggtgctgttctggtgaatctgggtaaaacttacttctctgaagcctttcctgaagtatggttgtatttcctcggtgcattgttcatcggtgtagtcatgttcttaccgaatggcttagcgggtctgtatgaaaaatatgtccgtccattgttcctgaaaaagaaaccgatcgacagcacttcgccaccgccaagtagtgatccggataaaacgatcaatccaattgtagaaggaggcgtgaaatga

SEQ ID NO: 62192 - DNA, 921 bp, Acinetobacter baumannii
atggatctatcatttgcagaattcggtgcaatatttgccatgcaaggctttaatggtctctctgtgttctgtgtgctgttattgatggcgctcggccttgcaattatctttgggcaaatgggcgtaattaacatggcacatggtgagtttctgaccattggtgcatatacgacattttttatttccacactgactgaaagttttttccctcaactcctaccttattatttcctgattgcaatcattgcagccttcctcacagcaggcattatcggttacatggtggaacggctcatgattagccggctctatcaacggccactcgatacacttcttgcaacatggggcttaagcctcatcatgcaacagctgttccgttctattttcggccctaaggaagtcagcccgactttacctgactggttaatgggttcttatcaaccgacggaagccatcgatattcctatcaatggtctgttcctggtgggcgttaccctctgtgttactgcatttgtctactttctgatttaccgttcacgctggggtttacagcttcgtgcaaccaaccagaaccgctttatgagtggtgctgtcgggatcaataccaaacgtgttgatagcttaacctttgccttgggttgtgggcttgcaggtattgcgggtgcagccttcacaaccatcggttctactggtcctacagccggttcgctgtatatcgtcgatacattcttagtagtggtcttcggcggcgctgcaagcttgcttggcaccgttgcctccgcattcagtatcgcgcaagcacaatctattctggaattcttcctttctggttctgtcgctaaagtcctgacactggctacagtcattattatcctgatgctgcgtcctcagggtctcttctcaatcaaagtacgtaaatag

SEQ ID NO: 62193 - DNA, 1239 bp, Acinetobacter baumannii
atgagcttaaaatcaaaagtaaagacatctggattactggcaggtttacttgctgttccattcttgctggcacccgcactgaccaatgccagcgtacctgcaacggcaaaggtcaataccacgaaacttaaagtagatgacaagtttgtatatgtgggccagctgcattcggcaaccggtaccatggcaatttctgaaaccggttcaatccaggcagaacgtctggccattgaacagatcaataaaaagggcggtgtacttggtcgacagatcaaaattattcaggaagatggtgcttctgactggccaacctttgcagaaaaagcacgtaaattatctgaaaaagaccgtgttgctgcaattttcggttgctggacttctgcctctcgtaaagccgtattgccgattattgaacgcaataactctctactttattacccaaccttctatgaaggcttagaacaatctaaaaacgtaatctacacaggtcaggaagcaactcaacaggtaattgaagcattgaactggctggcaaaagagaaaaaagccaaaaccttctatctgattggttctgactacatctggccacgtaccaccatgaaaattgcccgtacccacatcgaaaaagtactgaaaggtaaagtggttggcgaagaatactatccattaggccacactcaattcggctccctcatcaacaaaaccaaattgcgtaaaccagatgccatctttgcagcagtcgtgggcggttcaaacgtatccttctacaaacaaatgaaagctgcgggcgtaacaggcgacaaacagacactgcttaccctttcagtgactgaagatgaattgctggggattggcggcgaaaacatgaagggcttctattcttcaatgaaatatttccaaagcctgaataaccccaataatgctgcattcgtaaaagcctttaaagcgaaatatggccctaaagcggtggtaggtgacgtaacacaagccgcttacctgggtccatggttatggaaagcagcagttgaaaaagccggtagcttcgatgtcgcgaaagtgactgccgcatctaaaggcctagaaatgaaaaacgcgcctgaaggctacgtaaaaattgacccaaaccaccatttatggagcaaatcacgtattggtcaagtgcaaccaaatggtcagttcaaggttgtttacgagtctaaaggtctaatcaaaccaaacccattccctaaaggttactga

SEQ ID NO: 62194 - DNA, 3456 bp, Acinetobacter baumannii
atggacccaacagcgaataccagtcaggcacctcagcgcgtcattcatacccgacgtaaatacaatacctgggtggtcgatgaaagtattgaggattacgccctgcgctatgcgcctaaatccgtcaggaaatggtcgctatggacagtgaccaatacggcgcttgcgactgtcagtttcctggcaatggagacacttggagcaaccatgctctggcaatacggtttcagtaatgctttctgggcactggtggttgtggcgattatcattttcctgaccagctggccgattggttattatgctgcccgttataatgtcgatattgatttactgacccgtggtgccggatttggttatattggctcctccattacctcggtcatttatgccagtttcacctttatctttctcgcctttgaagccgccatcatggcgctggcattggagctaggcttaggcgtacccctgagtattggctacctgatttcagcactggtgattttgccattggtggtcaaaggcattggcttcatcaataaggtgcaggctatcacccaaccactctggttatttctgcttttattaccatggtgctttgtcttggtgaaacaacctgatttgatcagcaatcttgcattcattgagggcgcaaaaagtcagagcgctgcctttaatctgtctttttttggtgcatcttgtacggtgctatttgccttaatcactcagatcggagaacaggcggattatctgcggtttttacccgataaaaaacatattcagcgtaaatggaattgggcagtctttttaggtggaccagcttggattctaggcggatttatcaagatattcatgggtatgctacttatggcgctggcaatgcagtatctggttgccgattccgaactgagtaaccccaattatctgtactggattgcctatcaacaggtggtcaatcatcccagcatcgctttatttctgactgttctatttgtctgcgtcgctcagatcaagattaatgttaccaatgcctatgcagggtcattggcttggtcgaacttttttgcgcgtctgacgcatagccatccagggcgcgtagtctggctggtattcaatatctttatcgctttgctgttgatggaacttggggtaatccatgcggtggagcgtgtgcttggcttatacagtaatgtggcccttgcttggatcggtgccattgttgcggatctggtgatctgtaaaccactgagactgagtccaaaaggaattgaatttcgacgggcctatttatatgacattaatccggttggagtcggtagcctgatcattgcatcggtcttatccatgctgtgttactggggagtttttggagagattgcccggtccttggccggctttatcgcactcggtacggcgatgttatgtgtaccgctaattgcctggtttaccaaaggtaaatactacttggcacgtcaagaaaagcctgagctgaagttggtcgaaacccaaacctgtgtagtctgtgagcatgattatgaaactgcagacatggccagttgtccagcctatagcagtcagatctgttctctgtgctgcacgcttgaagcacgttgtcatgatctgtgtaagccgcatgcacgctggtcttcacagctaagagtttttgcagcctggttcctgccgaaatactgggtacaacatattaatacccgcttaagtctgtatatcctgctgatttttgtcttgggcgtggtgttggcagttagtctgagcctgatttatttacaggagtctgccagcctgggtgctttgtcacagcagcaggatgcgctgacaatgctgttcgtcaaaatctatgccgtactgttcctgctactgtgtgtagccgcctggtggttagtgctgaatgatgaaagtcgacgtcaggcacagctggaaagtaatacccagactcaactgctgatggatgagattgaagcgcataaagttaccgatcgccagttgcaggatgcccgcattcaggctgaaaaggccaatgaagccaaaagccgctatgtgattggcatcagtcatgaattacgaacaccgttgaacagtattctcggttatagccagctactgcagaaacaggaaaaactgtctgaacagggcgaatctgccctgggcgtgattagccggagcggtcagcatctgacttctctaattgatggtctgctggatttggcacggattgaaactggtaagatttctttggaaaattccaatatcgacctgccaaaatttcttaaacagatcgtgcatatattcgagccacagtttgcccaaaagcaactgaagtttgatgtggagatcagtagcaagattccacagtatgtccgtattgataaaaaacgtctggaacagatactgattaatctgttgggtaatgctttgaaatttaccctggaggggggagtcaaatttaaggtcgattaccgttttcagactgcttattttgaaattcaggataccggttgtgggattgctgagtcggatgttgagcggatcttccagccttttgaacgtggccgtaatgtagtacagggcagctttgccggcacgggtttagggctgccaatcgtgaagcttctggtcgatattcttggtggcgagctgaccctgagtagccagttaaaacagggttcagtctttaaaataaaactgtatttgccttctaaatccctgatccatccgatcgctgacgttgcctctaatactgtaaccagttataccggagaacgccgtaaaatactggtggttgataatgaagcgaccgaccgtggcctggttctgaattttcttaaacccttaggttttattttagaagaggcagaatcaggtttagcctgtttgcgtcaggttccagaatttaatcctgatctgattttgatggatttaagtatgcctttactgggcggctgggaaacggcgaaattgctgcgccagaataaaatcaccaatgtaccgattattattatttccgcagatgctaatgagcggatgattaatccggaaacggatgtattgaatgaagactttttagtaaagccggtcgatctcaatttattattaaacaagattggcgataagctgggcttaagctggcttcatcagcatgagcagcagacagaacaagaacagccttctgatcagaaagcacagatctccacgctggtggttgaaagcgaaaatgaattgaacccatccatttcattgttgaatgtggcagaggtggtcattcagttggaacagtatttaagtattggttttatccggggggcaaaagatgtcctgcatgaatgtggccagcactttgaacaatataacgatatatggcatcagattgagcaggatttaaaacaatttgattttaaaagagcaattcagcgacttcatgagcatgcagatgtgctgaagtag

SEQ ID NO: 62195 - DNA, 921 bp, Acinetobacter baumannii
atgttggaaagtattttgattgtggatgatatacctgaaaatctaagtctattgcatgagagcctggatcaggctggctatcaggtacttgtggcgaccaatggatttgatgcaattgaaattgcgcatcgcattcaacccgacatgatcctgctcgatggcagtatgccggaaatggatggcttcgaaacctgcacccagcttaaggccagtccagtaaccgaacatatcccggtgatttttatgacgggtctgactgaaaccgagcacattcttaaaggctttcaggcaggtggggtagattacgtaaccaagcctttaaatattgatgaagttcgggcgcgggtaaaaactcatttattgcaggcgcgtctgatgcatcagcagcgacaaatgctggatgcaaccggcagtgcgattctatcgttgaatctgaaaggtgaaattatctggcagaccccaatcgtcagtgaattactgaaaaatcatcaggtggatgtacagcattttcagtccagtttaaatcagtggctacaggacttgctcaagcagccagatcaagcacacttactgcatggtcagtatggtcatggccatcagcagttacaacttaacctgctcgccaaactgtatgcaggccatatctctaaacatgttttggtacagttgaaagagcagacccaaatgccgagcacagaggaaatcgcgcaggcctgtccaaacctgacgccgcgtgaagcagaagtgatgcattgggtcacgatggggaagaccaaccgggatattgccgagatcctgcaactcagcccgcggacggtgaacaagcatcttgagcatgtctttgaaaagctctatgtagaaacacggacggctgcggtattgcatgtcatgtcagcttgtcagaatcaggcagtggcttag

SEQ ID NO: 62196 - DNA, 1197 bp, Acinetobacter baumannii
atgctgacagatgctcacgttagaaaaataaaaccgcttgaaaagaaaaagcgttatgccgatgaaaaagggctataccttgaggtcaccccttcaggtggaaggttctggcgattgaagtatcgcttcaatggtcgtgaaagtactttaaccatagggagctatccagaaatctcattagctcaagctcgtcgcacccgtgatgaagctcgtatacagctttataaaaatattgaccctaatgccataaagaatgatcgccttcagcaaactgatgaaagtaagctatttagagtccttgcgatggaatggatggaagatcgtaaagctgtcataaaagaagcaacttatctacgtgatttatctgttttcgaaaaagatatattccctgcattgggtaacatgcccattgatcagatcaaagggaaagatgtgcttacctgcgctaaaaaaattgaagcacgtggtgcgcaagaaatggccaaacgctccattcctttaactgggcgtattttccgttttgcgattcgtaaaggattgattgagaatgatccaacccctcaccttcacgaagccttaaagcctcgtaaggtgaagcatatggctcgattggatatttcagaatttcctcctttccttgagcgtatggatcgttatcatggtaatcctgtgattaaaacagcattacaactgatgactttaacttttgttcgaactgctgaactcagaatgatgaaatgggaggaaatcgattttgagaataagatatggcgtataccagccgaaaaaatgaaaatggctttacctcatctcgttccattatctacgcaagcaattgaactactagagagcttattaccgctcacaggcagaaagccctatgttttttataaccacagcacagccaagcctatgagtagcaatgcaattttgtgcgtgatccgtacgatgggctacaacggtaaaatgactggacatggcttccgtggacttgcatctacaaccctacatgaacaaggctacatgcacgatgcgattgaaattcaattagctcatagagtcggtaatgcggtttcacaggcgtataaccatgctcagcatttagaataccgaacgaacatgatgcaggagtggtctgattttattgatagtttaagaaataaaattgtgccttttcctaagcatagaagagcttag

SEQ ID NO: 62197 - DNA, 1758 bp, Acinetobacter baumannii
atgtcaaaaagtaaatttcaaattgatgctcgactagttaccttactttcacaatcatattcttcatctgaacaagccttaaaagaattgatcgataatgcttgggatgctgatgctgatacggttttcgtagagttgcctgatcaggcaatgacaaatactcctttagtcatccatgactttggttctggaatgactgaacacgaactaacgcatgaatacctttttattgcaagtgaccgacgtaaacgcagaggtgaattaactaatctttttaaaagaaaagttaaaggtaaaaaagggattggtaaatttgctgggctgatgatagcagatcacatgaaattagagacttgggctaaaggtaaatgctctagttttgaaatttcatcgacagcattatcagcttctcttgaattaggaaaattagatttatctatcaaggttgaagattgtgaacctaagaaaaaaggaactaaaatcacattaaataatttaaaacaaaatttacatatcccaaatcctgaaaagttcaaatctcttttaattagagagtatgggagaagtgaggactttaaaattgttattaattctaaaacgttagacattgatgatttaaggggaaaatatcatgatgaacaattaagtattaacaatttagggttagtcagacttcagctaaccgtttcttcagaaaagtcaaaattgaaacaagcaggtatatcaattcgtgtccaaggtaaaataattggtaaaccctcatttttcggtttagataagcatgaaagcttcccttccaaattattagataagatttatggtgaaattgaagcagactggttaagtgagcatgtaactgctgactggggatcattcattgaaaatagtttacttttagaaaagctagaagaaacaattcaacctattttaatcgcaaagataagagaagaatatcggcatgatattgatttagcaaatgctcgcttacgcaaaaaaactcaagataggttagctctattaccagaattcaaacgccaatttgctgataaagcgatcaaatctattcttgaaaaatattatggtgaaccagattccaagcttgaacctatcgttaacgttttattagattctttagaaaaatcagactacagagcaattttagactatatcaatgaagctgataaaaatgatatttctaagttagctgaagccctctccgattttggattagctgaattggcaattattgctgaacaaacaaagacccgattaaagttcttagattattttgaagagctttgtgatgaaaatgaaactctagaaagtgaagttcataaaagtttagaaaacaacttatggattttaggtgctcaatattcaattttcagtagcaacattacgcttaaaaaacaaattaacaaatatctagaaaaacattattcaggtgatagagcagataagagaccagacttaatgttaagtgagaattatttttctcaatatttacttatagaatttaaacgccctaagcaccctctagcttttgctgattatcaacaagtcactcattatagacatgattttttaccatatactaataaagacataaaagtgatgttaattggtggaaaaagatcatctgaattaactaatagagtttattcagagcctaatgttgaaattctagtatttgatgaaatcatctcaactgcaagaaatcaattaaattggcttttaaaagagttaggttcaaagtaa

SEQ ID NO: 62198 - DNA, 345 bp, Acinetobacter baumannii
gtgcctgaacatacacatcctgctttttataaaatggttcaggttgaggaatatattaaaaagaattatgccgaaaccattactttggcgcatttgaccgcaattgctggcgtgtcggtggctcagttagaacgttattgcaaaaaaatataccatttaacgcctcggcaaatgattagcaaaattcgtcttcaagtcgccactgaactattggcgacagatttaccaatcactcaaattggtttgcgctgtggttataccgaccatagtgctttttgtcgtcagtttaagttgcatacaggaatgtcgcctaccttatatcgcgcctctaccaaaaatatttag

SEQ ID NO: 62199 - DNA, 948 bp, Acinetobacter baumannii
ttgggtcaagaagatgacaataagtcgaagcctacaacgacatcaacagtttcagggaatcctgaccctataaaactgtcattctcacgccgtttgctgcataaaacattacagcatgcacaagatgccgtcgggtttgctagtgatactacacgtaatcttgctgaagttgctgatgcagccctagatgctttagatcaagtgacatctcatacaaagcgtggagtggtgggcatgactaatccggcagcagggactgtcagagatatggtgtctgaaacaagtgaaactgcaagacaggttgccttaatcatggcgcgtacttttctaggtaaaagtacgttgaatttgtatttgccagaaatgctattaaacagtcaaattcgtaaacgcatagatcgttcagaaattgatgatattaaagttcaatgtggcaatgatcggtttcaagttgaaatcgatggacactatcaccgtttcctatatcgcctaagtttagattttcgagtattggaatgccgcattggacaagaaaagttcttgcgcttacgccaaatggatgaaagtctggatgtgcaaatacgtcatggtggaacattatcgaattgggctgttcgccgtattggtcgagtaggttttgaagtgattaatatgttgcctattccatcgctgattaatcatttgattcgtgatattccgggtattcagcgtgatggtcatcgcatgtggttcattgaccttgagcaagcaggttttattgatttcattaataaccgctcatggatggtagaaaaacttttaaatttaaccgactttagtattctaccgggacttaatattttaagagaaagtcgtgagcttgtgcagcaactggtagatcagttcgaaataaaagggctacgtgttcaatcaggccgtctggaagttcaagttggaatcgcaaattaa

SEQ ID NO: 62200 - DNA, 339 bp, Acinetobacter baumannii
atgcaatatcgttgccctcaatgtcaaagtgttaaaattatgccggtgagccaaggtgttaatagtgctaaacctgttgtgcctaaaagcttagtgattttagttcctgccatttttgtacttttactcttggttgttattagtatttttatgtggatttttggcaatggtgcaggcagctctcttcaaattgcaacagtagttgcatttgtggttactgtaggcgcaggttttatgttctggcgcgatttgcctgattttaaattgtctatgcaagcatttatgcagtcacaaaaacattggaaatgtcgtgactgcaatcatgagtgggaaatttaa

SEQ ID NO: 62201 - DNA, 957 bp, Acinetobacter baumannii
atgggtggacatcatggtcatgatcatagtcatgctgtagtgactgaaggtaatgctaaaaaattaacgattgccttggcgcttaccacgacattcttaattgttgaggtgattgcaggtttaatcacacaaagtttggcattgctctctgacgctgcacatatgtttacagatgcagctgctttagcaattgctttggttgccatacagatttctaaacgtcctgccgataataaacgtactttcggttatcagcgctttgaaattctggccgctttatttaatgcacttatgctttttgtggtggcaatttatattttatatgaagcctatatccgcttttcgcagccacctgaaattcaaagtgtaggtatgctcattgtggcgaccattggtttggtaataaacctcatctcaatgaaaattcttatgtcgagtgccaataacagcttaaatgtgaaaggtgcttatctggaagtattgagtgatgcactaggctcagttggcgttattattggtgcaattattatttacttcactaattggtactggattgacacgcttattgcggtattgattggattttgggtattgccaagaacatgggttttacttaaacaaagtattaatattttgctcgaaggtgtacccgaagaagtcgatattgaaaagctacgtgcagatttactttcattaaatggtgtggagagtattcaccaactcaaagtgtgggcaattacgtctaaaaatatccatttaaccgtgcacttatttgcgcctgaagctgaccgtaataagctctatcaagatgcagttgaaatgctttctcatgagcatggtattggtgaagtgacattgcaaattgaagatgatgctgagatcaactgtcagcatattgctcaacatgcttcacacgagcataacgataatgacaagacacattcacatcagcattaa

SEQ ID NO: 62202 - DNA, 270 bp, Acinetobacter baumannii
atgtctttatttttattgcataaaaaagttacatctgaattatctaatttttcagttccagcgatgcgagccttctctatgggggggctcgctttttttatttctttttatgactttgctgtgcattgggtgtcattaacgagtgggaaaaatggattccaagcagctacatgctttgtgagattgattcgcttctcggtagaacgcaaggcaaaaaaacaacgtctatttgagaacgcaataacgcagcttaaaagcaacgtgatttga

SEQ ID NO: 62203 - DNA, 306 bp, Acinetobacter baumannii
atgcaaatgctttcttctcggcaatttgctgcgattgccacaattattgaatatttatatgaacatctagaccagcaaccaagcttagaagatgtcgctacatatatgaatttaagtccgagttatatccagcggcagttccaagaatgggtaggcattagccctaagaagtttgtgcaatatatgagcttgcagcaagcaaaatattatttaatgcagcaacgtagcttattagatgcggctttaaatactggactgtcgggtagggtcgtttacatgatttgtttattcagcttgaagggatga

SEQ ID NO: 62204 - DNA, 918 bp, Acinetobacter baumannii
gtgggacaaggtaaaagtgttaaattgtttttggctgatggaacacctaatgggattttaacagctgaaattattaactggacaggacatgtgctttctgcccctcgtagtaaattggctgagttgattcagcgtgatgaatgtacaaaaacaggtgtctatttcctcattagccatgatccagaaaatccactatatccaagagtatatattggggagtcggatgatgttgctaatcgtttaaaacaacataaccgaacagaagaaagtggtggaaaagatttctgggaaaaggtttgtttagttacaagtaaagaccagaatttaactaaatctcatatcaaatatcttgaaagtcgtctgatggatattgctaaacaaaatggacaatgtcagctcgaaaatggtacagcacataattatagtcgcttacctgaatcagatattgctgatatggagtttttcttagagcaaatacaaattgttttgcctgtattaggctacgattttctcaaggatttaaaaagacctagctatcaacaatacttatcaaaaacctatagttttatagaacctgaggttgataaaacagcaaacttttatttaactagccgtgaagtagatgctaacgcacaagaaatagatggagagttttttgttttaaaaggctcacaagttcgaaaagatgtttctcaacctaactatacatatatgaagaatttacgtcctagattatttgaaaaaggtattattgatcctgaaaattttgtctttacccaagattatatgtttactagtccttctgctgcatccgcagttatacttgggagagcttctaatggaagaacggcatggagagaagtaaacacaaatttaacttattcagagtggcaacagaaacaagtagatagtgcataa

SEQ ID NO: 62205 - DNA, 195 bp, Acinetobacter baumannii
atgtcaaaaaatttagcaactttgattggtttaagtgccatcctaatgtgggcctctatggtgggttttgtaaaacatattacgaccgcaatcggtccagatgttggcattacgctgatctattccttaagtgctttactcctgctcattatttttagggtgccaaattttaaattaatttctaaaaatacttaa

SEQ ID NO: 62206 - DNA, 447 bp, Acinetobacter baumannii
atgcttaatgttgaattgcaagtgtccacaaaagtaagagacatattctttgctcatcaacaaaaattaaaagaagatgagaaaggtgggcaattatttattgatacaagtatgtcggatggtttatggcttgcagtagctacacctccacataatgctgatcgatctggtccaacatggctggaactagatgccaataggtgtaagcaagaagctattgagtatcaaaatcaagggttggttttagtaggatactggcatacacatgctgagttaacccctaatttatcctcacaagatataaaaagctttcgtgaattttcacgaaataatattagttcgttagcaaaccctttagctgtaattgttggtaatggtagtaatggcgatacaattagagcttggtcctttcaagaaaatgggatgatattggcttctttaaaatag

SEQ ID NO: 62207 - DNA, 1761 bp, Acinetobacter baumannii
atgaaaaaaatcactccaaaaatccgacaaggtatagattttttacaccaatatttaggtcaagatgcttcatcttggctgaaagtagtagatccaaaggacaaggaagttgtagcttatgaatttcctttacctgaggactacttaggtgtttcacgagtacttaggattagtttttgtgaaggctttccgacagtcggtttgcgtctacaaataagcccttcaccttggcttttatggcctcatgcaatgccacaatccttatgtttgtatgggtttggtgagcatcccgctgcaaactctgctgaaagtgtagtcaatgatgcattgaagaggttatccaagatattggagcttatattaccttcttctagtgaaagtaatcgaaatgaggaattttatagagagttggcttcttattggggacttcaactaaaaattaataatcatcagcttgttgtattggaacacccctcaacgaatggtgaactttttggactcactgatcaaagaggaggagtaaaacgtcatcaagttgtatggttggcatcgcagcaaccaatgatagaaaaacatctttctaaaatattaaacaggatagagaaagtatcagttttagcaccagttgcatattttattcgcttaaattcataccccactgttgaaattcctaattccaatgaagtctttgagtggattgaaaaccatatatcctcagtagattttcagaagctattggagtgggataaaagaaacaatagttatcctattagatggttgctattagaactcccgaacactgagccacccattattcaagctataactcttaaacacaaaggtatcaaaagtgatagctatcaagtttatggtaagcgtgctgggcgtcgattacgtgagcaacagaataacaatgtaagattgtcgagtttggaacatagtccagtacatttgttggcaaataatgtaattcattcaagaaatatagaattagctaataatgatatagctggtaaaaaagttgcagtgataggtgcaggttctttaggtagttcagttgttatgcatctagtgagggcaggtgttacggacatcaccattgttgatcctgatagatttgaaagtgcaaatctaggaagacatattttaggggtagatgatttaggtaaatataaaacccaagcattaaaagagcgaatccaaaaagatatgtctcatatcactattacatcaattccacaatatattcagtatgaatgtattaagaatattggcttgcttgatgaaatggatgtggtggtaattacaactgctgattggaattcagaagagtttatgtggttattgcatcaagttaggcaacctaagtgggctttaatccaagcttgggctgagcctcatgcaattatagggcatgtgctaataactagaccaaatagtattgcagatggacgctacttgttcgatgagcatggaagctttttaaaccgacattcagaatggaaggataatggggtcagcccacttcctggttgtggagaagcctttatacctggtggtcctattggaattaatacaatagcgacaataacagctcaatctgtatttgatgtgcttactggaaaagtagaatctgaggcatgggttactagtataggtgatattgaaaagatacgtgaattcaaaggtacatacgttggaccagatgtacctgacggttgcaagcaaattgtcatttccagagagtggccaagggtgtag

SEQ ID NO: 62208 - DNA, 1263 bp, Acinetobacter baumannii
atgaatttggtagcacaagcgcagcatccaacacaaatagatagttgggaagtggttttaatgaatattgttcaaaaaatttcattaacccctgctcaatacgatctaataacagatagatatagtaatctacaagcgattttaaatgtagctgaagatgaaatattaaaagatgctcatatttttgtacaaggttcgattggattaaagacaacaattaagccggctcctgaagcagaaggggatatggccaatgttgatgctgatgctattgtcttacttcctaacgcacaaaatgtagattcaaaagaagtattagatgcactaacaaagcgtttcgaagaagggactagaactagtactcctatcaaacctttgcgtagaggcattagaattgtttatgcagatgaaaatccaggtttccacatagatgttactccagcacgaaatgcacgaggtaatggtcaatcagctggttacggaaatttagaggtcccagatagagagactggttggaaatgcagtacacctcgtgattattcgctgtggttagaaaatttggctaagcttgaaatccaaatcattcgaaaaatggctgataataaagttttgatggatagtgcaactcaagatccattgcctttgtatgaagactacgctgaacataatccattaagagcaactattaaattactaaaaagacatcgcgatcagtgggcattaaattcagaaagtcctgagtatcgaccgatttctgcagtgataacaactctagctgccaaagcatatgagaaagtttataaagaatcccaggctcaggctctaaggccaattgaggcaattgtaaaaatcattgcatacatgccgcagtttataactcaaactgaagatggttttgctgttcttaaccctatggataagggggaaaactttggagagaaatggaatcgtccgaatggtgagggtgagtcttatcaagaagcattttttgcatggcattcacatgctttaaaaagtgtacagttagggctttatgatttagaaaatcaaaagaactttgaagatagacttattgaaagctttggtatctcaagaacatttattcaagagcaaattagaaacgttcctgataagtcatggacattaccagggagaaattcaaatgtatctctcaatacaatttcattaggtgccttaacggggacgtcatcaacagctgcttctgtacatacatcaacagaaccagtgggtcgtcttggttaa

SEQ ID NO: 62209 - DNA, 558 bp, Acinetobacter baumannii
atgactattaagaaaaaagaagttttcatctcagtggatgtagaaacatcaggtcctataccaggtgattatgatctattgtcaattggcatgtgtttggttgataaaccaactgttaatttctactgtgagttaaagccaatctcaaacaagtatgaccctgaagcattatcagtgacagggtttaacttagatactctattaagtacagggttattggcaaatgtggccatggctgagtgctgtaagtggattgatcaaaatattacagccaacgaaatacctatatttgttggttttaacgttggatttgattggtcatttataaactattacttccataaatatctaggaaataatccatttggctatacctcagtagatattaaatctatgtattttggctgttttggtggtaattggtcagaaactaaatcaagtaaaatagttgaaaagttaaagccgaaatttactggtaatcatcacgctttgcatgatgcgatatttcaagcagagttatttaatttaattttagaagaagtaaacagaagggggtga

SEQ ID NO: 62210 - DNA, 1563 bp, Acinetobacter baumannii
atgtcacacccatttgatgatgctgaatttgcaaccgttttaaagcagaaagtttctaatacttccttgaaggttttactttttgtgaataagttttataccaaaatttatgtaaataacgaaaataatgattggatagagttggggtatggagaattaggaagagaaactcgtgattatctaaaatcactaataaaggctaaaagagtaatgatacttgagtctgctactaaagatctgacattggagaaacctaaatttgaagatgcgcaagatttatccactttaaagaaacttgatgaatggatcaagatttctatcaatttgactgcaggtagattgggagaggtaaaaactcatactaaaaacaaagttatgtatgatgcagcttggagatgtcaattctcaggttgtggagttgatttaagagaacatttaacttctagtatgagtggaaactatagctattatgctcatattgttgcatcttctgaggatggaccaagaggtaatagtgattctgaaaaacttgcggatgaaccaaccaatatcatgcttttatgcgataagtgtcatcgtttaatagataaaattgagcctcataactatagtgttgaaattttaagagatatgagggaaaaaagtctaaacgaagtaaagcgattattagattgtttgaaatttccagaagcggaaatgatagttattggtggaaaaatcgaggggcaaccttttatttttaatagtcaagatgctgaggaggctatgtggcgacaagaaatgaaaagcttttctcaaccgcaccgaattttaaagaatccagattattttagtgcatctaataacccaaattattgggtgaatatatttgaattatttaaatcagaagattttcctattttaaaaaagattttgcacaaggctgcaaatgactatagaccaaagatactagcaatctttccattacatggaatgtcggttttaattttgagtgggagaattataggtgatgcttcaagtattgtgttatttcagtttcatagacaaaaagtttttggtaaaggcaaacaatgggcatggcctgaagtagttgagccacaaggtaataagtttaaagtcataacacataaagacaaccttgatggagaaagtgaagctcttttattggtgaatataactgctaaaatccctgaatctgagttgcctgagtatttatttaataatggatatactctaccaaccatagaaataacacttgatgagtgttcttttaatgctatcagtcacccaaaagatttagagcatttaggtgaagcgattgatagcgcttataaaaagattcaagatgaatggagacttcagaaagttcacttaattatggttgcaccaacgactgcatgtgtacgcttaggtcaaaaaatgcaggctcgccatcatgctgattttatcttgtatgaacgtaaacctggtactggcaacaaaggcccatttgaacctactatccaaattggtgcaaaaaaagttagtttagttggaacagatcaggaaatagatatttcctaa

SEQ ID NO: 62211 - DNA, 399 bp, Acinetobacter baumannii
atgcaacaattatcattatgcttagagcaatttacagaaaagttacacaacaaaccatattgcacaaataatcggtattgtattatttttttttgcgtgcttactatacgttgtctgggcaacggaagtgtttcgacccgactctggaacgcgatccgcagcgacgactgggcaattccgcacgttggcctgatcaggtcgccctgctgtaccttgtctgagcagttgacctgcatcaatggggcgggagatcgctgtacattgactcttgatatttttcctggtaagcgcaatatcttacaaagtcttgcaaggatttccttggccggaaccgcaaagcgacgcgattggagagggctaaatgaaagcgcacctacaggtgattttcacgctcgatga

SEQ ID NO: 62212 - DNA, 363 bp, Acinetobacter baumannii
atgtttgctactatagcgttactatatacttacactaattggagggaacaagaatcatatgatttatatgaggattttaaagttcaatgtagtgaattgcataacttattattaaaaatagattcaggtttaaatagtaatcataatattgaattagattccttaataatggaatatataaagaaaattgaaaatataaaatctattgcaaacaatacgttaaacttttttgataggttagaagatgaccataaaacatcatttcgtatgcaaataaattctcttgctggatcattgttttccaacctaaatcaaattaaaaaagaaattaagccttatctttttttcgataaaagtgcatga

SEQ ID NO: 62213 - DNA, 390 bp, Acinetobacter baumannii
atgctacatccatctatgcttcaaatgctcaaagagttgcttgaagaagggatgagaaaagatcctaaaaatatgggtcaggtattagtatctctacttaaggatttagctctgcttaagcctcagcacggtgaagatgacttaaccacttttgtagaatataggcatcctctgtatcaagttgtgaaacaattagacactattaaagcctttattgcttcgaaagggttggatggtgctacgacaagtgagatcaatgatttttttagtagtgaatttaaggcaggattaataaaagaaagattggagatgctgatctttaataacaacatcaagatggggaagaaacgaataggtgtatatgtaagtaatgtttattacgttatttaa

SEQ ID NO: 62214 - DNA, 264 bp, Acinetobacter baumannii
atgaaacaaatcactaatgaatcgataatacttaacaccatagctaattgcgtgaacaaggctagtagcattggtccatttcgtagtgaagatgctaaatccacattctatgttgagccaaagttacatcgtaaattggaagtaatttgtgagtacactggtttaactaaacaagagatatactccaaagcacttcgcaaatatgtcactgatggctatttggaagacttagacatagagtcatttattgacgctgctgcctaa

SEQ ID NO: 62215 - DNA, 534 bp, Acinetobacter baumannii
atgctaacagtaatgttaaaatctttttatggagaagaaattaatatttcttttattaaggatatattttcaattggagctacactgtttgcagctttaattgcaatatcactatttaatgattggaaagatcaaaaaaaatatgaaatcgtttcttcattggcaatagaagcacacagggaatttatctatgcaaaagataaatatatgttttttttgtttcaacatatctatggaactcctgatatcacttataaagaagtagatgatgatttatttaaagtgattgcgaagctaaatttattagatgcaattttagttcggtttcaatttggcataagtatcaatactgaaataaataacttttacacagatggttattgtaaaattcctgattactatagagatgtaaatgatttaaaacattttagtgaaaatcaattaaagatggtttttgataaggcttttgctagggataaagaattatttaaaaaactattagatattattgaaaaagtagagattaaaaattaa

SEQ ID NO: 62216 - DNA, 390 bp, Acinetobacter baumannii
atggaaccagtttctacaagcggttttacagcactattaaaattttatggggttgcaattgtggtggctttagcggtcggcttggttgcagcagttgtattaatgacacgtatgccacgttcaccacaagagtgggctgtaggtttgatctgtacggttgtatcaagccttgctggcggttcattcattatcgtgaagtgggggcttcatgaatgggttactgatatatgggggatgattgcacttggtggattcttctttgtttgtggtttacccggttgggctttagtccgctggatctttaacttcattaacaaacaggaaggtaagaccattattgaggtacttaaagaagttaagaaagccaaaaacgatatttcaaacagttaa

SEQ ID NO: 62217 - DNA, 2490 bp, Acinetobacter baumannii
atgggcggaatatttgggactacaacagtcagtacatctgataagcgcatcaattcgatgcgcattcagcaatctgcgtatggtctgacacagccattggtctacggcaaaaatcgtgttgcagccaatatgttttggtacggtgattttaaagcgactgcccatacgacaaccactaaatctggtggtaaaggcggtaaaactaagacaaaaaacacaacatatacgtattcagcatcgttgatgcttggtctatgtgaaaacaaaatcaaagatattgggattgtttggcgtgataaagaacagatcgtcaccaaaactgaaggcggtgtgcaacttaagccaattgatcaagttggatttgaactctttgatggtgatcacaatcctgtttggggatatttagcatccaagcatccagatgaggcagtgcattatccgttccttggatatgtcgcatgtgctaattatgatctaggtggtagtgcagcattatcgaatcacaattttgaagtgatcagcgatattacattttcagaaacgattcatgatgcgaatccagctgacgtgattgaagacttcatcacaaatccacggtacggtgcagcacctagtttgaatatggcagatttatctgaatttcgaacctattgtgcagccactaatttgttgatcagtcctgctttgacagaacaacgtgaagcatttgaaattatcaatgaaattgtggaagcagtgaattgtgcagtggtaccaagtccagacggcttgaaaatccgttcatacggtgacagtgcagtgacagggaatggggtgacatttacaccaaatcttgaaccggtatatcacctgactgatgacgatttcttaggtgaagatcagccagtacgtgtgcgtcgaagtcgcgataccgatgcatacaatcattgccaaattgaatacgtgaatcgcttcaaccagtacaacacagaaacggttgaagccaaagaccaagcaaatattgaaatgtttgggctgcgcacacaagatccagtcaagtttgactttttctgtgagccgaaaattgcccgtcatgctgtgcaattgctgttacagcgacgactctatgtacgaaatgaatatgagtttgaattaggctggaagtactgccgacttgagccgatggatattgtgaccattacagatgaatccttgggtttaaatcagtttccagtacgaatcacacgagttgaagaagatgaagaaggtgtactttcgattacagctgaagaactggctgttggatctcgctctgcggtcgaatatgatctgcaatcatcgaatgggtaccaaggtggcaatgaagaaccaggcaacgtcaatgcacctgcaatttttgagcctcctttagaattgacggatggtaaaaatcagatttgggtagctgcgtcaggtgggatcaattggggtggttgtaacgtttgggcaagtttggacaatgcgacttatgaaatgattgggactatctacggttctgctcgttacggtactttagtttcagcaattgatgcagatgacacatcgatgcaagtccagttgaatacttctagtcaaatctttggtggtacgcttgaagatgctgaagttgatgcaacgttgtgtaaagtcggtgatgaatatatcaactacatcgatgcaaccttggatggatcagggcgttatacattaagtagcatgttgcgtggtcgttttgacgatgcaagctcacataatgcaggtgaatcatttgttcgtattgatcgtgccatttttgaatatgacttcaactcaaatatgatcggtaaacagatttatctgaagttcacaagcttcaatggtcttgagcaaaaagaagaaaccttggatgaagtgacggcatacagttacaccatcaacggtggtcgtcctgcaggtgtgaaaggtttatcgcttcaatctgcatttgagggtacaagctttaaagttcagtggcaaagtgcagctggtgctacaggttacattgttcagatcatgtcaggtggcgtattgctgcgtgaggttgaaactacgaatactgattacagctattcaatggatgaggccaagattgacggtgttcagcgtgcttatacggttcgtgttgcaagtaaaaacggttcgattgtcagtacctttgctgaattaaacattagcaatccagtgccaccacaattattgaacgtctatacatctgcaactggtgattcgatcacagtcacatggattccaagtgaagtaccggacctgaaagattatcaggtgtggatcagtaaaaatgcaaactttgatccggaaacgctggcagcgagttggaccggtaccgagaatgcctgcacaattggaaatctggattcgaccacaacctattacattcgggttgcggcgcgtgatgtctggaaacctacatcatggaactactcggcgagagtgacacaggcgactttagaagtttga

SEQ ID NO: 62218 - DNA, 423 bp, Acinetobacter baumannii
atgaaaaacctcgaagctgttgctgaagccatgaattggctcggcacaccctatcatcatcagggcagaattaagggcgttggggttgattgcggtacgcttatttgcgaagtgtttgaaaaggtgggcttaatggatcatttagatccgcgaccatatccaccggattggcacatgcatcagcttggccaacgatatttagagcacgttttatcggtgtgctatgaagtcgatgagccacagcctggtgacattgttctctatcattttggcaagtgcatcagtcatggtgccattgtcgttgaatggccaacgattattcactcctatattcatcaaggagtaatactccaagatggcacaaaaggaagtctagctcgcagaattgcgggcttttttcgtatgaagaggctaaaagaataa

SEQ ID NO: 62219 - DNA, 2256 bp, Acinetobacter baumannii
atgcctttacctacgcctgcagaaatgcgtgatcgcacaaaaagccattctcaagttcgcgagatgcttgctcaaacagcagaatatattgctgacgatttaattgacaaagattcattagcaaactttggctcaggacaattaaaaacaaatgaaaattttgtaatttattcagcagatggcaactctttgattgaaatttggcacgataattttttttgctctgatttaaaagtaaaagaaggcgaatggtatctcatatcatcaaaatctgttggtgatgttcgctcttattatgtgtcaaataatgctaatgttgttagctatggtgctgtcgaatcaaatcaagtatttgttcaaattccgagcggtgcgaatcgcctcgttattaactctttgatctctgagcgcgatagcttctctgtgaaacttctatcaaaagatgaagtgaagttgtttgagagtattccagcaaatattcaaaatgcaattgatagctcattgtcaggcagcacacaaactaatgaaaagcaacttatttattctttagatggagtaaatcttaaaacagaatggcatactagctttttttggtctaacttagttgttaaccctggcgaatggtatctcatatcatcaaaatctgttggtgatgttcgctcttattatgtagcaaataacgataatgttgttagctacggagatattgaatcaaatcaagtttttgttcaaattccgagcggtgcaaatcgtcttgttgtgaactgtttaatctctgagcgcgatagcttctctgtgaaactcttgtcatctggcgaagtaaagttgtttgagaaattaacaccagctccagcaaacgttagagatgcttttcctcaaaagaaaagctacacagggttgttgaaacaaaaatgccctaagttttttaataaactacataataaaacaggtgacttagttgttgtgatgtctggcacatcattaacacaaggcaatctctacacatctcaacgagcagatgcaagtagtaggcccccgcttttacatacaaatgacttagcttctcacatcttcgacgcattaaatggattttggcatggtcaaaaatacatgaggtacgatcatccagatattagatattatgatgatacagagtgggttgttagcaatgatattaaagttggtggtgtctctatatgggatgatagagctgagtttaaaaatggtttaactaaaaccagtatctcccccaatgctcgtgtttcagcagttgttcccgttggggcatggcaatttaatttcatctatcgaagtgattctcaaggcgcaaactgtgttgttgatgtatatgaaggaaacagcaagatagaggtttttaatggcacaaattgggttgaagcaaatagatattcgttctcgatgcgtgaatcagcaaaaaccaacaaaaagggtaatacttgctaccaaaaacgcttaaaaatgcgttgcaaaaacaaggcggttggcggtattgactcccttgataccattaaaaatataacaatctcaaaaggtgcagattcagacagatttaatgttgttggttttgagtggtcacctcgtgagtttatgtttacgctaatcaatggtgcgcgaggtagtcataattggggttcaggaacaacacataatcttgaaaattatcaagataccgacatttgggaatttaaacctgacctgattttatgtgaagcaacaatcattaattggggaggtggttggggatacaaccttgatcctaatctttatgttaattatgcgaaacgctcatactatgatgagttcttagataatccacttgcactaaaaaacacatcagggaactttgaaaactgtgaagttattttttacggggatacgctttcaactcatgcgggcgctactcaaagttggaatagtgataaaactgctaaatttggaatcgtgactgaggttgcagacaacggtgatgggtcaactgaaaatttagggagatcaaaaacggtttttgagaattatgaagctgttgaagcttatatgcaaagcaagccaaacatctttattccagttgtttaccaattcaaggagcttgccgagagattctacggtaactatcctgacgcgtttgcagactcttggactagcggagctactctgacgtttgataccgttcatttgaacgataatggtgcagcgttctgggcgcacttaattacgccgatatttgagaatttctaa

SEQ ID NO: 62220 - DNA, 858 bp, Acinetobacter baumannii
atgagagcagcttctgcaaaactaattgcgttacttgatgctgatcagtttgtgatggcggatctctataccattacaacggtgcaatgtgatgaattccgatatacgaattatgactttgatttgactgttgcaggtcaaacatatagttcgagtggtccaattattagtcgtgaaggaattagcctgtcactaggtattgaagttgataatttatcgatcagtattgattgtattgacgataataaatggaatggcattaatgttgttcaagcatttcataatggccaactggacggtgctcgatttaaattagagcgcatatttatggatatgaatacaccaacggataccagtgccggtgccattaagctttttgaaggtcgaatcattgagcctgacttagatcgaaattcaattcaggccagtgttgcatcggatctggatgaattgaatgtgcaaatgccacgaaacctatatcagccaagctgtaacaatacattgtttgattcggcatgcggtctattgcgtcaaaatttcatggtgcagacaaccattgaagcaggcagtactacagcacgaattttatgccaggtgaatcagcctcaaggttggttcacacaaggcgtaattgaattcttggacggtggcaatgcaggtctgaaacggacgattcgcatgcatgaatcgggggctttgttattgactttgccattgttggaagcaccgcaaacagggcaacgtatcaaagtttatccaggatgtgataaacgtcttgagacatgccaaaatcgttttaataacttcagccgtttccgtggtgcgccatttattccggtaccagaaaccgcagtttaa

SEQ ID NO: 62221 - DNA, 654 bp, Acinetobacter baumannii
atgtctgatgcaattttcccggaattacccggtcttgaatgggatctcagcaagaaacccattttcaatacaaagatcatggaatcggtgaacggtcgggagcttcgcgcaagttatcaggccgttcccaagtatgaaatatctttgtcattcggctttctgcgtgaatcgaaagggaagaatgaattacagcaactcgaaagtttctttttagaacgccgtggtgcatttgattcctttctattcaaaatgcctgacgatagtgattacagttgctcattcactgggaatggaagcgcgacaagtttccagctgtataagcagatgcatacttccgtgattcctttggctcatacaaaggccaagacagttttagaagtggatcccacgttttggaatgaaaacgacaatcagcaattttggagtgataacgacgatgacctgttctgggatgacacaactgctcaagttactaaatcaggcatggttacgctttcaaagcctttgaaacaagggcataagtttgaggtgaaaggtacatattactatcgttgtcgatttgctgatgatgaacagcaatacacaaatttcatgagcaaattatggaaagccaacaaggtcgatatgatcggttcattaggaaataaagtatga

SEQ ID NO: 62222 - DNA, 387 bp, Acinetobacter baumannii
atggtcgaagaaaaagccaacatcaaagaaaagactactctatccaagaaagaagatgagactaagttaaagaaacccacatcactctctagctctgacattgatgatgaccaatattgtaaggcagagagttggtttgctttacaagcaatgactcttagacaaaaaggggcaccaaaaactaaagctcttgagcttaaccacgaaatgtatataggcttaaaacaaagaggttatgatgacaaacaaggatatgctgagcgcattactcaagccagtcgagcctacacactacctatcaagaaaactgagcaagcaaagaaacaagctatcgtggactttgctaatgagtattactataagtgtttaggtaatctgagcctgtaa

SEQ ID NO: 62223 - DNA, 1041 bp, Acinetobacter baumannii
atggcacaacaaaaaccttttatcctagcgttgaccgatggtaaagcaggccatgaaactcaaactcaaggaatagtgcaactactgaatcaacagcaagagtatcaggtcgaatgggttcaattaaatctacctaaaaaatggttgtatcgtgttctgaagttactgatcaagttttcaataaatacagagtggttacgttatttttttgatgcccaaaccctaagagcattagagcagaaacaggttgcttatattgtatcggcagggggaaacactctacttgccaatctattgctcaaacaacatttacacaaagatcagtctgtgaaaaatttggtcgcgagttcattacgggggattcgcgctaacttgtttgatgtggtatttactattcatgaacaacaagctgttttgcctcattatttttactatccaattgcaccgaataaaatgagtgctttacctctaacacgcgagcaggcccgagaacatttgggtattcaaaatgctgaacaaacgattacaattttgattggtgctgacactaaaacagtaaagattggtaaggcggcacaatgggcaactgttttacagcaggttcgaaagcaatatcctacagcgagattgttactgacgacatcacgaagaacatcggttacttttgaaaaagaattgcagaaacttgccgagcagtatggcatttttcagccctatgaccagttaacatgggtagcacaagggcaaagctgtgatatcaaagactacattaaagccgctgactggattctaataagtccagactctacgtcgatggtggctgaagtagtgatgtcaggaagtaagctgctggtactttacgatggagctgcagtacaggatgtaaatatcaagcgacaactgaatttcttagctgaacaacattggttaggtttgttggatgtatatactgaatatcatttctctaagattattcagaccttgcaagttcaaaaccatgttgaggatataaataagaaattaaaagagcttttattttag

SEQ ID NO: 62224 - DNA, 246 bp, Acinetobacter baumannii
atgaataaaaaagtgattgccggcattttagtggttatggctgtagttgccatcggcttttgggtatggggatataatgataaaaaacaattagataataatgtattaactttatatggaaatgtggatatccgccaagtttcacttgcatttgaacagtctggccgtattcagaaacttttagttcaagagggcgataaagttcaagcaggtcaagtactggcgactcttaatactaatgcataa

SEQ ID NO: 62225 - DNA, 1224 bp, Acinetobacter baumannii
atgctcgattttctgcggttagcgattccaatcatacctacgcatgttcgtagcttagagaataatcactggtttactggtgatattcgtgattatggtattcctgctgcaactcgccatgtcggtaagcttgatgatggaacgacaacaacaggggagctttatcatccttttgagtctctccctagtgattacaccgacatggctatgaagttttatacgcatacaattaatagaacgccttatgttgagattaaggcttctccattaaagttgttacaaggtcacaatgtgtatggttttgagtctatagaattaggttctgatcatatgcttggcatgttactcgaagcctttccccagttagccccaattttggatttacctaatactgaggttttacatctagatacgacatatatatttagattacctcatcagaatatggttcaaccaactttggactatatggctaacttggcttcgggtcatcgtaaagcaagacaaattaaatacgagaactacatcacttggggtaatgatggtgcatctattcgacctaaggcttatggcaaatttgaagaagtaaaaagccaattacataagctacagaagcaagcagacaagggctgtatgcgctctaaatcgcttgttattgctatgaatgatgctttgccatttgctaatgcagttttgcgtttagaagctcgtatttgtaaaacatatttaaccaagaatggttatccatctaatttatttcagctaattaagctgcaacatgaaaagccagaactattgctacgcctctggcacgtagcttttgacccgatcttaaacacattgaagggtaaacatatgaatttttcgaatgacggagaaatcctagatttatttaagtcgaagttagtgacttatacaaagactggtaaaccaagttatacgagagcgaataacgcaatgaagttttattcattgattcgtcagatcggtttaaaagctactaaagaactttataacgaacgtactttttatgatgcgcttaaggcattggaattatgcgagatttctaaaggtcatttacagaaccttgctaagaatccaaacggtaaagtcattccatttgtacgtttattcgaacttaagatggctgatcaattaccaccagattacgttcaaccagtttcacaatacacacccaaacgtgggttacatctagttgcctga

SEQ ID NO: 62226 - DNA, 378 bp, Acinetobacter baumannii
atgcgaaaaaaatttgggatttttaaagaaaagtaccctcatatcatttctatgttagagaaaggctatccatatactgacgttattttggatctcaaagacaaccatcaactagacttaagtttcaatacttttagaagctatctttaccggtatagaaaagaattaaattctgttatgaatacatcggaaaaattgacagccacccatacgtattcagacgatcatttgaaaaacgtagatacatctcataaagaagattcgctgcagcctactctgactaaagttggcagaacacaagaaaacatgagttttcgagatcgtggacaactttttattgctcgattaatgagtgagtcagaaccaaatgtagattaa

SEQ ID NO: 62227 - DNA, 930 bp, Acinetobacter baumannii
atgagtgaattaattgttaaggataatgccttaattcaagctagctatacgttagatactgttgagcagcgtttaattcttctagctatagcagaagcaagacaaacaggtcatgggataacagaaaatagcttattagaggtacatgccagtagctatataaatacgttcaatgttgaaaaacatactgcctatacagtccttagagatgcatcaaaaagcctcttcgatagatacgtcacataccatgatgttaatcctaaaacaggtaaggatcgtagtttccattgccgttgggttgataaaattggttatgaggctcagtcgggaattgtttttttaagattcactcaagatatcgttcctcttataaccagactagaagagaattttactaaatatgagttagaacaggtctcacgcctaactagttcttatgctattcgactctatgaattactgatccaatggaggtcagcaggaaaaactcccgtttttgatctgtctatctttagacaacaattaggcgttgaacctcatcaatacaaaactatgagtaactttaaaacctatgttttagactttgcattgaatcaaataaatgaactaacagatatcattgctaagtatgaacaatataaaaaaggacgtactatttcaggattttcgttcacttttagacagaaaaaagatacttcgaaaaaagtgatcacaagtgaaaatccctcagattatttctcgaaaataaccgatccacagcgtcacctatttgctaataagctttctagacttcctgaaatgaatacatattctcaaggtacagaaagctttgaacaatttgctgtgcgcattgcagaaatgcttaaagatgcccaaaaattcgaagaattattcccttatcttcaaaaagttggctttgctcctgcctaa

SEQ ID NO: 62228 - DNA, 516 bp, Acinetobacter baumannii
atgaaaacccttacagttcttgaactttccaagctttacaacattaatagacaaacgatttacaacaacataaagaaaggaattttaagtaaaaattctgagaataagattgatctagcagaagctatccgtgtttttggagaaccagtcaaaaaacaggatgtaaaagaatttgtaaaagtagacagtccaaattcggcagaagttttactgcttagacaacaaatagacatgctgaaaaatcagcttgatgatgctaaagatcgtgagtctttctaccaaaatcagatcgaaacgatgcaacgcctactagaagctcctaaagcaccaaaaatggaagatccaacaccagttgtaccacctcaagagacgattgaagtcccagtacctgaacaagcaactgaggttaaaactgagatccaaacgcagaataagcggatccccgtgccggagcatgttgaacaggaaccggagaaaaggggcttttggagccgtttttttagaccctatgattaa

SEQ ID NO: 62229 - DNA, 1158 bp, Acinetobacter baumannii
atgaaaaaatctatattgtttatgagtttactgagtctaagtagaattgtttttggatctccaatcaatattcaagttctgagtgcaacagtaaaagatcagtctattaataatgcggaagttattttacaaaaaaatggtgaaacttcttcttcaacgcatactaatgttcaaggaagagccagtatagagagtattattgataaccaagatagtttattgattataaaaaaagaaggttactccactttagttgctaaatgtccttgtgatggtctaacttatgcattaagcccagtgcaaacgaagttaggcagcatgcgtattgtcttgacttggggagaaaaaccactagatttagactcccatttgaactattccaatcagcatatttattggtctaataaagaaggtcatcaagctaatctggatgtggatgatagagattcatatggtccagaaacaattactatagatcagcgtttaagtgatcagtactatgtttactctgtgcatgatttcagtaatagagatgaaccaggctcaaatgggctcagtcatagtcaagccaaagttatggtatatactggtaaatctctcatccgatcttacgaagtaccaataaataaaacgggtaatttgtggactgtatttcgcatttctccaactggtgagattcaagatattaaccaaatttcaagtgttaaggttggtgctgaaaacattggttcaagtgtgtctaattaccagcaagaagctactcgaattgcaattgttccagtatctgctggaaatcaagcacgagctaaagcaataaatcttaaagcagatattttatataaaaataataactacgaacgtgcggctatgttttatcagcaatcgattgatttaaatccaaatgtagggcagacgtatagtaatttggcagtcacttatcaaaaattaggccgatcttcggaagctttatgggcaaatcgaaaagcaatcgcacttgcaacaaatgataatgtacgtgcttattctaactacaacattggtcgcatctatgaaaacaacggcgagtatgaacgtgcattagaatactatcgccttgctaatcgttttaaatcttcagctacttatgtcgaagcaattcgtcgtatggagcaacgttaa

SEQ ID NO: 62230 - DNA, 555 bp, Acinetobacter baumannii
atgagaattataaaagggacaaattattggcggttatcctcaatcattctgatgtttattatttttctaggattgtattatttttttattgtttaccctaaggataccgaaaaagctcgtttggcaatcggtgaggaaattctaatggcatcttattggcaagaattggcatataaacatgctttatataaggctttgctaaaacagaatgtaccacttaatgctattaatgatgaaatttactttaatgatctgaatgggttgagagtgttatatcaaagtggagatggggaaaaattgatagagacattgaatagatattcaaagtattcaatttatcaagataaaagtgtccgtgggctatgtttacaattacagtttctacagttatataaaaataaaattgaacgagaaaattatcacaccgaaagattgactcgttggcaaaatattaataagcaaaattgggaaacagtgtcgccttggttacagcaaaaggatgcatttaatcatttttttaaatcaaaaaagatgcaaagtgattgtttcttgtaa

SEQ ID NO: 62231 - DNA, 414 bp, Acinetobacter baumannii
atgaatgcaaaagttaataacaagacaatggattggtctaaacgttctgctcatcaatggttggaacaatatggtctatgggtaagatcaacaaaatctaaagtttctgcaaatcctttagcatgtctaattgaccaaaatgacacaactagaattagatcaagtaaggtctctatgccatgcgaaattgaagattatgaagcagttgaagtaagtaaactcttggcgaaaatgcataacgataatagggagtttttacaagaaagggcttggtttttaatactttattatgaaaataattggtcgtatctaacaattgctaatgtgcatagatgtagtaaagcaaaggtacgtgctgagattgataaaggcttggcatatttggatggaaaaattgaggtgttgcaatcttga

SEQ ID NO: 62232 - DNA, 714 bp, Acinetobacter baumannii
atgaatttggatatgtttaataatgaatccttaaaggattcagaacccacaccttgtgacttcttcagtggagaagatgctatagcaaaagctaaagaactgggtctacccgatcctcatatagttatacaagcaattatggttggtgattctgaatttagaaccaatacaatatacaacagatcaagatttatcgctcgttggggaaagattggagaacagctcgctttacttcttagaaaatcagatccagcttgggtttatcataatgaaagccagccaagactagaaaatattgataagaaaattcagattattttcatgagtggtaacttagcccttgggcatccagaacttgtactatcagctctttgtgaaaagggttatatgactttgaagaatattaaagaaaatcaatctagttatgatgatgcatcaaaattaagaacttggattctttattttccttctacatctcatccggcctacacagcaactgatataccaacaattccttttgaaatcgcataccctacaagttttgtacaaactcctgataagacaaaaattgacatattaccaagcaatcacacttgcagaattgcatttgagatagataatactcatccagtcgacaatgatcctaaaaagccaatattggaaccatctaacgagattaaaccagatgattttgatattcagcttgtagtctaa

SEQ ID NO: 62233 - DNA, 1110 bp, Acinetobacter baumannii
gtgtttagtaaagatcgtttaagaattgctaaagatttaagaggtcttagcaatactgattttgcagaaaaactaggctgctcgctttctaaagtgaagcagcttttagatgcagataaggaaatcagtgaaaatgatcaaaccgaaatctgtagagtattaaatgtgccgatgtcattttttatggaaaatgacatccaacctcatgaaacagaacagattttttataggtctgttgctagaatcaaggctcaacatagaaaagccaatgaagcctatacacttctagcaaagaatattaatacctacttgcttaagaaggttaaattaccccaattttctagaccagttttagatattaccgagatacaggatcagcactatcgttatgttgatcatattgcaattgaattgagagcattatggggattgggggttcaacccattaataatattgtatcgctctgtgagcttaaaggcattcgtatttttagacttccaaatgaagttaaagaaattgatgctctatcttatttcgatgatgaaagtggttctccttttatattcgtcaataattttaagtcggcagaacgtgcgcgttttgactgtgcgcatgagcttggtcatattattatgcatactcataatcgaaaggttcgtgaggaaaaagacaataaactcttagaaattgaagcagatcaatttgcttcagagttcttaatgcctgcagaagcgttttttgcaacttctccacgttatctatcaattgataatatgattgagtataaaaaaatctggagaacctcattaaaagcagtgaactataaagctcataaactaggtttaatcagtgactgggttaatcgaagcaatctgatgaaaattaactcacttggatatcatattgaagagcctgaagaaacccaccgtgatgaaagtatgatgcttccaaagattatttctttattagtttcgcaaccttcttttgacaaaaataagatgctagatgaaataggaatttctgaagatgatttcaatcagttaacatttgatgcacttgctaaagtagatataccgaaaaagaaaacaaaattatatcttgttgaatga

SEQ ID NO: 62234 - DNA, 1089 bp, Acinetobacter baumannii
atgaatacagacctaaatgattatcctaatgataattatgaaaaatattccatacataaggtggatgataaaagcattgtaataattgatgatccagaagcattacagaaggatagaatcattcaactcataaaaaaaatgcaaaaagatggaaagctttttatttacgttattcatcccgataaaaagcaatcttacaaaattaatcacaggcctttacatgatgcattaaaaaacattgatccacgatttataattgatttcaattacacaagtgctgagactgacctatttcgtaagatatgcgtagagtgcttccctgcacacattgtaaatgatacatctacaaacttttggcaacttgctcacaatgagccaatagcgatcagcccaactcattacaagcctaaagctcaaattttaaatgagttctatcaacgtctcttcaaggcattatctactgatatagactataaaaaagcagtagaactacgcaaagaaaaaagcttaaatcagaacaagaaggctaaaaggctaatccaaaaattaattattaaattcagtaaattactggtaattcgaattgatttctccatcaatcgaaattttcaaatcacacttgaactactgaaaacatacatgagcactttcttaaaaaagctccatacaccaaatgacgaaataccttcgattgtcggctatatttggaaattagagtatggcatacagaaaggctatcattatcattttatcttttttatggatggtaatctccataaacaagagactttctttgtagatcaactcgctaaattatggaaagaaatcaccctaaataaaggcacttatcatagctgtaaccataacaagggttcttacaaaagactcgcaattggcacccttgttcatgatgacctagaaaaaatcaacgcactgtatatggtcgtggattacataactaaagttgaccaattcatcattgagaaaacacttacgaaccatcgtacgtttggctatagcactcgtaagtatgaaaaaagtagtgctgggagacctcgtaagatcaacgcaggatcaatatcagtctaa

SEQ ID NO: 62235 - DNA, 1008 bp, Acinetobacter baumannii
atgaacatgtcaatgcaacctaccaatacgacagaaagcaccaatctaccttatttttgtatgggtgagtttaacctattcaatatgcacagcgtttcggaaatcgccacgaatccaagttatttgcctttcaaggaaaaatttaaaaaaatcagtcgaatctctactcaatactatgtcagtaatactccgcatacagatcatgtatttgaactactactgagctttcaaccaattaatgttcaattacgagaacactcactattcaaaatcagtcaaagtgtaaaggctgtacatcaggcatatgtaaatttgggttccaattcggatggacctattaatccaatgctgctacacaatgaatactatgttgagcagataaaacctgttgtagatgcattcatatatgaattgaaaaagcattcaaccagtaaaaatgcaatcgctgatcgtgataagcgtattgcattaatcaaagaaatacgtaaagaaaatgtacctgtgatgaaaaagttattcaaaactcatcaacaatttaatctaaatcattttacttacgtgttccacatgaatgagcatgaactgtttaaagcaaataaatctgtggaaaatgctttgacccaaaaaatgcgcagcatcatcaatcagtttcatgaaaaacatcaatcagaaattttagcattatttttttgtatacaacgtgatttatctgataactatgtcttaaatgtgtattgtgcgacagagcaagaatgccagcctctatcaatgaaagattgcatcagctttcgtgataatggcactcttaattttgcaccactttcgaagattaccatgagtatttttgaatttcaaagttcaatgaatattcaaggtgtagacggtataaatgaaaagatatggaaagtcatttttggacaacaagttgaaaaatacaaatatgtctattatgaatctgaattcgtatcaccaaaattcatatacatagagtgtgacagtaaaaattga

SEQ ID NO: 62236 - DNA, 732 bp, Acinetobacter baumannii
atgtttgagatcattgatgatttaaaaactaaattagatcaccatcgacctcttccatctgcgattgtcaaaaatctacatgaatatttactcttacgttggatttaccattccaatgcgattgagggtaacactttaacccttttggagaccaaggttgttctagaggggattacggtagggggtaaggtattaagagagcattttgaagtaatcaatcatcgtgatgcgatcttatatgtcgaagatattataaagaaagaagagcctttttcagaatggcaaattcgaaacattaaccagttgatattgaaaaatattgatgatgagaatgcaggacgatatcgtcagcaaaatgtcttaatctcaggcgctaccaccaatcctccagatcacacattactcaatgacaagatgtcgcaatttatagattggtataacacggaagcccatacattacatccaattgagcgagcagccaaagttcatgctgattttgtgggtattcatccttttattgatgggaatagtcgtacgtctcgattattgatgaatcttgaattgatgaaagcaggttatccaccgagtgtgattacggtcgaaaatcggctagcctactatgaggcacttgatcaatggatggcggatggcaatagtgagccatttaataacttagttgctgctgttgtattggagggattcaagccatatcaaacagttttaggaatctag

SEQ ID NO: 62237 - DNA, 306 bp, Acinetobacter baumannii
atgccaaaaagagatctatataaaattttgttccccaaacagcgtaaggcattgaccacttttggggaagatctattactcgctatgaagcgtcgtggctggactaaacaaatgatctgcgaccgtactggatttgataataaaacaataaataaagtttttgctggagatcccagtgtggcaatcggcacatatatcaaggtaatgggagtgttaggtatggaagataattttgccaaattagcagcccatgacgaagtgggaattaaactgcaaaatattaaattattagaaggttcaaaatga

SEQ ID NO: 62238 - DNA, 1251 bp, Acinetobacter baumannii
atgacccgacatatagtagatgtttatgcttcttggttacctattgattcaccattacttacagggcaattaatgtttgctgagacaagtcgtggcggtgtatttagttttacttatgataactcattcttgaagtcagaatatcgtcttcaacttgatccattcttaacactccatcgtggtgaactttataacgaccttccagataggaatttccgtatattcttagactcatcccctgaccgttggggacggattctgatgcaacgccgtgcggcaatagaacaccacaaaggtttacgctcaagtgccagactcacagaattggactatttactgggcgtccatgattcttttcgcatgggaggaattcgttttaaaatagcagagtctgataatttcttagatgacaatgacgaatttgcagctcctccaatgacttcattacgtgaactagaatatgccgcaatccaaatagagaaagatgagaacattgacagtgaagaatattatcagtggcttaaattattaatttccccaggttcttctttaggtggtgctagacctaaggcttgtgtgaccgatgagcatggacatctctggatcgcaaaatttcctaatcagaaagatacattcgatgtaggagcttgggagttagtctgttatgaattggctcgattagctggagtagaaatgttcccaagtgaaatacgccgattctcttcagaacatcatacttttctcactaaacgatttgaccgccaaggaactgaacgcatccatttttcatcagcaatgactcaactagggtactacgatggtgaacattcagaaggggcaagttatcttgaaatagcagagtttctaaccaataatggatcacaaacaaaaaatgatctagctcaactatggcgcaggatcatctttaatattgcaatatcaaatacagatgaccatttaagaaatcatggctttttattaactaataaaggatggaagctatcacctgcatatgatcttaaccctattgtagggaatcgaggtttacaccttaatattacagatacagctaatgcacttgattacagcttagcatttgaggttattgatttcttccgtttatcacaagaggaagcgactcagatttatgatgaagtattattggcggtaaaaaaatggcaaagcattgcaaatcggttgagcattagtcgtagtgaacagctaatcaagcaagaggcttttaacgtataa

SEQ ID NO: 62239 - DNA, 1014 bp, Acinetobacter baumannii
atgagtaatgttgatcagcgtccaattattttgacaggcgaccgcccaaccggacaacttcatctcgggcattttgtcggttctttgcgttctcgtgtaggtctacaggatagccatcatcaacatctcttattagcagatgcacaagcgttaacagacaatgccgataacccagataaagttcgccgtaacattttagaagttgctctagactatttagcggtaggcattgatccaactaaaaccacaatttgtgtacagtcatgcttgcctgctctgaatgagcttacaatgttatatcttaactttgtaactgtagctcgtttggagcgtaacccaaccatcaaatctgaaattcaaatgcgtggttttgaacgtgatattcctgccggtttcctttgctaccctgtagcacaggcagctgatattacggcttttaaagcgactgtagtaccagtaggcgaagatcaaattccaatgattgagcaaactaacgaaatcgtgcgtcgtgtaaaccgtcaaattggtcaagaccttttacctgaatgtaaagcattgctttctaatatggctcgtttacctggttttgatggtaaagcgaaaatgtctaagtcattaggcaataccattgttttaaatgcttctgacaaagacattaaaaaagctgtaaatgcgatgtataccgatccaaatcatcttcgcatcgaagatccgggccaagttgaaggaaacattgtatttacttatttagatgcatttgatccaaataaagaagaagttgaagagctaaaagcacactaccgccgtggtggtcttggtgatggtacagttaaaaaacgtcttgaaggtgtactaaaagaattaattacacctatacgtgaacgtcgagaagaacttgctaaagatcctgactacattatggatgttttacgccaaggtactgataaatgtcgaatcattacccagcagactttggacgaagttaaagatggcttaggcttatttaagttctaa

SEQ ID NO: 62240 - DNA, 294 bp, Acinetobacter baumannii
atgaaaatcgcggtgtttggaaccaccttacatgctggtgtaatggcagcattattagctgaatatggcaatcaaatttattggtgtacaagtgtcacctgcgaggaaaatatatctgtactctcatatcaagatcaagaagttaatcattatttaaataaacagagaaaagcaggttttttaaaagaaagccctttttctgaaattcctttagatattgaagtttacttattttttaaaaacagtggaaaagttgagcgagcgtccgatcgttcatcctcgtttaatgattaa

SEQ ID NO: 62241 - DNA, 660 bp, Acinetobacter baumannii
gtgtcaaacgtattatttccagaattacccggtcttgaatgggatacctcaataacccccatgttcaataccaagatcatgacttcaattaatggccgagagctccgtgcgagctttcaggcctcaccaaaatatgaaatttcgttgtcttacgcatttttgcgtgaaaataaggggagaaaggaattgcagcaactacaagggttttatttagagcgccgaggtgcttttgattccttcctcttcaaaatgcctgaggataatgagtttaaatgcacttttattagtgatgggactactaagaccttccagttatacaaggaaatgtatacagataagatgcccttagtgaatacacaggggaaaatttttgggagtggtgaagtagatcctaatatgtggaatcagactacatctaaaaccatgtggaatccaaatcaggaaaagctgatgtggaataccttaaccgctcaaattacttcagatgggaaatatatcatttctcaaccatttgaagagggtcaagagataaccattactgggactttttattatcgttgtcgttttaaagatgacacacaagaatatgtcaattttatgcacaagctttggaaagctggaaaagttgatttgattggtacattagggaacaagatatga

SEQ ID NO: 62242 - DNA, 405 bp, Acinetobacter baumannii
atgagttatattgagcttaatagaaaattctcacaactatcatctaatagtaattctcaagttacaaatagtgattactcattaagtatggattctgctggattattaacgtgggaagatttattagaaaaatataatagatgtgtagttttggcagaagctggagcaggaaaaacagaagaatttaagcagcaggcgaaaaaacttgaacacgatgataaattttctttttttattagaatagaagatattgatagcgattttatagaatcatttgaagttggagataaagagcgttttgaagaatggttaacatctcctgaaaaaaaagcttggtttttcctagattctgtagatgaagctcgtttagaagatccaagagcatttcaaaaatgctataaataa

SEQ ID NO: 62243 - DNA, 357 bp, Acinetobacter baumannii
atgaagtttttaagtgaaaacattgaaatatcaattttaaagcaatggttgagcgatgatttttttgaaatttgggttcatcctcagttagtgacaggttttaataagaaagatctaaagactgctgagtttaaatatattgaaaatcactataactcttgtgaagagactagtgatgaatatgacgttgtgataactgactatttgtctggctgtttaacacaggacagttttaatttggttaatgaaatttcggttaaagattttatgtcagcagttttatattcgataacaaaactatattcatcttatgcagcatatccatttgcttggaatggagcttatttagttagataa

SEQ ID NO: 62244 - DNA, 1068 bp, Acinetobacter baumannii
atgttgaacagtattcatcaagttttagatagtttgggtattagcccgcagaaacgtgctattcatgttcaatttacgtctccgatattgaatgaccaagtatttctgcaaagaattgatggtgtacatgcactcaatgatggtttaaaagcagaacttttatgcctatcgacaaatgcaacgattcaacttaaatcttttattggtgttcaggctgctgtagatattgtgacggagcgaggtgaattaactcgcgttacaggcattattactcatgctcaacagggccaatcagatggaagtctaactttatataagctgatcttagaagatccaactgcattatggaaatatcgccgtaattcacatgtatttatgaataaaagcgtggttgagatatgggaaatactatttaaagaatggcaaactaaaaatccgctatttgctgcaagtttaagtttagatttaagcggtctaacacaaacttatgatgtgcgtccttttgtgatgcaacataacgaaagtgactggaatttccttacacgcttacttcgtagtgaaaatatcagttggctcattgatgaagctcagcatattgttccaagtacagatacatctattcaagctcagaaactcaggttaattgatgccaatagtcaatatcagcctttagaccgtaaaacgattcgttaccaccgtagtagtgcggtggaacaatacgacagcatgactcgcttaactgccgagcgttctcttcaacctaacgttatgcatatacaacgttggcaagcagaaatattagaacaagaagaagggattggaagtgttcaaagtaagcatcagcatagtgaacattatgacaatgctacacttggcttggagcaagcttggaactattcgcctgcatggattggtgacttaaagggtgaggatggggttactaaatctggaaatcaacaagttgaacgattaaaccagaacctccgcaattactacgaggcacaggctaagcggtttattgcacaaacaacagttcacgtgcctatgtgggctactatttcgaattaa

SEQ ID NO: 62245 - DNA, 768 bp, Acinetobacter baumannii
atgttgaatcaacatgagataaatttaaaacagtatcaaaataaatctttaagttatttgaatagcaccgctcactctgaaggggtcgagtttgataaattcattaaagaaattgatgaatatccaaatgccgttgttttagatttaggttgcggtggtggtcatgtagcttataacgttgctcgccatgcagatctggtttttgcttatgatttatctcatgaaatgctcgatacagtgtcaaaagctgccaatgctcgaaaaataaaaaatatttttgtacaacaaggcattgctgaagatatgccttttactgatgaacaatttgatgtaatcattagtcgatattctgcccatcattggcagcatgtcccaacagcaatgaaagaaataaatcgtgtattaaagccaaatggcactgttatttttgttgatattattagctcaagtttccctattttagatacatttttacagactatagaagtgattcgagaccctagtcatgtaagaaattacagtattaaagactgggttcactttattgaagatgctgggtttgaattaacaactttagagaaacaaaccctcaaactagattttgatagttgggtacagcgcatgaagacacctgaagatcaaataaaaacgcttaggtatctccaagaaaatgcagcagatgttgttaaaaagtattttaatattcaaaaagatggaagttttgaaagtaaggtcgggtactttgtatttaaaaaactatccttctaa

SEQ ID NO: 62246 - DNA, 588 bp, Acinetobacter baumannii
atggtggaatatcagccaacattaaaggatatgtatatccatacagtttatattggtgtagcagatcaagaagaattgactaaacttgttttgcgcaagattgtaagcaaagagttgagtgataaagaacgtgaacgcatttcgggtactgggtggttagcgtcttttaatgtaaacgaaaatggatgtttaagtgcagatagctatgcaccagccagttatgtatatggtacccaggctttaagtcaaggagagccccttattgacttaaatgcaagacttactagagctaaggaggagtttgctcagcgttgtcatcgcttagttcaattgaaagaggattatcgatgttcatggaaggatttacaaagtgaaacggatttaattagatctatttttgctcatgatgagcagattggattagattggcgagtcgtagttgctacaaagcgattacctagaaaaaaagcgttagaggatattgaacaagaggttaattatctgaactcattttatttagatgatctagataaaatgctgaaacaaagttcattaagtcaaccatttggccaagcgttatctacataa

SEQ ID NO: 62247 - DNA, 1005 bp, Acinetobacter baumannii
ttggaaaaatggctaaaacaattgccatttaaagatgcaacttacgctgcgcaggagtttatctgcaatttaactggtagaaaaggttcagttaaaggtaaaactaaaattgatcaattagaagaagtacactatttaaaacgtctctactcgttgatgcatgaatatataaaacctgatgaggatattttaagacctagcttaattgtctattcacctggcttaagagatgatgctcaagatgcaagagatctattattttcatgtttaaaagatattccatgttcagaaacctattatgctattaaagatttatctaaagaaactacggatcataatcgtcgaaattggttattaaaaaccgcttctaacattgcactatcatgtggtgatttagaaccatgggaaagtgagcaactgctgcaatttgaaagttctggaaatataaaacctaaaacacataaagagttatttaatttagctttgcttagagtttttgagctgaaggattggctggaaaatggtgatgatagcccatggcgtacttggcaaagagtggaagaggaaacagaaatgagaaatcttattgccagtgaattaagaaaaatagctcaaaataaatattctacatctcaagaaaatgaacttgctaatagccagcgcactgatatcagattagaaaatccgagaataaatagtccagtaccgattgagttaaagattttggatagaaattggactggaccagatttgtgtgaaaggctaagaaatcaattagtaggagattatttacgtgaagctacttctggttgtggaatatttttattagttgctcagaacactagtaaaaaatggtttataaatggaagtagagttgggctaaatgagttagaagaaactcttcaaaactattggtatggtatagcctcgcaatggccaactattgactctataaaagtagttgtaattgatttaaataaacggggcctagtttctaatacttaa

SEQ ID NO: 62248 - DNA, 609 bp, Acinetobacter baumannii
atgggtaacaaaccaattactaaaaatattccccctaatagcaaagcttgggatggttatccctctaaagttgaaagctgtaatgtaccgaaaccattttgctatttacaacttgatcgcccacttgcaatgccttacacctttatgatgtctgcacaacagtgggaatatgtagaaaaaagaaataagttagaatttttattagctgttagatttggcatggaatacgatattgctaaattaaatgaggatgttttgatctctacaggtttccatacgggcatgtatgttaagtttcaaaactatttaaggaaacactatcaaaaagatgctgttgtattaatgggtgtttttcaaagtaatgcttttaccacaagatttggtacaacttttgcgattgaagatttagtaggcctaaaaggtgctatcgatgatttgaggatagacgatatcatgactggggcacatatgatttcacgaagaaatggtgctacacaaattaatagaaagatgtatcgacaaaactttaaccaagactacaatccaactatgttaaaaaccttagctgctcaaggattgtatcctgatgaaatcgaaggaatcttctag

SEQ ID NO: 62249 - DNA, 405 bp, Acinetobacter baumannii
atggtttttgtgataaatctagctttatcccaagaaaaaaatgaagagattattcagacacgattaaaagatatgcagccagaaattatacatattcaagaaacttcagaatcgataaacgataggaaattaaattactttgatgttcgaattaaaagcccagacaagcttaataatcctttttttgcacagcaatttattgaaaatttaaaaaaagttaccccggcattgatggatggaaatagtgagatactcttggtcttaagaacagatcttcaatttggtctaatttcaacaggccagtacagtctatattctgttgagcagaatgatacagagtttaacgttatagagcagcaaagttctgagttcaatcaaatatcctttttatcgatcaacttctaa

SEQ ID NO: 62250 - DNA, 321 bp, Acinetobacter baumannii
gtggaaaaatcaggattaggtataggtttcttatttctaaatactatggctgggtttgctaaaaatcctgaagatgctcgtgctttaagagtattagaggcgatacgtaataataatttagcggcagcatcagttgcaggttatggatcttatgttgtagtaggcacagtggccgctgtatctgctgctgcacctgtagtaggaagagtggctgcgccatttattggtactggagcacacttagaaggagccggtttaactgctggaactgtgggtaaagctgctgtcacaagtgcgggaattggtggggggtggacataa

SEQ ID NO: 62251 - DNA, 300 bp, Acinetobacter baumannii
atgaaaaaaattgcaacgaatcaattgaatcttgaagatgtacctgcggactataagtggaatagttttgttcagtttgctttaagttttgatcctagattagagatagaccaatggggcgaaagtgattatattagtccaaatcggttgccaactaagtcggattctataataggattgagaagctatttgtaccatcttcaaagagtaaataatcaagaaattaatgatgaaaatactttaaaatttagagtggaaaaagtatatattttattaagagaaaagttaagagaattttaa

SEQ ID NO: 62252 - DNA, 306 bp, Acinetobacter baumannii
atggttcctacaaaattttgttatgcatgcggtcaacagattgatgcgcgtgctgagatttgcccgaaatgtggcgtaagacaacaaggcgttagaacaacgggacaaaaaagtaaggttgttgccggtgtttttgctttgctcctcgggggatttggtgcgcataaattctatttaggtaaaattggacaaggtattctctatcttattttttgttggacatttattccggcaattattgctttttttgaaggtatcatttatctctgtacctccgatgaagattttgccaataagtatggttaa

SEQ ID NO: 62253 - DNA, 228 bp, Acinetobacter baumannii
atgggtaaagattacgactatgtacgtaatgaaatggacctgcctagattaagagcattaagtgcgtatcagcaaagtaaccctcccgcgcatattggaatacagcgcctttgccgtattttggaagcatttatgggtattgatgaaactccgccagctatcaccgtttcagatgatgacgaggatgatatgttagaagttttgtcgaattttccacagggtggttga

SEQ ID NO: 62254 - DNA, 726 bp, Acinetobacter baumannii
gtgcacgtaaatcgccgtgtagagctttattacacgcgacaactactggctatttcaaaatactgtcaggaacaaacaaaagaattggttattcctacagtcggccagaatatcggtgatgcttggttctcagacatgatgacggcgtttagggaaaagctcacaaagtatgttgttgaggtttcgcgaccgttagccacaaaggtcgtgactgacacccaaaaggaagtggacaagcaaattgcagagcacaccaaaacaattattggtgtggatttaacgccgttttatcgagctgctgatattcaggatgaagtagatctaaacattacggccaatgtcagtttgattaagtctattccgcagcaatacgccgataagcttgaggtattaatcaccaatgctttgcagactgggcaaactaatgaagagttagccaaagcaattaagcaattgggtttatcaactgattatcgtgcacggcttattgctagtgatcagatgggcaagattaacggccaaattaaccaagctagacagctttcaatgggtgttgagacatacacatggcaaacggccaaagacgagcgagtgcggccagatcaccaacataagcagggcaaaacatttagatgggattctccgccagatggagggcatcccggtcagcctattcgttgtcgttgcacggcattacctaattatgaggatatcttaattgactga

SEQ ID NO: 62255 - DNA, 1458 bp, Acinetobacter baumannii
atgaatttacaacccgttattctatcaggtggatctggtacacgtctttggccactttcaagagaaaagtatcccaagcaattacttactctctttaatcaacatagtatgctacaaaatacaggtttaagattaaataattcaaatgtttttacttatcaggtaaatagccccattgttgtttcaaataaggaatatcgattcctgattgctgaacaactaaaacaaatcgggattagagcgaagattttgcttgaaccttgtggtcgtaatacagcaccagcattaacgattgctgcattagatattattaaggaaaaaaaagatgcaataatggtcgtcatgccagcagatcatttgatcgataatattgatgcttttcatacagcgatccaacatgctgttgtaaaagcagaagagggtaatattatttgttttggtattgaacctacccgaccggatacgggttatggatatattaaaactgaagatttatcagaaaagaatttaaaacttttagactcttttgtagaaaagcctgatgctgctacggcacagaagtatttagagtctcgtgattatgtctggaacagcgggatcttcatgatgaaagcatctacttggcttaatgctattgccaagtttaactcctctatctatgaagcatgtaaactggcttatgatttatcagttgtggatagagattttatttgggttgatgatgaagagttcgccaagtctccagaagattccattgattacagtgtgatggagcatcttggaaaaaatagttccgaagaaattcgatcttatgtcgttccaatgtctgtaggttggtcagatgtaggttcatgggatgctgtatgggaagaaagcgataaagataaaaatgggaatgcaactaacaataaacatgatacctatttttataacagtcataataatttagctttttccgataataagcgcctcatttcagtattaggtctcgagaatattattgttattgatactcaggatgcattacttgttgcaaataaatctaagctcactgatattaaaaaacttgtaggtttggttagagagacacatgaacctctgacacaggttggtagaaaagtttatcgtccatggggaaactatgattcgatagataatggagataattttcaggttaagcgaattattgttaatcctggagaaactttaagtttgcagatgcactatcatagagctgaacattggattgttgtaaaaggtacaggtaaaattactcgcgataaggaaacctttcttttacatgaaaaccagtctgtatatataccattaggtacagttcatcgcttagaaaatcctggtaaactagcattagagcttattgaagtgcaatctggtaattatttaggtgaagatgatatcgtacgatttgaagatgtatatggccgtactaaagagtaa

SEQ ID NO: 62256 - DNA, 663 bp, Acinetobacter baumannii
ttgactcctgaaacattagataattatattgatcttccacctattgttgctgatgttgagccagcaaatattgctgatttaatcagattaatgttgttggaaaaatatggaggcatctggatggatgctagtatatttctgactgaaagtctgaattggattttagataaaatggatacgcaagatgcttttcttttttattcagatgagtgtacaacaaataatcaaaatcctatttctgaaaactggctgatagttgctccagaaaagagtgcttttattcaggcttggctggaagaatataaaaaatgtattctgagtaaagagcctaaacggtattatgacgcgataaaaaatgacaaagcattaatgcagaagttgaataatccagattatcttttatgctatatttcagcaatcgtgaccttgaaaaatggatgttataatattttgtatgcatcatccggttcaactgggcattattttaattataaatatgcatggagtccttatgccattgctacattactattattgagagatgctggtaaaataagcaaacctaagctggttaaaataacaggtggcgttagaccagcaatttcacgattaattagatataaaatgtttgtacgtagtagtttatttggccgtttctattaa

SEQ ID NO: 62257 - DNA, 858 bp, Acinetobacter baumannii
atgtacgaagtacagaaatatgttgatgtaaatattaacggcactgctttgatgttggatttattagtaaataactcttatacagttaaaaaagtgatcgtagcttcttctcgttcaatatatggtgaaggaaaatatattagtaaagaactaggggttgtttatccgactcagaggaccgctgactatatggatcagaaagattttgaagtcaaatatcatggttcttctgaattaaagctagttgctacagatgaagagtctaagattcacccatcttcagtatatggaatcaccaagcaaaatcaggaacaaatggtattaactgtttgttcaagtatgggtattgctggcgtggcatttcggtatcaaaatgtatacgggccgggccaatcacttaagaacccgtatacaggtattttatctatattctctacacaaattaaaaatggcaataaaattaatatttttgaagatggtaaggagagtcgagactttgtttatattgatgatgtggtcgaagcaacaattctaggattagaaaaggaagaagcaaataatcaggtatttaatgtggggacgggtatcgcaacaagtgttttaaccgttgctgatcaacttgtcaaaaattacaatatagatgtgcctattactatttcaggaaattatcgcctaggagatatccgtcataattatgctgatctgagcaaaattaagaaatatttgggctttgaacccaaagtttcatttgaagaaggcataaaaaaatttacgcaatgggtgaatactcaagaaattcaagaagaccgttatcaacaatctatcaatgaaatgaaagaaaaagggttgtataagtaa

SEQ ID NO: 62258 - DNA, 471 bp, Acinetobacter baumannii
atggaaagttttaaccaaaaagcctttgagcaagcattacatgaacgtggattagatattcctcaatttgttcaagacaatcattctttatctcaaaaaggtgttttaagaggactacattatcaacttgatccatatgctcaaggtaagttagttcgggttgtacagggtaaagcttgggatgttgctgttgatattcgcaaaagttctccaactttcggtcaatgggttggtgttgaactaactggtgaaaatcataagcaattttggattccagctggatttgcacatggtttcgtagctttagaagataatacacaatttttatataaaacaacaaactattataataaagaaagtgaaggagcgatcctttggaatgatccatctattgcaattgattggccacttaatgatatccaagaggtattagttagtgaaaaagaccaattagctcctaatttgggttaa

SEQ ID NO: 62259 - DNA, 189 bp, Acinetobacter baumannii
atggacgtcatactttatgttgaagaacgccgtgtctggctaccagctaatgcaccgtggcttttgaactacattgaagaaattgaaggccttactgctgattggtcacatgaccatgacgaccagtgggacccgaccattgatgcgattaatgattcattagccaaaaagccaactgtatttgattag

SEQ ID NO: 62260 - DNA, 450 bp, Acinetobacter baumannii
atggcacgctctcaatatttattagagcttaaaaataagcttgaaacacagttagaagatgtttcgactgagatgctgagtgcgtgtctaaatttgatcgattatgtatctatcgcaccaacaaagaagacccatttaacttttgtcgatctctataaacaagtagatcattcgatttctgaagatatattttatagtgctgtattccacttaactaagaaaaatataaatgttttgactcaaaaatttgaagcatataactctgttatagacagatatgaaactattatcgacgacgatgatattagagaaatattaaaatctatagctagtggtgactatattcatccgctgagcgggcaaatcttaactgccgaagattttaaccaacaagtattaacctacttttctccatcagatttttttgtgagtaaattatatgctcactaa

SEQ ID NO: 62261 - DNA, 264 bp, Acinetobacter baumannii
gtgccatccacattgacaactacagttgctgttgggtcacttacagtacctgttaatgtaggtgtgctgtcgttagtgagtacatcatcaagtgctactgtcggcgcaactgcatcaaccactgctgttgctggacctgatgtattgccagcaggatcttctgttactgccgttaccgtatcaccatcatttaagcctgggtttggcacagtccaagtaccatccggtcctgctacaacacttgccgtactaccatctggataa

SEQ ID NO: 62262 - DNA, 279 bp, Acinetobacter baumannii
ttggaagattattctacaggtgaggataatgcaaattgtggtggtgtcttaatatatgctgttgatacagattacaatacaaatcaaatgttaaaaatttggtatgaggatttagcggaagctagtaaagattctactaggaatcaaaacttacaagggctaactcttgaatggcctgatgaaaataaaaatattttttatagtactcaaatacatcctcattcaggcctttctggttataaagtaagacattgtatcttaaatcttaaatctaaataa

SEQ ID NO: 62263 - DNA, 213 bp, Acinetobacter baumannii
atgtttaaattttttttaattggtatgttagcctggactgatgctgctaatgctgattttaatatagaaaataatcaagaacagtcagtaaatgtcaaattagggtatcggagtgttttaaattcttcctttatatatactgatgtcagcaaaaatgtagatttgaaaaaaatatcgttactgttccatatggcgaagttacagttttactaa

SEQ ID NO: 62264 - DNA, 189 bp, Acinetobacter baumannii
atggacgtcattctttatgttgaagaacgccgtgtctggttaccagctaatgcaccgtggctattgaactacattgaagagattgaagggctcactgctgattggtcacatgaccatgacgaccagtgggacccgaccattgatgcaattaatgattcattagccaaaaagccaactgtatttgattag

SEQ ID NO: 62265 - DNA, 408 bp, Acinetobacter baumannii
atgaagtattggagtaaaccagcagtacaagtgagtgtgctgccagacgtccaatgttctgatgtctgggatgatagttttagcctagaaaataaaaaactagtaaaacaaataggatttaatctaaaagataaaaattggatttctactggttcatgtagccatatccataataaaactgatcttattatgatttatagtcctaataattcatttgcttactcaagagcattagatcaaaaaaaaattaaagaaggattcaaaatagaggactctgtcgacgtaaatttgtcttgcggtaaaataggggaagatataaatattatatctgtcttaaatggatatttacataaggaaacatcgattaagaatatttctaaatataaaatttatgacagatttaaatga

SEQ ID NO: 62266 - DNA, 285 bp, Acinetobacter baumannii
atgttaagtgagaattatttttctcaatatttacttatagaatttaaacgccctaagcaccctctagcttttgctgattatcaacaagtcactcattatagacatgattttttaccatatactaataaagacataaaagtgatgttaattggtggaaaaagatcatctgaattaactaatagagtttattcagagcctaatgttgaaattctagtatttgatgaaatcatctcaactgcaagaaatcaattaaattggcttttaaaagagttaggttcaaagtaa

SEQ ID NO: 62267 - DNA, 402 bp, Acinetobacter baumannii
ttgcccaaacataaatatgtaaattacagttttgatataagaaatttagttatttcttgtcggagatgtaatacaggagcacaaaaaggtacacgaacagattttatcaattatctaattcagaatgatcaatataacgcttcaatagatttttctttagataactataaattcatacatccaaagtatgaaaatactagagatttttatgaattggaatgtttacaagcagggcgtgcagtatttatgcgttatacaataaataaagaacatcctaaacttgaatatacatttgatttttttaatctaaaaaagttagagcgtggttctttagaagattgcgcaaggataatgaaaagattaaatagtaaatttttaaaatatttacctgagaaaatataa

SEQ ID NO: 62268 - DNA, 195 bp, Acinetobacter baumannii; identical to SEQ ID NO: 62205

SEQ ID NO: 62269 - DNA, 483 bp, Acinetobacter baumannii
atgtttgctactatagcgttactatatacttacactaattggagggaacaagaatcaactaaacttttatccgctttatcgaatcaatgcatggataaaatagatgtcctagttagaaccaatgatcaattaggttcaaatattattagtatattaaatggtgaaaagataaactcatatgatttatatgaggattttaaagttcaatgtagtgaattgcataacttattattaaaaatagattcaggtttaaatagtaatcataatattgaattagattccttaataatggaatatataaagaaaattgaaaatataaaatctattgcaaacaatacgttaaacttttttgataggttagaagatgaccataaaacatcatttcgtatgcaaataaattctcttgctggatcattgttttccaacctaaatcaaattaaaaaagaaattaagccttatctttttttcgataaaagtgcatga

SEQ ID NO: 62270 - DNA, 222 bp, Acinetobacter baumannii; identical to SEQ ID NO: 55516

SEQ ID NO: 62271 - DNA, 594 bp, Acinetobacter baumannii
atgatttcatggctttttattggcttggttgccactattttacttacccctggcccaacaaatactttacttgcatcatcaggagtacaagtaggccttaaaaaatctgctaaattaattccggcagaggttctagggtatgtgatttcgatttcagcttggggaatgttaatcgggaaagtttctgcaacgcttcctttattacctcctatacttaaattgctcagtgcttgttatattatttttttagcaattaaattatggcacacggcaaatcaacagtttgaactagatcagccaactattcgcccacgtgaattattttgtgcaactttactaaatcctaaggcattactttttgcttcagcgattttccctgttgcagcgtggactaattttcatatttatctcattcatatgttggcttatttagctttaattaccccaattgccttattctggatttttttagggtcagtcttggctgcaaataaagtacgttggttaaatcaatcaaatttacaaagaacggcctcgttggttttagttagtttctcaattccaattagctattctgctttattaaatctttaa

SEQ ID NO: 62272 - DNA, 165 bp, Acinetobacter baumannii
atgctcaacagtcttaatgtttattacaacggttggggcgaatcatggttatggggaacgctgattagttcaacagccaccacaggtagacccactattgcttttgaatatagtccagaagcaatacagcgaggtttcagctctcttcttatttactccctttaa

SEQ ID NO: 62273 - DNA, 381 bp, Acinetobacter baumannii
atgggattacctggtccagtctatgatgctttgccggatggttggggcatgttattaatggatcgatattttcgaaaaattggactgcatccggcacgaatcagccctttggaacgtctaacttatattagcacccatgcaataggtgttctctcctttgaaccctgtgtcgcagagatgcaaacttcagagaatattcccctgccgcaattggcacaggaagtccaagaagtcctcaaaggagaaggtggcgaatttttacaacatttgctggtcagggtggctccccccaaggtgccagatccaaagcattggcttaccgaaatcctgtcaattttgagttttcgacgcaagcttctgatcaaaatgaagcctggctga

SEQ ID NO: 62274 - DNA, 1188 bp, Acinetobacter baumannii
atgaaccagtctgatgatttagaataccaacttgatactttagccattcgtaccggacacactcgtagttttgaaggtgagcatggcgaaccaatttttttgacttcatcttttgtatatgaaaacgctgctgaagcagctgcaaaattttctggtcaggttcaaggaaatatctattctcgttttactaatccgactgtatcgatgttcgaaaaacgtttagcggctttagatggggctgaacgtgccgtggctacaagctcaggtatgggagcaattctatcgatttctatggcgtatctaaaagcaggtgatcatgttatttgctcaagagcagttttcggttctattgtcgctttatttgaaaaatacattgccaaatttggtgtagatatcacatttgttgatctacgcgatttagatgcatggaaaaatgcagtacgtccagaaactaaactattatttgttgagtcaccgtctaatccattagctgaaatcgcagatatccaagcgcttgcagatattgcacatgcaaatggcgcattacttgctgttgacaatagtttctgtacacctgttttacagcaaccgttaaagttgggtgcagatctagtgatttactctgcgactaaatatttagatggccaaggccgtgcgttaggtggtgcagtggtaggtaaacatcaactcctagaagaagtttttagcgtagtgcgtactttagggccatctatgagtccgtttaatgcatggattttcttaaaaggattagaaactttgcgtttacgtatgaaagcgcactgtgaaaatgctcaaaaacttgccgagtggttgtctacccatgaaaaagtagaaaaggtctattatggcgggcttccaactcatgaaggtcatgaacttgcagcaaaacagcaaaatggctttggcgggattgtttcttttgtagttaaaggtgagcgtgaaggcgcgtggaaggttattgataacaccaaatttatttctatcacgggtaatttaggtgatgtgaaatcaacaattacgcatcctgctacaaccacacacggcaaactttctgctgaagcaaaacaagctgctggtattcaagaaggcttaatccgcgtttcggttggcttagaagatattaacgatattattggtgatatctcacgtggattagatttgatctaa

SEQ ID NO: 62275 - DNA, 1068 bp, Acinetobacter baumannii; identical to SEQ ID NO: 62244

SEQ ID NO: 62276 - DNA, 228 bp, Acinetobacter baumannii
atgggtaaagattacgactatgtacgtaatgaaatggatctacctagattaagagcattaagtgcgtatcagcaaagtaaccctcccgcacatgttgggatacaacggctttgccgtattttggaagcatttatgggtattgatgaaacgccgccagctattaccgtttcagatgatgacgaggatgatatgttggaagttttgtcgaattttccgcagggtggttaa

SEQ ID NO: 62277 - DNA, 657 bp, Acinetobacter baumannii
atgaaaaaaatgcttataaagagcggtttactcatcactagtttttttatttataaccaaacctatgccaactgtactttaagcaagggctttaccacagtcgatattccaatgacgattggaactattgtagtacgcccgaccgatccaatcggaacagttctccaaaagaatacttttactattttacccaataattcgactgcaacttgcaaccgtgccagtgaccaaattacagcggcacttccattaaactatcctgttagctcgattggaaataatgtgtatgcaaccaatattccgggtataggtattcgactttatagagaggcattcgactctacagatttttctggatattacccttataaacgcagcttgactcctaatacaacatatacactttcaccaggctattttgttatggaagtgattaaaactgctgcaactacaggttcaggtgcattagttgctggtcgttacagtacctattatgtaacaggacaacaaaatcgtcctttcttaacaactacagtattgagcagctcccctattcttattgcatcatcttcttgtgaaattcaaaacggtatagatacggttgttcagcttcccactgtgatgaagtcaggttttagagctattggatcaacttaa

SEQ ID NO: 62278 - DNA, 441 bp, Acinetobacter baumannii
atgcgaaaaattatacctatagaaaataaatactatcaattgattagtaatcacttcatatatcatgatcgacctgattggactatgccaatagaattaaatcaaaatgaacttaaggagcttacaaataatatcaatgaattactaggcttgcttgatgagttatactttattacaaaggataataatatagaaaatcttaaactccattaccttaattatgctcagctatatcactatatcttaagcagatcagagctcctttataaaaatggtgacaaagctgaacttgttgaatttttacgaacttcattaaagtttgtatataaagatattaatggcaaggaatggtcaagtaccactctttatgcttacgccttcaaagggctagaaaaagtagaactaagaaaatatcttagtgaaaatttaaaaatcaagtaa

SEQ ID NO: 62279 - DNA, 498 bp, Acinetobacter baumannii
atgccaagaaatgaacttaacgttattcatagtaatttttcacattttataaaaaaagagttaggtttagaaatcatcgaaaaatacgatttcctttcttccccgttggaccttttcccttgcatccagaagttttatgatgaaacagtggataaagttagtggagtcacagagatctacttcaccacaactgaaggtacagctcaccatgaaaagttacgtggagacagtgttgatattcgtcaggtgacctatcatgaatcgggtgtaaatggtttaaaaaacacagaaattgatggcgttaaacttgatgaaacaattacgccttatagaataagtaaaaaatactatgatcgagatatagaaatttcattaaatagtagttacaacgcgttaagcaatattaatggcagccatctatataatgcctttataataggatctcgttcttatgaagatattgagtttgttctcaataaacttttaacactaaggtaa

SEQ ID NO: 62280 - DNA, 267 bp, Acinetobacter baumannii
gtgccatccacagttaccactacagtcgctgtcggatcatttactgtacccgtaagtgctggtgtactgtcattcgttaatacatcatccagtgctactgtcggtgcaactgcatccaccacagctgttgctgggcctgaggtattgcccgcaggatctgttgcggttgcagtcactgtatcgccatcaaccaggttacctgggtttggtactgaccatgttccatctgtgcctgctaccactgttgcagttgtgccatcaggataa

SEQ ID NO: 62281 - DNA, 267 bp, Acinetobacter baumannii
gtgccatccacagttaccactacagtcgctgtcggatcatttaccgtacccgtaagtgctggtgtgctgtcattcgttaatacatcatccagtgctactgtcggtgcaactgcatccaccacagctgttgctgggcctgaggtattgaccgcaggatctgttgcggttgcagtcactgtatcgccatcaaccaggttacctgggtttggtactgaccatgttccatctgtgcctgctaccactgttgcagttgtgccatctggataa

SEQ ID NO: 62282 - DNA, 432 bp, Acinetobacter baumannii
atgagaaatcttattgccagtgaattaagaaaaatagctcaaaataaatattctacatctcaagaaaatgaacttgctaatagccagcgcactgatatcagattagaaaatccgagaataaatagtccagtaccgattgagttaaagattttggatagaaattggactggaccagatttgtgtgaaaggctaagaaatcaattagtaggagattatttacgtgaagctacttctggttgtggaatatttttattagttgctcagaacactagtaaaaaatggtttataaatggaagtagagttgggctaaatgagttagaagaaactcttcaaaactattggtatggtatagcctcgcaatggccaactattgactctataaaagtagttgtaattgatttaaataaacggggcctagtttctaatacttaa

SEQ ID NO: 62283 - DNA, 570 bp, Acinetobacter baumannii
ttggaaaaatggctaaaacaattgccatttaaagatgcaacttacgctgcgcaggagtttatctgcaatttaactggtagaaaaggttcagttaaaggtaaaactaaaattgatcaattagaagaagtacactatttaaaacgtctctactcgttgatgcatgaatatataaaacctgatgaggatattttaagacctagcttaattgtctattcacctggcttaagagatgatgctcaagatgcaagagatctattattttcatgtttaaaagatattccatgttcagaaacctattatgctattaaagatttatctaaagaaactacggatcataatcgtcgaaattggttattaaaaaccgcttctaacattgcactatcatgtggtgatttagaaccatgggaaagtgagcaactgctgcaatttgaaagttctggaaatataaaacctaaaacacataaagagttatttaatttagctttgcttagagtttttgagctgaaggattggctggaaaatggtgatgatagcccatggcgtacttggcaaagagtggaagagaaatga

SEQ ID NO: 62284 - DNA, 951 bp, Acinetobacter baumannii
ttgaaaattgccttgtcagaacatgagtttttagtagtacaacattacatacaacatcgttatgaacaatatttgtttaatcagcaggatgatctactttttagtgttaatcatcgtgtattaacggatcaatgtatcagcaaaattacagtagagttgtttaaccaaatattaggtatgcatcatggctttagttttcatacgttgcgccacagtgctgctaactatctagcaataactttgctgggctcaaaagaaatgattaaaacatatacagattgtccttgggtaaaagcaaaaaagatgcgtgatttattgtttggtgttaaagcacgtgctcatgaagagattattcaacataaatggcaggtgcttgcctcttggatggggcatagcagtattgaacaaacggcttcaaattatcttcatgttttggatttattagcagtcgatcgaatttacaattcgccgtgtatcatttcaaaaaaagtcctagaacagtgttttggtccagtgaattcaagtacagagtacataaacttaaatcgttatactcagcagcagaaatggtttaactcttatcagcaaacacagccagttatgattgctggtcgacaagaaaagaagtttagtatcgagaagagtactctgacgccttttcaacgtttgataagtttaagagatggccgttcaagcgaagatattcaagcacaagaatggatgcagcgatgtcaatttatgagcactaaatggatggaccccaaaaattttaatttaaaaacgaaatatgttagtaataaaaatttagatgggggttggtttgatgagctttacaacaaagctaagaaactgaaacgttctgatgaaataattcctctccttgatttgcataaccaacatgataaggggaaagatatacctaaagagttgaacgtggtcaatgcactttag

SEQ ID NO: 62285 - DNA, 696 bp, Acinetobacter baumannii
atgtctcattatcctttttatttattggcgacttataatgaaaagcaaactataaaatattcagactatcattttgtcttaaatgagcgtgatgctgatcttatgtgtgacatttatggagtcaaaagtgatttttcactaccagtttcctataaggatgtatttgatccaacaaaagttaaaacagttgcaaatgctcctttaaaaattttatttgttggtacggctttttttggcaacatacctggtgttgaattttttataaaagaagtaatgccacatatcaatgctgaattgaccattgttggaaaaggtatggatcagtttaaagaaagatttgaaacaaaagaaaatataaaggtttttgggtttgttgaagatctttctgcactatattacgatgcttctattgtaattgcgcccatattttcaggtggaggcatgaaaacaaaagtagcagaagcattaatgtatggtaaaactataattggaactaaagaagcatttgaaggttatgttaaggttaaaagcgcaatgattgaatgcaatactgctgctgaatttatctcttgtataaatcaaaataggccttattgtccttacaatgaagtctctagacagcagtttttagcttattatgatacggatatactgcattcaagcttaaatgactttttccatacaaactttaactaa

SEQ ID NO: 62286 - DNA, 678 bp, Acinetobacter baumannii
atggatctttctaatattcttataggtgacacaacgtggtcctttgttttagaaattttggtccgttgtaccatcatgtttatcattatcattagttttctaaggctatctggtaaacgtggtattcggcaactctccttatttgaacttgccattattttatgtttaggttctgctgctggcgatcctatgtttactaaggatttaccgattgcccatgcattgatagcttttatcgctattctttctctatatcgtcttgtcacttggggcatggtaaaacataaaaaaattgaagacttattagaaggaaaagcgctctgtgtcgttaaagaaggccttttagtctacaaagatttccaaaaacagacctattctcatgatgagtttttttcggaaatgcgccaacaaaacgttgaacatttaggccaagtcagaacagccctacttgaatcggatggtattctgagcttgctttattatgaagatgaagatgtcaaatggggactacccttattccctgatgcttatcgtaaagcagaagttcttaaaattaatactttttattcctgtatgaaatgtggcgaaactaaaattttaaataagctagaccaagaatgctctcgttgtcatcaccacagttgggctgaatctttaaaaacccggcgcttagggtaa

SEQ ID NO: 62287 - DNA, 603 bp, Acinetobacter baumannii
atgaaatccgtagctgaacgttttcttagtgtcggattgcttaagggtttaaacggaatgatcgtcttggataaagaggaggagtatgactctaaatcttatagctttggcggtctgcctgacctcatgcgtgagtattcgattcaaactgctggtgcagctgatatgccatatacgattttatttgggcaatcacctgcaggtatgaacgcaactggtgagcacgacacacggaactattacgacagtatcgcaactaagcaaatatggtccttaaagccattcatgatgaagcttttaaaagtgattgttcaagctacatttggtcgtcagattccaagtttagatgttgtgtttaacccgttatggcaattagacgctaaggtgcgttctgaggttgagaaagctaacgctgaacgggattccaagtatttagaaatgggcatcattaccgagccacagatagcaaaacagcttgttattgacggtgtttattcagtgatcgatgaagctcatatcaaagagcttgagacaatggtgaagcttaatgacaacgataattcagatcctgaaaccacacctccagcaggcgaagaaacgtaa

SEQ ID NO: 62288 - DNA, 417 bp, Acinetobacter baumannii
atgtgtataagagacagattaattcttcctagtgttagacagaatgatgcatttcatactggtacaattgatattttttcttatttacaagaagaattaggtgaaaatgaagttgaactttttgcttttgatgaggagtatcaagagttagcattacattcaaaagcacattggttaggtgtttttttagtagctcaagtagctgtaccaatattcacaaatgttatgagtgattatatttcaaatgaattgcaggctaaaagtgatgatgaaatagaggttaatattataattgaaaagaacaacgataagaatatcaaggtagcctatcgtggtaaagctgagcatattaatagtgttctagataaagttaatgagttgagtagagacaatgaagttaatagacatgctaaataa

SEQ ID NO: 62289 - DNA, 444 bp, Acinetobacter baumannii
gtggatagtgaagcaatttatcaagcgctgtttgatcggttaagtacaagggtagaagggctcaaaacagtaagtcgccgtttacgtcactttaataatgtattgcctgatgaacggcctgccatatttatcactcaaggcaatcagcaagaagtaccggtacatggtatggattcaaaagttgaacttgctgctgaagtttatatctacatccatgaggctgatagagctaagcccccatcatcacagatgaatattttcatcgatcgtgtacgtgaagctattaagcctgaccatccagatttaaatgaatgtcaaaccttaggaggtttggtagagcattgctggatcgaaggcacaatagaagtgtatgaagcagtagaaaacatgctggatgatcaggcgattgccattattcctatccggatcctcacaaccaattaa

SEQ ID NO: 62290 - DNA, 267 bp, Acinetobacter baumannii; identical to SEQ ID NO: 62280

SEQ ID NO: 62291 - DNA, 267 bp, Acinetobacter baumannii
gtgccatccacagttaccactacagtcgctgtcggatcatttactgtacccgtaagtgctggtgtactgtcattcgttaatacatcatccagtgctactgtcggtgcaactgcatccaccacagctgttgctgggcctgaggtattgcccgcaggatctgttgcggttgcagtcactgtatcgccatccaccaggttacccgggtttggtactgaccatgttccatctgtgcctgctacaactgttgcagttgtgccatcaggataa

SEQ ID NO: 62292 - DNA, 216 bp, Acinetobacter baumannii; identical to SEQ ID NO: 47771

SEQ ID NO: 62293 - DNA, 321 bp, Acinetobacter baumannii
atgttttttgtactcgctttatatttgtctaaacaagcgtctaaacattatgaatgttatcaagaaaatcacaggacctttctacaacttgctgccctagagccatttatggcccgcatgacccctgatgagcagaaagagattagaaaaggactaataccaagttactttaatcaaacaagtgatggaaagtattcaagcaaaggagatgaagtggacttatcatcaaatatgacaactatttttaccaatctaattgataaaattccatcaaaaaaagagcaagaaaactcgattcgatctgaaaatactacaggataa

SEQ ID NO: 62294 - DNA, 204 bp, Acinetobacter baumannii
atgcctaaaaatctttataaaaatgcaaatagtgttatcgaaggaaattatgataatacacccttaggtgccaatacatatttgctgggtttaaccagtttatttgatgaaatgggggcgcaaggccattcaatatccgatgttttatctggcacaaatatttcgccagatgctatgaatcactcctctttatatatttcctaa

SEQ ID NO: 62295 - DNA, 1359 bp, Acinetobacter baumannii
atggggaatatcatgaaactaaaattgaagaattttaagccaaataatttatggtatgccgtctgttcaagctcaatgatattcacatggctgatgacaagctctgtggtgcaagcaagtgatttacaaatttatgcctcacctacagcaggtaaaaaaacaattgtgatgatgttggatacatcaggaagtatgaccagcaatagttatggtgaaaaccgtttggctatgcttaaagatggtatgaatgcttttttagctagcaataaccctgtcttaaatgatacgcgagtaggtttaggaaatttctcggcaaatggtgatagccgaagtggacaaattttagtggctgctgcccctttaggagatgcgagtactttaaatacggtaggctcacaacgttataaattaaaacaagctgttgctaatttaagatcagggggcacgacaccttcagcccatgcctatgctgaagcagctgcttacttaatgggaacaaccacatattcagaaacgaattatgctattcgtaaagagagttatattaaacgtgtaagaagatttgataataaaactgaatactcttcttgcactaattcttcacaaattgatattaataccttaagtcaatcatgtcgttctaatggctggagtagctggaccacgttcaatccaggagtaaatacattaacagattatgagacttcatctgactggacttattactatacttattactacaccacttttaattatgctgtggcaaatgcagatagcggtattccaaaatctaaatcaaacgatacagctagcaatccgaatattgttgtagaccgaaatgctactaactccaatgcagtgtatcagtcacctttacctgcagtagcgaatcgccagagttgtgatggacaaggtatttacttcttatcggatggcgaaccgaacaatacaacaaatacacgttcggcaagtgtcatgtcgactgctttaggtagtacttttggagctgattttaattgttctggaggtttatctaacactacggcagactctggttgggcttgtatgggggagtttgcaaaaagattatttgataaaacaaagaaccctgccggagtttctattcaaacagcatttgtcggttttggtagtgacttttctagtttgagttcttctgatgtaaaaaatgcctgccgtttaagttcgagaacccagtctgaccgaaaaggagatgatgcgtgttcaccgaatcaatctacaaatgcggtagctgcaccaggttatgggaatggtggttttttccctactcaaagttcacaaggcgtaacagacagcgttattgcattattaataatttag

SEQ ID NO: 62296 - DNA, 1263 bp, Acinetobacter baumannii
atgcgagatttaggacaattaggtgaaagcacctttgcaatgtggtgtgctcaagttggattaattgctaatggttcagcaattgataaaacaggatgggactactatgtggaattcccaatatcttcaaatataactactcatgaattacataaatcagcttttgaatgtaaagttcaagttaaagcaacagataaaaaggatagaaaactcgctattacagtatcaaatcttagacggatggcaactgtgcaaatgccagcattttacgtttttctagaatttgatgggaagaatgaagcacaaaatgcatttgttttacatatagataatgagttggtttataaaattcttaaaagagttcatcaaatagaacaaagtgaaaaaaataaggatttaaataaaaagacaattactcttacttatagtgaacagcacaggcttgaaaaattagatggggaaaatctaaaacaaaatttgttgaaatatatcggtgaaaactattctgattacatagctagtaaaaataaatatttacaagagtgtggttttgaagatgggtatggaacagttcaattttctcttgaaggtgaagaagacattcagagaatcattgatgtttctttaggattagaagaggatttagatgtccaaaatttagttaatattgaaaagcgatttggtatcccatctaaaaagtcgaattttgaaatacctaaagcaaagctaagtttgggtgtgcaaccaccaaaaaaaggaaaaattagatttaaagaagatagtctatctactggcttagtttttgatatagatttttataactcaccttttagttttaatcagtttaggaaattttcaaaatttcgagttgttggcgatttctttgatatgacttttgagccatataaagaacagtctaattataagtttaacttaggtgtagataggagatttgagttaaagaaactaaaagatgctattggcttaattgaattgatgagcagagataaccaagaattcattattgaactaattatagaaaattttgaaactgtagtttcttcatctaaaagtaaatttataaaaagagagttaagtatatttgatgatctattgaataaggcattagaaatatgttttcaaagcaaaatttatgatgaaatatttatttctattcaggagttatataattatagagaagaaattgaacagttccatactatacttactaaaacaaataagtgtgattttagagtcgagtga

SEQ ID NO: 62297 - DNA, 1437 bp, Acinetobacter baumannii
atggaaactttagattcttcaatttttgacctcaccccaattccaatgtggattgaagactttagtgaagttaagcagttatttgacttatggagaaatcaaggggttgaaaacttatatgaatttctaagtcaaaatgaaaatctagtggttgaatgtgctcataaaattaaaattattaaggtcaaccaaaaagtattagacctttttgaagcaaaaaaccaagaagagttatgtgccaacttaaatcttatttttaaaaaagaaatgtttgaagctcatattcatgaactcgaagccttatggaatggcaaaactcatttctcgagtaccactataaattacacgctctctggtaagcgtattgatgtacaactacgtggagcaattttaccgggttctgaaactacgtttgaccgtattttaattaccaccgaagacattactccgtatcaaaatgcacttcgtcaggaagagaaaaatcgacgcctagcagaatcaatgtttatctactccccgacttcgctgtgggttgaagattttagccgtattaaaaatagaattgatcagcttaggctattaggaattgaagactttagaacttttttagatgtacatcctgaatttgttcgccaatgcatagaagacattttaattttagacgtcaatcagtcgactctcgatttatttaaagcaccagataaaaccactctgttaaaaaatacccataaaatttttgccaaagagatggtggaaacttttagagaacagctgattgaactctggcaaggaaatattcaccacaagcgtgaagccgttaactatgcgttagatggccaaattagaaatgtcttattgcaatttaccgtattccccggttatgaagagacttggggattggtacaggttgcacttacagatattactgcacgaaagaaagccgaaaattatctagaatatttaggccagcatgatgtactgaccaaactttataaccgagctttttttacagaagagcttaatcgtttaaatcgcagtattatccgccctgtttcttcaatttttttagacatgaacggcttaaaggaaaccaatgatcaacttggccatgatattggtgatggtttattacgtcgagtaggtaatattttaaatcaggcaattatgaatactgcttatacagcttctcgaatcggtggtgacgaatttgtaattttaatgcctggtgcagatgaagcgaatgttttgatgatgctgcaaaccattcaggagctttttaatatagataatcaatattattcaagtcaccctattagtattgcgattgggcacgccacaacaaaagaaaatgaacaagttgaagatatgctaaaacgcgcagatcatcatatgtatcaaaagaaaaaaagttattatcaagaaattcttctacgataa

SEQ ID NO: 62298 - DNA, 1107 bp, Acinetobacter baumannii
atgaagaaattgcttctcgctgccgcagttgcaactttgagcgtaaacgcggtgcaagcagcgccaactttgtacggcaaactaaacgtttccattaaccaagttgacaacaaaaatttcgatggtaaaagtgacgttaccgaagttaactcaaactcttctcgtattggggtaaaaggcgaagagaagttgactgataagctatctgctgtttatttagctgaatgggcaatttctactgacggttctggttcagatactgaccttagcgcccgtaaccgttttattggtttaaaaactgaaggcgtcggtacgttaaaagtaggtaaatatgactcttacttcaaaacctctgctggtagcaaccaagacatctttaacgatgacacacgtttagatattacaaatattatgtacggtgaaaaccgtttagataacgtagttggttttgaattagaccctaaattattagctggtttaacattcaatatcatggctcaaactggtgaaagcacttctgatagcaaaaaaggcgaaactggtaaagacagcaaaaatgatagcttcgattcagtttcgacttctctaggttatgaaaataaagacttaggtttagcaatcgctgctgctggtgacttcggtattaaaggtaaatatgctgcttacggtttgaaagatgtttatacagacgcttaccgcgtaactggttcttatgacattgctaaatctggttttgtagtaggtgctttatggcaacatgctgaacctactgatgacttgactgcatatggtcaaacatataaatcagatggttcaatcgataaagctggtaaagcttaccgtggtttagaagaagaagcatacgcggtaactgctgcttataaaattcctaacactaaacttaaagtaaaagcagaatatgcttctgctgaaacacaagtaaatggtcaggcagatcgtaaaattgacttgtatggtttaggtcttgattatcaaatcaataaacaagctcgcttctacggtatcgttgctcaacaaaaacgtgactggttgaacgacgacgacaaacaaactgttgtaggtactggtattgaatataacttctaa

SEQ ID NO: 62299 - DNA, 465 bp, Acinetobacter baumannii
  misc_feature (15)..(24): n is a, c, g, or t
gtgaagaaattcttnnnnnnnnnncttttggcaactgatcaggaaacttacgagcagatcaaaaacgcgacttggttcgatcgagagttacgagcatttgaactctacaacgccgagaagaatctttgcgatgaactcatgaattaccactttgcagattggttaatcaacgcatgtggaaaataccaagcacgtgaacaatctaaaaaaccaaattctggaacgcaggtccgagtccctcagggagaatcaaatactcttagttcaaaacagatttactcatttgctcaaaaactttctgtacatcctgagtttgcaagcaaatacgctgaaggtaacgagagctatgaacaacttgctgcacgtgtcgcagtgaaacttgcagatccagagcaacaacaaaaattgatgccatacctcattcaggttggatttcaacaaaaaggtaaaggagaggcggcttga

SEQ ID NO: 62300 - DNA, 252 bp, Acinetobacter baumannii
gtgattgcgaagctaaatttattagatgcaattttagttcggtttcaatttggcataagtatcaatactgaaataaataacttttacacagatggttattgtaaaattcctgattactatagagatgtaaatgatttaaaacattttagtgaaaatcaattaaagatggtttttgataaggcttttgctagggataaagaattatttaaaaaactattagatattattgaaaaagtagagattaaaaattaa

SEQ ID NO: 62301 - DNA, 1149 bp, Acinetobacter baumannii
ttgcaagcctttacagatattgttgagcgccatgcaggcttacgtacaatttttaatagcgccaatggtcaaacctatcaacaggttattcctacatctgaacttaaaaaattcaaatggttttggaacagtgccgaaagtcacgatgcaacgcttaccagtgaagcttcatataaatttgatttaacccgtgaacttcccttaagaattcgtttgattcgaaatgccaaaggtcgccaaactctatcgtttttagttcaccacatggtgattgatgaatggtctttaaataccattatggctgaccttgcgcatgcttatcttgctcgctcaaatgctcaagctccaaactggaaggcaccagcccaatctattctcgatttttctttactccagcaaaagcaagggattaaccaagaccatctaaattattggactaagctgttaagaggagcaaccaaaggtctaagcctccctgtttcggaacatgaattaaatgctgaaaaagaaaaacctccagttcaatggctcgaacttaaatttgcaccagaaatgtatgaaaagctcctcgcattttcaagacaacacagctcttctattttcgcagttctctatactgctatcgccaatgcattacagcaacaaggcgatttaaaagatattgtgattggtacttctgcatctggacgaactgatcctgagttttttgatacggtgggttactttacgaccatggttgcgcatcgcacacagtttagcccttcagattcattccaatcgttgctccacaatatcagcacaatgattaatacctcgatggcctatgcagatattcccatcaatcatatacaaaatgcgttagggatgagcgcagatgaaggactgttatttgatgtgtttattcatatccattcaaataatgctttaaacggcgcgctcaaaacacctcagggacaagaccttccttatcgccagattttgccggaacgtaatgaatcgatgttcggattacattttgaaattatggaaaatgtgattgatggacagcatcagttaagcatgatcattacgtatcaagcccaccgcttcccgactgcaatagtgaaaagtatttgcgaaaaaatgaaggcaaccttagctcaaatctag

SEQ ID NO: 62302 - DNA, 795 bp, Acinetobacter baumannii
  misc_feature (781)..(790): n is a, c, g, or t
atgttggaacaattttccaaatcgccctctctcctttcggttactgattacgaagaacatatctggatgttgcaattacaacagcctgaacaagttaaccgacgttttaatctatggaaacttaatcaaggtttagacattcaactgctcattaaagcaattcaagacattattaaaactacacctgacttaaatgttcgctatacatttagtgacgaaggtgatttatacaagtatccatttgatgatcattcggcttgtctagaagtaaaaaaaagcaatgcagaacaagtatttgagcaggtcgccgccttaaaagcgcaagcatggaatgcagaatttcatccccctttttttacaagtctcgtagaaactgaacaagactattttcttattttagcgctccacccgattcttgatgaaagctatcaaaagtcagattttattcaggctatacaaaatcgatatcaacaaaactcaccaaataatatgccattggtgctgatggaaattgatatctcaaatcatctagatgtaagttctacaaaagcgccagaacaacctaatcaaacttatgtttcagaaattattttagaagagtttcgaaatacgctcgctgaaccagaaatgagtcagcatgatgacttttttgattttggcggccattcactattagcaacgcgaattattggaaacctacttaataaacatggaattgagattcaatttaatgatttctttaaatctccatctgctgccgatttagctcaatacgctttcnnnnnnnnnngttaa

SEQ ID NO: 62303 - DNA, 657 bp, Acinetobacter baumannii; identical to SEQ ID NO: 62277

SEQ ID NO: 62304 - DNA, 1677 bp, Acinetobacter baumannii
atgaagtacaaagctcttttatctagtctttccattgctttatttagcttatctttagctggatgtaacgataatgattcacaagaaactgcggtaagtacaccaaagcagccgaatattttattcattatggccgatgacttaggctattcagatttaggagcttttggtggtgaaattcataccccgaacattgatagtttagcgcaagaaggtcgaattttaactgactatcacactgcacctacatgctcgcctactcgttcacaactcatttctggtactgatcaccacttggcaggcataggtgctatggcagagcttacccctgatcatttaaaaggacagcctggctacgaaggctatttaaatgaacgctcactatcgattgctcaggtgctcaaagataatggttatcgaacttatattagcggtaaatggcatttgggattaacacctgaaaccaatgcacatgctaaaggttttgatcattcatttaccttattacaaggtttagaccaccactttaaacaagctccaagtgcgtttaagcgaaattcaacctataccgaagatgggcaaattattcctgtttcagcattgcctgatgactttttctcgaccaattattttaccgacaaattacttagctatttagagtcaggtaaaaatagtggcaaaccattttttgcctatgcagcctatacagcaccccactggccaatacaggcaccagcagaataccgtgaaaaatatcgtggcgtttatgacgttggttacgatgctatccgtaatgcccgtattgcacgccaaaagcaacttggaattattccagtaaattttgaggctgctgaaccaattgcaactcaaaatgcaccacaaaaatatggcaagtggaatgagttaacagctgaacaaaaagcgcttgaagcacgcaaaatggaaatctacgcaggcatggtagaaaatcttgatgccaatgtaggcagaattattcaatatctcaaacaaaataatctttatgacaacactttaattttctttgtttctgacaatggcgcagaaggttttgttcgcggaagctatggcagtgaatcaggctttgataattctgtagcaaatgtaggtacccctacttcttaccattatattggaccacgttgggccgaggtcagtgcagcacctttccacttatggaaagacacagctggtgaaggtgcaactaccgctcctgctattgtgaaattaccaaatcaaaagaaagctgaagaaaccaatcatagctttgcatcggtactcgacgttttcccaacgttattagattatgctcatattccagtacctcaagggcaatataaaggccgaaccattaatacgccaagcggttattcttggaagtctgtacttgaaaataaatcacaaacgatacgccctgccaatttcagttttgccgatgaattgcatggtagtaaatatgcaaaacagggtgaatggaaaatcgcacttcaaggtcgccctgaattaggaacaggttcttgggagctctataacattgccactgatcgtggagaaaatcacaatgtcgcgcagctttaccctgcaaaagttcaagagctattagcagtttatcaaaaatacactgaacaaaatggcgtacaggaatataacgccaaatga

SEQ ID NO: 62305 - DNA, 195 bp, Acinetobacter baumannii; identical to SEQ ID NO: 62205

SEQ ID NO: 62306 - DNA, 588 bp, Acinetobacter baumannii
gtgaaaaaaataataggaatatttttattttccttgatattagttggttgtggtaaatcggcagaagatattgcaaaagaaaagcaggctcaagaacaggcacttaaaattaaacaagaacaagagagaaaattaaaagaacaagctgaacttaaaaaagttgaggatgctgttcgttattatcttaaagatggtgattctgcgaaatttagaaatgttattaaaaattgtggtgaggtaaatgccaaaaactcatggggtgcttatgcaggtttttccagatttatagttaaatcagataaacaagtaatctttgatgaacctgataattactattttgatagtttggtaaagttatattgccataaagattatttagcaaagtttccagtggaaacaagtgaagagatagcaattgatgcatctccaacagaacaaatatccggtgtggctgctgaggcggcagcgggagaaactttagaaaatgaaacaagatcagttagtaaacctaagaaagaggaggtagctgttgaggaattaactactgaagatacaacatcagataatggtagttctgaaaattattaa

SEQ ID NO: 62307 - DNA, 408 bp, Acinetobacter baumannii
ttgactcctgaaacattagataattatattgatcttccacctattgttgctgatgttgagccagcaaatattgctgatttaatcagattaatgttgttggaaaaatatggaggcatctggatggatgctagtatatttctgactgaaagtctgaattggattttagataaaatggatacgcaagatgcttttcttttttattcagatgagtgtacaacaaataatcaaaatcctatttctgaaaactggctgatagttgctccagaaaagagtgcttttattcaggcttggctggaagaatataaaaaatgtattctgagtaaagagcctaaacggtattatgacgcgataaaaaatgacaaagcattaatgctttgtcattttttatcgcgtcataataccgtttag

SEQ ID NO: 62308 - DNA, 468 bp, Acinetobacter baumannii
atgttggttgcaggcgcattactatggcaaaaaaagcgcatcaaagaacaaaagaaatttggatatagattagtacagcatttgaatttttttactttcttagggctgccttttgcctcagccttttatttaatggttggtcggattatacctgcttcatttgagccgagggaactatacgaggtttcagcattttatatagcatggctattaagcttattgattagctttagctgctcaataaggaagggaataatcatcatgctatatattacggctgctgttttattgcttattccagttattagtgtcgttctggtgccagaagcctctttattaaatagtttaaagtctgtgcattggtctctcactggtatcgatctggcgctcatactgctcgggctattctatttagtagtactacgcttctaccaaaccaaatttattacgttaggagaggccaaatga

SEQ ID NO: 62309 - DNA, 303 bp, Acinetobacter baumannii; identical to SEQ ID NO: 50594

SEQ ID NO: 62310 - DNA, 411 bp, Acinetobacter baumannii
atgaacgacttgataacgagatatttaaataatctggggcagtggcatgaagttgcgctgacaatgactaaagcgattattgcaataggggtgttgtgtttagttgcttatcttttaacaattagctatatcccttcagaaattagctttggcgatacacttatttttttactgatttttgcagcattttctattgtttatactgcgttctgcatgatgctatttttctttggtacctctttaatgccagtaacttggttcatcttaagtttggttgataagtatttgccatctcacgtaagaattggacaaaaacttccttttccaaagattagtattatcacattgggagtatctatttaccctgtctcttatacacatctgacgctgccgacgatctactctgtgtag

SEQ ID NO: 62311 - DNA, 444 bp, Acinetobacter baumannii; identical to SEQ ID NO: 62289

SEQ ID NO: 62312 - DNA, 219 bp, Acinetobacter baumannii; identical to SEQ ID NO: 56532

SEQ ID NO: 62313 - DNA, 261 bp, Acinetobacter baumannii
atgtattttaaaggacaatgtgttaaacaagattttatcgaagctagaaaatggtttgaaagagcatataaaacaggtggaaatattaatgcagcttatacccttgctggaatgtattatgaagggagaggagggagtaaagatattgaaaaagcactaaatttatatcagtttgcagctgatcatggagaccaagaagctgctaaaaatatagaaattataaaaaagaatatgggtgttgataaaaatttattaaattga

SEQ ID NO: 62314 - DNA, 264 bp, Acinetobacter baumannii; identical to SEQ ID NO: 62261

SEQ ID NO: 62315 - DNA, 264 bp, Acinetobacter baumannii
atgtattgggataattatagtgatgttaacttcttagtcggagttaatggaagtgggaaaagtcgcttattaaatactataggtcaaaatcacttaaagcgaaatgatcatgttatagcgatttcaaatactgtttttgataagtttagtactagaggatatgaaaaattaagtgcaagagatgggaaggtttttttaaaaaatataattattgattcatttttgaatgaaaatgatagtatttataatattctggaatactga

SEQ ID NO: 62316 - DNA, 399 bp, Acinetobacter baumannii; identical to SEQ ID NO: 58646

SEQ ID NO: 62317 - DNA, 438 bp, Acinetobacter baumannii
atgcaaataactctagcaatcaaatgtccaacctgcctcagtgatagtataaagaaaaatggtatcaaagtagatgggaaacaaaactatcagtgcaaagactgtaaacgtcagtttattggtgatcatgcactgagctatctaggatgtaagtcaggtattactcgtaaaatattacagttgatggtcagaggcagcggtatacgagatattgctgaagttgagcgcatcagtatcggtaaagttttacgtactttaactgaatcaacctatgaaattcagcctcagcaaagtcattatgaatctctcgaagtagatgagttctggaattttgttggaaataaaaagaataaacaatggcttatttacgcctatcatcgagaaacaggtgaaattgttgcttatgtttggggtaaacgagatttagctacagtctaa

SEQ ID NO: 62318 - DNA, 447 bp, Acinetobacter baumannii
atgcaaataactctagcaatcaaatgtccaacctgcctcagtgatagtataaagaaaaatggtatcaaagtagatgggaaacaaaactatcagtgcaaagactgtaaacgtcagtttattggtgatcatgcactgagctatctaggatgtaagtcaggtattactcgtaaaatattacagttgatggtcagaggcagcggtatacgagatattgctgaagttgagcgcatcagtatcggtaaagttttacgtactttaactgaatcaacctatgaaattcagcctcagcaaagtcattatgaatctctcgaagtagatgagttctggaattttgttggaaataaaaagaataaacaatggcttatttttgttcaaaagtcatattttacctcggagaaaccggacatttttattggtgagaatatagacactttaaatgggttctaa

SEQ ID NO: 62319 - DNA, 1233 bp, Acinetobacter baumannii; identical to SEQ ID NO: 53395

SEQ ID NO: 62320 - DNA, 2880 bp, Acinetobacter baumannii; identical to SEQ ID NO: 62017

SEQ ID NO: 62321 - DNA, 135 bp, Acinetobacter baumannii; identical to SEQ ID NO: 53397

SEQ ID NO: 62322 - DNA, 294 bp, Acinetobacter baumannii; identical to SEQ ID NO: 53398

SEQ ID NO: 62323 - DNA, 864 bp, Acinetobacter baumannii; identical to SEQ ID NO: 62020

SEQ ID NO: 62324 - DNA, 132 bp, Acinetobacter baumannii; identical to SEQ ID NO: 62021

SEQ ID NO: 62325 - DNA, 315 bp, Acinetobacter baumannii; identical to SEQ ID NO: 62136

SEQ ID NO: 62326 - DNA, 777 bp, Acinetobacter baumannii; identical to SEQ ID NO: 62023

SEQ ID NO: 62327 - DNA, 777 bp, Acinetobacter baumannii; identical to SEQ ID NO: 52165

SEQ ID NO: 62328 - DNA, 447 bp, Acinetobacter baumannii
gtgtataagagacagaatttaggacgcatcagcctagctgacaatgtagtattaaaaacaacaaaagatgtctgtaattgctttggttataactataaaaattatcagagaggaggggctattcatccgtatgaagaagataccttaatttggtttcctagactttatgaaaataaggattggataaatactatatcgcctgatggcttaacaattactgaaaagtcgacagatgaaactattacacttaaaaaattagaagagtggaaaaatggcccacagaaaagaattgtctttgcaagagttaaggataatttgaatagtcgagctatgtatcgttttatgggtttgtataagtttcaaaaagcggatttaaaggatggagcggtatggaaacgggtggaatgtgaagtccaaacgtattctcccaaggaaaccaaatgctaa

SEQ ID NO: 62329 - DNA, 252 bp, Acinetobacter baumannii; identical to SEQ ID NO: 53391

SEQ ID NO: 62330 - DNA, 171 bp, Acinetobacter baumannii; identical to SEQ ID NO: 53392

SEQ ID NO: 62331 - DNA, 3183 bp, Acinetobacter baumannii
atgttgaacagtattcatcaagttttagatagtttgggtattagcccgcagaaacgtgctattcatgttcaatttacgtctccgatattgaatgaccaagtatttctgcaaagaattgatggtgtacatgcactcaatgatggtttaaaagcagaacttttatgcctatcgacaaatgcaacgattcaacttaaatcttttattggcgttcaggccgctgtagatattgtgacggagcgaggtgaattaactcgcattacaggcattattactcatgctcagcagggccaatcagatggaagtctaactttatataagctgaccttagaagatccaaccgcattatggaaatatcgccgtaattcacgtgtatttatgaataaaagcgtggttgagatatgggaaatattatttaaagaatggcaaactaaaaatccgctatttgctgcaagtttaagtttagatttaagcggtctaacacaaacttatgatgtgcgtccttttgtgatgcaacataacgaaagtgactggaatttccttacacgcttacttcgtagtgaaaatatcagttggctcattgatgaagctcagcatattgttccaagtaccgatacacctattcaagctcagaaactcaggttaattgatgccaatagtcaatatcagcctttagaccgtaaaacgattcgttaccaccgtagtagtgcggtcgaacaatatgacagtatgactcgcttaactgctgagcgttcccttcaacccaatgttatgcatatacaacgttggcaagcagaaatattagatcaagaagaaggggttggaagtgttcaaagtaagcatcagcatagtgaacattatgacaatgctacacttggcttggagcaagcttggaactattcgcctgcatggattggtgacttaaagggtgaggatggggttactaaatctggaaatcaacaagttgaacgattaaaccagaacctcaacaattattatgaagcacaggctaagcggtttattgcacaaacaacagttcgtgatgcctatgtgggctactatttcgaattaaatgaacatccagaaatagatcagcatgaaagcacagatagaagctttttgattatctctaaaagttttttcaatcagaacaacttacctaaagacctgaatgatcaaatcaatggtttattggcgcaaagtaactgggcaatacaaaaccccgagaacagtgatgaacgccaagcgaatcaactgattttacaacgtcgtcatattccaacaacaccagcttataacccacaaattcatagtccagtcactcatccacaacgcgcaaaagtggtgggtcctgaaggtgaagaaatctatgtagatgagtgggggcgtattaaagtccgcttcctatttacgcgtagtgatgaccatagccatgatggtggagcaggaaccaacaacaatgacaccgattcagcttggattgacgttctaacgccgtgggctggagaaggttatggtgcgcggtttttaccgcgtatcggtgagatcgtcgttattgacttctttaatggcgatatcgaccgaccatttgtaatgggccgaattcatgaggcccagcgccatccaaccaaatttgataacaaaggtaagcttcctgacactaaaaagctgagcggcattcgttctaaagaagtgtcaggtggtgggtttgggcaactcagatttgatgatacaccgggacaaattagtacccagctacaaagcagtcatggtgcaagtcagttaaacctcgggaaattgagccatcctaaagataaagcggaaagtgaagaccgtggagaaggatttgaactgcgtacggatcaatggggagctttgcgcgctgggcaaggtttattggtatccacccataaacaggataatgccaaaggagaccaccttgacgccgaagttgcgaaaaagcaacttgaaggtagtcaaactaacagtaaagcactgagtgacattgctaaaaaccagaaaaccgatgaaatcgaatcgattgaacagctaaaagattttgcctcacaaattcagcagcaaatcgctaaatttgaaaaagctttacttcttttgagttcaccggatggtatagctctaagtagttcagaagatattcacatctcggctgatgcacaaattaatcagattgctggagacagcattaatataagtactcaaaagaatgtgattgcccatgcccaaaataggctcagcctttttgctgctcagagtggactaaaagctgttgctgcacaaggcaaggtagaaatacaagcccagtcagatgctttagatgtgcttgctaataaaggtattacgatttcttcgacagaagactgcattgaaattagtagtcctaaagaaattgtaattactggtgcaagttcacaaattaccttaaatggttcaggaatctttccgaaaactggcgggaaatttcaggtcaatgctggacagcatgtgttccaaggcggcgcatcggcaagtgttcaatctagtttgccaccaccaccaaaacgtgggcagggtgtacttgagttgttccatgaatatgcacatggtgagtttgttaaacaaggcggttatacagtgactgattcgttagggaaacagttcaaaggacaactggatgataaaggttttgttcgtgtttcgggtttagccacaggctcagccaaaattgtatttgaagaggataagcgtaatccttgggatgaagcgagtgattttaaacgccctcctatgtggccaagtgataatgatacaagtgctcaaactttaatgggtaaagcagagagtgttttgaaaggtgcagtgacagaagctaaaaaagctttaggtcaaaatttcacaaatccaagttcgattatgagaacaatcgatactgcaaagcaattaaaagaaaatggtgcaagtgcattgttgccgatggtgcaacaagatgttgaatcacatttaacgagtcaattgaccaattttacctctaaggttttaagccaaagttcgacagggcaaggatggatgcatgggaaaactaaccccgttgctccagttaccagtggactaaatgtaaatccattaagggctcaagactcgaaaaatacagagagtgctcttaatcctatgaattttaagtttaaataa

SEQ ID NO: 62332 - DNA, 447 bp, Acinetobacter baumannii; identical to SEQ ID NO: 60969

SEQ ID NO: 62333 - DNA, 765 bp, Acinetobacter baumannii
atgtcatattttaaatttaaaaaccccgatcaagctctatatttttataaacttgctgaacgctataaaggcatgtctgatcatattctttttcctagcgatgagggcttaccaataaggtatatggacacaggtcaagaaccaactgaaattacacttaataaaatgcctatatgggcagttagagaagtatttaataattatgtgaaattacgatttcagtatgtccacactaagcaggactggtttagaaaatcgtttaattttttttataattctatttactattttataagttttattgagttaatcccaaattcaactcaattaattctattcccgaaaaacttagaaaaaagtattatctgtgcaagagtcaattttgataattcaacttacgagataaatagatctgaaatctatttccaacctaatgaacagaaaaaatttgagttttggctcaatgatcattggtcaaaagaagttaacaacttggatgaatacaaaactgattattttaaccctatcccagcacgtcaactcttagctgcagcattattctaccttccaaaatggtcctttttaccccttcatcaacttaaatctgttgttgctttaatatcgactaagcttttagtattaaataaattcgaaggacgttattgcgaccataatgttttttcagatccctttctagatatatttgcggaaaaaaatataatgattagcattaaatatctgccatataaaaacccgctaacatga

SEQ ID NO: 62334 - DNA, 1455 bp, Acinetobacter baumannii
atgactaaaagaacaataaatatttatggtgccagacaaaataaccttaaaaatatttcattgaagattcctaaacataaaatcgttgtctttactggagtctctggttcaggtaaatcttctttagttttcgagactattggcgcagaagctcaaagacaaattaatgaaactcaagatagttttgtacgtaatcgcttgcaacattttggtgttactgacgttgataaaattgaaaatttaaatgtacctgtgattattaatcaaaaacctttaacgggcaatattcgctcaactgttgcaacaattacagatatttatgccaatcttcgcttgttattttcacgtatgggtgagccgtttgttggatactccaatgtcttttcttttaatcacccaaatggcatgtgtccacaatgcgaaggtattggaatcgagcaaacaattgatatttacaaaatattagatttagataaatccttaaatgaagaaggtgctatagacttccctacttatcaacctacagcatggcgttggacgcgatatgcagattcaggttactttgatttagataaaaaattaaaagattatagtgaaaaagaatgggacttatttttgtatgctcctcagcacaaacctttaaacccgacaagtaaatggagaaaaaccgcactttatgaaggactaattcccagatttgagcgtaactttttaaaaggtgaagcacaggaaagaaatcgttatagaaataaacttgagcgaattattacaatcaaagaatgctccttatgtaagggacaacggctaaatcaaaaatccttatcttgtaagattaacggtaaaaatattgcggaatgtacggccctatccgtatcaaggcttttagagtttctcgaatcgataaaaagtgaaaaatttgaaaccgttttgcacgaaataaaaaataaactcaataacttaaatctcgttggactcagctatttaaaccttaaccgtgtcagcaatacattgtcgggaggagaatcacaacgaattaaaatggttaaacatttgggtaatagtctggttgacctactctatatttttgatgaaccaagtattggcctgcaccccaaagatttagataatattattaaaattattcaaaaaattagagataagggaaatagtgttttattggttgaacatgatcctgatcttattagaacagctgatcatgtcattgatatggggcctctttctggtatcaacggcggcgaaattatttaccaaggaacttttgaagaattaaaaaattcatcaggtttaacaggtgcgttttttagaaggcccaatacctataagaaagaaccacgtatgggcaatgaatggatttcaattaaaaatgctcatttattcaatttaaaaaatattgatgtcgacattcctaagaacctgtctcttatacacatctga

SEQ ID NO: 62335 - DNA, 666 bp, Acinetobacter baumannii
atgaagctaatttatacacgtattgctgctgcagctgcgttagaggttggaactattgccaatcctgattattacgaacatccgaatcgaagtgctgaagaagtaattatttacggtgattacccgaaaatccaaaatgattaccaagctctggatattcctgttgaagttcgcaaattggaagagcctgcaaaaacgactttggccactgtaaatgtagcggttggaattactccagagctgcaagaagttattgataaaactaaagctgagtgtgaaaaggttgttgaggaaaacggacaacttaaacagaaaatcgaaatcttggaacaagctagtggtgatagttcggagttaatttctgaaaactcacgtttaaaagatgctgtactccaagctgacaatgctactaaagcggctgaagaaaaggtagtaagcattcaagcagagtttgatgcttttaaaaacgatattcccgcaatgcaagcacgtattgttgaattggaagctggaaaatcggcagaaaacccagctacagaaacggcagctaatgattttgaaaactggtcaaatgatcaattaaaagagtatttggctagtaaaaatattggttacaagccgtcagcaacaaaagcagaacttcttaaattaatccctaaggaataa

SEQ ID NO: 62336 - DNA, 993 bp, Acinetobacter baumannii
atgattatccgaggtattttagaatattcattgggtggtcaactatgtattcgtggttttgcacctttaggtgaacttgctcgtttatctcagccagatgaaagctatcaacgtgcatatattcaagatcgtgaacaagacctacagaattatcttaaaaatgaagaatatttgtttttttcagaaattattttgagcttggaggttaagcatactataaaaaatgaaggagatgttccgcctttccatcaattgtttagtggtacgaaaaaggcatttatatcaaatgtcgatggtacgcagttaaaacttaagcctgttccttttaaaagcacaacagatataagaaataagacagaagtacaacttgttgaactatcaataaatgacactttaatctctcaaggaataaggccttttaatcgtattgatggaaatcatagattatctgctgttgagcatcttaatagttcatctgtttcagatagaaatgcgccattttgtattgtattgagtccagtcatacaggcagaagatgggagtgttatccaacaggaaaacaaaaaagctgagcgtgttatatttaataatatcaatgctaaagctgttcctttgactatggaacaaaatctcaaagctattgtttctcaagatagttgcgatagttttaataatgaggaattaaaggataaatttgattgggcgacttttgcagttcgagaattaggtattgcttctatcaataatctagccgatgtatatccaaatttaggtcaagactttcttaattgtccattaacattctccaaaaaaattatagatatagcactcacagaaaatgtgattgttgagttagatgaagaaataaataaaattaagcaagctctgagagaagtaaaccaaattttgggaaatgaaaatctgacagaaatatcagtagatattgtagtagcttgtgtctttattcaactcctgtctcttatactcatctga

SEQ ID NO: 62337 - DNA, 900 bp, Acinetobacter baumannii; identical to SEQ ID NO: 53648

SEQ ID NO: 62338 - DNA, 285 bp, Acinetobacter baumannii
atgagcaaagttattggtgaagttaatttgagccctagccgtattgaaggtactccggatcaggtagctgttcatatttttgaaaaaatcatttgtccaagtactgaggagcttctcaaaaataatcctgaggctgcaaaggtttttgcataccacatttttggtttagcactttctcagcttgccgaattccattcaactaaaagtttagataaagctgtaaccgttactcttcacaaccttttgcgtcaattgaagaaagaacgtaatgagttgaagcattaa

SEQ ID NO: 62339 - DNA, 921 bp, Acinetobacter baumannii
atggctctaagacatttcctgactttacgtgatctatccactctagaacttaatcgcattttggaacgcgcaagcgaacttaagaaaatgcagcaaagcaataaggtatatcaaccttttgttggtaaagtattgggaatgatttttgaaaaatcgagcacacgcactcgtatttcttttgaagctggtattaatcaatttggtggtagtgccattttcttatcaccacgtgatacgcaattaggccgtggcgaaccgattgaagattcagcacgtgttatttcaagcatgcttgatatcgtaatgattcgtacttttggtcacgatatcgttgaacgttttgcatcttattcaaaagttcccgttattaacggcttaactgatgatcaccatccttgtcagttacttgcagacttacaaacttatattgaacatcgcggtagcattgaaggcaaaaccgtagcttggattggtgatggcaataatatgtgtaattcatacattgaagctgcacacatgatgggtttcaaactcaagattgcatcaccaaaaggttatgaacctaaacctgagtttttagcagagtttgggcattgtgttgaactttttgataatgcggaagatgcggctgtaaatgctgatcttatcgttacagatgtatgggcaagcatgggacaagaagaagaacaaaaacttcgtgaaaaagcctttgctgattttcaggttaacgagaaattaatgggacttgcacacccggactgtttattcatgcactgcttacctgctcatcgtggtgaagaaatttctgaaaccatgctcgaccataaaaatgccgtagtatgggacgaagcagaaaaccgtctgcatgcacaaaaagctttaatggaatttttactcaacgaaaatttgaaaaaagcttaa

SEQ ID NO: 62340 - DNA, 588 bp, Acinetobacter baumannii
ttgatctgtcaaattaaggcaaaaagttataaaccatatttatattggtttaccattattgcgagtacaactgttggtacaacattagcagactttgtcactcgatctttaggtattggttatagtggaggaagtagcttactcctcggcttagtcatcttctcattattgggttggtataaagttgaaggcagcgtctcccctcataccgttaataaacctaaatcagaagtcttttattggttaacaattacctttagccaaactttgggtacagctcttggtgactggtcagcagatacgattggattaggctatagtggcgggattgctcttttctcagcactcattttattgatggtgtttttgtataaattcacttctgtttcacgaacatttttattctggagcacttttattttaactcgtcctttgggtgctttagttggagactttctagataagcccctttccgctggaggtttagacttaagccgttttgcagcatcaggagtaatattagttgctattttaatatgtatttattttagtaaaaataatcagttaggtaatgtaaaaaatgcataa

SEQ ID NO: 62341 - DNA, 255 bp, Acinetobacter baumannii
atggatttggcggttggtgccaagaaagtatttatcactacagaccatgtgaccaagcaaggtgagccgaagattgtgtctgagctgacttatccggtgacgggtaagcactgtgttgaccgtatttacaccgatctttgtgtgattgacgtgaccaaagatggtttaaaggtgattgagaaagttgaagggcttagttttgatgagttacaggctttaacgggtgcaactttgattgatgcgactcaagggtaa

SEQ ID NO: 62342 - DNA, 780 bp, Acinetobacter baumannii
atggaaaataaaaaacgaatgatttctgaatcgaaagggtggaaaagttcttttaaagctttcttggatcgccgtgcaatcattatgttgtttttgggtttttcatcgggaattccaatttttctaattttttcaactctatcattttggttgactgaggctggaattaaccgaagtactattacaatgttctcttgggcagctttggcttattcatttaagtttatttgggcgccgctaatagacaagttacccttgccatatctaaccagaagaatgggcctaagacgtagttggttgttggtatcacaacttttggtaatttgtgcaatttgtatgatggcatttacaaatccattacccaacacatctgatttcggttcattgtcaaatttaacgattatggcaggggctgctatttttcttgggttctcatcagcaacacaagatattattgtcgatgcttaccgtatcgaattaactgaagacccaaatatacaaactgttttagcttcaacttataatgcagggtatcgcactgctacaattattactcaattaggtgcactattatttgctgcatctttgggaacagcagttggtaattatatttatgaagcatggcgaaccacctatttattaatggctggtttgatgattgtaggaattattacaactttactcatccatgaacctgtagttaagcgcctacaacatcattatcatgcaaaagattatgtccagttatttgcagtttttgttatttcaaccatagtataa

SEQ ID NO: 62343 - DNA, 405 bp, Acinetobacter baumannii
  misc_feature (388)..(397): n is a, c, g, or t
atggacaagttaaaaatgcactcacctaatcttgtggatgcaaacatcgaaaagatttcagcactattcccaaactgcattaccgaaaccaaagatgaaaatggcgaactgaaaaaagccattgattttgatttgcttaaacaagagctttctcaagttttggttgagggtgagcaagaacgttaccgtttagattgggtgggtaaaaaagaagccattttaacggctaatgctcctattgcgaaaactttgcgtccatgtcgtgaagaaagcgttaattttgataagacagaaaacttgtttattgaaggtgataatctcgaagccctgaaacttctgcaagaaaattatttgggtaaagtcaaaatgatttacattgacccacccnnnnnnnnnnccctataa

SEQ ID NO: 62344 - DNA, 513 bp, Acinetobacter baumannii
  misc_feature (493)..(502): n is a, c, g, or t
ttgcattgtgaattttgccatgcgccaaaaataaaggcttcactccaattagatcaattaaagaggtgggtcaaagagctagatcaactgggtactcttggtattggatttggaggaggtgagccaactttatatccccatttttcagaaatttgtgaatatacggcaaatgaaacagatttggcggtgacctttacaacacatgggcatcgtttaacagacacattactatctaatttgaaggggaatgtacattttataaggatcagtattgacggagtggggcagacctatgaaggctttcgaggtcgtaaatttgataaattaatagagcgtattgaaagagcaagggaaatcagttcattaggttttaatattgtaattaatgattcaacaatacaggatctagatcaagtcacggaaattgcaaggaagtttgatatatccgaagtactactcttaccccagcaagccactcaaaatgttaaaggannnnnnnnnncatctatatga

SEQ ID NO: 62345 - DNA, 138 bp, Acinetobacter baumannii
atgacattagatttttcacaattggcgttgagtgttgcggattttccgcctactacatggacggatgttttatttactgttcttttttgtattgctgccttctgttttgctgtatggcttcttttttatgctaaataa

SEQ ID NO: 62346 - DNA, 1164 bp, Acinetobacter baumannii
atggctagaattagattaacgactgggggtattggagcaggtaaaacttacctgaatgttaaacttgcggatgaggctcataaaaagggtcagtatacaaagatttattctaatatccgcgctcattctgaattgactgattatgtttatgatctgcctgacgattggcgtgagtgtgagaatggaagtctcgttattattgacgagcttcaattcaatgagaaattttcaaaacatttttcacaacgtcgtgataaggaagttgtagatatcacgatgattcgacatgacggtatagacatgtggttaattacccagtctacaaagttcatgaactcggatattagagagcttgtaaacgagcatttttatattgaagttactggcaagaaaacgtctaaatgttattgttttcctcaggcacaaacgtctatttctaaagctgttaagaaacaggctcatgatgagttttcatatactttagaacagaaatattttgatatgtacaagagtacgaaagatggtgtaaaacccactcgtacacatcatatcaatatgaaattaataggttttgttgttggtgcactttttaccttagctttaatatttggtttattaacttacttgggaaaaagtaataaaaagaacattgatgagatgactaaagctaacgatgttacgcaaccaacaaatgcaactaaatcggtagcagatcaacttaaggagcaagcagcccttgcaaatctaacccctgaacagtatgccgatttaatgaatcctgaaaaacgtaatgctgaattgcaggctaaaaatgatgttcgtttagaaactattgctattaaatacaatcctaatcggccatatgatgttgatacatcaaatattcagtatcaagctacgtctaaaccagtgttttctggatgtattaagaaaggtaaaaagtacgttgcgtatacacaacaaggcacaatacttcgcgatgtagatccatctgactgtaagaggttgattgaggatggtgataggccctttaattattttcagcaaccagttatacagcaacaagttgtgcaacaagctccccagacagtgccagcaactcagcaaattgatgccgaatttattgcaaagtaccagttagctaaggctcaaggcttaatttaa

SEQ ID NO: 62347 - DNA, 282 bp, Acinetobacter baumannii
atgcctatgtttttagccattcttgcggaatggttacttaaaaatgcagttcaaaaaatattaataggtgcaggtctaagtgttgttagttatctcggcactatgactgcaattagagcagctttttctgctcaacttaactctgtaaatacattagcgcctgatcttttagcacttatgggtatttatggaattgatcatgtattaagcagttttattagtgcaggtctttttgttcttacgcttaattcaggaaaattattcttaaggaaggcaacctaa

SEQ ID NO: 62348 - DNA, 1581 bp, Acinetobacter baumannii
atgagaaatctaaaatatttgatttttataattataagtctattttctgttcaggcttttgctgttacatggcaagctaatgtaaatgggcttttaaaaactggtgcttctcctgacgctgtttgtttacaagctcaatctgctgtttcttcttcttatcctaatcaaaatactacttattcgtatacattgactaaaagaaatgatcagctttatttatgtctagtctatgcagcaaataaatttgctggaccgtgggattttaatgtttatacaaatgacacagttccccctgtaacttgtcctaaatcgggttatccaattcctatttattttgatcttaacacaccaattccgttaagaacttgtaggaagaattctgacggtacttactgtattactgaatggactggcgataaaaatagaccgattgttatttctggtaatcagtatcagagtattacgcatgcatctgtgagtgaaatacctagtccttcttgtactccattattttcacaagatacatgtgatccaaaggatccttacggtggctgttataaaccgcccaacgataactgtaaccgtatgtcagatgggtctatttactgcccaccagatgagccaccaccacccataaaatcgggctgtcaaaatggtgctacatactgcgatatgcctccaactggttgtggtacaggctatgttccgggtacgtttaatggtaagcagatttgtgtaaaaaatagcaatccacctccaactgatccacctgatcaaccaccaccagcatcggacccacctccagttgatccgcctgatcctactgatcccccagacggtgatccaccaccaccaccaccgccaccaccacctagtggcaataatgatgcacttttacgggcaattcttgatgctattaatgcagtgaataacaagttgacgtggcttaaaaatgagcttgttaatgcgattagtacggttgctaaaaagatagatgtaactaattcaaagcttgatacggttaattcatcaatcaaagagacaactgctgctgtaaatgcaagtggtgacaaaataaaggctgctgtagatgctaatgcaacaacggtaaaaacggctgtagaagcaaatacggctgctacaaatggcgttaaaacagcggttgaggctaataccaattcgactgcaaataaactaaatgaagttgtaaatgcgattaacaataagcctgttggtgggggcggttcggctcctgatatgaaacctacaaatgatctgttaaccgaaattaaaaacttcctgaaagaaggtcctgacaagttagaaaatgagaagcctttagaagttaaaaatgaaaacgttacggattatgacaggcagaatcatgttgtctttggtcaatattgtccgttctctccagaacaaactgctttgcctgttgctccaggctatgaaatgactgtttcaagtgatttaacaccaatctgtacatttggggaaaaagctcgtcctatcattcagttaataggtcatttgggggctttattatttgttttagctgcactaaggagtaaggactaa

SEQ ID NO: 62349 - DNA, 234 bp, Acinetobacter baumannii
atggctaaacaactagcaaacaaagctaaaaaactttatcgcaatgcaactgtagcaactggggttttaattgctacaacaccaatggcatttgctgctgacggggatttcgacttaacaactggacttgtcgcaacgtctgttattgcaggtattgttggtgctgcaacgcttaaagcattaccaacattcacagcttggggagtgcgtaaagcattgtctatgcttcgataa

SEQ ID NO: 62350 - DNA, 213 bp, Acinetobacter baumannii
atgcaagtagctgattgctctgttgtaactcaaatcgaaggcgttaattactgcattgtcgtactgcatcaaacgtcgtggatggatgaactaaacaatttaccacctgaacaggtgatcgctttgttatctgccacgattttgatttggtacttagcatcagggctacgtaccacactttatgtacttggttcatctacaaaagaggaataa

SEQ ID NO: 62351 - DNA, 336 bp, Acinetobacter baumannii
atgaataattcacaacatccaattatgacagttacaggcatccgtaaggctgctggagactttacagacgataaaggcaaaacaatcgagttctcaaacacggttgtaactgtattacagaattactctgagcgtgaacttgaacaaggtgcaatcggattcaaatctaccgattataaaatcaaaggcgctcagttctttaatgattacatgcaccagaagctaccagccgaggctgcaatgatctttgattgggatttcacaggtaaacagccaaaggctgtattagtggcgttagatttcaatgcgaagaaacaggaagttaaatcgctatga

SEQ ID NO: 62352 - DNA, 138 bp, Acinetobacter baumannii; identical to SEQ ID NO: 62345

SEQ ID NO: 62353 - DNA, 1164 bp, Acinetobacter baumannii; identical to SEQ ID NO: 62346

SEQ ID NO: 62354 - DNA, 282 bp, Acinetobacter baumannii; identical to SEQ ID NO: 62347

SEQ ID NO: 62355 - DNA, 1581 bp, Acinetobacter baumannii; identical to SEQ ID NO: 62348

SEQ ID NO: 62356 - DNA, 234 bp, Acinetobacter baumannii; identical to SEQ ID NO: 62349

SEQ ID NO: 62357 - DNA, 213 bp, Acinetobacter baumannii; identical to SEQ ID NO: 62350

SEQ ID NO: 62358 - DNA, 642 bp, Acinetobacter baumannii
atgaaaaaagatataaaaattgtattaatagatacatgtggatggataggaagtttaagtgtaattgtatttttttttacgctattgctatattcccataacaacattcaagatcccttaaaagaggcttggtcgataacttttagctctttgtcggcattagccacaattggagcagcaataattgcagctaatttatttaatgattggaaagagcagcataataaaactgtattagccccggaagccttaaaaatatttaaggctttagaaaccgatataatgacattagctaaagttacatcaacaattaaacactcactaaatgaatcagctctaagcgaaaatggagagaaggtcttaggatcatttggtgaagttattgagatgagagaacaaagagttattgaactaaaattcttttcaaccttgtctaaaaattatgaattagatcagctcacaactactttttccaaggaaattgataactatcagaaatatatgtttaaaatatttgatgatcctaaaaaccatgtttttactaaagagatattagatgatgctaaacaaaacacccgaattattgttcaaataatttatgccttaaaagaatctataagcaactatatacttttaaaataa

SEQ ID NO: 62359 - DNA, 951 bp, Acinetobacter baumannii
atgaatattaataatgctctcgcatggggtctattatttattgctcaaacaggttttgctaccgactgtaaaaatattgagcaagaaataaaagatattcaaactaactatgaaagtaagtttcaaactctaaaagaagattcggaaaacttggaaaaaccagatttttctactcctgatttaattcttaagtttcaaatggacacgaagtggactgacaaaaggatggtttttcatacaccaagtttcagaaataaaacccaaagaatggtttttggtacacctcaaacaaccatgaaagataaaaaaatgtctatggatttacctacaattagaatggtgctcaagaaaactggagaatatccagagtttacgtgtagtgggtttagctgtactgttaagtggtctccgatttacaccaaagttcctgaattagttatggagagaaaagagtgggtaatgggtatacctgaaaccacatggaaagatactgaaatcattatggatatccctgaatttttcatgcaagaacaagaatggatattaaaaatacccgagttcacagttaaaaatgttgaaggtgaattaaaacaagttgaggacaaggcgcaacagataaaaggaacatctgatatgctcgcaagtaatctgaaggaggaattgggaaataaaactggagaattacttagttgtaatatcaaagccgttgaagaacaaaggacttctgcattaaaaatgtatgacttgtcacttcagcagatagaccttgcaattaattcggcaacatcaagaggacttgatccaaccaagataccgagtgatagtggagaaataaacttaattgcacaaaaaaataaaatcttaaatgatatagataaaatgcaaaaagattttgatggtgcaattgaacaaatgaataagagtttaaaagaaacattagaaaaaaaataa

SEQ ID NO: 62360 - DNA, 903 bp, Acinetobacter baumannii
  misc_feature (864)..(873): n is a, c, g, or t
atgcaagaacttgccaaccgattggcgatacaaaatttcgtcaacgcttatatgcaagagactggcaaaggatatttactttcttttgaccaacaaagttcaactcaacaagcgtttagctctggtttgacgctgttaactcttcctcttccttctatacaagcagaatgctctgtacctttatcttatgtaagtcgtgtaggacgccatcgtcttgctgctttaccgaaaatgtgtattgatggtcaatggcaaaaaatcagtgcaggaaccattgttagtcttttacttgaagagttggttgttgaatctcaattcaaattagatgctgcttcattgttagagaaatggatacaaagccgggacgcgctactacaattcttaaaacaacgccacaatgatttcgatgatttagtaaaggctggacagaattttattgaaagcgaacaggcattaattttgggtcatagtatgcacccagcgcctaaaagccggaatggttttgttcatgaagattggttgaagttttcacctgaacatgctggaaaaactcagttacattattggcttgttcatcagaattatattgctgaaggttgtgcaactgagcagccaatttcagatcaagttaaagacgcaatccgttggtatttgtccgaaagcgatttaaacctgttaaagactcatgttgaatttaaattattgccactacatccttggcaagctcgttatttacaaggtaaaccttggtttgagcaattaaaacaaacaggacagttaattgatatcggtttacgtggatggcaattttcaccgactacatcaattcggaccttggcaagttttaacgccccttggatggtnnnnnnnnnnggatggttaaaacctcactatcagtcatga

SEQ ID NO: 62361 - DNA, 534 bp, Acinetobacter baumannii
atgttaagaatctgtatcgatacaaatgcaatacttgatttatgttaccgctattatcctagtgaaaaattcgcttggatttgggatggcctaaaagtttgcaagtcgacaggttttataggattttatatatgtgcatctgttgaggatgaagtcttagagcaaatatctaggtttgattatgatgagagtgtgtatgagtcattccttgatttatttagacctgaaattattgaaccagatgagcatgggcagattactgcagattttaaaatagaactactaaattgcccaattgcagaattttccccacatgttaagcaagatcactatgctgatttagaaattgtcagtttggggaaatattatgatagtgaaggttatgttctaacctctgagcaaaagactcctaacatagactggaataaacctaaagcccatcatcggattaaagtcccaaatcttgcagaaaaatttggtgttagatgcggttcttggattaatctaattgatgagttgaatataactcattaa

SEQ ID NO: 62362 - DNA, 1131 bp, Acinetobacter baumannii
atgaaagtccaattagtaagacactcaacgaatgcgttggtacgctacatggcggatatgaatatatctgttgatgagttggctcgtctttcgaaaattgcagactcaaaaataaaaaaggctttagagccagacgagggggcgatatttaagctaagccaattagagaaaattgcaaaagttctttatgtgccgacagtgtacttaactaccgacaaacatatttataaaagagatacgcctgaattaattgagcatcgtaataaatttgatatttcagaaaataaatataagtatcaagctttaattgaagagttctctcttgtgagacaaaactatatttcaattaaagaagcattgaatgaagagatcagggattttacgctgaaattatcaggtaatatagagagtgctgaagaagatgctgaaactattgttcagtactttggtttccgaaattataagaaaaaagttaaaaataacgatgattattataattcttggagacaactgattgaagatagggatattattgtccttgataagagttctgaaaagtttggttctgacggaatgtgtatgtattataataatcttccaatcattaccatttttagttctgggcaatatgcatcaagaaaactctttaccttaattcatgagattgtgcatctaggattaggtcaaagtgtctttgatgggagaatgactgaatcacaaaaagatattgaacgttattgtgaccgagtagctggatatgttcttgctccaaaagatgttatcgaaaagtattttgatgaaaacttagatttagaagaagtagttcaattaattaggaaagaaacaaaggcaagtaaagcggcaattgcaatccaattgaaaacattaggctatattggcaatgaagaattaattgactatctcgattttataaagcctaaaaatgatggcattcctaacaataaaaaggaaaataccgtattaaggtattttggatataactacgttgaaaaagtactaagtgcaatgtggcaagaacaaatatcatcaagtacagctaaatctattcttggttttagaaatgcatctagccgagagtcattcaagcaccttcaggaaaaggtgttttaa

SEQ ID NO: 62363 - DNA, 516 bp, Acinetobacter baumannii
atggctttaaaagtcggaattattaaaagttcggatgtatcaaaatggtgtgaatataaggattctgaggggcaagttcaggctgaattcaaagtccgtggtatcgcttataagccttttcaggtagctattgaacgagcaggaaaccagatctcgtctaaaggctatgatgtgatggtcaaagatgaagatgccaagctttatcacgaattgttaatggatgcatgtgctgcacacttaattgaagactggaagggtgtggtatttgccgaaatcgtagacggtaaaactgttgagtctgaaaagccatatacacctgagaatgcctcaaagcttcttaatcttggtgatattggtatttcgatctggctatttattaaagaacaggcccagaagattcaggaagacgcagacaaggataaggctttaattctgggaaagtcatcgagctctacaaataccaaaaaacgtatgcgtcgaaaacgccgcacgaaatcgaacaaatcaaattcttag

SEQ ID NO: 62364 - DNA, 633 bp, Acinetobacter baumannii
  misc_feature (597)..(606): n is a, c, g, or t
atgattgattgggaaaatttacattacttttcagttttttctgaagagaagacactttcagctgctgcaagaaagttaggtgttgaccatgctactgttgcaagaagaattgcccagttagaagataatttaaaactaaaattagtggaccgtagacctcgtacttatattttaacttcagagggggagcgtctggccaaaatcgtgacacgtatgatggaagaaacattttctattgaacgtctggctcaggcaggacaacaggaaattagtggagtagtttcggtaagtctaccgccagctacggctgcacatttggtaatgcctcatcttggtaagttttatcgtcaatatcctgagctacaattgagaatacttggtgatgttcattatgcctccttacagcatcgcgaagcagatatcgcagttcgctttggacgccctaaagatgattatctaattgcgcgtaaagctggtgaagttccttttggcatatatgcagcccaagaatatttggatgctatacaagaagaaaactatgaatggattagcgttgaagttggtggagttcaaggacaaaaacagcaaaagctaaannnnnnnnnnaaagctaaaacaacgcttaaattataa

SEQ ID NO: 62365 - DNA, 1485 bp, Acinetobacter baumannii
atgcatatacatagccttaaaattacaaattttaaaggattcgcggaggagaaaaattacttaccttttaataccccaaatggtgaaaaaggtagtggtcttaatatttttattggagaaaataacagcggaaaatcaactgtactagaggcaattgattttattagaaatagtacaagaaaagatctagaagctattcatcataaaagtgcctgtggaagtttcgcaaaagaagctattgttgaattagaatttactggagcagtagttaaagttattgatacatttgctcaacctaataaattagatccctttaaacaggtaatttatcagtgtgaccaaggacgagactattttaaaatatcccgatctacctccgaaataaaaactttgaaaacatggagtagtgctaataattcatttactaatacgggaggacttgatggaacaataaaaaaacttttcgaaaccaactttatttgggctgatacaaaccctagtgatgaagctgctttcggtgcatccactttatgtggaactctattaaaagaaatagcatcagaacatgcaaaaacagaagaatttattgagtttgaaaaaaaattcaatgaagtttttaattcacagtcatcagagttaagacagaaaatttcagttatcgaaaataaacttaattctattttttcaaatcaatttggtaatgcttctttaaatttccagtttgacacacctaaaatagaatcattttttaaaggctcatctatccttattgatgatggtataccggtcaaaatggatgaaaagggtaatggtatgcagcgatcagttgctttagcgttacttcagatttatgcagaagaagttgcatttgatccagaaaaacaaacttctagaccattctacttatttatagatgaaccagaaatatgtctacatcctatgggccaaataaaattattcgatgctcttttggaactagctacatatcgacaagttttcgttactactcactcaccatatttcttaaattctcaatatcttgataaggttgggatttttatatttaaaaaggaaaatcataaaaatactattacaaaggcaaacatggactacttcttcccttggagtccaacatggggagaaattaattataaagcttacaatttacctactgttgatttacacaatgaactatatggatatttgcaagaaaaatcagagaaatataaagaaaaagattttgatgcatggttagaaagtcaaaattgtcccaaatgtaagatttggattaaagaatcaaaaggagagatgctatctaatacacctgtaactttaatgactttcatccgaaatcatatacatcatcctgaaaattctagtatgaaaagtaatcgttacacaccagatgagttatcccaatctataggtgaaatgattagagttttaaaagataataattattttagagaggatgcacctttatga

SEQ ID NO: 62366 - DNA, 291 bp, Acinetobacter baumannii
ttgcaatctttacctgctttgggtattaataatgaagatttttatcatttttttagaggacatgatatagcagatatttttgatccaatttttaaaaaatatttaaaattaatttatgaaaatgaaattagcataatctgctcgaaattagaaggcaaaagagctattgataaaagacgcgaattagaaaatgctgaaaaggagtttgatgtgttcgatgaaaatcgagacttaactaaacatcatttttttaaaaaaacttttgatagattagctcaactgtatgaataa

SEQ ID NO: 62367 - DNA, 327 bp, Acinetobacter baumannii
atggaagatcaatatttaaaaaaaatatttcctatacaaaatagaatttcacttaatcctttaaataagcttgttaaagaggcagactacaaagttagcttttctagttctgagaatacagaagttaataatgtaactataaatatagaggattctattgataagttaatccaatttggttttcatgttgagggttcttctaatattcaaacttatcgtgattttttactacaacagcctttgcgttcggttctacaattattgcaatcaagttcagaaatttattctaaagaaattaatcatggagctttagagatactttcttaa

SEQ ID NO: 62368 - DNA, 171 bp, Acinetobacter baumannii
atgcatataaattggcaaaaaaagcttcttcgcacttttttagaaattgctccacagtctcaatttattgtttcaacacattcaccagctttaattcctcaagatactcaagaaattaattttgtgaatgtaactaaactaaaagaagaaatggagatgtatagtgagtaa

SEQ ID NO: 62369 - DNA, 522 bp, Acinetobacter baumannii
ttgatcggatcaagcaccggtgcatttggtgcaaccgtatcaactgtatatgtgtgtgtatcgttaacagtgctgctattacctgctgcatctgtaaacgttactttggcatcaatcgtcttatctgcatccgcagtcaactcactgcctggtacgcttactgtccacgtgcccgctgtgctatctacagttgcagtatacatctggccattgatcacaacagtgaccactgtatttgctgcatctgccggaacatttttcaatacgcctgtaacagtaacgttgcctgacgcttctgatgcattaatcacattgtcagctgttaccgaatcaacagcaaagttaacaccatctgtatttgggccaactgcatcgacaatagctgtacctggtaaagatgggttgcctgctggatctgtagcaattgcctcaacttcgtcaccatcatttaaacctgggtttggtactgaccagctgccatcaggtcctgctacaactgttgctgtgtcaccattaggatag

SEQ ID NO: 62370 - DNA, 240 bp, Acinetobacter baumannii
atgactcctactccaaatggtaaagccttttttaaagctgatttagtgaaattaataccaattgtcttaaatatctgttttattgtttctaaagctgcacctttcaaatatctttcaaccattttaactccagcctttgatgccagtttagatgcttgtgttgttccagcctgttctaatgcaccaagaccagcaataagaaaactcatatgctttgcatcttcattatttaaatcatag

SEQ ID NO: 62371 - DNA, 405 bp, Acinetobacter baumannii
gtgattgataaaggcattgcttcacctgaattgctcagccatgtgctggtatcgaagtatgccgatcatttgccgctgtaccgtcagcgcctgatctatcagcgggctggcattgatctgtccagatccactttatctgactggataggtcgctgcggtgtagaactggaacctctggccaatgccttaaaagaggtggtgctgcaacagcgggtgctgcatgcagatgaaacaccggtcaccatcatgcggatgggtgagaataataaaaaaccgaagaaaggttatgtctgggcctatgccaccacacagtataatccagttcaggcggtgatctatgactttcaggatagtcgttcaggccagcatgctgaagagttcttgaaagtcaggccaggtgattga

SEQ ID NO: 62372 - DNA, 279 bp, Acinetobacter baumannii
atgaaatttgaagagtttaataaacttgtagataagctttcggaacaggaagaatatgaaaaagttgatgaaatcctagatgatcaaatagatgaaataataaagttagatagtaaagaaatcgaaaaatatttaatgctttatgcctcattagcaggagatgctgaatctttagctagattttataaattatttaataaggcagtatctttaggaaaaattaaacagactgatttaaaaaaatatgaggaattatcaccagctaatagatggttatag

SEQ ID NO: 62373 - DNA, 537 bp, Acinetobacter baumannii
atgacatttgaacaaactgtagagctttatgcagcagtacttcgtcagttgctacccgtcggtggttatgacatgtcaccaaatacgaatattgcagatgatatctatgcccatgcaaaagtgttggcacaggctgatgttgatgcaaaacgtattttggtcacgttggagcgcattcctgaagaactgattagtgaatatgaagcagcattaggtttgccgttgaagtgtacggtgaatacaacaaaaacaactgaagaacgtcttcagatcatcaattgggttcaacagaccaagaatgttttaaaccgtgcttatcttgagggcttgctaggcttgtttggcattgagttgattgacttggtgcgctacagaccaatgcaatgtactgctccatgcgattcaccagtcaacacagaaaatctacggttcaaagtcaaacttatcttaaaagccccagtgcaagctgacatggcttgcatcattaaaaactatttaccagcttatttacgttatgacattgaggagcagccatga

SEQ ID NO: 62374 - DNA, 1047 bp, Acinetobacter baumannii
atggcttatccaatcaaaacatttaaccagctgcgttctgacatcattcaggaagtccgcaatttaactggtttaaccattgaagatgattcagatgctgctattcgtgcagatggtgaagcttcagttgttgaagggctttatcaccatcaaacttatattcagaaacagcttttcgttgctacagcagatgaaccttttctttatatacatgctgagcgtttacagtgtccacgcttagctggctcaaaagcatctggtcgagtcaaagcgatttcaaatactgctgtcaccattcctgctggtaccaaaattaccgatggtaaaggtcattactggttaactatttatacagaacagctttcagccaataaaaccaaagaaatccaagttattgctgagtttgatggtattgcttggaattttgatggtcagcaattgctttgggttagtcctcttccgggtgttgctgcacaagttgatgttattgaaatatctgctggtgtagacattgaagatgttgaagcttggcgtcaacgaatggaggaaaaggaagctttagggcttgtccgagatcgtgaagcagatgttaaacgtattgtgaaagacgttccgggtgttgccgatgcttttgtgtttccaaaacgtcgtggccttggttcattagatgtagcaatcacggcagctggtaatccacccaactcaccaagcacagcactattagctttagttcagaccactcttgatgaatattcaggcttttggggcgatgtaagagcttattcgccaaccaaagaatatttgaatatcacagctgtggtcacaggcactgcaaatcaaacagatattgaacaagtcattcgtgattatgttggtttgttggagccgggtgaaacttttgtcgcatctacagttgttagccaaattagagcattgccgggtgtgacagatgttcagcttacaccagcagtaaatcaaacaccgactttaactgtatttattactggttggctccggatcggcacattaacggtgacactactatga

SEQ ID NO: 62375 - DNA, 363 bp, Acinetobacter baumannii
atggcgaatattaatttagaaacgaaagattatgtgctgatgagccttgatacagccttcagtaaagatgaagtacaagccgtttgccagcgtttgaatattcatcgtggtaagtattgggctaattcaaagataggcagccgcttctacacattacgacgttcaaaaggcgtgcctcgaatggttcagatcgtaaaacagtatgctgaagaagcattagaagacttagtgccaaatcgttttgcatcaatcttggtaaatgcagtgcaaactgctcaaagccgagttgatctaaatattgatgttgtacagctttctggtcagaaacaaacaattcaatattttgttccggttggaggctaa

SEQ ID NO: 62376 - DNA, 483 bp, Acinetobacter baumannii
atgatgaaatctgtagcagctcaagtaaataaaggtcttgggcaaatccgaaattcatttctcgccctggtcgcacgtggtggttcaaaagacctgcaattaaaaggttttgctgatgaaacgctgcaagaaattgaacttattcaacaagtcggctttagctctcatattcctgaaaatgcccgtgttgttgtaattcctttgcatggcaaaacctcacgttcaattgtggttgcaacgactggtggtgctgtggtggtcaacgttggtaaaggtgaaacatgcgtttacgaccaatttggacacagccttttgcttaaagaagacggtacgcatatcaccagtggcgatctttttgttgatgaaggcaatttacatgtgaatggcgatgtctttgataagaaaggctcaatgcaggaaatgcgtgacatttataaccaacacaaaaatggcaatagcccaactccaattccgcaaatgtag

SEQ ID NO: 62377 - DNA, 1176 bp, Acinetobacter baumannii
atgggctgggatacagatttacaagatgcaagtttcagaggtgtgcagtttgaatgcacgtctaccaaagatactgcgcctaaaactcttgccattaaacaagccccatattcagacgaagctgaaattgaagacatgggcaatgaccctcgtcgaatttcaatccaagcggtttataccgggtctgattatttaacgtgggtcaatgcattagaagctgctttgaatgctactggatcgggtgagctaattcatcccatttttggtgttcaacaagtccatgttgtgacctatgacatcaaccatgatgctgaaaatccagacttttgcagcatttcaattgagtttattaaggcaaaggttgaaaagcgtgagctgtttgtacctgttgctgtacctgagaaaattgccacaacaacaattattgatgctccagcttcagcattagaaagtgcgttagaaaaacttaaaattgcagacagcgataagttatttagcacagtcaatacgatccgcaacggtatcgatcaggcacgtacctatttaggtgttgctaagcaaaccattgaaaacgttttagctcctgccgattggattgttgggctggttgatgacgtcaccaaactggtgacctttgataccaatatttctgctttgtcaaaatggcgtgatgttgtgcatcgtgttgagcgttttgaaaacctttttcaaaatgatgacgactctactgaattacaacgcgtatggcgttcaacacaagttgcaagccaagttgctattgctcagcaagttatctcaacaacacgctctgaatctgcaaacaatcaacaaatcagcttttcacctgttgatttggctttagtacgtaaaaagacacgtgaagtactacagcaagccattcgtgatgagcgtgccattaatacctttgaaagtattacgcaaattcaggtctacaaggacgttgctgcacaaattcaggatcaaatccaagaactcattgagacacgtccaccgcttacaaaaacacaagttcctgtgccttgcacattacattggttggctcatcacctttatagcgatatgagccgtgctgacgaaattcgacgcttaaaccctgatttagtgaaccctgcggcattgcaggtcggcatggagctaacggtctatgcaagataa

SEQ ID NO: 62378 - DNA, 2118 bp, Acinetobacter baumannii
atgagcggaaattctaccgtttctcttacgttgcagatcaaaggccaacaagctgcacaagagataaagcgcatctctgatcagcaagttcaagccacaacaaaaatcaatacgcaatggatacagattggttctgctcaagccaaattcgtcaatactgcaagagctggtacacgggaaactataaatactgcccgtgctggggatcagttgttgcgtacaaatcgaatgcttgaaggtgtgttgcgtcagcagtcaatacaaaccaagctacaaagccagctattaaaacaacaagttggttcagctcaacaattggcaaactgggcaaaacaagttgaacaatctagcaaacgtacacaccagtcaacgcaacaaaccatgtcactttggcaaaaaggcactgctgcaactggcggtgctattgctggtggtatgtatgtatcaaatgcactgcaaaagccacgtgattatgatcaacaactgacatacattgctgcaacggctactggtggccaaggtatgagtcctgaatcacgattggcagcacgtggtcaattgaatgaatatatcaaagcagctgtgcgtggtggcggtggaactcgtgaagatgctgctgaggccgcaaatgcgttaatcgcttcaggtaaatatgaactcaataatgtggctccggctttaaataccgcaacgaaaacagcctttgccacaggtgctacagcaacagatgcagcagctttaaccgttcgtatgcaagactttggtatcactgatttacaacgtggacatgatattgctgtacgtggtggccagcttggtagctttgaatataaagatttatctaaatggttggcacagcagatggctgctgcccgtgttgtggggtatagcggagaaaaaggtctcaccgaacttgtagcaatgaaccaagtggcaatgaaaactgctggtacaaccgatgaggctggcaataacgttgtgaacttacttgccaaattgtctagttctgaatttagcaaatctgttgcagatgctgtaaaagtacaggctggcgacccaacaaaatcaaatggtaagaaaaagccggcacaagtttttgactggagtacttatgctatacagcaacgggatcaaggcgtatatggtgttgaagcatttgtaaaattacttgagcgtcaacttgcaggcaatgcccaatataaaaagcttcaagctcaggcacagtctagtaattcagcaacacgtacagctgcgttaaatgatatgagcaatattgcaatgggttctgagatcggcaaaatcattgcagatcgtcaagcacttatggctgctttaagtgttgcctacaataaagacacattgagtaagttgcgtaccgagcttccaaatgcatctggtacagttgctgctgattctgcgatggttcgcaatactgagtgggcaaaagatcaggcaatgaatcaggaaaaattgtttgctcaatctaaagcttacgatgctatttccgagtcgctaggcggtttcaaagatacgattaccaaaagtgcagcagagaatgaaaatcttgctggtatggcttatggtgctgctgtggccgttggtggacttgctttagcagctggtgcagctgcatttacactacgtggtatgggtggtaaagccttgccagatttaccaacaaccaagggtggcggtttggcatctaaagcttcaggtgcagcaaaaacagctggtctcgttggtgctgcttatactgggtatcaaatctttaaaccaattgatgatgctggatatagcttggttagtgatttattggctaaagttggtattggttctggtggtgaacgtcctgactttgttcagcaagcaattgaacaaagcaaggcacagcaggcttctgctgaagaaaaaagtagtcaattgattgctgaacaacagcaacaaaatgtattgagccgagagctgatcaataaaattaatactttgattgatgtcactgggcaaaacaagccaatgaactttagtggtggcttacttggggcaatttcagaacatgcggcaactgaagaaaagcgtcatggagcgccaaatgtgcctttatatttgcaacgtagataa

SEQ ID NO: 62379 - DNA, 174 bp, Acinetobacter baumannii
atgccgcttgatctggctgcggccttactcagtgatgagcggcttgataatactcatcaaagaccaccaaaaagtcactctacgcaaccaccaacgcctccagctccggcatctaaagatgaaggtacaacttttgttgcaatgggtcgaaaacattcaaaaccaaagggatag

SEQ ID NO: 62380 - DNA, 342 bp, Acinetobacter baumannii
atggaacaaattcaagtagaaggtacattacctgtagcacttaaaaaattagtcggtcaaacggatatcaaaagtcgaaaagttgtgatgcgtcaaatgacagcaattgaatatttgcaggctcaagcatcaactgaaatcggtcaattcgttggtattgctgacttagctgctatgacaaaacttattgatgctgaaggtaatgagcatgatattagttatgacatgcttggacattcatcacgagcaaatctgaattatttaacagacttacgtgcaactcttgatgcaaaggaagcagccgagagttcattgcccgagcaagaatcatcagaaaactga

SEQ ID NO: 62381 - DNA, 378 bp, Acinetobacter baumannii
atggctgagaaagctgttggttttattatcctaagtgtgaatggtcaagaatatgactgcgccacacttaatcccactaaaaataccggtaaccgtccaatcccgactatgaaccgtactggtgaggttaaatataccgcaaaaggtattaaaacttatgctgtatctgtggctgtggttgttccagacgctaaggatactgtggattggcttgcgattgatgatgctcgactcagtatcgaatcagaaacaggtaatttccgtgaaacgtatatcgactttaacgtacaaaccatttccgatacgtatgacgtgaatggtgaaacacgtcgaaatcttgaaggttttgcactctcttatatcaatgaaactatttaa

SEQ ID NO: 62382 - DNA, 810 bp, Acinetobacter baumannii
atggctcttcaagatactctcgatacaatcaaaccactcggtcacaccatcattgccgtatcagcacctccagcagctggtgcagacacgactgcatggatcgaccacttaacttctgtcagcgattcaattgaacaacgtccagcgattctcgttgtaccgttctctgatatcgttgctgctgaaacctttgctgaccaagccccggtaaaaaccagttaccgcgtcgttgttgtttgctacaacggtgcgacaggccaagaacctgaacttgccgcggcaatggctgctgcattagcagattcaaatgacccagcattgccattcaacggggttaatctgggcggtattaaaccagttgctgatgagttcaagctcacgtttgaacgcatggaagcagcgatgaataaaggtgtatgtatgattaatacaggtgctgatggtaaacctgaaattgtacgtgccatttcaacatatcgtatgaaccctgattctggtgaagcagatgacttgatgcttgatatcaatggcgtattagttgtggactatacacgcaaagttattcgtcaagacttgatgaaagaacgtcgtcgtaaaaacacagctgctcaacgtcgcaatatcaagtccattattttgactcgtgcgattcaactggataaggctgagattttgcaaaatgtacgtgagactgctgatcagattacagtgattgaagacacaactgatcgttatcgcgtcaatgtgaaagttcctactgattgggtgcgtggtatgcacgtgattggtacgacacttgatgtctactga

SEQ ID NO: 62383 - DNA, 678 bp, Acinetobacter baumannii
atgggtttgaatattcaacttccagatgttgtttttacaaagcatattggcaacttgataccttctggtgaaaatttagaaggttattggttatttaatggcacattagaagaatcaataattaatcgagtaactggggtacaaggaactgttgttggtacacctcaggtgtctaattcaaaaatcactactgataaagccaatggcttcattacggatattataatatctggcgaaaaaacctttgttgttgttgcaaagtttacaactcaagctattttgcttagttcgattaattatgatgcatcatcactaactaatgaaggtatcgctgtatatggaggtaaacctctagttcaacttgatagtgcatcacgaccatcatcggcttatttaccggatttgacaaaagttcattttgtgtctggttctttaggtttagcaagtaatagtctttttgtttcatccgatggtgttttgactgaagaaatagcaagccatacaggtagtttaaatgatagcgctgcactgaggataggtgcttggggtgtcaatagcacaagtatcgttggttcaacggatacctacgctgctttgatatttaacaaaaaactttctagtacagagactcaagaattatatgagtacctttcatcaatattaccagtaaatttttag

SEQ ID NO: 62384 - DNA, 2022 bp, Acinetobacter baumannii
atggctacacaagtcgtaattgaagttcctggcgtcccgattagtgaacttgaaccaacttcaaatgtttctcctaatgatgtgatgcctgttgtacaagaaggtgaaacaaaaaaagcaccgttacaacaagttgctgatttggttaagtcaggcctgggtactgctgcattaaagaatgaatctgattttgctacaccaacggctgttgtagctgtagctcaatcaagtcagtcgcgtgatgatgcaatcaacgagcgcgtagatgaagttgagtttaacgtcacactggctaaaagtggctatgaagcatcattcaatagttatgcagagatgctagcttatactccatcaggaccaaatgtttctgtccgtgtaaataatgatgttgattcatcgaaagttggaacctatacgtggactggtacagaatacaaaattggtactgatctgttcaatttagctgtagaaaagtctgaagaatatacgaatcagcaaactaaaccactgaaatatatttatttggcaaaacaaaactacccgtattcaatttctgattcagctggaagaatggcgtttgctattaaagataatggggctattgcaatagaggaattggaagtcaacgcaattaagacccagagttgtgagtttaatagttcagcggcagctttttcaatcactgataaaaataaaaatgctgcgatagcaattatgtcaaacggtgttgttaaagctgggactattgaggtcaatgaattacaggttggtgggaaagaaatcacagcattaataggtcgagttcgtaaggttggacattatgcttttaatgttgtgcattttgaaatttttggtcaatcgttaagtcagggtgcttattcttctccaatccaaacgacagttcagaaatatgacagtgtcatgtttgttggtggcattcgaccacagcatccatcatacaacgttccaaatttctacggctctttcataccgcttgttgaagaaaaagatgtgagtggttatgtcgggtacgagacgccttgtggtggcgcaactgattgtgtcaagcaattgattaacgatgaaaatgggatcgaatacacacaacagaaataccagcttcttggaactgcttgcggtgaaggcggtatgtcgctcgcgtcactctcaacaacatacctgaacaacaatctcaaacctgcaatcaccaacgctttcaacttagctcaagcacaagggcttacatacggtatgccgctaatgggatgggtgcagggtgaagaagataataagcctagtattggaacaaccattcagcagtataaagacggtctgcaaaacctcatcgggcttattgattctcacttaaaaacacttaattcgaacctagctttagatggtctaatcacaactcaactatgctcgtttaaaacatctggacgtacagagccaaatattgaattggcaatctatcaagctgcaactgaagcaagctccaatgtctatttagcttgtcctttatatatcttcgactacgcggatggctatcatattaatggcgtgtcatcaaaatggatgggtgcatatattgggcttgtacataagcgtgtgcttgttgatggtgaagactggaagcctgtatatcccatatcacatgtgaagcaaggtcgcattcttgaagttaagtttcatgtacctgtacagccacttgtatttgatacttcacatattgcactgaatactaactatggcttcagccttgttgataattcaaataattcaatagtaattagttctgtagagattacacagggagatactgtaaagattattgctgtagaccctatacctgttggtgcaaaccttcgttatgcatggactccttccgctcaaccaaatcgtgtaacaggcccgcgtggtaatttgcgtgattcgcaaggagtagatttaattttcgaccccgatggcattaataaaccactgcataactggtgtccgatttttgaatatttaataagttaa

SEQ ID NO: 62385 - DNA, 348 bp, Acinetobacter baumannii
atgagtattcctgctggtattaaaacacccggcgtttatacagacgtcaatatcaatacactccgcacagggcttccagccaatcagcaaaaagttctttttgtgacgctagatgttttgtccgggcaattcactccagttgatgtttatgacactgctggcgcaaatgctgtatttggtgcggagtcacaagctggtcgcatgattacagctgcggttaagactaatcgtcttgtcaatgctcaggcggtggctttagcagctgaaggcgtacaaacacaagctgctcttcagactcaaagtggtgacccacttttaactgaaagcggtgttttaattgagccttga

SEQ ID NO: 62386 - DNA, 615 bp, Acinetobacter baumannii
gtgagtctaaatcttgctgttgttgaacaaggcattaaagatgtcttggctaaacaagttactgacaaaaaatggacttgggttcgagaaatcaaaacctatggtggagagtttgatggggatctacccactgtaatcaaaacatttccagctatttgggttgtttttgatggttcaggtacaccaaagatgagcagttataacaagactgagtatccactgaaatttgttgttttagttggggcacgttcagtccgtaatgaagaagctcgtcgtcaaggtgctggtggtgacatcggtacttacaacatgcttgatttagttcaacgtctactgattggtaatgatttgtcttcagctggtgtgactggtcttgcaccacttgagcttggtcggactaaaaccattttcaacaccaagacacgtgagcagtcaattagtgtgcttgctcaagaatttaccacccaatacaccattactgcttcagatcgtgaccgtgaagaggctgatgaatctatcggtgaaatccaccgtatcaatgtcgattattgcttcaagccgggtgatgacgttactgacgcatctgatctggttgaactgaaggaaaatgaataa

SEQ ID NO: 62387 - DNA, 429 bp, Acinetobacter baumannii
atgtatgcaacggcagatgcgatgatcaaaaagttcggtgagcatgagttaattcagctcactgacaatgttgagccatatcaagatgcaatcaattacgacaagctgaatgctgcattgcaagaagctaactcggaaattgagggttatcttgtgggtcgttatgagctgccgttgcaaaccgtacccccatttcttgaaagcattgcttgtcacatggctcgttatcatgcctgcacaggtgcaatgtctgataacgatccaatccaaactcgttatgacaatgcaatcaagaccttaaaagaaattgcaaaaggtaacgtcagcttgggtaatgctccagctggcgaagctgaacctgtaaagacttcatccaacaatgtgttgtttcaagttgggcggcatgattttggaggtaataactggtga

SEQ ID NO: 62388 - DNA, 423 bp, Acinetobacter baumannii
atgacagcaactcaaactggaatcgtcacagaaatgcgtgatggtgaattaatgcctgttccattgaaagcaagcgcgattgttctagtcggtacatttgctttggtagatgccacaggatttgcaatcgcttcagaaacggcaattgctgcaactcaaaaggttgttggtgtttgggataactcagctgacaacacagatggtgctgatggcgatgttctcgcatgtgctcgtcgtaaaaaacaatttttgttccagaactcatcaactgatgctgtaacccaagctgaatttggtgaagaggtttttgtggaagacaaccagacagtagcaaaaaccacaggtgctggtcttccagttgcaggcaaatttatgggctttgatacgcaatatcctgactgcgtatgggtggagatttattaa

SEQ ID NO: 62389 - DNA, 1101 bp, Acinetobacter baumannii
atgcctaaaccaattcttgtcgcttcatgctcatttgacttgagcgtgacatcaaaccaccttgttcttgttcctgaaggtacattttctggtgttgatggacgtccatttgatgcaccgcactgggtacttactccggagcgtggtcagcaaattgttgcttcattgaatcagcgtcaagtggatatggtcattgattatgaacatgccactttaaaggcacaagaaactggtgaaccagctccagcttcaggctggttgaaggctgcacatttctcatacgttaatggagttggaatatgtagcactaaatttgaatggctggataaagccaagggctatatcgagtcgaaagaatataagtatttatcacccattattttttataccaaaactggtgaggtcgttggacttcatagtgttgcgttaaccaatacccctaacttggataatctgcccgaggttcaacttgcagccttggcacaggattactttacccaaaattcaccccaacaggattctgaaatggaagagttattagaaaaactgcgctggatgttgaatttgccattgtctgcaacagcagaagaagttttggcagaacttaacaagctatcagcgcaaatcaaagaaaaaaccggtgttgctgtggcggcaaatggtcaacacctttttgatgcattagatgcaattgatcagatcaaagtggctgcaaacagtcagtctgcggttgatatgactcaatttgttccaatggctgtgtatcaagaagctgtgaacaaagctggtactgctgaagcagctcaaaaagccaaagaaatcgatgacctgattgtggctgcatgtagtgatggtcgtttgactggtcaagcaacaatcgactggataaaagatcaggcaacaactaatcctgactttgtgaaatctcacattgaaagtttgccaaaaattgcagctttgagtcagcgtcagactgagcaagtgaatttagcagctaaccatcaacagcaacagcaacagaaacctgttgtggatgatattaccgtcagtatcgctacacagttgggtgttgatccaacaactttaggagctaatccatga

SEQ ID NO: 62390 - DNA, 498 bp, Acinetobacter baumannii
atgagctttatgcaaatcaacgatagcgccttgattgaccgcatgtctcaggttgctgatcgtatgtcagatacaacgccattggcagcggctatagcattgagcctagatactgttactcaagataattttgataatggtggtcgtccgacttgggctggtctgaaagatggtggtgcatcacatttgtatcggtcaggaaatttgcgacgtagtatcacaacgcaacatactcgtgatcaagcaatcatcggtaccaatgtgccgtatgccgccattttgcattggggtggtcaaacgcgcccacatgtaatccgccctagaaataaacaggcattgtcattcaatggtttggtgtttacgcaagttaatcacccgggaagcaagttcccagcacggccgtatttgccgattgatgaacgtggattcttacagcgtgaagctgaggatgctatttttgatgatgtggatttttactggcacaaaagctttggctaa

SEQ ID NO: 62391 - DNA, 1317 bp, Acinetobacter baumannii
atgccagtcgctcaacgtccagagttgaatgccttattcaatctacccccaaatgatgcaatcgattacttgaaatcaaagggttttaagattggctgggattggcatgaaaccttagatgatgcccatagtcgtgcatttactgtggcaaaggttgcacgtattgatctgttgcaagatatccgtagttcattggtcacggcaatggaaaaaggtcaaacgctggagcaatggaaagccagtattacaccaacgcttcaagcaaagggatggtggggaaagaaaaacgtcattaaccccgaaggccgtgaacaagaagtccaactgggtagcccacgacgcttacgcacgatttacgatacaaacatgcaatccgcatttgcagctgggcgttataaagccatgatggctggtagtgaaacccgtccatactgggaatggcggcatattacgattaataaccctcgtaaacagcatgtggcattaaacggaagattattccgttttgatgatccattttggaatgtggcctatccacctgctgagtggggttgtaaatgccgggtaattgccagatctgcacgtgaagttgaaggcaaagaaattttgtctagtgatggctatgcatcaacaatttatgaacgtgttggcacagatcgccactctggtgttgatgtaacagtaaagcgcactcagtttgatattccaactcaatctggcaccttaactttcgctccggcagctggatttaatggttctccagccagtagttatttgatggatagagtgttggcacaacgtgccgcagaccttatggggactagaaaaggtttgcagcaagtgcaacaaatgctgttgtcaccaccgcgactgaaagcccatgaatcctttgttcataatgcaatgagctttgctctgccacaaaacagaacaagtactgtgggtgtgttgcatattgatgagattcggtttttagctaataaaaacaaggttgttgaaagcccgattatgacggtcagtgaccatttattggtgggtaaaaaagcaaaacggcatagtgatgccgggaatgctttgaccacagatgaatgggttcagttgtcaaaattgattgctcaagctgagctagtggtgtgggatgttaagaatgacagtatgttgtatgtgttgccagcattggcacagagccatgaaaacgaagtgattaagctttcaatccgtgcatccggagtgatggaaatcgtcagtatttttaagattcaggatgatgtaatcgaaggcagcctaaagtcaggcgtttatgaaaagattagataa

SEQ ID NO: 62392 - DNA, 1581 bp, Acinetobacter baumannii
atggctaaaaaagaccgcacatccaaaaaacaagatcgttctgcactcgagacacatcagactgctgaagttgcgtggttatctaaccaatggcaagagcatcctgtggttgggatgaatccacagcggatgcatcaattactgactgaagctgaacaaggcaatctgcaagctcaagcagatttgttctgtgatatggaagagcgtgacggtcatatcttcagtgaaatggataagcgcaaaaaaggtgtgaataagctcgattggggtgtcaatccacctaaaaatgcatctgagcaagaaaagaaaattgctgaagaggtcgcggagtggattggggacattcaagattttgagatgtttctatttgatgcgatggacggtgtcggtcatggttattcatgccaagagattgaatggcatcaaatgggtaatttgtggctacctaaaagttttcagcaccagttggcacgtaatttcatcacaccatttgataagcctaatgaattgcgcttaaacgatggcacgcctgaaggtgcggagttttgggactttggctggttcatccaccgccacaaagccaagtcgggatatattgcccggtctggtttgcaccgtgtactttgctggccatttttattcaagcactatgctgtgcgtgatgtgatgcagtttctggaaatttatggtctgccaatccgtgtgggtaaatatccacctggtgcaacaaatgaagaaaaaatgacattgctacgtgctgtgatgtcaatcggacgtaatgctggcggtgtgattcccaatggtatgagcattgattttgagacagcggcaactggtgatactgacaaccacatggctatgattaagtggtgtgagcaaacccagtctaaggctattgtgggtggcactttgttatcacaggcagatggtaaaacaagtaccaatgctcaaagtcaaacccatgaaattcagtttgatcgtctagttgagtctgatgcaaaacaacttgcacgctctatcaatgactgccttgtcagttatttgatgcggttgaactatccaaacattacatctgatcgttatccaaacttttactttgatacctctgatactgaagacatggaagtctttggtaattcgcttgagaagcttgttgccgttggtatgaaaatcccactgtcatgggcacatgaaaagcttggtattcctcagcctgcggatgatgatgagccagtcttgggtgttcagaaagaatcaactgtaccgaatttggcaatgaatactttccagccaaatttattgaacagtctgattgctgccaattctgcccagttgccgattgaggaacaggcattacagttgttattaaaagatcaaactgaatctgcacaaaccacagttgaggattggacaaagcaattgctggcaaagattaatgcaggcaatgaagaggaaattttgacaattcttcaggatgtttatccaatggatgatgaaccagctctgcaagaaaaactgacacgcctgatttttgccagtgaagtactaggccgtctgagtgttcaaacggagcaaagctaa

SEQ ID NO: 62393 - DNA, 789 bp, Acinetobacter baumannii
atgcagaatcaaacaacagaaaaaatacctttctataaatcgtgggtggtttgggctgtgatctatggtttgctgattttggcatataacatagcgtttatcttccttgatcctgaaaagaaggttttgcttacctcgaatgaactaggtgattttttagctggagtctttgctccattagcttttttatttttgtatttagggtataagcaacaaggtcgagagttacaacaaaatacacatgctttaaaccttcaggctcaagagttgcaaaatagtgttgaacaacaaagattgttagctgaagcaacaattgatgatttaaatataacgaaggaacaaatccaaactcaaagaagaaaagaacttatcgaagctcaaccattttggcatttttcagttcaacaagtttataaagaaaaaccagacaatgtactcggtacgaagatagctgattcaaattttaaaagtattattatttccgctagtttagataatagtagagctattgctagagaggtttcagtctctgttttaaaatctgatgaggttatccagcaatttaaatatcaaacatttgaaaaattatctaaaccacaaaatgttagtatccgtttaccttacccagattgttttgatgacaataatgagctgaaattaaaatacgctattgtttatcttgatgcgttagataacccacaatatcaaaattttgaagttatagccgaaagaaaaacagaaacagaaactcaatattctagagttgatcgaatagaacgctcatattag

SEQ ID NO: 62394 - DNA, 378 bp, Acinetobacter baumannii
gtgagtaaaaaatatgctgtttcacaacaagaattacaacgtcgtttgaatcagcaaaagaaagagttgctgactaaaaatccaagcaaggttattgaacctcaatatttacaaggtattgaagtgaaactcaaaaagcgttggattgtagagaattggcgtagcggttggctatggttatctaactggttcgttgcattaattgcatatgttcaattttacggtgtgccaacagagttgattcaattgctacctatggcaacacaacaacgtgtaacagccaccttggcagttttggcttttattggtcgctttattgatcaaaaccgcgctaagcctttgcctcctgcatccgatacctttaaggaggatgtatga

SEQ ID NO: 62395 - DNA, 501 bp, Acinetobacter baumannii
gtgtctaaaacatttcaagacgctctaaaacgagtacttcagcatgaaggtggttatgtaagccactcatctgatccgggtggtgaaaccaattatggcatcaccaaagctgtagctcgtcagtatggttataagggttcaatgaaagatatcccaatggatattgttgaacaaatttataaaaaccaatactgggatgcaatgagctgtgacaacttcccattttcagtagctttccagctttttgatgcagccgtaaatcatggcctactcaatgcccgaaaacttctacaacgtgctgttggtgttaaagatgacggtattgttggtgtagtcacccttgcagctgttcgcaagcaaccacagtttgcattaatcagtttgttcaatgccaagcgtattgagttctatacaaaaatttcaactttcaatgtttttggtaaaggctggatgatgcgtattgggttgaatcttggctatgctgcggaggatatgacgtga

SEQ ID NO: 62396 - DNA, 573 bp, Acinetobacter baumannii
atgaaaaaaataattgctgttattgggttgttgttattggttggttgctctaagcaaaatcaaatacagccagcagaacctccttatgttaagcagagttatagtgaatcagacccagctgcaaaattaagtgttgttcaatttgctggtgtagtaaagagcatttatcctgaatatcaaatcacatattccaaagatgttggtgaagttaaattcttaccaagtgatgtgaaaccagatgctgaatttgtacgagcaaataattggtacagtattaaagttattcgagactctaaaaccgaaaactgggagaccttgattgttgaggttcttaatcaaaattcttatgcagaatcaaaggcagttgcattccatgattgtcagaagattttcggaaatattgataatcgaattctgacagtaattgatgagcttgagaatcgtgtagaacaaaatgaaaaaacaggttcttctgcttttagttcagcaaatcgttatggatataccgtaaatttagatgctagtcattataatgaaggatatcctgtttcttgtatcgtgaactctaattaa

SEQ ID NO: 62397 - DNA, 654 bp, Acinetobacter baumannii
atgatcgggcttagaattaaagaagaacgaacgcgtctaggtttgactcaacctgactttgctcaaattgcaggcatttctaagcgaactttgatagattgggaaaaggatttgtcatcaccaaatgcagtgcagttatctgcactaagccaagctggcgttgatgtgaattacattattactggcaataaagtgttaagtagtattggagatctaccagacggatttgatgggttttcattaatccctgttcatgaggatgttgtaatttcagctggtcacggttctgtagtctgtgctggagataatccgtcaaattacatggcatttagaaatgattggataaggtcaagaggtttctctgtaaaagacttaaaagtctttattacgcgtggtgactctatggaaccaaccattgcagacaaagaaccaatcctgactaatactgctgaagtaacccctcaagatgggcatatttatgtgatccggagtggtgagatgacttgggtaaaacgaatccaaagacagcttgataacacgctgttattgatttcggataacaaggcttatccaccaatgaaactggatttagaaactgcacatgatgttgaggtaattggcaaagtcgttaattcatcaaagaatttttattga

SEQ ID NO: 62398 - DNA, 207 bp, Acinetobacter baumannii
atgcgaaataaatcaccagaccaagttaaaaaggactttgagaaaaagggcgaaaccatcacagattgggcacttgcacatggttttgaccgacatgacgtctacaaagttcttaatggtcaggccaaatgcaaacgcggtaaaggacacgaaatcgcagttgcattaggtctaaaacaaggcaccagtcaaatgactaatgcctaa

SEQ ID NO: 62399 - DNA, 144 bp, Acinetobacter baumannii
atgagagcaaatttcttcaccttgctgtttctatttgtagcgatatttggctacacacaatggtttttcgcagaacaagacaatgaaatcctgcgccaagaacttgtgtctatcaaatacagcgctgggagtgaccgcccatga

SEQ ID NO: 62400 - DNA, 318 bp, Acinetobacter baumannii
atgacagcagtaaacaagtcagcaagcaaagtcctcaaagtcttaaaggcactacgtgggcacagcttaaaaggtgcaacaaaccaagagcttgcaaatcaactcaacgagtcgccaagcaccatcacacgcgcattacaagtgctttcagaagaaggtttggttcaaaagctggatgacggcagctatgcattgggaagctttctcgtatcaatagctcatagccatgcacaggaaattgaacgtgcccaatctcgtatcagcgaacatctacaacgtgtttttgctggtgtacatcaaattaaatcagaggcttga

SEQ ID NO: 62401 - DNA, 957 bp, Acinetobacter baumannii
atgagcgaattagatcaaaacaaacttgcacaattggaacaatctgtttctgttgagcaaatccagctctctgaaaaacttggggcaatcaaggcaacagcgtttatcaaaaaactggtaacggttaccgaaattaagttactagcagaaatcaaagaaaccaaacaatacaagggtttaaagttacttgatggctctggaaaactggtaacggttaccacttttgaagagttctgtcagcacattggcatgagccgtgaaaaggttgaccaggatattttgaacctatcaacctttggtgaagacttcttagaaactagccagcgtatgggcttgggttatcgtgacttacgtaaactccgcaagctgcctgatgctgagcgtgaaatcttgatcaatggtgaagcagttaaaactgaagatcgtgaaagtctgattgacctcattgaggaaatggcagctaagcatgccaaagaaaaagcggaacaaaatgcacgtatcactgaacttctggaaaatgacaaagcaaaagatcagttgcttcaaaagaaagaccaaaagatcaatgagcttgatgcaaaaaacaccaaactcagcagcccgcttgaaatcaaaaaacgtgaagaaaccaaagatcagcaattagcagccattgctctaagtgatgcaaacacggcttgccagattatgcacaacgatgtggttcgtttcaccaacagcattaactctattttagatgttgtgaacgaaaacggtttgtaccacatccaagaacaaattgaagcatccattgtttttgcattccagcagattgctcaaaccagtgttgaacttggcattcaaattgatttcgaggcaatggtaaaccctgaatggcaattaccagctagtcaagagctagatcaagatgagcttcaacagcttcaacaagctgctcaacaatcgttggagcagtaa

SEQ ID NO: 62402 - DNA, 1743 bp, Acinetobacter baumannii
atgacaaatccaaacttagcgaaacaagattacttgcgtgatgttgcagccaaacttactgctgctgagtttggtgggaaagctgtgattgtaaaatctgcctgtgtttatttgaatctaagcaaaccgcaactttaccgcgaactagcaaaagttggcttcactactgagcgcaagcaacgctcagacaaaggtaaaacagttgtaccgacggaagttgctgaaatgattggcggcatggtgcatgttgcaacacgtgccaatggcaaaaaaactttacctatcaccactgcacttgaaatgctggtggcagatggtaaagcgccaaaggtttctgctgccacagttgggcgtgtcatgaagcagcaaatgtgccacccaaaacaactggcaacaccaacggctcacacacaacaaaagtctttgcacccgaaccatgtttggcaagttgatgcatcagtttgtgttttgttctacctgcctaaaggcggtatgcaagtcatggatgagaaaaagttctataagaacaaacctgccaatgtgaagaaaatcgaaaaagaccgagtcatacgctacgtcatgacagaccacttttccggttcaatttatgttgagtatgtgactggcagtgaaagctcagaaaacctgattgatatttttcttaatggtattcaaaagcgctcagcacaagaaccgttgcatggtgtaccaaatattctttatgcagataaaggttgtgccaacaccagtggcctgttcaaaaacttgcttgaacgtttagatgtgacttttatcgcccactcaacaggtaattcacgtgccaaaggccaagtcgaaaatggcaacaacattgtagagacacagtttgaaggccgtctgcgtttcatgcagatcaacaacattcaagagttaaatgcccaagctactgcatggcgtatttattggaatgaaaccaagctacatagccgtaccaaaagtactcgtaatgcagtttggcaaagcatcagaccagatcaactccgcatagcaccaccaatggaactctgtcgtgaattgatcagcactgtaccagttgaaaaaacagttaaagccgatcttacagtcagccacagcatccaaggttatggttcacagaaatatgacgtgcgtcatgttgaaggtgtttatccaaaagccaagctcatgattgtggtcaacccataccgcgcaccatgcatcgatgtattgaccaaggatcaatacggcaatgaagtcattttcacttgcgaaccattgcagcttgattgggttggttttagcgcggatgcgtctgtgattggcgaagaaaccaaggcaatgcctcaaagctcaattgatgcaaaccgcaaacgcatcatgaaaaaagcgtatgacgcagaaacccttgagcaagttgataaagccattgctaagaaaaagccagcgtatgagggtcaattcaacccgatggctgatgtcaacgcagttgaagttccaacctatatcaaacgtgctggtgagcaaatcacaacaccacagcaacagcgccaagttgctccagtcaacttaattcaagcagctaaacaaattcgtggactggttggcgacttgtggacacctgagtgcatggctgcacttaagaaatcattcccaactggtgaagttccacaagacgttattcctgaaattgccgaaggcatcaaagctgccaccgaaaaaccgaaattacgagtggttggagagtaa

SEQ ID NO: 62403 - DNA, 1188 bp, Acinetobacter baumannii
atgagcgcacttaaacaattattgattgaccatgccatcacgcaagcatccgttgctaaagcactcgatgtcagtggcacaaccattaatttcattgtcaacaatgggcaatggccgaaaaagaacaaggagcaattgcgacaactgttcatcaatttcttattggaaaaaggcatctctcaagatgccattcaaaacgcattagatgctgaccaatcccacaccgttgacgaccaagccttggatggtgggactgacagcactactcaaccggaggaagagcaactcatgctactacgcaaacaaaccctaacaccagctgcaaagaaaaaatttgcactattcaaaaacatctttacggaaaacattcgtactgccggggaacttttcaacaatagcgacattaactatgtccgtgaagccatgtggcaagcagctaaaggaaactcttcctttattgcagtagttggacaatcaggttcaggtaagtcgacattacgtcgtgagttgattgaccgcattgaacgtgagcgtgaagcagccattgtcattgagccgtatattttggcaactgaagataacgacttcaaaggcaaaacactcaagtctcttcatattgctgagtcgatcttggctgcattagcaccaagtacaaatgcaaagcgttcacctgaagcacgtttccgtcaagtgcatcagttactcaaagaatcaagccgtgctgggcaccaccatattctaattattgaagaagcccaaagcttgccaataaccacgctcaagcacctcaagcgtttccttgaacttgaaaatggtttcacacctttattgtcaatcattttgattggtcaagatgaactcaaaatcaaactggctgaaaacaaccaagaagtccgtgaagtcgtacaacgctgtgaaattgtcacgcttgaaccattcacacaaaccacgcttgttgactatttacagcaccgttgcaaagcggcagaccgtcaactttcagactttattgatgaatctggtcttgatgctatttgcgccaagctcactcgtaatgttggtcgcaagaaccaaagtgaaagccttttatacccattggcagtcggcaacctcttaacaggcgcactaaacgtagcagctgagctaggtgttgatgttgtgactggcgacttggtgatggaggtatag

SEQ ID NO: 62404 - DNA, 219 bp, Acinetobacter baumannii
atggttgattttgcagatgtagcagatggtttggctgaagagcgtattcagcaaaccctttctcaacgcccacagtttgatggtgaaagtgaacatgaatgcatgaactgtggcaatgaaatcccagaacgtcgtcgcgctttgggcaatgtgaaactttgcattgactgccaaaccgcagttgaaagcgactctaagcatttccgaggtggtcaatga

SEQ ID NO: 62405 - DNA, 225 bp, Acinetobacter baumannii
atgaataccaaacagaaacgtgcccaatttgccaaagatttagacaaattggtcagcggtgattatgtacttgtacctaaaaaaccttcatttgacatgatcgtagatggtttagcagtcattgcaacaggtgttggagtgcaagacattgaatttgaagtacgtaagatttgggaaaaaatgattaatgcttcacaagttgttgaggcgaattatgaaaactag

SEQ ID NO: 62406 - DNA, 705 bp, Acinetobacter baumannii
atgaaaactagatgcccagcatgcggagctacttgcagcctagatgccctaatcggtcatggcgatgcaagtcaggcattcgttgcatctttgaacatgactggcgacttggcaaaaccattaatcaagtatctagccatgttcagatcagagaaccgcgacctgacttttgaacgtacagccaagttactgacagagatttctgatgacattcttgcaggacaaatcagccgtaaccgggtcaattacccggctccaaaatcggcatggatttgggcaatcaacaccatgcttgaacgtcgtgatcaaggcaaattgcaactgcctttaaaaaaccacggctatttgtatgaagtgatcagctcattcaaacctgagtacgcaccagcacaagactcacgaccaagacaaggttttggtacagcagcagctgaagcaacaagagcaaaaacggaagctgaacgtgcagcagatcaggctgaacatgaacgccaaaaacatgctcgttcaaacctaagcgttactgaaatgcttggctttacaaaactgaatgaaaagcagcctgaacgtggtctgaagaacattcctaaagaacaactgatggcgcatgtctctaaaaacaagctgccaaatgaaaccctagaacaatgttaccaacgcctcaaagctgcggaaaacgaatcagaacaaggagcaacaccatga

SEQ ID NO: 62407 - DNA, 177 bp, Acinetobacter baumannii
atgtattcggttaaagcacttaaaccaaagcttaacgacgatccacaagcactattcgtcatcactcgtgaggatgacgttttagtgggtcatttctaccaccatacacatgcagaaatcgcatgcgcagcacttaaccaagctcaagcaactactgaaggaacatcaaatgagtaa

SEQ ID NO: 62408 - DNA, 285 bp, Acinetobacter baumannii
atgagtaacgtaactaaaaaacatattgctgaaactatcgccaagaaagttggcattagcaaatctcaagctgaagaagcgctcaatacgtttgaatcaatcatccaaggttctttggctgatggtgatcaagtcacactagttggtttcggaacatttgctgtaaaagatcgcgctgcgcgtaaaggtcgcaacccgaaaactggtgaagaaatccaaattgctgcaaccaaagttccaacctttaaaccgggtaaagcccttaaagaggcagtcaatggataa

SEQ ID NO: 62409 - DNA, 327 bp, Acinetobacter baumannii
atggataaccaatacacaaaagctgctggctatcgtcacctctctccagaagaactggatttgatggttcgtattaaggctaaagctgctgagctactcactttgcaagcagagttagaaaatcgtcttaataccgagcttgaagttaagcaagctgcggcagatcgttcgcaacttgcccctaatgattttgcaagttctgagtatcaagaattgaatcgcttcaaagctgccgagccattgcgctgggctgccattggcaagactgatattcagaccggaatcatggcacttatgcgcgcagtagcacaaccacccgtttgttaa

SEQ ID NO: 62410 - DNA, 726 bp, Acinetobacter baumannii
atgaagaaaaaagaagttattgaaaaaattaaaaagtgtttggcacttagtaagtcagctaatcaacatgaggctgctacagctttgcgccaagctcaagcacttatggaaaagtacaacattgatgccgatgacgctgagcttcttgggatcatgagcacaccaattgaaggtggcggttcaaaattaccacctgtatttgaatcaatgcttgcccaagcaattgcaaaactcatggattgcaaagtctttcttagttacacagttaaaagaacgccgactacagaaaaggttgtttctctgtggaaatttgtaggctttgatccagcaccagaaattgccagttacgcatttgatgtactttatcgccaattaaagaaagcccgtacaacctttattaatacagagcttaaacgtgtaaaagttcgcaccaataaagtcaaacgagcagatatgttctgtgaaggttgggtaattgaagcttctgaacaggctcgaaaaatcaaacctaacttagaaaagatcaaacaaattgaagctcatcttgagaaaacaatgacactcacaaagtttgatcctaaaaaccgtaatgaaaaaaccaaccgtagttctagtcgcagtttaaatgactattggtcaggtcgtcaggctggcaaagatgcccaaattagtcatggtatgaatgcaggccagcaatttgaaaaattggggacatcatcatgctaa

SEQ ID NO: 62411 - DNA, 204 bp, Acinetobacter baumannii
atgctaatagttgcttattttgttgttttctttattggcttggtgacctgttttaaagaggcaaaactggcttggcttacacgtaatagcacaggtctaaccatctttgaaaaacgcgcctacaaattgaaggctggtgcatcaattacattggcttttcttgcggttatcgggctgtgtcaggcggctcaaggtgtggtgtga

SEQ ID NO: 62412 - DNA, 207 bp, Acinetobacter baumannii
atgggtatattcttacttggttttatcatcgcttggtatttatgccacaaatatactcacattatgattgccaacgaatgtgaaaaacttggtggttttttcataggtagcaaaacatacaagtgccattctgtggttgattcaaaacaagataaatctgtaccaaatgcaattttagaagctgaaaagcttaatcgattggggtga

SEQ ID NO: 62413 - DNA, 450 bp, Acinetobacter baumannii
atggcatatcatccgcagatcgcagatgccccagcatatttcactgaaaaagaaattcttgggctaattcctgaaaattttatattcgtgactcagctgatcggcattcgatctgctttgaatatgattgatgaatatggaggtacaaaggtcttcattccacacaagcacgcccttgagcttcaccatgagattgctcaggttattggcctaaacaagcttcagcagctctcagagcaaatgggtaactgttatattgagatcccaatgggcagacctattatctgcgctatgcgtaatcgcatggttcgtgatcatgcggagaaaggttggtcaaaagcaaagcttgcacgtaagtttggcatcacacaacgacgcattcgtggcatacttaataaagcagaaattttaaaagtacacgtcgaacgcaaccttgatctttttgaataa

SEQ ID NO: 62414 - DNA, 201 bp, Acinetobacter baumannii
atgactctatcacttgaagaacgcattaagttgtttggctctcctattcctcaaggtattaatttacgtgttgttgagagtggaacagtagtggaaggtagatcagtcaccgatacaaatgttgttcttaaagactctgatttattccttactcaaaagatctttgaaaagctaaaagaaagttgcaaagaaattctatag

SEQ ID NO: 62415 - DNA, 237 bp, Acinetobacter baumannii
atgaagcatgggaaatttgaggaagggaaagaggttttcttgaagggttgtaaacaaagaatgactctagtttcaatcgatcaaaaggctgaaactggcttatgtaagtggactgatcctaatgttccaaaaatccaccaagaagtctttaatctttctgaccttagagcagcaggatcaaatataaattgggctgaggtgaataaggagtttgaagcccagtcacgatttagatga

SEQ ID NO: 62416 - DNA, 765 bp, Acinetobacter baumannii
gtgaaagtgaagggcttatatccaaatcctgaatggaaaatgcgtacacgcaaatccaaatggatgaaaggtgaaacgatttcagtcagtattggtcaaggtgcatttaccgcaactcctttacaactcgccatggcaactgccattacggcgaaccatggctcgcatgtagttccacatgttttacgtgcaacccatggtgcaaaaccttttaccgtacgtaatgcacctgatggaaaaattaatttcaatggtacagatgaagattgggtaaaaatgcgagaagccatgattgatgtaattcaatcaggtactggtcgtggcatccgtacaccgctctatcaaattgccggaaaaacaggtacagcacaggttaaaagtattgctcaaggtaaacgttataacgaagctgcgcttagtgaacgccaacttgaccacggtctttttgttggctttgctccggctgataaaccagaaatcgctattgcagttatttgggaaaatggccgtcatggtggttcagcagcccaacttgctaaacccgtgtttgattactggttattaacccgtaagaaaaatccgattcgaccagccaaccatcaggttaatggtggcttgatgaccgctggaattaaaccgggtgaactcccaagtggtaatgaaagtgccagctctactcctgcgacctctgctccgacttccgcagcagcctctactccacaggcaacaccaactcgtcctgctacaaacgaggtcgatgaataa

SEQ ID NO: 62417 - DNA, 612 bp, Acinetobacter baumannii
atggtgcaagccaccctaaatttaatgtactatgctttgcaacatgatgagagtaatgagtattttcatttaattagtggcgatgatgtttttctaaccgatttattggcttggaatgattctcaaatttatatggaatgtaaagaatcgaaagaacatcgctatcgtatgcgatttaatgctccacatgcagatactcaatatcaaagaagtatttttggtaaattgctaacacaaggttataaattcttagataaactggtcccaacagcagaaaaattctattttgggagtcaatggttttctattcgccgtgagcaattacaaaagattttaaattcgatctctattgaagatatggatttttttagaaaaaagctttgcccagatgagcattttttccaatatttagtgattaaaaattcattgttggctaatatttctcctttagggaataaacggttcataatttttgacgcaaattaccaacgtgggtctagtccaatattcttgacgactaaacatcttttgcaagctaaatcagagcaatattggtttgcacgaaaagttgagcaaaaagtaatgtatgaattctacaatataggtaaataa

SEQ ID NO: 62418 - DNA, 252 bp, Acinetobacter baumannii
atggctacagcattagatgagtctgaccaaggcatctctatgtcatcagagtggtttattgatttgttagatgccattagtgcaaaacagtatttttccaaaacatgtcctggtcgcaaagttgagattcgctcaggcgttgtgtccactgaagatttaatggctttagatggccgtactagtgattgctatcaagctctaatcgatgctcacaaagagcgcttagcttcacttaaaaataaaggggaataa

SEQ ID NO: 62419 - DNA, 405 bp, Acinetobacter baumannii
atgaaccaaatcacagatattagtcaacaagtcggcgctaattcgcatctccgttctactaataaaaacaagcctgctgaaaaactactttctcagcttgatgcatggatggcagatgaaagcttatgccattacctttcaattcaaattactggtaaagaaatttacccatttggaattattaaccgtccgttctttcatcttgatcaagcagaaagaaagctagaaagcttaaaaagctcaaatccagaagtggattactacattactgcaggcgcttttgccacctctgctttaaattttgaagacgaagaggcgccaatgtgggagcgagtttggctcaattttcatgagtaccgactaataaatcttcaagttcagaaaatgtctcatgaagagttgtaa

SEQ ID NO: 62420 - DNA, 417 bp, Acinetobacter baumannii
atggatcggcaacctgacggttctggaaccctatcgcccgatcttcatcggcgcagcgctggtcgcgttgttctttgcctggcggcgcatctatcgcccggcgcaagcctgcaaaccgggggacgtgtgcgcgattccccaagtgcgggctacttacaagctcattttctggatcgtggccgcgctggtcctggtcgcgctcggatttccctacgtcatgctatttttctattaatcacaggagttcatcatgaaaaaactgtttgccgccctcgccctcgccctcgctgccgttgttgcccccgtgtgggccgccacccagaccgtcacgctgtccgtaccgggcatgacctgctccgcctgcccgatcaccgtcaagaaggcgatttccaaggtcgaaggcgtcagcaaaattga

SEQ ID NO: 62421 - DNA, 408 bp, Acinetobacter baumannii
atgggactgatgacacgcattgccgacaaggcgggcgcgcttggcagcgttgtttccgcgatgggatgcgctgcctgtttcccggctaccgccagcctgggcgcggccatcggcctaggctttctacaggaatacgaagggttgtttatctccaagctgctgccgctgttcgcagtcgtggctttgctggcgaatgcactgggctggctgagtcatcggcaatggcaccgcagcctgctcgggatggtcggcccagccatcgtgctggcggccatgctcttgttttttggcaattggtggacggcgaacctcctctatgtcggtctggccttgatggtcggggtgtcgatctgggatctgctctcaccggccaaccgccgctgcgaactaccacccaaacacggctaa

SEQ ID NO: 62422 - DNA, 1278 bp, Acinetobacter baumannii
atgctgccattcgcttcaggcattcctaatctggcaccaaacttttcgcaggtccaaggtactgctgcagtctctcaaggtggtactggggcgacaactgcactagatgctcgaaataatctcggagcagcagaaaaaggggtgaatagtgacattacagagctaaaaggattaaccaaggctattgcaatttctcaaggtggtaccggtgcaacaactccatccgatgctcgaactaacttagggcttggtagtgccgcgactagaaatgttggtactacagctggtaatttgatagaagttggcggttttggaattggtggagtaggccaaacttttgaaagaaaaatgattacgggagtaaacctagattctgtcgttagctatgtattgttatttccttattctgtcagaagctcacccaatcgaaacatgtttggtgagctagtgttttcgaggggtgattcaggctcagcaaatcaacattcgagaactttagtatcaattcagcaagcatatgatcgtgttacagctcggtttattagtattggtgtaacaactcatatttcaggtatggctgtagttaaatatcaaaatgtagactatgttgccattcgaagaacagcaagttcttcaacatcggcatttagatatttttccggtatttccaatattacatctgataattatttagttactgttcatacagatgacgttgttattgtcagtgagatacctgttgtaattgagcagctaagaacatctgcgaatacttctgtggattccaacggtttcataaaagcagcatcaccagtagttaagctatttaacgaccatatcgagctcaataatgatgcagaaaagcagcctattgaatttaagaaagtcgatgtaggcgactatttacttaaaggctctttaggctttgctcaagaaggttggtatatcgaagtacctaaagacgcaaacggcaacacaatcgttgcagtagtgtatgacaccctagaaaatggtgacatctcaattaaaacttacaagcgtaagtttgattttgaacttgctgctgttgtggcagatcacgagaacccaatggacattccagaaggccgctggattgatatccgtctgcatgaagaacctgaaccagaacctgaggttgaagaaactttgagtgaaacaccagtggatttccagcctactaacttatctcaggcagttgctgcagccatgaatggcgtggaaccgccagaaatctcagacacagacgaaacactttaa

SEQ ID NO: 62423 - DNA, 1674 bp, Acinetobacter baumannii
atgcgagctacatcaggagtctttaaaggacttaatccgacagtgactgtcgcttctaaaatattagttatctcttttgttttattctgtgtcttacaagcggaacaagcaggtaaagcctttgaaatggtttctggcattttacttcaaaatgttaaatggttttaccttggtttattaacagctattttaggttttttattttatttaatgataggtcgtttcgctcacatacggcttggaaaagataatgaaaaaccagagtttacctttactggctggatttctatgttgttttcaggtggcatgggggtcggactagtattttggtcggcagctgaacctatgtggcactacgctagcaacccttttacaccagggttaagtgatgagtccgctagtatggctatgcaactgacttttttccattggggtttgcatccatgggctatattttgtatcaccgctttagctcttgcttatttctcttatcgtaaaggtcttccatttagtttacgctcaattttatatccaattatcggaaaccgcatttacggacctattggccatacagttgatattttaacaattgttattacagcttttggggttgctcaatcccttagcatgagcgtacttcaaattaattctggacttaatcaagtttttggttttgagaatagtttaagcttacaatttatcatgctgactattttatgtggaatagcaactatttcagtagtcatgggtattaatagaggaatgcaaagactatctgagcttaatatgattttagctattctattgatagctattttacttattattggacctactcgttatttatttaataccttatttgaggctacaggtaactatacacaaaatcttataagcatgagcttatggagtgatgctcaaaaagattctggctggcaaaattggtggacagctttctactggccatggtggatgacatgggggccttttgtaggtatgtttattgctcgtatttctcgtggacgtaccattcgagaacttattgcaggcgtacttattgttcctacacttgtaacagctatatggatgtctgtagtaggaggatcagctctaaaagtagaacaagatgctcgtcatgcttatgaaaaacatgctgctgctttagttaaagctggtgagccagctccagaaccatttacaggtgggccaatagtaaaagcgactcaagctgataatactcgtgcgctttttacaatgtttgataatattgatagtggtacactcggtaaagctcttagtatcattacctgcttattactggcgacattccttattacatcaaccgattgtggtacacatgtattatgttatatggacgcagaaggagctacggaaacaccaattaaaattcggatcgtctggggctcacttattgccattctggctggcgtattactttatgctgggggtttaaaagccattcaatctgcgtctattattgctggctttcccatagctatcttcctggcaattatgagtgttactttatttaaaaatttacgtagagaacctcaagcatgtatgttattaccagaacatgcacggcctaagaatgattcattagaggaaagtccccctgaaaaaagttcacttcaagtaattattgaaaagtaa

SEQ ID NO: 62424 - DNA, 306 bp, Acinetobacter baumannii
atgaatagtcgagttagccagcaattaattacggttcagcaagtcgataatgttttgaaccctattactgaatcaaatggtatgccaaatttagcatataccagtaatgaatattttaattttgaacgtgacaatattttaagtaaaacttgggtatgtgttggttttgcttcagatttacctaaaaagagctatgtgaagcctgttaattttatgggcatgccattggtaatgatgcgcaacaaagaaggggaactacatgttttccctctgtacacgataaaaatagataactcattgaaataa

SEQ ID NO: 62425 - DNA, 552 bp, Acinetobacter baumannii
ttgaactattcaatatgcgatatagctgaatcaaatgaattaatccttgaagcagcaaagatgcttaagaaaagctttcttgatgctggaaatgaatcatggggagatattaaaaatgctattgaagaagttgaagaatgtatagaacatccaaatatatgcttgggaatatgtctggatgataaactgattggatggaccggattaaggccgatgtacgataagacctgggaacttcatcccatggttataaaaactgaatatcaaggcaagggttttgggaaagtactactaagagaactagagacgagagcgaagagtaggggaattatcggaatagctcttggaactgatgacgaatatcagaaaactagtttgtctatgattgatataaacgaacgaaatatcttcgatgaaatcgggaatataaagaacgttaataatcatccatatgagttttataagaaatgtggttatatgatcgttggaataatccctaatgctaatggaaaaagaaaaccagatatatggatgtggaaagatattagctag

SEQ ID NO: 62426 - DNA, 420 bp, Acinetobacter baumannii; identical to SEQ ID NO: 51541

SEQ ID NO: 62427 - DNA, 162 bp, Acinetobacter baumannii; identical to SEQ ID NO: 46255

SEQ ID NO: 62428 - DNA, 231 bp, Acinetobacter baumannii
atgagtgaatcaaaagttaagcacctggtgcttaaacgacatccaactttgaaaggttacttaattatttgtgatgaagaatctggattgccattagctggacaaaaagcagtacagatgaacagtaatgctagtgatggaccagccacaataacagtaactttcgaagcttatggtcgtaatggtgttcgcttagtaagcgatgaacctagggccaaagaggaaaaataa

SEQ ID NO: 62429 - DNA, 183 bp, Acinetobacter baumannii
atggtaaaggtaattaagccaggtaaattgcctgaggacactattcatgagattacttgtcacaattgcaaatctgacttggagtttaaagaaagtgaagcccgcatttttaaccaccgaaatgaaattaatttagttataacttgtcccgtttgtaagaaagaactcgggaaaacaaagtaa

SEQ ID NO: 62430 - DNA, 504 bp, Acinetobacter baumannii
atgacaaagcaaccgctaacacttcaagagctagtgcaaaatgttgaatatttcaacgtggaccaagcatcaccagaagcactacctaaacgcattatatgcatcttaaaacttcactctggagtgcaagtaaacggcgagtatttaattcctgaagactcaccagtaggtgattacaatccatttgcacttacagctgccattgaaaacttaaaacagcttgggtttgaaattattgaaccaccttcagagccacaagtgatcgaaggtgaggcggttgaggttggccagaatttagatgagccatcaaagtcaccaggtgtacagtcgattgaagcgatttcatcaccttatattcagacggttgaaaactcatatgatgctcatcaagcaaatcttcattctattgaagtattgacctcacttttaaaagctcctcggttaaataacaaagtacaggaatcaaccaataataagcttattgaactgattgagagcctttaa

SEQ ID NO: 62431 - DNA, 2319 bp, Acinetobacter baumannii
atgaaacctttggcagctttaccgttaatttttatagcaattcagcaagtgcaagctgaggagagaattgcaattttaaagcctcttgtttttaaggcaaatgcattaaaggaaaaaaattatgtggtggacaaagaaaaagtagaaagttccaatacaataggtgatgctcttaaaaatataacaggtatacaaagtacttcatttggacccaatgcaggtgcaccagttatacgtagtttgagtggaaatcgggttggagtaattgaaaatggagaatttattaatggaatgaatgcatttagtggaaatattaatataccattcgatccaatttttatagaaaaagtgatagtgaacaaaaatacagataatattcgttatggcggaaatgcaataggcgggagtgttcaaatagaatcgggtttaattcctaaaaaaattgaagaaaagccaaacaaattagatattgtctttcggaaaggatttaatgattttgatgtaaaggggttcaattttaacatcaatgatcaaaaaaactggtctacaaatataagatattcagaatatgaaatttcttcttataaaattccaggaaatagtaaagccaaattatgtgaagaccagattttttcaaattcaggtgggatcaatagtgcattagcagcttcctgtcaaaaagatagtagagtccaacatatttataacaagtcgtcacaaccatacatagataaatttatgactgagaatcctgattgggcagatggcgatttttctttttatacagataagcccacatctatatggggaggaaaaacatatataaatccaaaaaatccagagtacatacctaatactccgcaaaatacaataaaaaagatcaatacggatgttacaccaaattattttaaaaaattaggtaacagttatgctcagaatgagaatattgggtttggaacaacatacttttttgataaaggtttcattggattgagtgcagataagaaaaaaagtgaatatggtgtaccaggattttcattacaaaatcaatcttttgctgattcttatgaaacattaccggttggtgtgaaaatagatcaaaatcgttttgtattaaattccaattttatccaaccaatttcctctgcagaagagataagtttgaattttcaacagctttctaataaatctggagaatatgttggtactgcaaaagctaatgactataaaattgataatcaattaattgaattaataatgaaacagtcatcctttaagggattagatgggatacttggttttagccttaaaaataggaatatcgaaggaagtggtactcagcgctatttacctaatgtaagtactattagtaaagctatattcttacaagaagaattaaatatcaaacaatttactttaaatacgggctatcgttttgaaagaattgaacatgagcttcaagataatgattttaaactagcaagaaatgctagtaattcaagaatagaaaatagaaaatataatttaaaccaatattttatcggaggagaatataaggttaataattttataaatttaaaagttgattatggtatttcagaaagagcacctgaagtgaatgagctctattcaagtaatgttcactattctgttatggcacaagaagaaggcgaccagaatctcaaaccagaaaaatctaaaagtttagagttaggtatgtttttgaattggaataattgggtcatgcaacttgttgggtatcaaatggattttgaaaattatatgtatttatctcattcaggtgttgctgtgcaaaatcgattacctttaaaatactggaaacagacagacactgacgtcaaagggtttgaaattgatttaatttatgattttaatctagctcatattgggaatattaaactaggtggtttagctgattttgttaaaaataaggctgttaatcctacagatataaggttagctaatgatggagtttacctaccaaatatgcctactaatcgttatggcatgtttcttgagtggagaaatgattcttggaaaggtaaaatttcaagtatttactacgatgagccaagatatctaggtaagaatgtaatacaggaagttcctttatctggttacaacttacttgaatttaagatagataaaaaattaaagattaaaaatgcttcatttgatatatttttaaatggtacaaatctgctgaacgaagaggctagaccacaaaactctcctctaaaatatattgcccctctaccagggcgagcatttcaactggggataactatgcatatttag

SEQ ID NO: 62432 - DNA, 2538 bp, Acinetobacter baumannii; identical to SEQ ID NO: 46902

SEQ ID NO: 62433 - DNA, 651 bp, Acinetobacter baumannii; identical to SEQ ID NO: 59726

SEQ ID NO: 62434 - DNA, 1800 bp, Acinetobacter baumannii
gtggctagtgaagtcggacggattaacaataatagaaaggcaagactggaggatgttgataaagcaaactttagcccggaacgtactgcagaaataaaggcggaaataaatcgtcgtgcagataatgatattgctatagccaaacaagcccttagaacgaaattggaagactataaggagttccagaaaaccgaggaacagttactagaagagtcctttaaccgtaaaaagttcaatgcagctcatgaccttgaattaagtaagtttgagcagaagcaagctgttgaattgctggaacagcaaaaacagcaagagttagggttattaaaactagctcaggaacagcggttgtttcaagcccgtttatctctgctttctgaaacgcaagccatgcaggaacgttacagactcgaacgggaggaaattcttaagaataccaagctttctatagaagagcggcaaaagctaatcgcattatctaaagccaatcaggataaagagacacgcgataaagtgaataatgctgttcaaaactggggtggtatccaagcggatatgaatggtaccggagaatttttcagacaggatcaggaacgatttagccgtttaaatgctgcaaatgatttagcagatagtcaatttgctgctactgatcttgatgaaaaaaatggtttagatgttctaaatgcacacatggaagcaggactcatcaagcaacaggacttcgaaaaccggaaaacagctatcattcaagctgctcaggaccaacgcaatcagatcgctgccgaatatgctcagaatgctcaggatattgaagataagtatcaccaagatcgattgaatgctcaaattgctcttggtggccaaatgatgggttcactcacatcgatgtttggttcaatgtttggcgagcaatcaaaagcatacaagatcatgtttgctgctgataaagcttatgccattgcagctgcaggtatttctattcagcaaagtattgcaaaggcggctagtgttggttttccagcaaatatcccattaattgcaagtgctattgcacaaggtgcaagcatcattgcaaacatccgggcaattaaagatcaaggctttgctgacggtggttacactggatcaggtgggaaatatcagcctgctggtattgtccataaaggagaggtggtctggtcccaagaagatattaaacgctggggcggtgttggcttagtcgagaaaatgcgtaagagtgcaaaccctgaagcttttctcaataacaatgccttggcagatagtgtcatgcgccgtgcaatgatgagctctagtgcctttatagaaagccaaaagcaggctgacatctttaatcaaccggttcaagatactcagattatctataagggtaatagagacacacctaaattagcttcttctggaaatttagacttattccatgatggcaaggtctacttctcatccaatggtttagttcaggatcgttcaaatctggatgatgttcaggactttactttaggaagtacttcacgccctcaagctgagatgatgccttcaattgagccagcttcaccgacaatcaatttcaaaattgaagtgattaatcaggtgagtggggcgacagttgaagccgaacaactggacgagcaaacagtccggatcattgttaaagatgaactggataagcagcttccaagaacggtacctaagcttgtaagtgatcaaatcgcaaatccaaactcaaccattagtcggtctttgactgagaatacgacagcgagaagaaatcgtacttaa

SEQ ID NO: 62435 - DNA, 1014 bp, Acinetobacter baumannii; identical to SEQ ID NO: 49376

SEQ ID NO: 62436 - DNA, 1233 bp, Acinetobacter baumannii
atgagcacttcacgagtaaagctaactaagtcatttatcgatcaacttgaactcacaccggctatttatcgtgacagtgagattattggctttgctattcgtgtaaataactcttataaaacttacattgtggaaaagaaagtaaaagggaaatcaattcgttgtaaattaggggattacgaaaaaattactcttgaagacgcccgtatacttgcacagcagaagttaaaagagttaactgactcaaactctttaagcattaaaaataataaaatattaaaaaatagtttaaatgagaaaattgaccagccttatctcaaagaagctttccaagtatatataaatcaccacgagttaaaagaaaggacattagccgactataaagaagttatagaaaaatatttaatagacttaagtgaacttaaactgattgatattactgaacagatgattgaagaaaagtatattcagttatctcagtatagttatgcaaaagctaatttatctatgcgtgtacttagagcggtctatcatttttcaattaagtattatcaaaataaaaattgtgaagtaattataccaaggataaatccggttaatttgttaaagaagaaacagctctgggaagaaatcccacctcgaagaaactatatcgatgtggataatttaaccaagtgggtgcaagcaattattgaatataaaggtaggggacaggaaaatgaaacaaataaggattttttattaacacttatattaacagggctttttaggaatgagtgtgaatctttacattggaaaaatatagatttagaggaaggaactctgtcttttataaatccatacaataatgtgtactataaaatttatatgggaaactttctttggtatctgatgaaaaaacgaagaatacaaaataaaggagagtgggtttttccatctgtaaaatctgaatctggtcatattattaatatttcaaaatttagaaaaaaaattaatgaacaatgtaatctttcttttacttttcaagatctacgtagaacattttattttttgttaaataatttaactaataaatcattagttagcaaaagaacagatcagtatgaagaaaagctggacgttaagaatattgctcatgctcaggatatgcgtaatagaatgaataaggttgagcaaattattcttggtccctatcgagatgaacttattaaatctatcaatattaacctataa

SEQ ID NO: 62437 - DNA, 864 bp, Acinetobacter baumannii; identical to SEQ ID NO: 53541

SEQ ID NO: 62438 - DNA, 219 bp, Acinetobacter baumannii; identical to SEQ ID NO: 49282

SEQ ID NO: 62439 - DNA, 225 bp, Acinetobacter baumannii; identical to SEQ ID NO: 46246

SEQ ID NO: 62440 - DNA, 423 bp, Acinetobacter baumannii; identical to SEQ ID NO: 46071

SEQ ID NO: 62441 - DNA, 408 bp, Acinetobacter baumannii; identical to SEQ ID NO: 50978

SEQ ID NO: 62442 - DNA, 375 bp, Acinetobacter baumannii
atgaatgcttctttaattctgtctcataaaaatattgatcatatttataatttggtgcaacaaatacttgattctaatttttatattcacattaatttaaaggttaattttgttaaaataaaaaaagctacttctaatataggaaatattttctgtgtggaaaatcgggttgatagtaaatgggctagatatagtatagtgaaagatattcttaatttaatgaactatattttacagcaagatactcggaataaatattttcatttaattaatagcgatgatgttatttcaatcaacgaacaggtttgggacgactctacaatatatatggaatatgtagggacaggattatttctgtctcttatacacatctga

SEQ ID NO: 62443 - DNA, 159 bp, Acinetobacter baumannii; identical to SEQ ID NO: 60274

SEQ ID NO: 62444 - DNA, 393 bp, Acinetobacter baumannii
atgtatttgatcgaagccggccaaatgcgagcagctcaagataatttcttcggaacctataacgtgatggtggctaaagctcaattgaaaggtcgtcagcaagagttttacgctccaccgctacaactagaacacaaagaacctaaacacgttcctgtgagcaatgacgaggctcaaaagcatctcaaatcattgatggaaagattaaaaatcaatggtcgtaaacctgcaccagttcaaaaacttgaggcaaaagaaaaagagcctgagcttgcaaaagaattaggtccagatcctttcgacaatccgcacgaatacgctgagatgtgccgccgtgaaggtatgccaatacctagaaatattcttcagctaattgatggggcgaatgcatga

SEQ ID NO: 62445 - DNA, 249 bp, Acinetobacter baumannii
gtgcataagcctgtttcaaatgacgaagcgcaaaagcatctccaatcattgatggaacgtttaaaaatcaatggtcgtaaacctgtaccagtacaaaagcttaaggctaaggaaaaagagccagaactcaaacaagagctaggtccagatccttttgacaatccgcacgaatacgcagagatgtgccgccgtgaaggtatgccaattcctagaaatattcttaagttaattgatggggcgaatatatga

SEQ ID NO: 62446 - DNA, 348 bp, Acinetobacter baumannii
atgcttaatatgggtaaaaaacacagcgtgactaccgctccaactgtacaagcacatgaccgtgagaaacagcgttatgtacagcagggtagtgcatttttaaaagagcttggcattaccgatgagaaagctcaaatcattccaagcatggctcgtaaatggaaacagattaataaatttatcgaaatttttgcgagcgcatatgagcagattgatgctgagcaaaaagagttaaatattgttgattttggttcaggaaaaggttatttaacttttgctttgtatgattatttacaagaacaacaaaaggttccgctcattacgggtgtaagctgcgccgtaacttag

SEQ ID NO: 62447 - DNA, 276 bp, Acinetobacter baumannii
gtgctgtgtcctggttggcctgacgttcggcaacctccagaaacgggtatagggagggaggatgagctactccgttataaatcaagatggggtgcatctgtgcgacatcccattgaacgtctaccaggtgatacgtcgccaatccttgtctgcgttgtggctttactgggcgcagagcttgaatttggtgaaggtgctcattgcttgcgtcggaaagatgatctttgtgatgccggtaatgtggttctgggtgctggtggtgtgccgcttggttga

SEQ ID NO: 62448 - DNA, 393 bp, Acinetobacter baumannii
atggcacttatccttcgtcgtggcttacgcttgcacgatactgagactcggcttgcaactaccgtgcaacgttcccatatatcgagcctcagcccacgaagcatctggggtcacgttcgctctatccgtgcagctcccccatatgcggaggcattccgtttccggtctttccttgtgggcgtaccttgtgcgctttcttctggcataaaaaaaggcgctgacgcgcctatctttcttttccctggggtattgggagcttctggtggctacctccccttacgctggggttcatcaatgatgtcgtggtcgatcatgccttgcttgatggcccgtagctctgtctgctgcttacgcttgttggacgccatcacctgcttcacgaagttctcatga

SEQ ID NO: 62449 - DNA, 564 bp, Acinetobacter baumannii
atgaatatatcacttatctttgccaatgaattaattaccagagcattcggtaatcaaggcaaattaccttggcaattcattaaagaagatatgcagttcttccagaagactacagaaaattctgtagtcgttatgggattaaatacatggagatctctacctaagatgaagaagcttggtagagacttcattgtcatatcttcaactatcacagagcacgaagtgctcaacaataatatccaaatattcaaatcatttgagagcttcttagaagcattcagagacacaaccaaaccaatcaatgtcattggtggtgttggtttattatctgaagcgatagaacatgctagcactgtttacatgagttctattcatatggttaaacctgttcatgctgatgtgtatgtaccggtagaactaatgaataaactctatagtgatttcaaatatccagaaaatattctatgggtaggtgatccaatagattctgtgtatagcttgtctattgataagtttgttagaccagcttcgctggttggggtgccaaatgatattaatacgtga

SEQ ID NO: 62450 - DNA, 3177 bp, Acinetobacter baumannii
atgttgaacagtattcatcaagttttagatagtttgggtattagcccgcagaaacgtgctattcatgttcaatttacgtctccgatattgaatgaccaagtatttctgcaaagaattgatggtgtacatgcactcaacgatggtttaaaagcagaacttttatgcctatcgacaaatgcaacgattcaacttaaatcttttattggcgttcaggccgctgtagatattgtgacggagcgaggtgagttaactcgcgttacaggcattattactcatgctcaacagggccaatcagatggaagtctaactttatataagctgaccttagaagatccaaccgcattatggaaatatcgccgtaattcacgtgtatttatgaataaaagcgtggttgagatatgggaaatattatttaaagaatggcaaactaaaaatccgctatttgctgcaagtttaagtttagatttaagcggtctaacacaaacttatgatgtgcgtccttttgtgatgcaacataacgaaagtgactggaatttccttacacgcctacttcgtagtgaaaatatcagttggctcattgatgaagctcagcatattgttccaagtacagatacatctattcaagctcagaaactcaggttaattgatgccaatagtcaatatcagcctttagaccgtaaaacgattcgttaccaccgtagtagtgcggtcgaacaatatgacagtatgactcgcttaactgctgagcgctcccttcaacccaatgttatgcatatacaacgttggcaagcagaaatattagatcaagaagaagggattggaagtgttcaaagtaagcatcagcatagtgaacattatgacaatgctacacttggcttggagcaagcttggaactatgcgcctgcatggattggtgacttaaagggtgaggatggggttactaaatctggaaatcaacaagttgaacgattaaaccagaacctccacaattactacgaggcacaggcgaaacgctttattgcacaaacaacagttcgtgatacctatgtgggctactatttcgaattaaatgaacatccagaaatagatcagcatgaaagcacagatagaagctttttgattgtttctaaaaatttctttaatcagaataatttacctaaagatttaaatgatcaaatcaatggtttattggcgcaaagtaactgggcaattcaaaaccccgagaacagtgatgaacgccaagcgaatcaactgattttacaacgtcgtcatattccaacaacaccagcttataacccgcaaattcatagtccagtcactcatccacaacgcgcaaaagtggtgggtcctgaaggcgaagaaatctatgtagatgagtgggggcgtattaaagtccgcttcctatttacgcgtagtgatgaccatagccatgatggtggagcaggaaccaacaacaatgacaccgattcagcttggattgacgttctaacgccgtgggctggagaaggttatggtgcgcggtttttaccgcgtatcggtgagatcgtcgttattgacttctttaatggcgatatcgaccgaccatttgtaatgggccgaattcatgaggcccagcgccatccaaccaaatttgataacaaaggtaagcttcctgatactaaaaagctcagtggtatccgttctaaagaagtgtcaggtggtgggtttgggcaactcagatttgatgatacaccgggacaaattagtacccagctacaaagcagtcatggtgcaagccagttaaatctggggaaattgagccatcctaaagataaagcggaaagtgaagaccgcggagaaggttttgaactgcgcacggaccaatggggagctttgcgcgctgggcaaggcttattggtatccacccataaacaggataacgctaaaggagaccacctcgatgccaaagttgcgaaaaagcaacttgagggtagtcaaactaacagtaaagcactgagtgacattgctaaaaaccagaaaaccgatgaaatagaatcgattgaacagttaaaagattttgcctcacaaattcagcagcaaatcgctaaatttgaaaaagctttacttcttttgagttcaccggatggtatagctctaagtagttcagaagatattcacatctcggctgatgcacaaatcaatcagattgctggagacagcattaatataagtactcaaaagaatgtgattgcccatgcccaaaataggctgagcctttttgctgctcagagcgggctaaaagctgttgctgcacaaggtaaggtagaaatacaagcccagtcagatgctttagatgtacttgctaataaaggtatcaccatttcttcgacagaagactgtattgaaattagtagtcctaaagaaattgtaattactggtgcaagttcacaaattaccttaaatggttcgggaatctttccaaaaactggcgggaaatttcaggtcaatgctggacagcatgtgttccaaggcggcgcatcggcaagtgttcaatctagtttgccaccgccaccaaaacgtgtacaaggtgtacttgagttatttcatgaatatgcacatggtgagtttgtaaaaggtggaagttatagggttgtcgataacttcggaaaagaggttactggcaagctggatgataagggatttgcaaaagtttctggcttagcaacaggtgcagtaaaagtcttcttcgaatcagatcaccgtgatccttgggatactgcaagtgactttaaacgtccagttgagtggccaaataagaatgatgcggatagtgagcaatcagattcattaattgcacaaatgagtaaaacagcccagtccaaacttggtgaattatctaaacaattaaccaatcctacgaatattatgaaaaatattcaaactgcacaaagcataaaatctgaaggagcaaaggctttaatgccaatgttaaaaactcaggcgcagggattagtaactgatcaagtgaagagctttttaccaatttcagaagcaggtcaaaaaatagggaacagcattgaacttacatctattcaaaaaatgaatgatttcaataaatcaggctctattgatggcaatagtttggtcaataatacgcttcatcaatatttgcaaagcccttttaaaaagaattcatag

SEQ ID NO: 62451 - DNA, 609 bp, Acinetobacter baumannii
ttgagttatgttcatatcttagataatacaaatgaacaaaatacactttatttaaaatcagtttcagctgatgaaattattttaaaacagactagtgcggatagagttattacatttaatgattcaactgccaccatacattttggtgaggggcaattatcttctattgtatttgatgatggaactgtttgggataaagctcaaattgaacaacatattgccgaacctgtatttggcacaactggtaacgatgtaatcgagacaaacataccaaatcagagttactcttatattctaggagatggtgcagatactgtagtttttaatattctcgataatacagataatttaggtggaaatgttaagactgaatggacagattttaatcttgtagagaatgataaaattgatttttctcaactgcttataaatgacagtggagatcttcaagattatattactgtaaaagatactgaggcgggactaattatttcagttgatagagatggctctagtcaatctacgtatcattcgcaagaattaattttgcttactggtaagcactatacgttagaggatttaatggcttcaaatgcatttattcattaa

SEQ ID NO: 62452 - DNA, 750 bp, Acinetobacter baumannii
atggcgggtcattctaaatgggccaatattaagcatcgtaaagcgaaacaagatgccagtcgcggtaaagtttttactaaatatattcgtgaaattgtcactgctgcaaaacttggtggtgcagatcctgccagtaaccctcgccttcgtgctgttgtcgaaaaagcgctttctgtcaacatgacacgagataccattaaccgtgcaattcaacgcggtgtgggtggtgaagataatgatgatttaaaagaagtaacctacgaaggttatggtgtaggtggtgttgctgttcttgttgaaacaatgacagacaacctgaaccgtacagttccagatgttcgccattgtttcagcaaaactaatggtaacttaggtaccgcaggttctgttgcttacctatttaccaaacgtggtgagattacttttgacgatgtttctttagaagataagatcatggacgttgctttagaagctggtgcagaagatattgaagtttcagaagatgaaattttagtaatcacttctccagagacttttggtgaggttcaagatgctctagcagctgctggtttaaaatcagacaatgctgaagtagtgatgagcccttctactaaagcagaaatcactgatattgatcaagctaaacaagtaatgaaactcattgatatgcttgaagatctagacgatgtacaaaacgtttatacaaacgttgagtttagtgatgaagttttagcgcaacttgatgcctaa

SEQ ID NO: 62453 - DNA, 378 bp, Acinetobacter baumannii
atgggtgatttttcagctgcatctgagcttgagcgtacaaaattaaaagataaaaaattcattaatgtcgatttagataatattgatgaagtaatggaatctctgtctccaagagctgcttttcaagtagacaatacgttgacagaagaaggcggtaaaatggctgttgatttaacatttaaatcaatggaagattttcgcccggaaaatgttgtacagcaagttgatccattaaagaaattggttgaggcgcgtgagcgtttaaccgatttaagaaacaaaatttcaaacagtgagcgtttagaagatctgcttgatgaggttcttaaaaatactgatcaaatccgtaaattaagtgcggaggccgatcatgaataa

SEQ ID NO: 62454 - DNA, 963 bp, Acinetobacter baumannii
atgatctcgaccacagttaaaaaatcactaaacaaaattaaattttaccgtgaaatcgagttaccggattttgccagtaaaaaatccatcccaatccgtcatttaaatatcggatttgaaggtaaagagattgatgttgaattctatatgaacaatcaatttgccacgatgttttttgctacgctttcagtatttctgacttatggtgaagatctggtgattgaaactgctcgtcatcaccgtgaatttattcaagatccagttttaaaacagcgtgttacttcattgattggacaagaggcgattcattctaagttacacaatgaatataacgatgcgcttaaagatgttgaataccctgtcgatttataccgtttcttgggcgaaaacttctttaaatatgtgtttttgaaattcccgcaaccgcttaaattatcgatgatggctggtattgagcattttactgcggtacttgccgaatacatgatgaagcacgaaaagaatttctactattcagatgatgccaaaagccgtgctttatggatgtggcatatgcttgaagaatctgagcataaagatattgcctatgatgtatatcaattactcaatggtagctacccactacgagcttctggcttctttttagcattcttcactattttaggtctaatccctgcgactaccttgtttattccggttttaagaaaaccgcaggaaatgttgactagaaaattctggaaagacgcgcgccgtggcgtcaacttaatttttagtccaaaagatggcgtatttggtagcaccattggtcagatttttgattacttacgtccagacttccacccaaatgaccatgacacgaccaaatatctggagtactacaaaaagaaattacttaacgagggcggtgcaattgcgccttactttgtgaaggaatttacaccaccagttcgtgcagtttcataa

SEQ ID NO: 62455 - DNA, 960 bp, Acinetobacter baumannii
atgatctcgaccacagttaaaaaatcactaaacaaaattaaattttaccgtgaaatcgagttaccggattttgccagtaaaaaatccatcccaatccgtcatttaaatatcggatttgaaggtaaagagattgatgttgaattctatatgaacaatcaatttgccacgatgttttttgctacgctttcagtatttctgacttatggtgaagatctggtgattgaaactgctcgtcatcaccgtgaatttattcaagatccagttttaaaacagcgtgttacttcattgattggacaagaggcgattcattctaagttacacaatgaatataacgatgcgcttaaagatgttgaataccctgtcgatttataccgtttcttgggcgaaaacttctttaaatatgtgtttttgaaattcccgcaaccgcttaaattatcgatgatggctggtattgagcattttactgcggtacttgccgaatacatgatgaagcacgaaaagaatttctactattcagatgatgccaaaagccgtgctttatggatgtggcatatgcttgaagaatctgagcataaagatattgcctatgatgtatatcaattactcaatggtagctacccactacgagcttctggcttctttttagcattcttcactattttaggtctaatccctgcgactaccttgtttattccggttttaagaaaaccgcaggaaatgttgactagaaaattctggaaagacgcgcgccgtggtgtaggacttatttttggtccaaaagatggtgtattcggtagcaccattggccagattttcgattatttacgtcctgacttccatccaaatgaccatgacacgaccgaatatctggagtactacaaagacaaattactcaaagaaggcggcgcgattgcaccttactttgtgaaggaatttaccccacctgtacgcttgtcttaa

SEQ ID NO: 62456 - DNA, 927 bp, Acinetobacter baumannii; identical to SEQ ID NO: 46217

SEQ ID NO: 62457 - DNA, 276 bp, Acinetobacter baumannii
atgagttatctatttttatcgtgtacagagatctctctccctatcaccagtattaccagttacgccaccattattgggtgtgtcagtgcgggttctggcgtggcgttagtgcctaagagtatttatgagcaatataaaaatttagcgcatattcaaagttataaattcgaataccttgcctttatgcaaaatcattttttctggcataaaaatgtgagtaaccataaagcgagagacatgtttatagaattgattaagtctgagttttgtttataa

SEQ ID NO: 62458 - DNA, 1326 bp, Acinetobacter baumannii; identical to SEQ ID NO: 50187

SEQ ID NO: 62459 - DNA, 375 bp, Acinetobacter baumannii; identical to SEQ ID NO: 42637

SEQ ID NO: 62460 - DNA, 471 bp, Acinetobacter baumannii; identical to SEQ ID NO: 42638

SEQ ID NO: 62461 - DNA, 666 bp, Acinetobacter baumannii; identical to SEQ ID NO: 61575

SEQ ID NO: 62462 - DNA, 837 bp, Acinetobacter baumannii; identical to SEQ ID NO: 22759

SEQ ID NO: 62463 - DNA, 225 bp, Acinetobacter baumannii; identical to SEQ ID NO: 13704

SEQ ID NO: 62464 - DNA, 1494 bp, Acinetobacter baumannii; identical to SEQ ID NO: 13713

SEQ ID NO: 62465 - DNA, 405 bp, Acinetobacter baumannii; identical to SEQ ID NO: 45626

SEQ ID NO: 62466 - DNA, 624 bp, Acinetobacter baumannii; identical to SEQ ID NO: 10352

SEQ ID NO: 62467 - DNA, 1218 bp, Acinetobacter baumannii; identical to SEQ ID NO: 45628

SEQ ID NO: 62468 - DNA, 414 bp, Acinetobacter baumannii
atgaatacgctcaagaacctcagcaatgaattgagtctgaatatcgtaggtgttggtactcgtgaggcaatcaccatactgcatactgatccgcaatatgccagtcgctttgatgtggtgaatttacctaaatgggaactcaatcaagattttttaagattattagtcagctatgttcgactattgccgttaaaaaaacagtctaatcttgcatccaaagagattgctacgttgatttttgaagtgtcaggtggaaatttaggggatttaaatcgattactggtggagtgtgccaaagaagccattttacaaggtgatgaagaaattacctatgacatcgtacataagtttaaatggcttaaacctacggagggtttaagaaatattagaaatataaatctcagcctgagttaa

SEQ ID NO: 62469 - DNA, 951 bp, Acinetobacter baumannii; identical to SEQ ID NO: 51155

SEQ ID NO: 62470 - DNA, 1989 bp, Acinetobacter baumannii; identical to SEQ ID NO: 46156

SEQ ID NO: 62471 - DNA, 1527 bp, Acinetobacter baumannii
atggccttaagtgcttggggctttactgatttaccttcttatacagataaatatgatcctaatgagaaagatatagtgataaagacaaataattggttgaatgatgaggcagcagaggaaaaaactcagcaaggtcttactgcctttgtagctcttgatgacgcattcatgagtattgcatcacggatttatttaattagaaattcaaaggaaacgattgatctacaatactacatttggaccaatgattttgtggggaaccttattttacatgagctgctcaaggcagcggatcgtggcatcaaagttcgcttattaattgatgatcaaaacggtataaagcttgatggcatattaagaagccttttacagcataccaactttgaaattagattatttaatccttataaatttcgttacttacgtatcttcgattatctcttccgatttaaaaaagtaaatcatcgtatgcacaataagctcattattgcagatgcatcgattgcagtaacaggcggtagaaatattagtagtgaatattttgaagcaagtagtaagtttcaatttacagatatggatatcttattttacgggcatgcagtgcgacatgcccaagctgtatttgctgatttttggcaaagtaccctaagtgtaaatgcaactgacattatcggaacttgtgctgagcaccatttaaaagctttaagagagcactatgaacaactccatcacgaagaccatagcctcactgaagataagctttacgatgcgcagagttatttaaaagagcttttagagcataaccctattcaatggtctaaggcccattttgttgctgactctccgaagaaaatactgggcactgcaactgaacatgaaatgctttatggccaagtcttgtctattatgggtaaacctaagcaacacttagaattagcttcagcttattttgtacctacccaacaaggtacttattacttaaagcaactacgagttgaaggtataaaagtccgcgctttaacaaattcttttgctgcaaacgatgttgcgatcgtacatgccttttatagccaataccgtgtagaaatgcttaagaatggtattgaactgtatgagtttaaacctgttctggaacgacgacgtagaacgtggtacgaaatcgtaacaggcagcgttataccagcaaaaggaaaaaataagtcgagcttgcatgccaagttttttgatgtagatggcaaagtctttatcggatcatttaactttgacccccgctctacctatttaaacaccgaagtaggtttggtgattgagtccagtcaattacaaactcagatttctgtcatgttagatcaacatttacctcaagtagcatatcaacttaagctaaatagccaaggccaaattacttggctagattaccaagccaacggacaagtcattgaatatgataaagacccgggaaccagccgttttcagagaacaatgattaaagctgtctcttatttgccaattgagtggatgatgtaa

SEQ ID NO: 62472 - DNA, 171 bp, Acinetobacter baumannii
atggaaaaatatgaacatcttgcagagcatgtacttgaaatcatgcaattaagcgatagtgaacggattgagacattatttactgatagatggattggctataagaaagcccactctattgtaaacaagacatttttatcttttatattcaatggcttattttcctgctaa

SEQ ID NO: 62473 - DNA, 951 bp, Acinetobacter baumannii
atggactcggtgcatacagataatggccccgattttagaaccaatcacatcagtaaagcttgtctaaagtatgggattcattgggaataccgaccaattggtggggcaagatttggcggtcatatcgagcgtatgcttggtatcgtcaatcttgaaatgcatgtcttggatggtacaactttttcaaatgtacagcagcgtgggacttatgattccgctaaacaagcctgtatgacattaaaagagcttgaatactatatcgtgtattggattactaaagtttatcaccagaagaaacattccgctttaggaacatccccaatcgttaaatgggaagaaggtgtttgggggacgaagacgacagcaggtacaggtttgaaagaacgtgtatcagatgaagataccttgtttattgattttctacctgaatttgaagcgactattcagcgtacaggggtgcaaaaagataacttattctattttgccgactgtttaagacaatgggttaattctattgatccagaggacaataatcgaaagcgcaaaagaaaattcttgtttaaacgtgatccgagggatatttcacagatttggttttatgagccatattctaatacctattttaaagtacctaccgcaaagcgagagataccaccgattagcttatttgaatataagcaggttcagaactatctcaaaagtgaacgtcaggatgttcagaatcaggatgagatttacaaggcgattttgcatctacgtgatcaacttaatcaggctagaagcttgactcgaaagcaacgtcgctcaaaccaaagaaaaaaggaaaatgcaaaagccattactcagctttccgaacagaatcagtctaaaaaggctgtagtttctgaaagtcttcagacaagtgatgatttgtggagtactcctttaactgcatttgacgatttaaggtga

SEQ ID NO: 62474 - DNA, 171 bp, Acinetobacter baumannii; identical to SEQ ID NO: 51532

SEQ ID NO: 62475 - DNA, 420 bp, Acinetobacter baumannii; identical to SEQ ID NO: 60258

SEQ ID NO: 62476 - DNA, 510 bp, Acinetobacter baumannii
atgaccgttatgttggtaaaacctcatttaaagtttaaagaaagctataacaactatattaatgaattagcagatgaagatcgccaccctttgacaacagagtttgatcatacagattttgaaagttttttgaataaactaagagattatgaaaaaggggaattcctagaagaagggcatgttcccaacattacatattggttagtagaaggtaatgaaattattggcgcgtctaacttgcgacttaaactcaatgagcagattgaatattgtggtgggcatattggtttaggtattcgtccctctaaacgtggacagaattttggctcgaaattgttagagcttacaattcaggaggcatggaaactaggcctaacggagttacatatacattgttataaatctaatttagcttctgcaaaaaccattcaggcaaataatggtcgtcttcattccgaaattactctcaaccaagtagttcaaagatatgtggtgtataaaactctataa

SEQ ID NO: 62477 - DNA, 162 bp, Acinetobacter baumannii; identical to SEQ ID NO: 46255

SEQ ID NO: 62478 - DNA, 783 bp, Acinetobacter baumannii
atgtctaattttatttctaatgcattcatgatgccaaatgacctgatcgacaaaggttatatggctcttatgaaaggtccagcattgccttgttacatattcattgtgcgtaaaacacgcggctggaataaatctgacgatagcatcagtgtttctcaactggtgaagggtaccggttacaacaaggattcagttttaaagggctgtgaaaaattagttcaaatgggcgttattgagcgtaaatccttcgcaaatcagccagcaaaatacgttttgactgacagtatttttgcagtcgatattttagatagcgaaaatatcgcaggcgaaaatatagatgggggagtcgatattttagatagcgtgctatctaaagattcgacccacaataacaactcaaaaacaactaatacaaaaacaaatgtaattagtgattcaaaggctaaattttcatttgttgaagcacttaaaaaacttggtgcaaatgatcaattaattaaagactggttagctgtacgcaagactaagaaagcatctaacacccaaacagcttttgaaacttttgaagaacaactttcaaaatcaggattcgatgtgaaccttatccttaaaatctgtattgatcatgactggaaagggtttcgagctacttggttacaaaacattgatcttcacgcttatcaaaatcaaatcttagagaaccaaactcaacagatcatccctgaacaaccagcaacacaattcaaaggtgttgctaagaaatttaaggggatggaccaatga

SEQ ID NO: 62479 - DNA, 324 bp, Acinetobacter baumannii
atgaacaacattcacttaaccaaatcacaaattaatgaaatggcagtagctgcgtgtgagttcaatccgcaagtttactttttgttgtatgactttgaagttgtctatgttggctcatctgagaatgttcatcttcgaataaaaaatcatcttaactctgacaagctttttgacagctatgcagttattgattgctgtccagatcatgtactggctgttgagtatttttatattcagaaatttaagccgaaatacaataagaagcttaagccacggaagagtgagatttatcaaccttcaattgtggagttggactatgtctaa

SEQ ID NO: 62480 - DNA, 513 bp, Acinetobacter baumannii
atggaagctttaactatatcaattaaaccacctatcactgaatggtgtagagcatgtgattactcggcgagtaaatcattttattcacttttagctaagtgcccaaactgcggctctagccaaatgacatcaatgactaagcttgagaaggttttctcagtttcagtttctaagggtgcattcgctatcacctttggcggtcaattgtgtgaagaacagtatcaatacacattctacaactctcctcttgggaaagtcgttcgtgttatcgctgatgaagactatgagcgagattgcccatttgaaactttggaagatctttacttggcaaaggatattcgatccagcgatcttgagagtttaaaaatgcttcatgcatcggtttatgcagatgaagaatggcgacctgagcaagaaaaatctattgccaataaccgccgcatagagcttgaaaaagaattgtatcgcttgaatcaagaatttggcttttacaaggagccctctcatggataa

SEQ ID NO: 62481 - DNA, 780 bp, Acinetobacter baumannii
atggataactacaaaatcaaagttaatgatgaagctaagagcaaagaggctcaggagttgttttttgagttgggttatagctggcaaggttgcggaaaatactataaccgcattggaaactatgcatttattacagcctacccagatgaaatgttattaagaatgggctggggtggagatactgataaagaactcaccctccctcagctacgcgaccttgttgtgttgaagcggaatgatattaatgacgccaattgggaaaccgaaggtggtgatcagatatttaatgactcaaataacaagtcttatatctatcgcacagatggctgggacgaattgcaacgtcatgaaatgcgccaagcaatgtgggaaaagccaaaagcaatcgctcaaccccaagacccagcattgattagcggtgctgaggcaaagcttgcgtgggctaatggagttgatattcaaatcaagaatgtaaattgtgtcaactggtatgacttagatgagagcaaatacaatcttgatatttttgataatgttcgtgttgatttccgcctcaaaccccaaaccatcaagcttgaacttgagctgccgaagccttttgagccagaagaagattgtcacgtttacatcttagatgacggaaaaacagatggctatcgtcgttattcctacgaagttcatggtgataaaggaaatacatttattggtatttggcgtaccgaagaagagatcaagcaagtcgtagagcaactcagaaagatacgaggtactaactcatga

SEQ ID NO: 62482 - DNA, 303 bp, Acinetobacter baumannii
atgcgtaattataaaatagatattcttcgaggaatgtctatccttttggttcttttacaccattttaatattccttataaacttaaagatacatggttaggttttgattttttaggtgaagcatttagcacggtcatcgcaagaaatggaaattatggcgtcactatgttttttgtgatttcgggttttttaattacccatcacactttaaaacgagaaaaacaattttccgcaattaacctcaagcattttttatccgacgggcagcgcgtattttgccgtgtttggtattactcattttag

SEQ ID NO: 62483 - DNA, 198 bp, Acinetobacter baumannii
atgagcaaagaaaacctttatttctgcttaaatatgttctctagttgcggtgcattatcattttctattttcactttaggtagacatacttatcttgggttcttttttggcgccctatctctggtattttttttagtatttattgttgcattaattaacaaactttcatcttgtcaatgtaagaaagaacagcaataa

SEQ ID NO: 62484 - DNA, 270 bp, Acinetobacter baumannii
atgtttggagaattagtaaaaaagattaagacttggtacaaaggagatccaggtctaattgacagcaaccctgctactggcattgatacaattataagggagccttatagaagtcctgttgctaggtttttgagttattttattgagccattcattgccctattgatactaattaagcaagaatggaagtactttttaactacttttttaacattgattacagtgcttattgctgttctttcttacattgacaagatgaaagtttgttaa

SEQ ID NO: 62485 - DNA, 783 bp, Acinetobacter baumannii
atgaaccattcaatattagcagaaaaaactgaaaaaccaaagcgaaagccaattggtgacaagttgcgttttgaagtttttaaacgtgatcaatttaaatgtcagtactgtggcaagtctgctccagacgtaattttacatgttgatcacatcaatccagtaagtaagggaggagataacgacattctcaacctaattacttcatgtgtggattgtaatttgggcaagagtgatcgactgctatctgacaacacagttcttgataagcaaagaaaaatgcttgaggagctagatgagcgaagacgacaacttcagatgatgctcaattggcgagacgaattaaagggatttgagagtgaagtcgctcaaagtgttgctgattattttgaacaatcaattcagaaccaaactcaagtaaatgagactggtctaaaaaacattaacaaatggcttaagagatttgaagtaaatgaactacttcaagctattgatgaccttaatccgatttatacaaaagatcaaaacttagatgctggcgcaatgttcgcaaatattccaaaggtcgcaaactttaatagaaagggtgaccttgagaaatcagcctgttacatccgagggattcttaaaaatcgcatttcatatgttgattaccaaaagtcattagcttggcttgtagaagctctcgagtgtggtgttgatgaggaagaattaaaggatctagcgaagtcagtaaaaaactggactcaattccgtacagcaatggaggaaatattaaatggctag

SEQ ID NO: 62486 - DNA, 867 bp, Acinetobacter baumannii
atggctagagctagaaacattaaaccttcatttttcactaatgatgaattgggcgatgttaatccgttagcgcgcttattgttcattggaatgtggacaattgctgattttaagggctgttttgaatacaaacctaaacgtttgaaggttcagctattgccttatgacgactgtgatattgaagagctcgtgactgatctagaaaaatctggatttatctcgaagtataccgttcaaggacgtcaatacatcaaggcattgaattttactaagcaccaaaaccctcataagaatgagcgtgagagtggaagtgaaattcctgatattgaccaagcagaccaagagttatctaaaaataactttaatattagtaacttaccaaatatcgagaataatctggagcaagacggaactgatcgtgctgattcccttaacctgattcctgattcccttaacctgattcctgaagttatttccgacgttgtcgaaaattcggcttcgcctaaacgcaaaccaaaaacccaaaaaacaactgtacctgaaaattttgaaatcagtgaacaagttcgtatttgggcaacttctaaaaacttcggtgatcttgaacaacaccttgaatacttcgtttcaaaagcagcagccaatggatacaagtatgcagattgggatgcagcattcaaaactgccattcgtgatgactgggcgaaattaagaacaccacgttatccaaaccaaggttatcagtcagctgctcaacagacagctaatgaacaggctaaatgggacaacttcttaaatggtgactcacgctttgtggatgtcacaccaaaaaagtcgttaatgattgaggaggtgggtcatgcgtga

SEQ ID NO: 62487 - DNA, 258 bp, Acinetobacter baumannii
atgaaatcaataagtaaaaccaagaaacttaactttgatgatcaacttagcttgctcatgttcggttgtcatgcaactgcgcctttcaatgtcaaagacgtgaaggaatcagtgtttgatttcaatcgaggaaccatctacagcaatcttcaaaaatttgttgaatggaaatatttcgaacgtgttgggaaaaatcattacaaggcaactcaatacgcaaaagacatcctgaatgttaaaggggagctgaaagcatga

SEQ ID NO: 62488 - DNA, 393 bp, Acinetobacter baumannii
atgtttaatacatctaaggtggcaagaccgagcaagtccatcttgatcaatccccaatcctcaactacacgcttgtcccaattgacgactggtgactttcctctagtctcgagcacggctcgattaacgataggttcgcctgcaacaacaatacctgccgcatgttggccaaacgatttcattgtgcctgcaagcttagttgcatgcttccagataacaggatgttcattgcggaacttgtctagctcaggcacagcgtccgcagaagtattcaggtcaagtgacgttccatgttctttaagcacaagcttggtcgcacttaattgcatgttgttcaaaccgctgatacgacctgtatcacgtagggctgaggctgaagctagtgttgaatag

SEQ ID NO: 62489 - DNA, 1383 bp, Acinetobacter baumannii
gtgagaggatatggtctctctacagaacttcctagaattctgacaacatatgatgagaccgaaagacatgaacggctctacacccctcatccagaagaagaaaacacctggacgatccttataggtgatagcctcacaacagatgatcatgtatttattgcctactataaatatagcaaatatacccaagatgccgtaagaatcttatttagcagtattgcaaaacatgatgattttatccaaagaaaccatatataccctaaagtaatgccatggcataaggaaacgagaaaaattagggtttcaggtttttgtattcctgacaccaatgcttttttagccttgacaatccttggaatagaactacctgatcaaacacttatcagacgtgttccaaaggtaattcaccgcattaagaaacctgtagatgtcaactcacctaatcctcctcagttgcaactaggtcctggtcagattaacgtatctgaagatcaaggagggcgcaaaccattattacaatcggttattttaggtcatgaatttacatggttaggttcaggccctatcggggaaaaaagtaaaacaaagtatgaaagaaccatcacccagccacagagaaagaaaaatactaaagaaaccaatacagttggtacaggagaacctgatagctctaaggaagttctaaatgtccaaattaacccgaccactaatggagatacagagtttgaagctccagatcatggaagaatcatgggcctatggaatgcatgtttaaaggctcgctcgttaaatcccagtattgtcaatgcagtccactattatacttttgaggaagagtttgattaccgcgataaacccactctcatggcctttttcgttaattcagaaacattaaataataaagatattacagatggagaaaaacaaacttataaaaattggtgttatgcaaactcaaataaaacagcacttcgtggagcattggtcatccgattatctcttgtaaattgccctccagtttatcttttcgatatacaaccagcgacttacgtttcaactgtagatggggaaagtgttctcaaggagcgtgggcatgctggtctaatatttaggtcaagaaccgcagaacaatttgagcagtatatttctgggctcatggagagcctgcctttgtcagagggctcttatacgacaactctcctaggctccaatttggttactcaattatttgtttttagacattcaaaatctgctggcttgtcagagggtgaatcaacgttattgaatgctctaagaaaaattggaatcacgaatatcaagttaaaggaggaaaaggaggaaaaggaggaaaaggaggaaaaggaggaaaaggaggaaaaataa

SEQ ID NO: 62490 - DNA, 345 bp, Acinetobacter baumannii
atgaagcagattgaagtcatcaactatgacaaatctattcaaacagcttttcgtgaagttgctgatgggctggctggcaagtccacactagatgaacagatcaaatcgcagcagcaaatgattgcggccagccaggatgcccataagttggcaaccttacgttttgatgctggtgaagataattatctcgcagtcctcgactcacaacgaactctgtatgcatctcagcaggcacttatacagacccgcctggaacgcctgaataatcaggtcaacctctacaaggcattaggtggaggctggaatgaacataccgtacagattgaacgtaaatctttgaaatag

SEQ ID NO: 62491 - DNA, 333 bp, Acinetobacter baumannii
atgataggcatggtgcaagataaaaagtttaaaggaacaatgatgtggcttgtctgcatccttagtcttgcattgtgcctgcattctaatacacatgtaactgaaatcagttcatttcagaacgcaccttatgcagaaacacatccacatgaagtgaatcaaccgcatatacatagccaccaagatacttatcatgaacattttgttggttatgatgttggtcaaaatattagttttattgtactgattttcaattctcaaattattgacagaatcaaacactatacccttttagtgatgagtcgcatttttaaaccgccaaaaaatgaatga

SEQ ID NO: 62492 - DNA, 444 bp, Acinetobacter baumannii
atgtcaaataataagttcataaaacttattcttgtatttgtcctgtttttgttttcaataacaactacgggtgtttatacatgggcgcctgtaattgctaaaaatttagaccatcaccatgatctaaatatttctattgtgtctggagatataagtcactggactctagttcatcatgataatcaaatttctcaggaagatacaaaaaatcataattggaaaagttatgatcaatctgctttacaacattcagttaagcctattacgattcaagaacattttgctcttgatcctgtattcttcttgagctttgccctacctcttatactactttttcttagtttttttgaaatacctattaggtcttttggatttaggaaaaggcaatcttttattagtaactcttatacttatacaaaagctttaatcgttttacgtaattga

SEQ ID NO: 62493 - DNA, 342 bp, Acinetobacter baumannii
atgccaaaaattatagttcttccgcatgaaaagatttgtccacagggtgcggaacttgaaattgaaagtggaagtaatttatgtcgaagtttattggatcatggtattcccatagaacatgcctgcgatttatcaggtgcatgtacaacatgtcatgttgtcgtgaaaaaagggtttgatagtctggaagaaatggatgatgtagaggctgacttactggatcgtgcttgggggcttacggctgaatcaagactatcttgtcaggttaaagtccaagatgaaaacttggaagtagaaatccccaaatacacggtaaactatatttcagatcatcatgaataa

SEQ ID NO: 62494 - DNA, 285 bp, Acinetobacter baumannii
atgaaatttcataaatttatattgattttaaaccttgtggtcggtgcttacagtattaccaatgatgatgccaatgctcagcaggaatttaaaagaatttgtttatcaggtgaacacatgcaagccagttgtaattgtgtttgccaacagcttgcacaggtgtattcacctcaaaccatgcaacgtttaaaacacaccagtttgcaaagtcctgttctcccacaggactttgcccctaacttgtttagcagcattcaacactgcaacaaaactgaaatgggctaa

SEQ ID NO: 62495 - DNA, 1839 bp, Acinetobacter baumannii
atgtgtggtatcgtcggaggcgttgcagagcgttgtgtaaccgaaattttaattgaaggtttaaaacgtcttgaatatcgcggttatgattcagcaggcgttgctgtactgaataatgaagaagttttacgtgagcgtcgtgtaggtaaggtgattaatcttgccgatgcagttgctgatcagcagctcactggggtagttggtattgctcatacacgttgggcaacacatggtaaaccaactgaaaataatgctcacccgcacatgtcgggtaaagtggcagtcgttcacaacggtattatcgaaaactatcaagagcttaaagatgaccttcaagctttaggatatgtatttacctctcaaacagatacagaagttgtcgctcacttagttgcagaagcactaaaaagcactgacagcttacttgaagcagtacaatctgttgttcctcagcttaaaggtgcatatgcactgggtattattcatagcgattacccagatgagttaatcactgtacgcgaaggttcaccactggtgattggtgtaggtattggtgagaactttattagttcagaccaacttgcgcttttacctgtgactaaccgttttatgtatttagaagaaggtgatattgctcgcctgactcgtacttcaattgaagtatttgcaaacggtgaacttgttgaacgtccagtgaaagagcttgacgcaacggtaagcaatgcttcaaaaggtgaatacaagcactacatgctcaaagagatttatgagcaaccagaagcaattaaacaaacaatttctcaagcactggatggcaacagcttacgcgaagacttcttgcaaaatgctgaagcagactttagcaaagttcaaagcgtacagattattgcatgtggtacaagctatcactcaggcatgatcgcgaaatattggtttgaacaactgattggcgtgccttgccaagttgaaatcgcaagtgaattccgctatcgcacacctgtgattgttgaaaatacactctatatctgtatttctcaatcaggtgaaacagccgatactttagctgcattacgtgaaactcaaaaacgtgccaaagcaaacaatatcgatattcaaactttgactatctgtaacgttgcgacgtcttcaatggtacgtgaaactgatcaccacttattgacccttgctgggcccgaaattggtgttgcatcaactaaagcgttcacgactcagcttgctgcacttatgctactcgtcttaaaaattggacaagtaaaacagcgtattagcaatgtcatggttgaagagattgctcgtgaattgtggcacagcccgaaagtaattcttgatacgcttaagaatgatgctgaaattttacgtttatcagaattgtttgttgaaaaacaacactgtttattcttaggccgtggcacacactatccaatcgctttggaaggtgcgttaaagcttaaagaaatttcatatattcacgcagaaggttatgcggctggtgagttaaaacatgggccattggcacttgttgatactgaaatgccaatcgtgattcttgcgccaaatgacgaaatgcttgataagcttaagtcgaatatggaagaagttcaggcgcgtggcggtgaattattcgtattcgctgatgaaaatagcggcgtagttgaaaaagatcgtcaacacgttgtacaaattccggcagtaaacgaatggctcgctccaatcatttatagcgtaccagttcagttgttgtcttatcacgttgctgtattacgtggtacagacgttgaccagccacgtaacttggcgaaatcagtaactgtagagtaa

SEQ ID NO: 62496 - DNA, 1668 bp, Acinetobacter baumannii
atgattaaaaatattaaattgaagtttggtcgagcaccagatttggagcaaatgatagtaaatgcattaccaattactgtatttgtaggacctaataattcaggtaaaagtcagattcttagagaaatacatcaattttgtataagtggtaatcaaaatacaaataataagataatagataatattgaattagaagcagtctcagaagttaatgttaataatattataaataaaattaaacaagaaccaatgattggagaaatggttcatcaggattatatcttgattggtaaaagtggtgagaggcagcaagttcatttgcagtcacttaaagtggcattagttaaccctagtacatcacttcacctattttgtaattcatacttgaagtacagtactttgattctaaatggaagcaatagaattaatcttgtaaatatgcaacctgctggaaatcttcaagctcctcctcatacaagttttcaggtgttgttcagggataatgcaaaaagggatgaggtgagaagaattattcatgaagcatttggtcaatatttagttatagatcctactaatttaggtaatctttctttacgtctatcttcaagagaaccagaaaatgaagtagaggaaagagggattcacgaagctgctgtcaattttcataaaaatgcaatgccgatagactatgcgagtgatggagttaaggctttcactgggatggttactgagatggtggcaggggatccatctattcttttaatggatgaaccagaagcttttttacatccttccttagcatttaaattgggcaaagaagttgctgggattatgtctcattctgaaaagcgcttatttgttgcaactcatagtcctaattttattatggggtgtatccaatcaggtgcaccagtaaatatagttcgtttaacttatcgcgataatgttgctacttctcgaattctaccaaatgaagatattttgagattgatgcgaaacccgttattacgttcaactggtgtattaagcggtctattttatgagtttgtaattgttacagagtcagatgctgatcgtgcgttttatcaggagattaatgataggcttttaaaatttactgattttggaattcctaattgtttatttctgaatgctcaaaataaacaaactgttaaaactattattaagcctttacgtgagttgggtattccagtcgcaggtatagttgatatagatatacttaaggaaggtggaagtgtttggggggagtttttagaaagtggctaccttccagagctcgagaaaaatgctttggctcatactagacaggccattaagcaaaaatttgatcaatctggtcaaaacatgaaaagagatggtgggataaacattttaacgggatcagatagagaagcactttcaaatctttttgaaaaacttgcagaatatggattatttgtagttccttatggcgaactcgagtcttggttaaaagagttgaatataagcggccatggaccaaattggttgataggaatttttgaggcaatgggagaggatccctcttctcatagctatattaaacctaaagaagaagatgtatgggcatttataactagcattagaaactggtttttaaattctatacgcaaaggaattcctaattaa

SEQ ID NO: 62497 - DNA, 291 bp, Acinetobacter baumannii
atgaataaaaaagatttaaatgataaatttcttatatacatgatttttattttcacaataggcttggcgattcggattgcattttttgattttgcaattttaagtgggcgtctatctaatgtgtttttatttattgaaatatttcttatgccttattttatttataaacgttttagtaaaatggttttattcctgtcacttttattttattttatcctagttggttttatatcatggaattttcaggtggcagaatacttggcagattcttacttttctcctttatactga

SEQ ID NO: 62498 - DNA, 474 bp, Acinetobacter baumannii; identical to SEQ ID NO: 54904

SEQ ID NO: 62499 - DNA, 189 bp, Acinetobacter baumannii; identical to SEQ ID NO: 54757

SEQ ID NO: 62500 - DNA, 279 bp, Acinetobacter baumannii
gtgatcgcaaaagccttaaatcttcaaaatgctaatgtcataaagaaacccgagtattcatatacctcaaatgctattctctcagcatataacgttatttcgcgatctagacgatatgagcagggtattccgctatctttggatatttcggccatttctgcatactgtgagcactatgaattgccagtagatagagacatctttaatgattgtatttttgcaattgataatctctttctagatgagtcacataaaaaaacgaacaattctaaaaaataa

SEQ ID NO: 62501 - DNA, 123 bp, Acinetobacter baumannii
atgatagttgatttaaaaggcgaaggttcattacagctttcaaaactttcaactcgtagtaaattcagattgcgccgatggcttagaagaattaacaaaccgaccaaattaattaaaccatag

SEQ ID NO: 62502 - DNA, 279 bp, Acinetobacter baumannii
atggcatctttttatatttcaatatatagaaacgggtccttaattggcagaggttcgttaggtgcaaacatcgagacaggtaatattaatgtcaattttaatggtacagcagttatcgtttctgcgatcgatgatattagtacagttggtaatgtcacatacacacttaaagcaggttttgcacgacaggagggagtaaacattccactgaatgttagttccaataatacttttatgatcacttcaagaacattaagtgtaattgaaatgaagaaataa

SEQ ID NO: 62503 - DNA, 924 bp, Acinetobacter baumannii
atgataaaagaactctcatatgaatcagttgatttagccgtaaattcatttgcagaaaaaaaagctatgttccttggccttaacttggatccactggctcctgcttatatgcagttaagcaattatttaagtaagaaaattaaagcaacacctagaaaagtaactgtatctaaaaaatttaagatacctgctgactatctagttggatataaaaatttattaaacaaaataaaaattggtcaagatataaatctatatcttagtaaagggatcgaaaatccaatattttctgatcgttttctagatgattatggctgcgtgcatttccatctaggaagtactttagaaaatgggtatgtcaaacgtactggtcctgtggctctagcatttgtgacagatcaagaaatattttttatcgaaaccaagttccatggtaaagattatccttatacatggactgataaaagtgtattaaagatccttcatgaagaaaagccacacttcatagcaagaaataaagtatccactttaaaagagatatccccttcaatttctaatgcagaaactataaaaaatcttcgtagtaatgggtatggatttggagttacgctgaatgatggaacagtatatatgccatcaaaatttggtcctgtaagcgttaaaacatcaaataaaaaaaagtattctacattagcctcagaacatttgttgtggatgatgcattcgactcgggaaatatatttccttataaataaatatgttaaagattttaagttaaaaaataattgtacaattatgaagattgaaattttagatttagtatcagataaccacaatcctcttataatcaatcaatgtgatattcagattcactacttaaaagaatttagtatttctatacataaaaattctttttatcgttaa

SEQ ID NO: 62504 - DNA, 369 bp, Acinetobacter baumannii
atgaaaaaatttattctaattagtaccttaatatttacaggttctattcatgcttcggattataaaactgctcttactggaaaaactctttatatgaagggcggaaattgtgctggcctatctctttctaaaaactctggtctgatgggggatcaatcgccctgtgaagtagacttaccgactagagttcgatggataagtaatgataccttcatgatggttgaaaaaaatcaaacatcatcagataaaccacctcgagtttatctatataaaataaagtctttacaaggaagtaaggttattctcactgatatctggacaggatggaatagctttgctgatagtgatacaacgtacacaattaaataa

SEQ ID NO: 62505 - DNA, 303 bp, Acinetobacter baumannii
atgtactcaatatataccactgaagtctttgatgattggtttgataaacttaaagaccaacaagcaaaaaaacgtatacaagttcgtattgatcgggttgaagatggtaattttggagatactgagccagttggtgaaggtgtatctgagctacgtttcttcttcggtcctggttatagagtttattactgccaacaagggcaaagagtcattattttattagctggtggtgataaaactactcaaagtaaagatataaaactcgccttgaagttagcaaaagaactagaggaggaactataa

SEQ ID NO: 62506 - DNA, 282 bp, Acinetobacter baumannii
atggctattaaacttcgtaagtgggatagtgcagagcacctcaaaacagaagaggatatgcaggcttacttacaaacatgtattgatgaatcgaatggtgatgctgcctttattgctaaagcattaggaaatattgctaaggctaaaggtatgactcaattatcgaaagagacaggcttaggacgagaaagcctttacaaagctctttctggagaggttaacccgagttttgatactgttataaaagtggttaaggctcttaatttacgcttagctatttga

SEQ ID NO: 62507 - DNA, 747 bp, Acinetobacter baumannii
atgaaatatcttttgatcccaacattattattaattacatcatcactggcttttgctaataaagaagaatcaataaaaaatattattatttatgatgattttactacgtggatagatagtggtaatgcactatttgactgggaaaaaatagtaaaaagttcgcctaaaaaagcagtgacaacaaataaaattaaaaatgattttgctggaaatgaggtgtctgcaaatagagattatgcaaatcaatgggtacgcctaaaaggtacagtcaaaaatgtaaaattagataaagatggaaaaatgtatgccgatctaacagaaaattatgtaaattttaaggcttatatttctgattctgaatttgctgcaagcctgcaacctaatcaaaaaatagatatgtattgttttaacgcaacggctagttcagcaactcaatgtattaattatcagagttcaatttgggaaaaagcatcagaagccaatttatcagagataagagcaaataaaggaatttcttcattttcatcaatattatctaaagctattcctgataatacttttaatgagtcttgctctaaaaatatatattcctctatatgtcacaatgctgtttccaattatatgaaggattttgagaaagtaattgagaaagaatttaaaaaatcttgtggtaaatccaaagagtccgagacttgtaaagatttcaaggaatcaataatggatctagagaagtttattaccaagtaa

SEQ ID NO: 62508 - DNA, 264 bp, Acinetobacter baumannii
atgtcagcagtaaatgtaattaatgaaaatgacgatgagagagaaattgcttctcaggcagcttgtgcacttcgagaaagttttattactgccgctcaaagtggaccagttctgtatgttgaaaacgatactgttttacttaaggaagtcggcgctcccccaattgtgattaaacacctagcaggtcgtaatcctgaacttgctcaacgagtagcgagtcgtggaacttttaaaattaaaaaatgtaaagtaagccaagattga

SEQ ID NO: 62509 - DNA, 519 bp, Acinetobacter baumannii
atgatgaaaattaaaaatatggactcgtttaagctgtcctatatgtacttctttccagtggtgtttttcccatttttaaatatctaccaatttagaaacaatccagaccttcaatcatggctattcagcaatttattgatcagcattacggtcattttgatcccactgttccttactttaagcatgctcatcagcaaatttttataccaagatcgtaataaaaaaccggaatacaacgccatggggcttgggctgttgtgcctgattttcctcatgggcagcaactactaccaattccagaaatttacagcaggcacggacctcagcatagatttttaccgcatggcgttaatgctgagtttcctgatcgggtgctttgtctcaagcctcagcttcaccttgaaatataagcaatattcaaaaaaatatgacacggacctcaacctcaaaacccaaagattcatgctgagtgcatgcccactgttattgatcgccatcacggccatctttgtggtttaa

SEQ ID NO: 62510 - DNA, 579 bp, Acinetobacter baumannii
atggctaaactctcactgagcgaagtatccaaacagtttaatgtcgatagatcaaccatctacagagctgtacgcaatggacgcttatcacgttccagtgatggccaatttgatattgccgaagtgattcgatgctttggtgaaccagaacaagtatctaaaccgactgaaccacagagacaaagtagtgataccgcaacacaaaaactcatcgctcatttagaaaatgaagtcagaaaataccaagatcgtgaagaacgtttgatgcaacaaattgaccgtatgcagacccttattgagttaaaaagtgtggcacctgccacagcagtgccacactctgacgctacagcatgcgacagccaaacgccacagcatgtaaaaacggatcaagatattgaaaataaagaaaatttaaataaggatgtggcagaaagtgtggcaataccacaacaagatgccacagcacgcgacagccaaatgccacagcgtgccacgttgcaaaatatggcagcaccacaacctaaaaaacggggtttatttgggcgtgtattaaatgcagtattcaacgatggtgaataa

SEQ ID NO: 62511 - DNA, 255 bp, Acinetobacter baumannii
atgtcaaatcaatatctaattgatgaaagtgacaaagaacgtgagattgctaatgtcgcagcgcgtgtacttcaagaatgctttatcgaagcaaaacaaaatggccctgttctttatgttgaaaatgatgtcttattgagcacagcaccgaatggtgaaccaaccgtggttaaacacttatatggtcgtaatccagctcaccgagtggttaatcaaggaacttttaaaattaaaaagcgtcaggtagaagattga

SEQ ID NO: 62512 - DNA, 315 bp, Acinetobacter baumannii
atgaaaaaaatattatattttaatttcttagcgattattttgacttacgtatctttgctttatcaaaaaaatatattagtttctcgcatagttgtagataagcttgaaaaagttgaagtcatagctgggggatttcctctacagttccttatagatggtgaaacctctccagtcggaagtataagtatcaatcctttatttattttcatcggcatggatcaatttgtttttctcaatttttttattgattatttattttggataagtattttatttgctttttctatgattgtgaaaaagtacagaattgtatag

SEQ ID NO: 62513 - DNA, 336 bp, Acinetobacter baumannii
atgaataatcttcaaatagttatagcacaagctctacattcatatgaatttgaacatatggagcaatcaataagtaaatccattagcgacactatattggaaatattggtcaatgatgggccttttgaaaaaattgattgttatctgtattcaaaaaaagattctaaaaaaattctaaaaagctctatacagtatgtaattgctgtcttagaaagggcgaagtatagagtacagaaagctcagcaagataatctgagtcctttgtatatctgcttatacgtgattaagaaaattgagggctttatcgaatacttaaatactaaatttcaactgtga

SEQ ID NO: 62514 - DNA, 273 bp, Acinetobacter baumannii
atgggcgcagatgttctcaaaattgctgtaatgcctaaatctaaacaagatgttttcactttaatgaacgcaactttaaaggtaagccaacagactactaaacctttattgacgatgtcgatggggcaattaggtacgatttctcgtgttgcaactgccaatatgggcggaagttatagctttggcatgattggtcaggcttctgcaccgggtcaaattgatgtgactaagctcaaacagattttacaaaccgttcaaccaacaaacccataa

SEQ ID NO: 62515 - DNA, 486 bp, Acinetobacter baumannii
atggggctatttagttttcttggtgatgttgctagtgctacgtttgatgtagttagtgatgtggctagtgctacatttgatgtagttagtgatgtggctagtgctacgtttgatgtagttagtgatgtggctagtactacagctggcgtagttggtgatgttgctgacattattattgaaaatccaggtaagacagcattagttattggtggaacagtagccacaggtggattggcttttgttgcagctccagcaattgctactgtcgcaggtacagcaggcttattgggtactacggctacaacaggtgcaacgatcagtactctaacaggtgctgcactgactaatgcctctttagctgctttaggggggggagctattacagcgggaggagcaggaatggctggaggtacggctgtaatagctggagctggagcagttactggggctggtttatcaacagtcgtagcaaacacaatagattaa

SEQ ID NO: 62516 - DNA, 1416 bp, Acinetobacter baumannii
atgcctcagtgtgatgaatgtggtgatgcggttgaaaagatacaccgactttataaacagcgtaactattgccataagtgctatgtacgagtttttaaaaaacaggattgtccatcgtgtggtaaaagttccagattatataaagctgataacttggccgtttgccaacaatgtgaaaccaatagaccttgcattagatgtcagcgtattgattaccctataggaaaaataacggagcaaggccctgtttgtaatagttgttcagtttattttagagagtttcaagcttgtgaacggtgtggtgtgacatcacaacgcttatctcgtatcagccgttttggagataatttaagagtttgcccaaagtgtgcaacccgtgattaccagacatgccaaagttgtagaagatataggttgattgaacaggatgttgtgtcaggcaaaatgctttgtaagaaatgtttgacctgtccaccacttcaatgtctaacttgccagcaacagattcctgctggatatgggaaatactgtgaattatgtacatggcgaagaatattggggaataggattaaggaactggttaatacattaataaacccaagcctcaaaggttactttaaagattatatgagttggcttgatcatgaggttggaccgcataaggctgcattactaattcgtaaacatattcatttttttgaaaagaccagtgatctttggagagatcagatcccagacaatgactctttattacatagactaagaacaagtggtttacgcaaatatgagctgcccatccggtggttggttgcagtacatcacctgcatatagatacccaatctaaaggccactgttctgaatttgaccaactgagaaaactggcgaactcatgtcctggttcatcgctttcagcccaaattcttcagaactactatcaggttttaataaataaaatagatttagggaaaacgagtatacgttctgcccgtttagccatgaaaccagcatcagctttaatgctgttggtaagtcaatcacgattagatttaccaacaatgtggcatgtaaaatattacttatttaagtctcctgggcaagcttccgctattgttggctttcttaattttttaaacaagaattatgatacgaaccttgatacgtcatgggtactagatgaaaaaataacagaaaaaagtaatatgaagaaactggaaaaacaattgttggccatcatgaaagccccagaggaaaattttaatgaactagagtggataaagttaggattgatgtattttcataatttagataaatctttttttaatcaaatggatagtattaattatagggggctgaatgatggttttgaagtgaggtttggtgatcagcaatattggatacctaaattgcttgtgtaa

SEQ ID NO: 62517 - DNA, 363 bp, Acinetobacter baumannii; identical to SEQ ID NO: 54898

SEQ ID NO: 62518 - DNA, 1830 bp, Acinetobacter baumannii; identical to SEQ ID NO: 54703

SEQ ID NO: 62519 - DNA, 456 bp, Acinetobacter baumannii
gtgattgttgccattgatacaaatgtattagtttcactagttaatgaaagggcaacctatattaatctggagacatttttacatcaaaataatgcaacattactaattccgactcctgttgttgcggaatttaccgctattgatttcagtaaacgccgaaatcaatttatgtcctttcagcataaaaatgtaattatctctgaatttgatcaactttctgcttttgtttgtggtgaaataacaagcaaattaagtaaggttcattttgaagataatcgacaaagaacaaaaattgatttacaaatcatagcaatagctttagctaagaaggctaatttattaatatcaaatgataaacatatccatgattacctcttagatcttggagaagaggaactaaaggtgtgtaaattgcatgagattaagttaaatcttgggttgtttgacttcgattaa

SEQ ID NO: 62520 - DNA, 732 bp, Acinetobacter baumannii
atgattaatgattctgaatacacgttctccctatatgtatctggactcaaactttctgaaatcaatcccttagaatctgcaaagcttttagaggctttatgtaagattcttggtgcaaaacatcttgaatggggtgaaattaaggaaggttctgctgattatgctgttaagtgtaaagcagaatatatcgaagaaaaattagagtccgtaagcaaatctatttctcaagatacaagagctatcggtattattaccgagttcttaaataaacaccctaaagctagtacattgctgagatataaaaactcagcaaatgatgaatacatggaattacataagttccaaagaaaagaagaaagttttgagtttgttcaacaagaatctattcgaggaagaatagttggattgcttgaaggtagagataaaactgatcatatatctgttaatactatttcagggaaaaatgtaaaagtaaccatttcaccagagctgtcagcaaacttgggtgttaagtggagaacagaacatcagcttgaaatatctggtaaagcaaaatataaatatagaaattataaagatgttgaattagttcaatttattgcagaaagtattaatgaaatccaagaaggaaatatattagattggatagataacttcaaaaaagcaggggatagtggttggaatgattttgacgaccctatagaagcttggctaaaggagcgtcatgagtga

SEQ ID NO: 62521 - DNA, 396 bp, Acinetobacter baumannii
atggcaaacaactttgaccaagctagaaagttcataattgagcgtatgatggctttcccttatcttgagcaatccaggatccaatatcccaatgcaaaactaattaatgtacccactgaaggtatatgggccgccatctatattaattggggtggttctatagtggctgctattggggacgccccatgtgtaagaagaacgggaatagttcaaatcagacttatgtgcaggcccgaaacacatgaagttcagataacgcaaatggctgatcaattacttcagcattttgaattctatagaaaggaaaatctagaactcttacaggggtctatccagccacttggaacatctgatttttatgaatttatggtgacgattaactttagggttaattaa

SEQ ID NO: 62522 - DNA, 990 bp, Acinetobacter baumannii
atgactatcgcagattttccacccaaaacatctcaaaagcaaccccatcaacttgatacgcaaatgttcatagataagtcggtgggcttatatggtgataaatttgaatacgattgcactaactatattaatgcaaagacaaaagttgcgattaggtgtaagagtcatggtgtttttagcattctcccatctaatcattacaagaaacatggtgggtgtaaagcttgtgtaaatgatgggttgagagttactgatcacattgaacggtttaagtcagttcatggtgataggtataattattcaaaatttaacttcaaaggcgctagggtaaaatcaatcattatttgtccagatcatggttcttttgagcagacatatcatcatcactatatgagaaggcaaggctgcccaaagtgtattaagaatagaagattaaatattgaaataatattggagtctttcaaggcggtacatggtgctcgttatgattatagtttggtagagttcaaaacaaacaatagggcaaaggttaaaattatttgcagagagcatggggtttttgagcagcaaattgcctcacatgcacaagggaaaaattgccctaaatgctttaacaatattgggtggtctcgatcagactatattcgattctgtgcgaaatatgacaataaatcatccctttacctaattgagatgacaaaggggtccgaaagattctttaaggttggaatgactgctttagatctaaagaggagattctcaggaaagtgtgcgcttccttataaaatcaatccattacttattttaaagtcagaagctggatttatctatgaccttgaaaatactctacacagaatgttgaagccccacaaatatgagccaaatattaaatttgaaggacacactgaatgcttctcaaaaattccgaatagtgttttaaagttcatacagcaaatagattcatcgtcacaaatgcaattgattacataa

SEQ ID NO: 62523 - DNA, 426 bp, Acinetobacter baumannii
atgggctggacaagcaaaccgagtgccttcactaaaacaattgaagccgatctaaccaaaaagcaaaaagatattgtgattgatgcattacaaggtgttgttctttcgagcgcggtggacactggtgcagtgagagcaaataaccgtattgggattggtcatgtagatgggaaagctgacgagaatgaggttgataagggtgggcaacgcactttaactcgcgaattggctaaattaggaagccttaagccattccaaacggtgtatttatcaaacggcctgccttatgcatatattcttaactatggcctttaccctaagaatccaaaggtcgaaacaggtaaaacagaaaacggctacagtcgccaagatcctacaggattttacgagacaacatttacatatatatctgaaaaatatagataa

SEQ ID NO: 62524 - DNA, 210 bp, Acinetobacter baumannii
atgaaacgttactacaagcaaactgaatcggtagtttctcaatggacgaccgaacaagactgttttttaatagaaaataattctctttctattgatgagttgaaacaacatctgccattttctgaagaagaaattagggtgcgtagatcagttttaggactggtaagacgcgatctaaaaaatattgcggaggatttaacaaaaccataa

SEQ ID NO: 62525 - DNA, 690 bp, Acinetobacter baumannii
atgcaaaagacggttttaggtgagatttttgggattaaagtgcattcaccaattagtcgaggtgaaataagagatgtcctgagaaaacaattagaatttaaaaaagctttacaggctgaaaaaagtttaacggaagatcaagcactcctagaggttgcagatatctttgaaaacttttttaaagatatatcaaaagaggataaagataatttcgaaaaaatccattcagaagaaattaatgcagcaccaagtgaatggttctgtttggagagcaatattcctagcaatagtgcagtatttttagaaacaggtattgctggtgaattgtatggaatgcaagtcaattatccttttactagagaaaatatacggaaattggtataccgaagaagcgaggtaatgaagtctcttgctgactcacaaggcataagcctttaccaagcatccaatgatttaagtgatatgcagaatcattttattgaaaaattcagttatgaagatcaagagaaatttctaaatcttatgactgatgagatgatcgcacatactaatgcgttaaatgacgaaacggcaaaaatcaaccagcaggtgctagagaaagaagtttctaatatcaatcttacccatacaatttcgggaataattgtattttgctgtttaatgtttttagtatttgttctattcagatag

SEQ ID NO: 62526 - DNA, 642 bp, Acinetobacter baumannii
gtgtatgaacttcaccccgaagtgcaagcacagttaattgttaaatcagttgatgcgcattttgttattgctttcccgaaatcaaagtcacagaactttcaggcagcattaagtttggcaaaacttgcagacacatttgaagaaatcaaagatggtaaatcaatatattacctttcttcatttgagataaacctaaagaatgttagcttaataaaagcaattatggatttagctctattctggaaaggtgttcatatttttcttaatgggcagccagttaatagaacaagactactttcagaaatgcttggttgttttagggattcatttcgggctacagacaagaaagcttattgttttcaagttgtagaggatgttggtgaaccacaaaatacaggccctttagtatttgaactcaaccttgtcaaaagagaagatgaatttataccaagagctgagaaaaaagaggcaacaaagtggatacacccttgtaaacttcttgccaattctcatagatacttaagcaaggatcacccagcctcacttcaatcccaacttcaagcacaggctgttaagtttaactgtgatatttgcccgaatttcaatgctgataatttaatgaaattggatgagttttcgtga

SEQ ID NO: 62527 - DNA, 228 bp, Acinetobacter baumannii
atgtctagagctgacccgcaaatcaatattcgagtgcctacagagctaaagaaagaaatagagcatgcagcaattgaaaatagtaggtcgcttaacgcggaggttgttcacaggctgcaacaaagtttaagtagcggaagggttaataaatctgaactcactactgaggaacttatggaagagctttcaagcaggttggaaaaatttaagattactattgagaagtag

SEQ ID NO: 62528 - DNA, 264 bp, Acinetobacter baumannii
atgaaaaacaaaataaaagtagagtttaagcactacggttggttttttgtttgccccatgatttatggccgtgatgagtttggttgtccgtatcgggtgggcagatatgggtttaactggttgtttattttgcttgaacgtatttacattatattcataaatactattggtattttcaatagaaattacactccagcatataggcacattgctaccggtgaactaaaaaaacctttctataaatatattgagattgaggaataa

SEQ ID NO: 62529 - DNA, 237 bp, Acinetobacter baumannii
atgttagtagcaaaactaatgagtagtgatgatttaccagatagcaacaattcaaaagactttactttggttgagtcgcatgggttgattgattgtgttcgtgacaaagatggaaagggtacaattgttgttattgatgagtatggtgaggaacgtgaatatccaatgaatgggaatgcttacattcttcaaaatggtaaaactattgcaacttatgcgtgtcaccaatacggttaa

SEQ ID NO: 62530 - DNA, 1197 bp, Acinetobacter baumannii
atgttaagtgactcaaaaatcagaagtgctaaaccaaaagaaaagctttatcgtctcggtgattctgatgggttatgtattgaaattaaacctaatggaaaaaaatattggcgttatcgctttcaatggctcaaaaaaacacaaatgatgagtttaggcgagtaccctattgttggactagctgaagcacgtacaaaaagagatgaggcaaaatcattagttataagtggtattaatccagtagaagaaaaagaaaaccagaaaaaagctaaacaagaagaatatgacaatagagttctatttaaagatgtagctgcagaatttaaaaaagaaaaattaaataatcgatcagagcgatatcaagaagcttttcagcgagcgcttgataaagatattttaaaagttattggcgataaagatattaaagaagttacctcggcagatgttttgacaataatgaaaaaaaccattgcacgagttaagcgccaaaaaaatcatggtaccggcgaagtatcagcaattcagaaccgtacttttattggcggtgtaatgcgttatgcaatcgccacacttagagctgattatgatcctacatatgcagttaaaaatgtagttgagcgtccagaaatagagcacgcaagacctatggaaaaacatgaggccgtacaacttcgaaataaattaaatagctatggtggatctactacagttaaaaatgctgggctggtaatgctctactctatgcttaggactatcgagatccgccgcatgaagtgggaatatgtagattttgaagcaagaacaatcacatttccaaaagagatgatgaaaaagaagcgcattcacatcgttccaatgtctgaccaagttttcaatattcttcaagagcaacgcaatattgtcggcaatcgtgaatatgtgttccctgcgatttatcaagatggaatgctgtcagcaacaacgcttaataaaatgcttgattatataggcttatctgatgtgactgcccatgattttcgtgctaccgcatctacccttctaaatgaaaaggattacgacgacaagtggattgaaaagcaattggcacatgcagatggaaataaaaccagagcaacatataaccatgcaaaatacctagaaagcagacgtaaaatgctgcaagactgggctaatattgtagatagttgggctgactaa

SEQ ID NO: 62531 - DNA, 393 bp, Acinetobacter baumannii
atggaggaaaccattatttacaatcttgctcgtttagaagaggcagcacatcaatctactgatccagaacaacaattacgagcccttattaaagctgagcttatttcaattactggcgatacaggtgcagccatggctgtgttggtttatgaatggtttgctctctcaaaagaaaagcaaaattacctgttaaaaatgcgtaatgaatatgagcaaatctggctcgacgtcattgaaaatttacgcacacaaggcaaggtaaaacatgatgcctttatttggcgaagattaattggtggtgcaatatcatggactgtaacttggtataaatctgaaggcaaagtcaaaattgatgagttaactgaaatggtcttggagatggctttgaaatga

SEQ ID NO: 62532 - DNA, 531 bp, Acinetobacter baumannii; identical to SEQ ID NO: 54270

SEQ ID NO: 62533 - DNA, 1224 bp, Acinetobacter baumannii
atgctagatcatatttgcataaatgcgccttttgaatccagcttctactcagtagatgcggaagggcgttatttttttgtagatatcgatcttcacagtatagaaataccgcttgcttctcgttctgttcataagaatgacgatggttcaatttctgctgctgcgttattccatccgtttgagtcggttccgactcattacactggtatggcaatgaaagttttttttgattcttcgtatgaaccttttgtacagatcaaggcttctcctgcgaaattgctgcaagggcataatgtctttggcagcgacaacatagagcagggtgctatggaaatgatcggcttcttacatgaagcttatccgcttcttgcaaggatgctagattggcctcgtgcatgggtttcacatattgatgtgacttactcagtacgattgaaagaccagaacacagctaaaaaagttttggatttcttgagcaatgtcagcaatggccagactcgtttaagtaacaagcgtttcgacagttcagtatattggggaggtcagacttcaagacttgtgaatcacaagtgttatatgaagcatgacgaatttatcgctcaatttgaggagtataagcaacttgcaaagaagaacgataaagcagctcaacgagttgttgatgtcatgtccaattcggatctgattaactggactgtcggtcttttacgttttgaatcacgtttaaaaaaacgttggcttgaacgtaatggaattcctaccaatctctttgatttaattaagtttcaacgttccaatccaaatttacttcaaacactctggactaaagctactcatagcatttttgatgccttacgaggtcaaactatgaaattaacagacgatactagtgttcttgaagctatccaacgatctgatgttgttttaaccaaatctggtaaagcttccccaactaaagtacgtaatttatttgccatgtattgtcttatccgcgaaaagggatttgatgaagttaaaacgacttatggcaagtctcaatttcacaatctaatagcccagttatgtgctgtacaaggtcttaataaaggtatcttgcagaacttacatacaggcaatgccaacaatattattccgtttattaagttcgtagacatagatttcaatcaacaattgccagattggtacgaagagccagtttcgcagttcaactacaaaattgcatag

SEQ ID NO: 62534 - DNA, 264 bp, Acinetobacter baumannii
atggaaaataatcaacaacctctacaagctactgataacaccaaaaaggctgttactgccgtaaaacgcgcagctatgactgctggtgttgtaatggcaactactgctgcggcatttgctgaagatgggggcacttcgattgatttaaccactggcttggctggtgttgcgattattgcgggtcttctttctgtaggtagcctcaaggctgtaccaacatatgttggttggggtattcgtcgagcgttatcacttcttcgctaa

SEQ ID NO: 62535 - DNA, 207 bp, Acinetobacter baumannii
atgacaattaagatcgtggaccaaatacaaaagatcatgaaagggttttatgagaagaagggggaacaaaataataaaggtggtaattctgaagcgaaccaaactaaagctgaagtagaacttgagattaaaaaacttgaacttctgaagttacaacgtgatcctagccaaaataatggacagtacttccctctaaagataacgtaa

SEQ ID NO: 62536 - DNA, 225 bp, Acinetobacter baumannii
atgacaagcgaacagactagagcatatctggcatttgcacttgtggcgctaatgtttgtattggttatcgccttattttttgtgaatatgccacgtgaaaacagcaacttgatcaatacggctctaggctttattgctggagcaatgacgactgcatgtggtttctattttggcagttctgatcaggaaaagaaaaacaaagctgacgattcaaatcaatcgtaa

SEQ ID NO: 62537 - DNA, 921 bp, Acinetobacter baumannii
atgattcgacatcagcgtttagatttatggcttatcagccccaatccagcgctagtaaacagtgatgtgcggaaccttgtgacacagtatttctggcttgaagttgtaggtgctaaaacaacgaaatgctattgttttacgaaggtttataacagtattaccaaatcaattaaattacaggcttatgatgagtttgtttatacaatcgaagagaagtatcacaaactttataaatctactgaagacggtatagcatcaggtcgtaactataattttaatgttaagttatggggctttgtaggtggtttggttgttgtagttattgtggcttgtttacttgtaggttttcttgcaaagggtacaaaaacaaaagtagatcaattgtctacttctaaaaaaactgatactgcacagcctcagaatgctaatcttgataacaaagttaaattagatgttataccgaaggtatccgaagaggattgcagaaaaggtgtaaatgttcaaaaacctgaatgtgttgaatactttaaccgtctaactaaaaatggtgagtctgttggtgttgctgtacaacaagtaagctatgatccgtctaagccttttgaatcagccgaaaagatacaagaaacggtttcatatcaggttactgcaaagcctgtattgtctggttgtatgaccgatcgtcacggtaagttagttggatatactcaacaaggtacaattattcatggcctcaatcagtccgattgcaaacgtataattaaaggagatcgtccgtttaattactttgctcagcagtctgtacaacaacctgtacagcaagcagttcaacaagttgccactaatcagtcctatcaggctaataactatgttcaggaaggcctagaacgtaatccagtgaatggcgcgaaccaattatga

SEQ ID NO: 62538 - DNA, 843 bp, Acinetobacter baumannii
ttggttaatgatggtacacctgatacatctatggctttagcacgtaattatattgctcaaaaatatcctcattttgaaaatcaatttgtttttattgatcaaaaaaaccaaggtcaaagtgttgctagaaataatgcattaaaaatagcaaagggtgagtatgttggatttttggattcagacgattatttattgccaaactatttttatgaattaatgaaagttataaatgagaaaaatgtagaaataattcattttaatgctaaacaatatactgaagatcaaggctatattgatagtatgtgttttgtgaaggaaaataaagtttcaattaataatgaactttatcgtgagaaattgtttttacaagcttattggtatccttggttgagggttattagaaaagatgttttaaacaaatttcaatttgatgctaatgtatatatggaggataagttgctttttccaaaaatttactattttacagatggttgtgaaatttttgaaatgaaaaaggaactagtttgttataggcatcgagatggcagttcaataaggagtggttatcctgaaccacttttaaaaggaattgacttagggataaaaaaatttattccaacaagtgaagccccactttactctattatctataatcaatttttagcccaaaaaatatcaacaatgattgatagagagcaaagcttttttagtatttatttttttgctttaaatgaggtaggtaatattaaacttaattataaaataagttacaaggtttttttgttaaaatactgtactttgatttatatagctattttaaaattaagaaatttctttagatag

SEQ ID NO: 62539 - DNA, 534 bp, Acinetobacter baumannii
atggctaaatattctcaagaattcaaattaaaagttgttgaacattacttgtctggtcatggtgactctgtgacaggtcaactttttaatgttcatagatcagatgttcaaaagtggagtaaagcatttaaactttatggtctggcaggcttagaacgtagaagatctaaaacaacttttacggttgaatttaagtatcaagttgtcaaagtaatacatgaagaaggcatttcattaagagaagctatgcaacgctttaatattaatgaaacaagtacgttaagagattggttgaaacaatataaagaaaatggcatagagggtttgcaaccaaagcctagaggaaaacttaacagtatgtcgaagcccaagatgcccaaagctaagacgattaaagcagatcaggacaaaacccatgaggagctgcttgaggaattagcgtatctacgagcagaggtcgcatatttaaaaaagcggagagccttgattcagaagcagaaagaacgggaaaaagccgaacagcaacagcagtaa

SEQ ID NO: 62540 - DNA, 786 bp, Acinetobacter baumannii
atggcacgtagtacctatttctatcatgagaagctgtcaaaacttgaagataaatacggtgatctaaaacagcaaattcaagcaatctatcatagacataaaggtcgttacggatatcgccggattacactcgcattgagaaatgcaggcacgatagtgaaccataagtgtgtacaacgtctaatgcggtctatgaaacttaaatcacgcatcagagctgtgaaatatcgttcctacaaaggtgaagttggcaagatcgctaagaatattttacagcgtaagtttaaggcaaaccgtccaaaccagaaatgggttacagatgttactgagttcaatgtcatgggagagaagctttatctttcaccagtcatggacttgtttaatggtgaaattattgcatttcaaacagggcgtaaaccgatatttggactagttaaagatatgcttaagaagtccatagataagctcaaatcgaatgagaaaccaattattcattcagatcaaggatggcaatatcaaatgcgatattatcagcagcaactagcagaacgagggctcacccagagtatgtcccgtaaaggcaattgcttggataatgctgcaatggagagcttctttggaatattaaaatcagagtgtttccatggtgaagaatttaaatcagttgatgaattggagcaaaaggtgaaagaatatattcactattataaccatgagcgaatcaaggttaaattaaaaggactgacccctgttgaatacagaaatcagtccttaaaaaccgcctaa

SEQ ID NO: 62541 - DNA, 1209 bp, Acinetobacter baumannii
atgagtacagttacaacagtagaaagtattgcagaactaacggctattcaaagtccagaagaaggacagaccgtatatgtgaagtcttattatcaaggattaaacaaaggtggtggtaagtttatttatgcatctggaaaaaaagccataaatgattatggattaacaattaatggctgggtacgggagtttgattgtgtacctaatgtctttatgtttggggcaattggagataacactaataatgatacagatgcattccaaaaagctgtagatgcagttactgatctatatgtacctagaggtgtgttcctatgcaatgtgaatcttaaaaaatcattcaatatcactggttctgggaaagagtctatattaaaaccttacgacattaataagcctattttaactaacatcaatatatcttctttaagttggtctaacgattctgtatctaatctagctttaaaatcatcgaatttcacaggagttggtttcagttatggtgtgctacctgcagttaatgattattatggtgttggccgagtggttatgaataacgtgtggtttagtggttttatgcacggtattcgaaaagtaaatggaaacatcggtaataaatactacaattgtaattttgaaaactgcaaatacggtgtttatgcatcaagtaaccaagtagctatccctaactcacttgcaatcatgcattcgggttgtgatatgtactatagctgtaattttagtgagaatgctattgcgggtgcagcttattatgataaaacccatggaacgggacagtggttatttaatcactgtacatttcaattcaataaaggctttgggttatttatggactttgatatcccaagtactttattttctccgattattataatgaattcttggtttgaagaaaacggaggaaaccaagtagttattgatcgtgttaatggtacatcgcaatctatgaattctgaagctagatatatttcaggaacgattgatgtagtggtagtaggtagcgaagattctaaaactcgtcttggtataggagtggataaacctaaaagtactctacatattcatgataagagtctgccgatgttacaactcacatctgattctactggttcagaagatagaaataatggtggattgatctatgatcctagacagtatcgtggacaacaaatccctctaaattcttaa

SEQ ID NO: 62542 - DNA, 684 bp, Acinetobacter baumannii
atgaagcgggaatatccaagtattcctagtgaagcttttgctcagtctgttgaaggtgcttactacaagaaccaatttaaattcttgtatgccaataaacgcattggtgtattgccttctaatgatcatttacctgttatgaccttctgggacttaggtgtctcagactcaatggtgatctggtttatccggaagttatcagatacttgctaccaagttatcgattactacgaaaactcaggcgaaggtatgcggcactatttcaaagtgcttaaagaaaaaggctacaagtacagcaagcattatgctccgcacgacattaaaaaccgctctcttatgaatgatggtaagtctcgtcttgacattgccaaagagggctatgtgctcgatgacggggagaagtactcagtcaatttcgaagtggtgccaagtatcaccgtaatggatggtatcgagcaggtccgtgagattctgcctttatgcgaatttgatgaatacaaatgtgctgagggcattactcatcttgagaactatcgaaaagagtggaatgacaaacttggatgttggaaggacaacccacttcatgacattcactctcatggtgcagatgggttccgtatgtttgctgtcgctatgggtaaaaaggtagttgcaaaaacactagatataggaatggtttactaa

SEQ ID NO: 62543 - DNA, 603 bp, Acinetobacter baumannii
atgcaccaattggccctacacgctttacatgtggcgctgatgaaagaccaagctacacaatatttatggattgattcaacaactctgccagtttgtaaaaatcaacgtattcagcgtcataaatcattagtccaaattgcatcacgtggtagaagctcaatgggctggttttatggctgtaaattacatattgcgatgaatcaatttggtgaaattgcctgttctgctttatcaaatggacatgttgctgacataaaaatggttgagcaattggttgctggtatagaagcaaaactttacggggatcgaggttacatcagccaagaattaaaaatcagattgaaagatcaaggtattgatttaattacttatcatcgaaagaatatgcaggctattcaactctgtgcatcagatgaatatcacctaagacaacgcaataagatagaaacattattcagtttattgaaggggcaatacaatttagtgacgagtaaagcacgtagtcttcatggatttctgagtggaatttacgcctcactatgtgcatatcaattaacccatcaaaataagccaacaattcaaattaaggaatcatcggcttaa

SEQ ID NO: 62544 - DNA, 450 bp, Acinetobacter baumannii
atgccaaatttagaagcttcatttagagcactcagagtgcttcatacagcaaaagatttatttatggagtatggatttcacaaagtcggtgttgaccgaattattgccgaatccaaagtgaataaggccacgttttataaacattttcattcaaaagaaaggttcattgaaatgtgcttaacctttcaaaaagatgggttaatagaagaggtgttatctattattcattcatatcgtgaacttatggtatttgataagctaagaaaaatattttatctccatgccaatctcgaaggactgtaccgtttgccttttaaggccattttggagattgaaaagttttatccaactgcttacagagtggtggtggattatagaaactggttagtgacccaaatacatgacctacttttaactattaaacccacagctttaatcgaagatgcgtaa

SEQ ID NO: 62545 - DNA, 882 bp, Acinetobacter baumannii
atgttaatcaatttggcattcttaggagcatgttttgatatcttgacagatgcaaacttaattaaaaattttacagatgaagagcgtagctctttattgtcttattacatttttgggtggagaattgcttctatttttgcaggtggggcagttctatttatttttaataaaatcttccaaggaagtttaagccacttatttgtattttcctctttgatttttctgattttttttatagtttttactgttaataagttaagcgatttttggaaatttagtcgggaaaacttattctattttttaatgtttttaccaccgatctctttattttttattgtgaaaactagtctatacaatttaaaagattcgttttctgttctttctgatataagtaaattgtttttttattcaacattttataagctttttgatttaaccttatcttcttttgtgatcatattttttattaaaaagtttgagctaactcttgagttttttggtgtggttaatactattttaccgctacttgctgttgtattttgtggttatgcttggggacggatgagtagtaaatttccagcaaattatataatgttgttttctttgttactgaaatcattaaccttgttgttctttatctatgtaagtttttataatgaaattaataaagtttatttacttgtcttgttctcactcaatattgtttcatctagctttgttacttattctttttccaattatttaatgcaagctgttaatagtgctaggtcatcatttaaattttctattttaacatctttgtctatgcttttaattttggtatctgtaccagttgcatcttatttagttgataatggctttgttgcacaaagctattcttga

SEQ ID NO: 62546 - DNA, 279 bp, Acinetobacter baumannii; identical to SEQ ID NO: 58479

SEQ ID NO: 62547 - DNA, 279 bp, Acinetobacter baumannii
atgcttaagtttctcgcaaagttaacagaatggttattaaaaaactcggttcaaaaggtgcttactggggcgggtttatcggtggtttcttacctgtctgtagtagctgtaataagggtcgcttttaacagtttaattaattcaatttatagcgtttctgctgatcttcttaattttatgggtatttgtgggatcgattacgctttaagtggtttcgtttctgtagctgttttcttgatgagtattaaacaaggcagcttatctttgaggaaaaaataa

SEQ ID NO: 62548 - DNA, 336 bp, Acinetobacter baumannii
atgccatattcagatctctcatttcgcgcgttaagcgtgcttcatacatctcgttatctttttaatgaccatggttttcacaacgttggtgtagaccgcattgtagaagaagcggaagtgaccaaaaccacgttttataaatattttcagtctaaagagcggcttattgaaatgagtttaaattttcaaaaagatgctttaaaagaaaaagtcttctcaattatttacacacaaaaagatttagtggtgcgtgaaaagttaaaggaaatattctttttacatgtcaatctggaagggctgatcctagccaaaataatggacagtacttccctctaa

SEQ ID NO: 62549 - DNA, 339 bp, Acinetobacter baumannii
gtgaataagctatacaaaataatattaattttgacaggagtaatatttttattttctgggtgtagtcgtgatccgattagagaggttttaaaaaatgtggaaggtgtgcctcgtaaggaaaaagatcgatcaattaactggtacaaaatgaatccccagataagtgaaaaagtaaaaaatgcttgtgatcaaaatactagtaaatattttcagagagaagattgtataaatgcaaaagcttctctgaatttattgttgcttgagtctagcactgatttaagtaacaacataaggcttagtcgtgatcgtgaatattttaataaaatatcaaataaatag

SEQ ID NO: 62550 - DNA, 303 bp, Acinetobacter baumannii
atgtctttgattgaagacgtgggcaaaatttttttatattacactatggaaaaaactggtgtaagaatagaaaaggcaaccttatatattaaagaaccgtatgcaaatttaattgaattgccacaaacaacaactaaggagctgaatcagtataaaacctttatttttaaagatgttaaagtgttatttcaaggcattggtaaaagtactttagtttcttacaaagtgaaagatatagaaaagcagttagtgattccaaatgaatatattactgtagagcgaagcaagaaaattgaagagtaa

SEQ ID NO: 62551 - DNA, 210 bp, Acinetobacter baumannii
atgataaaagttattcatttagagggtaagtttattttggtagatgatgaatatgttctatcagttcaagcttctattatcagcactaaagatgaagatggttatattccaaatgaattttttgagttcgtaaaaattttggatgaagacgagtttgagatagatgaagtagtgaaccgtaccgggtttgtcggagggtcaatattctga

SEQ ID NO: 62552 - DNA, 336 bp, Acinetobacter baumannii
atgaaatatcaaatacaaccaacacaagtaccggatgatttaaatagctgctggttccatcctgatatagaactacatgacacaattggagagcatgctgagttttatacaaaagaacaatgggcacaactgcaaaagaaccttggtgtttctataaaaatcgaaaaccttgactattgggatattgaagagattccagaagataatctttgtgattggtccaactggaagccgcagccaccacaagaaggcttatttctaatagcagcatttgattcagaaaatggccctgttctttggtgggcaaaccctaaagcggaaagtaaggaggagtaa

SEQ ID NO: 62553 - DNA, 186 bp, Acinetobacter baumannii
gtgggctcggttattggtggaattaaagaaacacaagaactactcgatttttgtggtgagcataatatcgtttctgaagtagagatgattaatatgcaaaacattaatgaagcttttgaacgtatgctaaagagcgacgtgaagtatcgttttgtgattgatatgaaaacactgtctgaagattaa

SEQ ID NO: 62554 - DNA, 2925 bp, Acinetobacter baumannii
atgtttattaaaagtattttatcttcgattactagtattatcccacttcctgaaaatagtaacacaagcagtaatttaggtaacggctctggtgacggcctacttaatggaatatcttccggaaatggtgaacacaactatggtattggcaatggtattgcggatgacgcaagtattaccgccccaattaccattcccctcaacctatctggtaactcaattactctcataggcaattcatcttcaagttcggtgaatagctctccaaccaccacttcaaataacgttaatgacaacgacgtaacgaataatggtaacggctccaccattggtagtggtacaggcaatggctctggtgacgggcttttaaatggcgccgcttctggtaatggtgaacacaactatggaatcggtaatggtattgccgatgacgcaagcattactgccccactttcaattccaattaaccttgcgggtaactctattaccctaattggtgactcatcttctagttcggtcaacaactctgcaaccaatacatcaaataccgtgaatgataacgacaccacctataacggcaatggctcaggtgctggtaatggttcgggcgatggcttgttaaatggaattggctctggcaatggcgagcaaaactacggtatcggaaatgggattgcggatgacgcaagtattacagccccaattacgcttcctattaacttgtctggtaactcaattactctaattggcaattcatctgcaagttctgttaattcctcgccaactacaacgtcaaatactgtgaatgacaacgacaccacctataacggcaatggtactggtgatagcggcgtgaacgctctgggcggttccggcaatggttcaggtgatggcgcaggtaatggtatcgcttctggcaatggtgaacataactatggtattggcaatggtaacggcgacgatgttgatattactgctccgatcactggtgttctaaacatttcaggaaactcatttactctcattggtaattcttcatcaagttcagtcaatactgcgccaaccaccacatcaaatacggtgaacgacaatgacaccattgataatggtaatagcggcggcacaggtagtggttcaggcaatggctctggtgatggtttacttaatggcgctgcttctggcaatggcgagcataactacggcattggcaacggaaatggtgatgatgtagatattaccgcaccaattacaggtgtttttaatttctctggtaactctttctcactcattggcaattcatcttctagttcaattaatactgccccaactacaacgaccaatacagttaatgacaatgacgtgactgataatggaaataatggaggcgggcttcttggtggaagttctggaaatggctctggtgatggcctgttaaacggcgctgcttctggcaatggcgaacacaactacggtattggtaacggaaacggtgatgatgcagatttcaccttccctcttactggcgtacttaacttttccggcaactcgctttcaggctttggcagttcatctagtgaatcggtaaatgttgcaccaaccacagcaactaataccgtcaatgataatgacaccattgataatgccaatacaggtggccttggtggcggttcgggcaatggctctggcgatggccttttaaatggtgcagcgtctggtaatggcgaacataattatggcattggtaacggaaacggtgacgatgcagactttacgcttccatttactggcggtttaaatattctgggcaatgctttatcaggtatcggcggttcttccaccgactctattaatatttcaccgacaactacttcaaacacagtcaatgacaatgacactaccaacaatggcaacacttcaggtggtgtgattggttctggcgactcaggcaacggctctggtgatggcctattaaatggtatttcatcaggtaacggtgaacataattatggcattggcaacggtaatggcgatgatgttgacgttgttgcccctatcactacaccacttaatgtattaggcaactctttctcatttattggtggtgaaggtacaggcgatatcttaggtccgattactggcattattggtggtattggcggtgatggagatatcctaagtccaattactggcattatcggtggtattgatggtgatggagatattttaagcccgattactggcattatcggtggcataggcggcatcggtggtgatctaggcgataacccacttacaggtattattcaaagcggtattgacgttctacaaaatttagaaagtttaaaaacaggtttgattaatacaggtattgatacgattgccggaacaattattggtgtgttccctgatgcagagcatcctgtcggcgattttgcagaccttggaaaactacttttcgagacttcacgtgatagtgttaacggtacgcttgaggctatttctgaccttgcaggcgctgaccttgagggtgcaagtggctcgattactggtgtaattgatactcttattaccaatggttcaacggcatctaccattattcagcatattgtaggtgatgacctagtcactgaaaacggtggcctcttgggttcaatcaccacgattattggtggtgttgacagcggcgacggtggtttactgggtggcctagatggcttaattagcattaactatggtgactcagacaatagtaattctgtagatgtagaagatattttaggaaatatcctcggctcggtaggttcaaatcaaggtattgctgttggtgaacctgatccaacgggcggtagtttgattcatacgatttcacttaacacagtaaatcagttaactgaccaacttttacatgctttaccaactgtctaa

SEQ ID NO: 62555 - DNA, 666 bp, Acinetobacter baumannii; identical to SEQ ID NO: 61575

SEQ ID NO: 62556 - DNA, 2361 bp, Acinetobacter baumannii
atggctaaagagaatacacaacagaaagaaattaaaaaacaacctgctgttgaacttgctgtttttaacttaaatagcgtgacggatgtagcggacttgcaaatggtcgcaagtcaggttcagcgttatttacaagtgtgtggaaacacctcattagaacaaataaaaagtaaggccaatataaccacagttgctaatatctttgcattgacgggtagtgtactagatctaatgctctatgctacagataaaaaaactggtgatgctgctgtacaacgtggggcattacttgcggcaaatttaattggtttattttcagaaccgaataatgaagcacatgcacgaatggctttacgtccgatgtttggcttaatggcagagtgcttatatcgagaaaatggaaaaattaaagaaacggatattaagcgtttaggtttacatctcaatgcgatgatcgctggagatctagagaacttcttaaaagagactcaagcgaagttaagcagtttacttactagcgctacaacattgggtgtaaccattctacaaagcatggcgaccccagcaacaggtataaatgcaggaataaccactgcggcaggtgcaagtgcagaaaaacgagatccgaaactcaaatttaccaactgggctgttccactcattgatttattagggaagccgagccaagcaaatttaacccctaaaatacaaccaaatataacaagtcgtttgcaacaagaagcaactcaagctattgcggctttaagtcaaactttacagcaacaagcaaatgctggccaaaaatatactttggcatggctattacaagaaacactgaaagctatacaagcattagaaaataaaggtaatgcaagtgtgccagtcaaccagacgggtgaatatgaacggcatacgaaaggagacactttagaatttgtaagtttgcaggcagatgctttaaatgctcctccatgtgaaggtgctgattcacaatctggaaaaagtattagctattcaattggtgctgaacgggttcaacatgcagacttctatttaccaaaaataggtttttcttttacacggcaatataactcacaaatggatgagtttgatcaaagtatggtcggtgcacgttggatgatgccattttccaatatgattcaacaaaatgccaaaggctatctatttattgatagtaaagggcgaaagcatcaactgccagcttccattacatttgaaacatatgaagtgccttatgagggaataacaatacaacctcttaaaaatggagatctggttctaaactttgggggagactggacttttcaatttcatcagttttcagtcggacagccttatcaattgattcaacaattcaatgaaaaaacacaagaaaaaattgatttaagttatcttatttttgaaaaggttgcttatcttcaatatgttgtttttcagttagagcatgccaaacaccaattaaaatttgcttttaatgagcaagttaaaattatggcggtgtttttagatgataaagccgaaccattagcacgttatgaatacgatatccaagggaacttaattaaagctattgatcagaatggctatacaagaacttatgaatataacaactttcatcaactaacacgctatacagaccgtacagggcgtggacagaatattcgttatgaatcaacagacgccaaagctaaagcagtagaagaatgggcggatgatggtagtttccataccaaactaaaatggcacccgcgcttacgtcaagtggcggtttataacgcctatgatgtaccaacctactattactttgacctcaatgggtttacttatcgaactcgtttagcggatgggcgtgagtcatggtatagccgtgatgggaaaaagcgcattactcgacaaattgattttgaagggcgagagactcaacaggaatataatgatcaagatcaacttgttaaaattgtccagccaaacggcggagtaatacgttttgcatatgatgaacaggataacttagttgaaattaaagacccagaaggcagtatttggaaacgggaatatgatgaaaatggtaatcttaataaggaaatcaatccattagggcatatcacacagtacaaatataacaatgataatcaactggttgaagtcattgatgcaaaaggtggggttaagaaaattggcactgttgcaaagttagcgatgaggcagccttttgtcttattcaaaggccttacatttcaaaaactctgcttaccaggcgcatttcgcccaggggatcaccataataaaatgctgaggcctggcctttgcgtagtgcacgcatcacctcaatacctttga

SEQ ID NO: 62557 - DNA, 981 bp, Acinetobacter baumannii
atgacattatttatgtattgttttctttgtttaatagctttaggttttacttttgtgcaaaaaaaacattttctaaattatgtttttattttctcctgtttgatggggtggtctattgttgtgcggtttaactcaattcaacaagatttgatagtttattcggaggtaatgacttatgattgggaattttttaaaagcttttatgtattaagagagccagtttattggattacaagtaaatttctttatgatttttttaaagatcctatttttgtatttattatatgggatgctataatttttagcttacttacctatgttgcttataaaaaagatgtaaaaccatattttattttggtttttatattgttctttcctaatgttatgggttttttaaacgtttataggcaatatatatcaacagtatttcttttcttgtcttttttgcttgtttatgagaatcatataaactccaagtttttttatttagcttctttttttagtcataatgtgggagctatattcttgcctttgattttcataaggaagaaattttttcaaattaaatttattttagcttctattacttctatatttgctatgattctcttatcgggctcaaaatctgaagtagataccggagaaacatctccattgcttttttttgctgttgtgtgcgctggaatgctgatttttttatcattgaataaattaatattatataaaaaaaatatagatttatattatataaatatgtactgcatatttgtatctcttttttctgttttatttttatctaatgctccagcaaaaagaatttgtatgattgctttaatttttttattatattcaatttattggtttattgaagataataaaaagaatattcttgtttttagatttgctttggtatttgttgctatagtcccaacgtttatattcccatcagtttttaatatgcttttatatgtaggtctttaa

SEQ ID NO: 62558 - DNA, 222 bp, Acinetobacter baumannii
atgaatgcttctttaattctgtctcataaaaatattgatcatatttataatttggtgcaacaaatacttgattctaatttttatattcacattaatttaaaggttaattttgttaaaataaaaaaagctacttctaatataggaaatattttctgtgtggaaaatcgggttgatagtaaatgggctagatatagtatagtgctgtctcttatacacatctga

SEQ ID NO: 62559 - DNA, 324 bp, Acinetobacter baumannii
atgattaatactctaaaagaaatatcaaagtatcagacaggtttatggtatttatctgatcatggcgaatcaaccggagaacatggtttatatttacatggttcaccttatgcaatcgcaccgagccaacaaacacatgtaccaatgattatgtggttctctgaaagttggaaacaacataatcttgctcaagtgaattgtttaagccaacaaactaaacaaaagttaagtcaggataatttattcccaagtttgttaagtttgctggatgtaaaaactcaggtagtaaataacaaacttgatatgttgagccaatgtaaataa

SEQ ID NO: 62560 - DNA, 291 bp, Acinetobacter baumannii; identical to SEQ ID NO: 46180

SEQ ID NO: 62561 - DNA, 951 bp, Acinetobacter baumannii; identical to SEQ ID NO: 51155

SEQ ID NO: 62562 - DNA, 1017 bp, Acinetobacter baumannii; identical to SEQ ID NO: 51504

SEQ ID NO: 62563 - DNA, 2481 bp, Acinetobacter baumannii
atgacaatgcctgtgttcgtgcatgctgaagaagcagctgcgagtgcgcctgtagaagctgaatttgattctgcttttttaattggtgacgctcagaaagtcgatatttctcgatttaagtacggcaaccctgttttaccaggtgaatataacgttgacgtttatgtaaatggtcaatggtttggtaaacgccgcatgattttcaaggcattagatccaaatcaaaatgccgtaacttgttttactggaatgaaccttcttgaatacggcgtaaaacaagaaattttaaccaagcacgctccccttcaaaaagaaaataatagttgttataaaattgaagaatgggtagaaaacgcattttatgaattcgatacgtctcgtttacgtgtagatatttcaattcctcaagtcgcattacaaaaaaatgctcaaggctatgtcgacccaagcgtatgggatcgcgggattaatgccggctttttgtcttatagtggtagtgcgtataaaacttttaatcagtctggtgaccgaagcgaaacgaccaatgcttttatgggggttacggctggactaaatttagcaggttggcaattacgtcataatggtcagtggcaatggcaagatacgcctgcggaaaatcaatctaaatcagactatcaagaaacaagtacatacttacaaagagctttccctaaatatcgtggtgttttaacacttggggatagttttacaaacggcgaagtatttgactcatatggttatcgtggtatcgatttttcaagtgatgatcgaatgctaccgaatagtatgcttggttatgctccacgtatccgtggtaatgcaaaaaccaatgcaaaagttgaagtacgtcaacagggccaattgatttaccaaacaactgttgcaccaggtaacttcgaaattaatgacctttaccctaccggctttggtggtgaaattgaagtttctgttatcgaagcgaatggtgaaatacagaaattttctgtgccttatgcctctgttgtacagatgttacgtccaggcatgaaccgttactcattaactgtaggtcagttccgtgatcaagacattgatctggacccttggattattcagggtaaataccaacaaggtattaataactatttaaccggctataccggaattcaagcatctgagaattacgctgcaatattgcttggtgctgccgttgctacaccaattggagcaattgcattcgacgtgactcactctgaagctgagtttgaaaaacaggcttcacaatcaggtcaaagtttccgtttaagttatagtaagttaattacgccgaccaacacaaacttaacacttgcagcttaccgttattcaaccgaaaacttctataaattgcgcgatgccctgcttatacgtgacttggaagaaaaaggtgtaaacacttatgctgctggtcgtcaacgtagtgagttccagattactttaaaccaagggttacctgagggttggggtaacttctatgtggtaggttcatgggtagattactggaatcgtagcgagagtactaagcagtatcagattggttatagtaataactaccatggtttaacttatggtttatctgcaattaaccgtaaggttgagtacggctcaaatgatgcgtcgcatgatactgaatatttaatgacgctttcattcccaattaactttaagaagaattcagtcaacgtcaacgttactgcttctgaagacagccgtactgttggtgcaagtggaatggtgggtgatcgctttagttacggcgcttctgtgtcacatcaagactatgcgaacccaacatttaacgcaaatggtcgttaccgtactaactatgcaactgttggcggctcttatagtattgctgattcttaccagcaagcaatggtaagtttaagcggtagtgttgttgctcactcagatggtattttatttggacctgagcaaggccaaaccatggtacttgtgcatgcacctgatgccgctggagcaaaagtgaataacacggttggtctaagtgtaaataaagcgggttatgcagtagttccttatgttacgccataccgccttaatgacattactcttgacccacaagaaatgtcgagcgaagttgaacttgaagaaacaagtcaacgtattgccccatttgctggtgcaattgcgaaagtagattttgcaactaaaacaggctatgcagtttatattaatagtaaaactgcagatggcaacagtttaccatttgcagcgcaagtctttaaccagaaagatgaggctgtaggtattgttgcacaaggtagtatgatttacttacgtactccactcgctcaagatcgtctctatgtgaaatggggcgatgaaagtaatgaacgttgttcggttgagtacaacatcagtaatgagttgaaaaataaacaacaaagcatagttatgactgaggctgtctgcaaatga

SEQ ID NO: 62564 - DNA, 438 bp, Acinetobacter baumannii
atgcaaggtttaaaacgtcgtattgtttatgtttcttcatatgaaattattggaatggtgatttcatcagtaggtttggctcttttggccggagatagtgtagagcacactgggccactttcagtgatgattactactattgcggtaacgtggaactttatctacaacattctttatgaaaaatgggaggctcgccaagaaagtaagtcgcgtacggttaaacgaagaattgcgcatgcgatcggatttcaaattactttagtaatgttcttaattccgcttattgcgtggtggatgaatatttctcttgttgccgcattttggttagatgttgcatttattattatcattccaatttatacgttcatatttaattggacattcgataagttatttggattgcctgcctctgcacaaccaagtactgctcaacagtag

SEQ ID NO: 62565 - DNA, 282 bp, Acinetobacter baumannii
atgagcacttcacgagtaaagctaactaagtcatttatcgatcaacttgaactcacaccggctatttatcgtgacagtgagattattggctttgctattcgtgtaaataactcttataaaacttacattgtggaaaagaaagtaaaagggaaatcaattcgttgtaaattaggggattacgaaaaaattactcttgaagacgcccgtatacttgcacagcagaagttaaaagagttaactgactcaaactctttaagcattaaaaataataaaatagtttaa

SEQ ID NO: 62566 - DNA, 654 bp, Acinetobacter baumannii
ttgggacaaaaagcatttgctgtacagtgcgatgttgggcaagcagaacaagtacagactttggctgatcaggcagagcagttgcttgatcatccggtaaccctcatcattaataatgctggcgtaggtctaggtggcaaatttgatgaaatgagtttggaagactggaaatggtgtatgcatgtaaatctgtggggtgttattcatggttgtcatgcatttgtgccaaagttcaaaaaactaggttacggtgcaatcattaatgtggcttctgccgcgtcgtataccgcagcaccagaaatgagtgtctacaatgtaacgaaagcgggtgttttggcattatcagaaaccctttcagccgagcttcgcaaattcaatattaaagtcaatgtactttgcccgactttggtgccaaccaatatcattaaaaatggtcgtattccggggcgttattccaagcttgcagaccatgcactcatgaactatgccatgacgaccagcgatgcagttgcaactttaacattgaatcgattagatcgtgggcagctctacaccacgccacagatcgacgccaaattattctggcttatgaaaaggacatctccaacgctatatgcaaagttccttgggctttcgtatcagttatttaaataa

SEQ ID NO: 62567 - DNA, 426 bp, Acinetobacter baumannii; identical to SEQ ID NO: 61578

SEQ ID NO: 62568 - DNA, 345 bp, Acinetobacter baumannii; identical to SEQ ID NO: 46216

SEQ ID NO: 62569 - DNA, 411 bp, Acinetobacter baumannii; identical to SEQ ID NO: 50973

SEQ ID NO: 62570 - DNA, 294 bp, Acinetobacter baumannii
gtgactgaacaaaatattaaaggacaattcgaaagtcatttaagaatgagccagcaaggtgatacccaggcactttctctgttaagccgggttgggcctattttaatgcaaagacagattttagctcagcaactcaattatgatgcttcaatcttaacaatggcactaaaagcaaaatcagcagatgatttgcaagctttaacccaacaacttaatcaacaaggttttaaagctgagttaggtaatgttcaagctgatggtaatggtgcgattggggtggtgaaaatacaataa

SEQ ID NO: 62571 - DNA, 318 bp, Acinetobacter baumannii
  misc_feature (246)..(255): n is a, c, g, or t
atgccacaaggcttacaagtatttgatgagtctaagaatatattattagatgctactactcgaattactagacttattggtagggtggaaggtggtagtcctcccggtatctcaggttcagtaacaatacctactgacagtattggtaatggtaatatattttttattatcgatttattacccggctatggaagtaatcttgcagagatgacctacaataaattaactatttcaggtaatacaatnnnnnnnnnnatattaccattaccaatactgtcagtaggtctagttactggattctattatggggtttattaa

SEQ ID NO: 62572 - DNA, 378 bp, Acinetobacter baumannii
atgaatttatttaacgccggagcatcttcttcagttttcatcggtcgatgggttctaaagtgtctaattcctacatccggagtaaatgattgttcaactccttcgccacgtagaacaccagcttcaatcgattcacgatctgcaacaattccattgacttttaaatatgtagatttatttaatgcaaaatttccattacgaaccatatttaccagttcatttgacgcatcaattaaatttaatacttgtcgctggtccttaacactgtgtccacctacagtggtgccatttattaaagatgctacatcatcaagcttatgtgaattaccagctaccgcagcagagttcgctacatgttcaacaaaattctttcgataa

SEQ ID NO: 62573 - DNA, 207 bp, Acinetobacter baumannii
atgagtgctggtttagatgctattagcataccggctgataaggcaattgacttccgtcaaaaaatggttcgtttctatgaatcaaaaaatgcggatgaagtgatggagtttttagctgacttgcatccggctctcaataatacgaaaaaattagatgcagaaaaggaaaagaaatcagaaaatgactttggccgcagctttcagtaa

SEQ ID NO: 62574 - DNA, 348 bp, Acinetobacter baumannii
gtgaatattaagagattaattctaaagtcattaggtgttattactgttaatagcacggctgggtatgaagctttacttcttggaaaaccagtttatcttttgggtagagtgttttatgaaaactttaataacgtatataacctcaaatcctttagagatattagagatattagagatattctggattttcaatttttagatgtaaaaaaagattttatcgcatataaaaaatatgtttataaaggtgtaatttttattgattatggtaatagagtcaatgataaaaaaagatactttagtgaattggtcgattcgatattcttaaatattaatacggatattgagtga

SEQ ID NO: 62575 - DNA, 1365 bp, Acinetobacter baumannii
  misc_feature (1349)..(1358): n is a, c, g, or t
atgaaaaactatcaaaaagtactaggagtacttactgttatcgcagcaatgcctttaatggctcaaactactataaaagttacaacatttaatgatgaagataatgagaacatgaatacatgttctttacgtgaagctattacagctgcagaaatgagaaaatcttatggagggtgtgaggttccagcaattgatcaaaattatacaattcaacttgatgctggtacctataccttaaataaagagttaacacctaaaattgctttaaatattattggaaaagaggcgacagattgggagcgtaaaggagttttaactaatgactatcctgctcaaaaacctcttcaaactcgtataaatgctggtggaaaatcacgaatttttaatacagctgtttaccaacaatcgttaactttaaccaatatcattttggaaaatggtaaaagtgctgagcaaggtggagcaatttacgctggtgctgatgtaactttaaaaaatagccagatcttaaactctcaagcctctaaaggcggggcaatttatcttggcggaagtactgctagtttaacaatgaatcattcattagttcaaggtaatggtaaggcttcgactgaaggtagtattttggcaatgagttgcatgtttaataattcatacagtggacgtatcttttcatttgattcaaatagttttattgataatggtggaataaactctataagtatttttgatttttgcggtagtcctacggcgaaatttactaataatacaattgctaaaaatttagcgagtcttactaatggtaatattattaaatttactggagatgctgatccattaaaaaatcaaactagtaagttaagctcatctagtagtttaacattgcaaaataatacaatcgttgagaactctgcatacaccacatttttatacgataaattaggtacaaaagaattaaattttaatatattagcgtttaatacaggttcttatgcatgtaaatatttattaggagcagcggcggctgaaaaagatactggactaaatttgaaatttaatgcattaaacttaaatggtaatactcctaaatgtgatataccgacagaagtaatttctacaggcaatacgaatattgatataaaaaatgaagtttttagtaatttattagaacctttaaaagaagctaatgaaaataatggttttttaccaatttactatcctaaaaataatttttcagcgacagatttaattgatgttgatttggaaaataagggtacatgccaaactcaggaccaacgtggattatcgagattagtaagtaatacgtactattatcaaactctagaaannnnnnnnnngaattaa

SEQ ID NO: 62576 - DNA, 1029 bp, Acinetobacter baumannii; identical to SEQ ID NO: 45968

SEQ ID NO: 62577 - DNA, 666 bp, Acinetobacter baumannii; identical to SEQ ID NO: 61575

SEQ ID NO: 62578 - DNA, 1005 bp, Acinetobacter baumannii
atgaaaagaggttattttaataataagattaaggacagcattttttttaaagagaattcaaagaagtgggttttatcaatagagtattcgacacctatttggtatgacttgataatggatgagtgtgaagagtataaagagttttataaggaaatattaaatgaccaagttgaagcctcaaaagattgtaatgaaaaagagtttatttactttttcacatctagacctaaagttaggtttgatctctcacggaaaattaaaattggcaagaatattggtgaaatattcttaaatttaattatcaattgttcagaaaaaagaaaagttaatattgatcatgattattggcgagatttcaagaaaataattattaacgaaaaatttataacttttaagttcgatgaagatgttaaaataacatggccaattcatgtttttttatatgaatataatgttgaattaggtcttgaaagtgaagtgcattatataggaaaaacaaaagaccccgtaagtcgtacaatgactagagagcatcgtggttattccgatatgctttactacttgttgcatttaaaagaaaagagagatatttttctgaacgttttaatttttaaagtatcagttatttctcctccacataatagtattggaatattttcaacaaactccgtacttgatcatattccaaaggaattggaaatatttgttattgaatattgcctaatttattattttaaatcttcaattcaaaaaggtgatatggatacttcttggagtaagtttgttaattactttagggatttccagaaagaaggaataaacgcgttgtattttaagttggaaatgaaagaaagtacagaatataataatttgggtacacctaatttagctgccaagaaaagccattacttttcttggcaattaaatgaaaatggacttcagatggaaagattttatgaaagtaaagatttagatgaagaggtttttaaggatttctttgtttag

SEQ ID NO: 62579 - DNA, 981 bp, Acinetobacter baumannii
atgacattatttatgtattgttttctttgtttaatagctttaggttttacttttgtgcaaaaaaaacattttctaaattatgtttttattttctcctgtttgatggggtggtctattgttgtgcggtttaactcaattcaacaagatttgatagtttattcggaggtaatgacttatgattgggaattttttaaaagcttttatgtattaagagagccagtttattggattacaagtaaatttctttatgatttttttaaagatcctatttttgtatttattatatgggatgctataatttttagcttacttacctatgttgcttataaaaaagatgtaaaaccatattttattttggtttttatattgttctttcctaatgttatgggttttttaaacgtttataggcaatatatatcaacagtatttcttttcttgtcttttttgcttgtttatgagaatcatataaactccaagtttttttatttagcttctttttttagtcataatgtgggagctatattcttgcctttgattttcataaggaagaaattttttcaaattaaatttattttagcttctattacttctatatttgctatgattctcttatcgggctcaaaatctgaagtagataccggagaaacatctccattgcttttttttgctgttgtgtgcgctggaatgctgatttttttatcattgaataaattaatattatataaaaaaaatatagatttatattatataaatatgtactgcatatttgtatctcttttttctgttttatttttatctaatgctccagcaaaaagaatttgtatgattgctttaatttttttattatattcaatttattggtttattgaagataataaaaagaatattcttgtttttagatttgctttggtatttgttgctatagtcccaacatttatattcccatcagtttttaatatgcttttatatgtaggtctttaa

SEQ ID NO: 62580 - DNA, 612 bp, Acinetobacter baumannii
atgaatgcttctttaattctgtctcataaaaatattgatcatatttataatttggtgcaacaaatacttgattctaatttttatattcacattaatttaaaggttaattttgttaaaataaaaaaagctacttctaatataggaaatattttctgtgtggaaaatcgggttgatagtaaatgggctagatatagtatagtgaaagatattcttaatttaatgaactatattttacagcaagatactcggaataaatattttcatttaattaatagcgatgatgttatttcaatcaacgaacaggtttgggacgactctacaatatatatggaatatgtagggacaggattattttctcgttcaaagtacttcttcattgactctgctttaagtaatattctgattaaagggggatggttcttatatacattatttttttttatttttttaaaaagagagaaggattacagagtaaatgcaacattcataatttttgtatgtttctatttctatgagaatatttttaatggaaatttactattatctatttttttatttatgaatttttacaatcttttgtcaaaaagttatagtttgaagaatattgggtga

SEQ ID NO: 62581 - DNA, 207 bp, Acinetobacter baumannii
atgccagaaaccatttcaaaggctttacctgcttgttccgcttgtaagacacagaataaaacaaaagagataactaatattttagaagcgacagtcactgtcggattaagtcctttaaagactcctgatgtagctcgcatgactcctccttggattgcgcacaggcagctaatagttttagctgtatctggaagcccaacagattag

SEQ ID NO: 62582 - DNA, 1239 bp, Acinetobacter baumannii; identical to SEQ ID NO: 45924

SEQ ID NO: 62583 - DNA, 3177 bp, Acinetobacter baumannii; identical to SEQ ID NO: 53535

SEQ ID NO: 62584 - DNA, 1161 bp, Acinetobacter baumannii
atgtttatcccatatggcaaacaaaatataaatcaggctgatgttgatgcagtggttcaagttctccaatctgactttttgacacaaggtcctcaagttcctttatttgaaaaatcagtagcagaattagttggggcaaaatatgcctttgctatgaatagtgcaacatcagctttacatgtagcttgtttggcattgggattgaaaaaaggagatgtcctttggacatctccgattacttttgttgcatcggctaattgtgcattgtactgtgaagcagatgtcgacttcgttgatattgacccagatacctataatctttcagttgatgctctaaaagaaaaattagaaattgctaagaaaaataataaattaccaaaaattgtagtgcctgtgcatttatgtgggcagccatgtgatatggaaaaaatccatgcactttcgaaagaatatggttttagtgttattgaagacgcatcccatgcaattgggggtaaatataaagaacgttatattggttctaaccagtattccgatattacaatctttagttttcacccagtcaaaattattacaacggctgaaggtggaatggcgcttaccaataatgaagatttagctaagaaaatcgatttattgcgtagccatggtgttacaagaaacccggaatttatgaccaaaccatctgaaggcccttggtactaccaacaggttgagttaggttataactatcgcatgaccgagttacaagctgcattaggggttacacagttgactcgcttagaaacatttgtagctaaacgacatgagattgctaaaaaatataatgagcttttaaaagatttaccattaattactccataccaattaccggaaacatattctggtttgcacttatatgtcattcgtttaaagctagatgaactgagtaaagggcgtaaagaaatttttgaaatcttgagagaaaagggtattggagtaaatgtgcattatattccagtgcatacccaaccttattatcaacaattaggcttcaaacaaggcgatttccctgaagcagaagcttattatgaagctgctattagcttaccaatgttccctgatttgactgatgagcaaattcagtacatttaccagacactaaaagaggtgttggtataa

SEQ ID NO: 62585 - DNA, 1782 bp, Acinetobacter baumannii; identical to SEQ ID NO: 50937

SEQ ID NO: 62586 - DNA, 1194 bp, Acinetobacter baumannii
gtgcagattgatcatacacctctagatattgaaatcgtggatgacgagttcagagaagcgattggaaaacctcacttaaccttggcaatcgatgttttcagtcggatgattgttggatattacctatcactagaagcaccaagtacgacttcagtggcgatgtgtatagcatcttgtattttgtcaaaaaaacgtaagttgatcgaactaaatattgatgctgaatggcaggtcgaaggtattatggactcggtgcatacagataatggacccgattttagaaccaatcacatcagtaaagcttgcctaaaatatgggattcattgggaatatagaccaattggtggggcgagatttggcggtcatattgaacgtatgcttggtattgtcaatcttgaaatgcatgtgctggatggtacaactttttcaaatgtgcagcagcgaggaacttatgattccgctaaacaagcctgtatgacattaaaggaacttgaatactatatcgtttattggattactaaagtttatcatcagaagaagcattcagctttaggaacatcacctattgttaaatgggaagaaggtgtttggggaacgaagacgacagcaggaacaggtttgaaagaacgtgtatcagatgaagataccttgtttattgattttctacctgaatttgaagcgaccattcagcgtacaggggtgcagaaagataacttattctattttgcagactgtttaaggcaatgggttaattctattgatccagacgacaataatcgaaagcgcaaaagaaaattcttatttaagcgtgatccgagggatatttcacagatttggttttatgagccattttctaatacctattttaaagtacccactgcaaagcgagagataccaccgattagcttatttgaatatagacaggtacagaactatctcaagaatgggcgtcaggatgttcagaatcaggatgagatttacaaggcgattttacatctacgtgagcagcttaatcaggctcgaagcttgactcgaaagcaacgtcgctcaaaccaaagaaaaaaggaaaatgaaaaagccattactcagctatccgaacagaatcagtctaaaaaggctgtagtttctgaaagccttcagacaagtgatgatttgtggagtactcctttaactgcatttgatgatttaaggtga

SEQ ID NO: 62587 - DNA, 132 bp, Acinetobacter baumannii
atgctatttgttggcacagaaatttggtgggcgactttaaagaactgttcagagccggagcatcttgaacactttcaagaagaggacaaatctcatgggctgacatataccattcagcatcttgccaagtag

SEQ ID NO: 62588 - DNA, 375 bp, Acinetobacter baumannii
atgaaaaacgtcattattttaacttctatattgttattaagtgggtgcacaattaattctaagttattatcaccagcaaaaagtgatgatgagaaaattattgtagaagcagaaaagtacaagcaacaatatcaaaaaaagatctttaaaatttggaatgttccgccttcttcagtgggaatgagtgctagcgttaaagtctttttaagtgatactggtgagattgagcaaattatttttctagataaagaagaccaaaagtttaagtcgagtattgaaaaggcgatatggcgtgcaagtccctttgttttaccttttaatccggaagttagaaaacaagtaagaaagttcaatattaaatttactgcaaagtaa

SEQ ID NO: 62589 - DNA, 375 bp, Acinetobacter baumannii; identical to SEQ ID NO: 62588

SEQ ID NO: 62590 - DNA, 879 bp, Acinetobacter baumannii
atgcaattaagcgatagtgaacggattgagacattatttactgatagatggattggctataagaaagccattaccatcatgaacacattgaccgatattttgaatcgccctaggaaattaagacctgaatgcttgttgattgttggtgactccaatatgggcaaaacaactatcattcatgagtttgctagacagtattatacaaaaaccgtaagtgatgctgacatggatttattgtccgtaactaagccagttttaccgatacttgctccagcaaaagccaatgttaaagaactctatattaatattttaaatcacttctttgtgccatttcgggcaagtgatcctgaagccaaattacgaaatcaagccgtacacttgatgcgtaagtatgaaacaaaaatgttgattatcgatgaaattcataattgtctgacaggttcagccaaattgcttcccgaagtcatgaatacgctcaagaacctcagcaatgaattgagtctgaatatcgtaggtgttggtactcgtgaggcaatcaccatactgcatactgatccgcaatatgccagtcgctttgatgtggtgaatttacctaaatgggaactcaatcaagattttttaagattattagtcagctatgttcgactattgccgttaaaaaaacagtctaatcttgcatccaaagagattgctacgttgatttttgaagtgtcaggtggaaatttaggggatttaaatcgattactggtggagtgtgccaaagaagccattttacaaggtgatgaagaaattacctatgacatcgtacataagtttaaatggcttaaacctacggagggtttaagaaatattagaaatataaatctcagcctgagttaa

SEQ ID NO: 62591 - DNA, 981 bp, Acinetobacter baumannii; identical to SEQ ID NO: 62557

SEQ ID NO: 62592 - DNA, 606 bp, Acinetobacter baumannii; identical to SEQ ID NO: 53590

SEQ ID NO: 62593 - DNA, 4908 bp, Acinetobacter baumannii; identical to SEQ ID NO: 45835

SEQ ID NO: 62594 - DNA, 2289 bp, Acinetobacter baumannii
atggcaaattcaaatcacaatgatacagttttatcctatgacgagctcggctttatcattggaatgaaacgagttgaaaaaaaagttagtacgattgattcaaacattgaaaagatcattggtatccttactcaaagctttgaagagcaaaaagcacaatttgcacagcctcagcctaaactgactgaatttcaaaagatgcttaatgctgtcaataatagacaagctttagattttgaagatttattaaaagacaaagctaatccaatcactcaatcttttgttgtagcagacaagctggtcaaagactttgctgatgttttggaccaatcaattaatgaccttaaaacagtagataaaaaacaaatcaacaaatctaatgggcgaaagcccgctatagaaattaatagtcatgatgacttatcaaaaattgtaaatcctagtgtaccagagcgtgacgaaaaaggccgttttgtatcaaaccctaatgaaccccaaaaccaatcatcaattcgtaaagttgcccaaacgatatctacggcgattaaaggagtaatgccgaactcaacacaaggtgtagatcctacagttgacgcaatcaatgaagttggtcatttactttcacctgtacgccgtgcagcaggattagctttgcggccattaactggattgatgcgtagtaaaaagagaaatgagccattacctcgtgaacaagagaaccataaccgcaaacaaataaagttattgcagcgtattgccgataatttggcgtctaagggtggtttgttaggttctctagggaaattgcttacttccgtgttatctgctggtggtgggcttctaggtggtgctctaggcaaaggaaagaaaggtgtagggaaattaggaaagggcttaggtaaatttcttaagtttggccgtggtctacccgtaataggtgcattggctgctggtgcatcattattagattggaatgaacaaagcacacaagaaaaaggcggtactgttggtagtcttgcgggtggagtaattggtggtactgtcgggtctttatttggtccagttggaacattaattggtggtatggctggttcttggattgggaataagctaggtaccgtagttgcgccgtattttaaagagtggacagattcattaattgctgcagatgtaccaggtattattaatactgcttggaaagggtttgttaactatgcaaccaatgcttttgaactgacaaaaggtacagcatcaaaagttgtagacggtgttaaagatactgctagtgataccttagatttcattaaggataaatttaatcgctttaatccatttcatgacggcgttcccacatggggcattgggcaaggagtttataagccgggttttggagcaaataaaaatgtacctgcttatggatcaactatttctccaattggtgaaaaaactaaggaaaagcaacttgcagtttacaatgctatgaagaaagcaggttttaatgataattgggctgctggtttaactgcttccgttggtcgagaaaatgattatcgagatgaatacttgtttggtaaacatcaagataaagctggtggaataaatatgggaatgatttcttggcaaggagctcgtaaagaccggcttacggcatatatgaaggaaaggggattacttgatgcaaacggtaatatggtacggagccaagcagctttagatgcacaaggtgcatttatgaagcatgaaatcgaaacgaatccagaatatgcttcagttaaagcttatatgcagaaaaacccaaatgcatcaaaagaagatattgcccgagttctcggcacaaaatatgtaagatgggcgtatgggcaaacaaagcttcgcaatgggaagtcatttgattatagaccgcatttagaaaaggaatataaatacagagctaacattgataaaaccgttcaggaacagaaaactaatctacctaaagaaaataccccagctgtatcagatttgaaatcaagtcatattgtggaaaatacaagagctaaagttgctagtgttttaagcacccaaaaagctatcgttccccaagctactacaaaagcaaaaccttcattaaataatcaaaatagattattaactaatgtcacgccgtttaagcaacctttaaatactcctaacccacaggaagtcgttgttgttaatggtaataatggtaatatcagtcagaatgtaaatgatagattcctagcacatgctttaactggtgggataggaatgggaaacttagaaggttag

SEQ ID NO: 62595 - DNA, 225 bp, Acinetobacter baumannii; identical to SEQ ID NO: 46246

SEQ ID NO: 62596 - DNA, 849 bp, Acinetobacter baumannii; identical to SEQ ID NO: 46230

SEQ ID NO: 62597 - DNA, 537 bp, Acinetobacter baumannii
atgatgcgtaaacaatttgaaaaaacactatctgcaaatagcagtctgcattcgggtcatatcttttggcatgaggagagccaacagtaccacgctagggatgatgattatgttgaagaagctaatggcatgaactggtctttagcaacattcacaaaatgccgtattgattacgaacaccttcttggtaaataccgtgcaacaaagcagcttcaatacagcacatctgaacaaaatgcacgcctgcacagaaccttgcttttcgtaaaagatcatttttggatgaatgatttgggcagagtccttccacgcgtctatgaagaaatcacagagtgcttagatgatcagccacgcaaggtacacaacacatcatgcacatatcaatttgaacttgcatttcacaacctgcaagacacgcctgagctacgcaagatttattggtctgcattaggccaattgcagtttgattctaacgaccaagtgattacaccagagcttgaagagtgcccatgttgtaaggggaatcaagatgcgtga

SEQ ID NO: 62598 - DNA, 291 bp, Acinetobacter baumannii
atgtcgcaaaaaagtaaaattgaaaagttatataatgaatttttaaataacgttgattataaaaaattagaaaacgaaaccaatgcaagaaaagtagaaatattcttatctgaaaaaatacacaggcaagtacttccttatttttcgcaaagtggtagtcaatattacattgatgattattttctagttatagacccattagaaagcccaagtatcgaaaatccccatgaatttgtcgaatggcttttaaaatcaattaatgaaaagcacctgttgacagcacaagactag

SEQ ID NO: 62599 - DNA, 2664 bp, Acinetobacter baumannii
ttggctgtagagaatacggccttttttattggtgtttttatgactgtttctatttctgagcggcttagtcctttgtatgaaggcaatggtattaatacacgctttgattttaccttccgggttttcgatcaagaggacgctaacggtgtttcagttaagcaccaagtgggcgctgactttgaaaatattgatgagagtctttattccgtaacgattaaccctgacaacttaggcgggtatattacctttttaacagcccctgaagtaggatttgaattttatattgcaggggaaacacctgttgatcagcaattagacataacgaattatgataatttctatcctgatgctattgaacgttccttagataagctaaccgccattttgcaagaatgggctcattcgttagggtttgaaagactttctcgtgcaaaagcccttgaattacttgatttagctttacaagagcaaattcgagatcagggactagctttagatcaaattgacgcttttgccaaagatcttacgaatagattagaaactattgtggtcgaaagagggtggttagcagaactgatagccgatgctagtggcaaaaaccaacaagagattaacgatttattagaccctaaaagctttcctgatttttataaattaagcagtgatatagatgatacggcttcgtttaaacggcttagggatactaacccttctgctatcaatttgcgagcaggaaaagagtatattttatccgagacagtaattttaaataaatcatgtactgtcaacggaaacggtgcagttttaaaaggaactacacttggaattgcgccaaaacagatgactagcgttacggtaactgaagattttgttaaaggtgcatatacttttaaagttgctgatacttcaaagttgaatgttggtgataaggtgtttttatacaaccgtttttatatcacaccttgggccaacattgatgagatgttgaaggggatcgctttatataaggaccaacttgggtggacatgccaaatgaatgtcgttggttctattgatccaattaacagcactgttactttagaactgccttgccttgaaaaagggtccgctacgctgagtcaaatttttaaaatttatgatgatgagttcaattttaaagattacacagttctttttgacaccacacagaagttaagtgtttcttataatttagcgtgtaatctatcttcaaatgttaaatttaaaaacatcacaaatggtcaagcaacgagtgacactaaaaatttaattcagattattcataactattgttacaacgtccactatattgggacactagcggaccaaggtacatgtatacattttaactatgggacgactgattgttcagtaagttactctcagtttaatgtgagaacgcattcagatggtgctctggtcacttatctcggaagcaataacttcataagctttaaaaatacatttaaatattttgatttaatcgaaggaggagtccgatataaagaaggggccgctatctattttggagcaaaaacaaggaattgcaaatctttattcgatactataactggttttcacattggtgtacgtgtaatgtttggtgctcaagacgcattatttaataatctagtcgcacttaactcgaagaaagatgtttcagttataattatggaggattcgcaaggaacttcatacgataattgtactatagatggttccttatattctgtaaattcagacatcagtacgtataaatcaaattttattatgcctttttatgcaggttcacctacagtgccgaacgcattcacactaacgggctctattcctctgcaacttaaaatgcgcgattgtaaaatacaagggcggttgaatgtcacagcacaattagtggactctgacattgtagactgcccaggtattacagatgcgcttttttataactctaacggattcgtaaatagtaaatttaacggaaacagatgtggtgctttacatgttaggggggctttaggtgctcagataaaaggcaataaacttagtgattttgctcttagagggctaacgactaaacgtcccgcaggtatatccttaagcggtgattctattgttgatatagatgataatgatattgtccatgagtcgttaggaattgagaatcaaaatacgaatcgagggttaaacacagcaattaaactcggttctaaccgtataaaagcgccgaccaaaacaaacattcgaattacagaatctctttcaccagtagtgactgttaacaatgatcgatacatatcttctgaagatttatacagaaccgattcagacgcaggctactggaaaacaattggtttctctgccgaattgactccgatttggcagtattacagcaaggctagatacattaaacaaagctatcctaattttagtttccctatttctgccaacggaacctatacaacaacacgcactatagctaacgcagctataggggaccaagttatgatagattcgacaatatcaccatttcagggccgtttttacgcaaaggttactgccgctgatacggtcactatctattatcaagacctatctaataccgccagcacaattagtaccactgtataccttacagttatcaaatag

SEQ ID NO: 62600 - DNA, 192 bp, Acinetobacter baumannii
atgacgcaagtgatgatcaaggcgtatgattttgcaaatacaaaagaagttgatcttttggctgatattgataagggcggtaatatccttaaagtttatgactactcattaaaagagttgaccattaatttagatggaactgtgacttacaatggcaaaagatggacctttgataagaagcaaagtttttag

SEQ ID NO: 62601 - DNA, 1977 bp, Acinetobacter baumannii
atgactaaaaaattatattattgggcggaaaatttagaaaattatagttctgatatctgcgagagttctcctttttcgattgaaataaagagattaaatttttttatcggtaaaaataattctggtaaaagtcgattccttagaaatttatttacaacagctatatatacaatacgtgactattcttttcctgatttatcagattatttttctgagctaaaaactacatttgatacgactcacgggagtctctggattgggagtgagagttcaggatcagatcgtgctaagatatcaagcttaataatgggagtccttgaatttccactttatccaaaacataaatataaagaaaattatataaaagcgatggaactattaacacgggtgagatttgagcatacaacagtaattcaagacaagatcaaggaaattgataattacgttactaattatgaatctgcaataaaatttgaagataccaaattttatgttcctatacttcgtggtatgcgcccagtcactgatgaagaaaataaacaaccttatatagagcgtactcaaaaagattattttcaagaaaaatcaaaatttaatcaaaaaaatatagttacaggtgaacgtctttatcatgaattaaaaacacacttattaggtgagcccgaacaaagagatttaattaaaagctatgaagaaaaacttagtcaatatttctttgataatgaacctgtatcactcatccctaaacatgaccaagatgttgtcaatattaaaattggttcagaaaggcagttcccaatttcacatctaggtgatggcttacaacaatctattattttaacttttgaagcatacataagaaatgtagatgaaaatggaaataaaaaaactcatgctttttttattgaagagcctgaattgaatatgcacgctggtatggttcgccaactaatgaacttttatttgaatgaaactaatcatttctatttttttacaacacactcaaatcatctattagatatggttgatgaatcggaagaagttataattcaaaagtttgtaaaacaacttaaagaaggtgaacttaatgaatttgattttaaaatttatcgctgcgataaagaccatgaattattaacctcattaggtgttcgcccctcatccctatatttagctaattgcacgatttgggttgaaggagtcactgatcgaatgtatttatcaaaattaatgcaaaaatatattcaagaacttgatcttagtacttcttcacaagaagtcgaaaaagcaaaaaaatataaaagttttatgcccaacttccattacgcatttattgaatatgccggtggaaatattacacattggagttttcttgatgattatccaactaaacaagaagccttagattttttagataataataaaggtttaacagctaaggcaattacaaagaatattttacttttagctgatggtgataatgaaggtaaggctgaaagacttagtgaatggaagtctgaacttagtgaggaaaatgtctatgttttaccatgtaaggaaattgaaaatacactaagtccagatatcgtttacaaagcatgtttaacagagtttaaaggaaaaaaaaacttagcaccggaaataatactgcatgcagaaactattaataacattaaatttaaaggatttcaggggactacaaaagaaggttttgacattgataaacttgaattgcagagtctaaatttaattagcaatgatggtattggaaaaattattgatgatattatccgtgttgatacgacatcatcacctcttccacgtttattctctgatgattcgggtactattgccaataaagttaaattttgcgaaatatgtaaggttctaatgacttatgaaaattggcaattaacggagcaagcaaaagatctttgccagaaaatttttagtcacattgagcaatgtaattcctaa

SEQ ID NO: 62602 - DNA, 534 bp, Acinetobacter baumannii
atgaaaaaaatattaatagccttctcaagtgtagatggacagacatttaaaatttgtaatgaaattagtcatatattggttaatgatgggcatcaagttgacgttgtctctattaatgagggttctaaaattaaagaagactattcatttattcttattgctgccagtattcgatatggaaattatcataaatctgtttataaattcattgaagataatttatgtacaatagagcaaacagctaatggttttctttcagtgagtgcaactgctagaaaagttggtcgagatgatcctttagtagatatatacattcaaaaaattaagaaaagatcaggttggactccttgtcttgttaaaattatagcaggagcaattgattacccaaaatataagctttttgatcgccttatgattcaaatgattatgctgataactaacggtcctgtagatacttctaagagatttgaatttactaattggcataaggtgaggctatttagtttggaaatatctaataaattaaaaagttaa

SEQ ID NO: 62603 - DNA, 219 bp, Acinetobacter baumannii
gtggaaagatatctagatttagacggtgattctggaattcatgcatatgaaattggtgatacatatataagagtgcagtttgatagaacctttaaaatttatacttatagttatcgaagtacgggagctgtccgagttgaagatatgaaacaactagctagaaatggagatggtctaaattcttatattatgagatatgctaaaactttatatgaataa

SEQ ID NO: 62604 - DNA, 195 bp, Acinetobacter baumannii
atgactaaacagccagagtggataatacggggcaaaagcatcaaacaattaattaaagaattagaatcttttgaggatcaaaatttattagttgagctatcttttgatgagggggaaacatctaaacctataagcttagttagtaaaattgatggaaaatgtatgttactgaactgtgaaaactcaacagagtaa

SEQ ID NO: 62605 - DNA, 180 bp, Acinetobacter baumannii; identical to SEQ ID NO: 53064

SEQ ID NO: 62606 - DNA, 735 bp, Acinetobacter baumannii
atggataactacaaaatcaaagttaatgatgaagctgagagcaaagaggctcaggagttgttaaagcagcttggattccaggaagaaggttttacaggtataggcctgccatgctacttggcgacatgggatggtggatatgctgattactattttggttctttaagtgaaggtagaaaacgagaagaactcaccctccctcaactacgcgaccttgttgttttgaagcgtaatgatgtgaaggatgcgactcatgaagatcaatatggtgataagtggctttatttggatgaaagacactatgtctatctaaatgatcagtgggatttgcctattggtgagttcttagaaagatatgaactaaaaccaatattgccagtaaaaaaacaagacccagccttgattagcggtgctgaggcgaagcttgcatgggctaagggcgaaattgttgagtactttagaaaaagccgtgatgaatggtttgaagtaaaagggaacacatttgtttctgtgtttgataccgcagagaaactacgcatcaaaccccaaaccatcaagcttgaacttgaaatacctgctccatacaaagcaaaaattggcggacgagatgacacatctttcgttctgaatgttggcagacatcagtattgctacaaaaccgaagaggaatacacaaaggctcgtgacgctttggaagcagtatttgactcggcagtgagaggtactaactcatga

SEQ ID NO: 62607 - DNA, 186 bp, Acinetobacter baumannii
atgagtgaattgatcaaggttttggatggtggtgattttcgtgatcgttggaatgagctttgtatcaagctagaggattatgaaaacatcaattgtgataattacgaacaagagcttcatgatctatttgaataccacagctttgtatttgatgaatcaaagcacgaatattgggaaatcgaataa

SEQ ID NO: 62608 - DNA, 1794 bp, Acinetobacter baumannii
atgcatttaaaaaatttgaagattagtaattttagaaactttgaatctattgatattcctttgaatggtaatattgtattactgggagaaaatcgtgttggaaaaagtaatttaatattcgccatgcgtttggtgattgatcaaacactttctgattcagctaggcagttaaaaatttctgatttttgggatggatgtgatttatctacaaagcccaaaattgaagttcatttagattttactgattttgaagctgatccttatttaactgctttattaactgattatagactagcagatgaccctcacacagttcgcttaagctacatgttcagatgtaagtcagagattattggtttaccaacaagtagtgaagattttgaattcaatatttacggcggtggggttgagacaatatctgtaaataaccaagttagaagaagaatttgtttagatttacttgatgccttacgtgatgcagaaaatcaattgggctcttggaaaaattcacctttaaggcctcttattgaaaatgctatggcagcagttgatagcacaatattaactacaatttcggctgatttagaagcagcaaatacaaaaatagttgagcaacctcagataaaatctttagatgattcattaagtaagcaaattttgaacctttctggtaaagcacatgatttaaagacttcacttcgcttttcaaatgctgatcctttacgattatttcgttcattaggtatgtatattgatggaggaaaacgtagtatcagtgaggctagtctggggtcagctaatgttatgttgatggcattaaaactagaagaatttacttggcgtagagaaaaaaatgaaagaaattattctttattgtgtatagaagaaccagaagctcatcttcatcctcaactccagcgtagtatttttaaaaatatattcaaagaaaaagattcagcacaagcacttattattactagccattccccaactttagcagcagcagtgccgttaaattcaattgttaatttaaggttaaaaaatggtagtaccaaagcattttctttagccaatttaccaattagtgatgacgagaaggatgatattgaaagatatttagtagctacacgttctgagatcttattcgctaaaggggtcatctttgttgaaggagatgcagaagaaattttagtcccttgctttgctgagcaaatagggcatgaccttgatggattaggtataacggtttgtaatgtaggtggaacgaacttcaacccatatattaaattagctgaaggtttaggtttaccttttgttgttattaccgattgggatccattagatggtactaagcctgctttaggaagagcaagatgtgttgggatctgggattctcgtgttgaagttaattcaaacatttctcctttgacggaaaatggtcgtaagtattgtgaaacagctacttttgatgaatttagtcaagcatgggcgaaagcaggtatttttcttaatgatgaaacatttgaagtagcaatagctagaacgcctaatttaagtaaattattattagatattttagatgaacagggttttggttcaaaaagaactaagaaaattaaagaatggagaagtgattctgcaaaaatagagagttcagacttactttctatgattaaagacattggtaagggaagactgagtggtaaattaaaaaagaaaataactacatctggacctatactgccccctgcatatatttctgatgcaattgaatatatggtgaaaaatgtctag

SEQ ID NO: 62609 - DNA, 1782 bp, Acinetobacter baumannii
atgtctagttattcaactctaaaacaagctttattagagcttgagaagaatgaagaacaatttaaagctgtaagttgtagaaatcattgtgtcgttttagcaggccccggtagtgggaaaactaaaactcttactactgctatcgctcgtactcttaatgaagaaattattagtccaagagggattgcatgtataacttataataatgaatgtgccattgaactcgagaataggctatctaaatttggtatagagagcaatggtcaaaattttattggtacagttcatagttttgctttaactcagataataatcccttatgcacgctgtatagagggccttgtacctaaagattttaaagtagcaaatctccttgaatgtaaaatagctatcgaaaatgcctataaaactgtatataacgactcagaagattctaagaagcaatgggattttgctagcgaaaaaagaaatcgagaggtagatagaagtcttccaacttggaaaggtcataatagagaattagctgaatttattgaagaatatgagtcagagttaagaaaaaaaggtttgattgattttgatgatatgcctctcatagcatatagaatgattaaagaaaatccttggattcggcaagctttggaatctcgttttccaattttatttattgatgagtatcaagatttaggccatgtgcttcatgaattagttcatcttctatgttttgaagggaaaattcgattatttgctgtaggagatgcggatcaatcaatctatggttttactggcgctaatccagagctattacaaagtttgacagaaagaaaagatgtacaaacgattcagttaagatttaattatcgatcaggaacaaaaattgttaaagcatcaacagctgttctaaatgaagaaagaaactatgaaagtccagagggctcacccgaaggagagataatttttaatcccgtggtaggagctttagaggaacaagcctatttcattgtaaataatattttaactgagttagcttttaggggagttaaaaatgagcaaatagcaattttatataaggctgcgtggctaggagataaaatcgtagaagctttagaaaaaaagaaggtagcctatcaccgaactgatagaaattctttaattaagagaagctcaagatttgctcgctttattgaagaatgtgcaaagtgggtaacaggaggttggaaatatgctgaaccatcttttagtaggttgtttaaacaagcattgaatctagtttatggtaatcattgtacccaaattgaaaaacaaacattagagcaccaacttattgattttcttcaacggagcaggcttgttcaggaaacagcgaatgaatggttaataaggtttcataatgaacttatagtttattggtcgagtatttgtcgtaataatatacaagaatgggatatatgcttggaacttatacaaaaaacttcaccagaaatgaataaagatatatctcttgatcttttttcgggaaaaacggaagggacaggaagattaactctaactacttttcatagttctaaaggccgtgaatttgatgctgtaattatttttggtgcaaataaaggggtgttgcctgataaacgggatagtaagacatctaaatctttaaaagaagcgagaagactattctatgtggcagttacaagaccgaaaacgatattacatttagtctatcaatcaaaaaatcattctgaatttttagatgagttttatagacgtactcagcaaaattag

SEQ ID NO: 62610 - DNA, 921 bp, Acinetobacter baumannii
atgtctatgttgtatagtgaaagaacaattggcactaagcctagagtaaatgaacaagtagaccattcaatttggaaaggaataatcgtaattttggagtcattaagatcaaaaaattactttgcagaagaatttccagaaatatgtcctgacaatacttcacatatctgtggaacagacgattataaactcaatgatattttaagttcttattttgaactttcatggcctcttgcacacacaagagttgaagaaagtaatttatggtcttattcggatcctaaaccttatagcccaggaataaatttagcatttgatctactagaattcctatatgcaaaaacatcaacaccacatgaatatggctttcatagtttttttgctcacgctcacctctcctttaagccagataatcaagcaaaaaatgaattcagaaataaaattaatgaattctttcgtataagaggaatgatttatgaaatgaatccagaaggacaattacaaaaaattattaatgacgagacaaaacaattgatcagcaaagttctcaagtttaggtctcaagatatacagcttaatcaaatgttatatgatgcttgtactaaaatttctcattatgatttaaacgttagctatcatgctttagaaaaactatgggatgcttgggagcgtttgaagtgctactatattccagataataagaaagaatctgcaaaggaaataatcaaattattttcagataaccctgaatttcaggctattattaatgaagaaatgcgcacaattacttctttaggaaatactttccgtataagacattccgaacctactcaagtagtcctcaacagtcattcacaaattaattacttatttcatagatgtttggctctaattgttttaatttttgattacattaaatga

SEQ ID NO: 62611 - DNA, 1197 bp, Acinetobacter baumannii
atgtctttacctgaaaattatttatttagattaaatactgccaataaaatttcatcattaaataatttagcgaaagctttaggtgttcaagtttcttatttaagaaaaattgcagatctacctgatgaaaagaaatatgaagtttttagtattaaaaagaatgatggaagagaaagattaattcataagccttgtaaagaaattcgtaatattcaacgtagaatcaatcatagaatatttaaaccattaatcatttggccaacatttttatatggctctattcctgcggaaaaagaagaaccagtcaatgattatattaactgtgcaaaaaaacactgcttaagtaaatcagttcttaagttagatatcaaagatttctttgacaatattgatgaagctttagttaaaaatatatttagagatttttttaaatatagtgaagctgtttcaaatctcttaacaaaaatatgctgtgttaatggtcatgtaccacaaggggcattaacttcgagttatatcgcttctttatgtttatattcaatagagccaattttagctcaaagattaaataacaagaaattaaaatatacaagatatgtagatgatataactatttctactaaaaaaaataattatgatttcaatgcaacaattaatattgttgaaggtgctttaaattcaatagacttaccattgaatattgaaaaaataaaagttgaatatttttctacaaaaccaattaaagttcataacttacgcattgattttaagacacctcgttatgataaagatgaagcaaggaaaattaggtctgctatagatcgcttagtaaaacagaaagaaattccaaattatcgctcacattatttttaccgtgctgattataatcgttgtattggtttaatcaataagattaatagacttaaacatcccagctctaagaattttttaaaaaaaatattaagaattaaaccattaccaaatccaaatgatctagattacgttagaagaagtatatttgaattatcacgtgactatgcaattatgaaaaattcttatcaatataggaaaaaatttttcagaatccagcaaagattaatcttcattagatctcacccacaaatgatctatgaaaattcagcccaagttttaaattcaattctccaaaaatatcgtccactttatgaggaaaaataa

SEQ ID NO: 62612 - DNA, 198 bp, Acinetobacter baumannii
atgatttttaaaagtacgttagatttacggaccacttataaagaattcttaaatattaaaaattataaagtttctaaagtcttattaaataataatgacttttatagaggtaaatttatactatccaaagatgcttcatttcaaattgaaagtttaaattctaataaatttttagaagttcttataaaaagcttataa

SEQ ID NO: 62613 - DNA, 381 bp, Acinetobacter baumannii
ttggatatttataaaaaaatgatttgttccgctattaatatacttttggtcgcttgtcagccgcaagaatcgagggtcggaaatagccatgtgaaaatacctagttatcaatctaatggcgttttcgcatctgcaagattaagaggcccattacagctaaaagacgaatgtttatatgtgaatgatgtgttaattgtttttcctgaacgctctgcagaatgggatgctaaaaatcaaactttaacttataaaggtgagaaaattgccttaggtgaagaattagatcttgttgggggttctggtaaatacgaatttgataatcatcaaattaaaaacttaagcgcttcatgtgaacataaaagtatttggcttgctggataa

SEQ ID NO: 62614 - DNA, 1518 bp, Acinetobacter baumannii
ttgaaaaaagaagctgcaatagttgtaaaaaatacactctatatgtttttaagaatgttctttgtaatgttcttaacgcttttttctactcgtcttttattaaaaacactaggttttgaagggtacggaatttatgatctaatttttggggtcgttattcttttcaatatactgagtggaacaatggcgaccacattgcaacgtttctacaatgtttcacatggggattcgacaaaacaatcaaatatttatagtgtgtctctgcaaatctttttgcttattagtttattggtgctgggtcttggatttagtcttgctggtggtattgttggccaattaaatataccgatttatcatactgatgatgcagtcacattctttaagttatgtgtggttaatctcgtgtttatggtttttagattgccatttattgctttattaatttcaaatgaaaaaatgagtgtatatgcatcaatttcaatttttgatgcagtgctgaaatttctaggcatcttagtattaagctatatttcaataggtcaatctaatttagttgtttacggttgtattttgagtgtagtaactcttgtagttacactagtttatgttttgatgtgttatatgcaactaaatatgcctaagttgcagaaaagggtcgaaaaaaaatattataaagaaatattatcattttcgggatggacattatttggaagtagtgctgctttattttcacaacaaggtttatcaattatattaaataagttttttggagttcttgttaatgctgctaatgctgttgctcaacaaatctatacagccgtctatcaatttataagtagttttcagacggcctatagtccatatttgatgaaaacttatgcacaagaagactttgataagttaaaaaaattaattgtttttttctctaaattttctatttttctatatttactagttgctgtaccattattcactttttctgatcaaattttgcaattatggttaggacgtgtgccagagtatgcagtattgtttacacgcttaactttagttgcaatactatttgaagtgctttcagcccctttatggttgactgttcaagcatctggtgatattcgacgttaccaaatggtaatctcatgtattttaattttaaatttaccgattgcttacatgagttttatggtatggaaacagccgatgttggcttttattgcaaaaacactcactacgatcttagcttatatctatagagtacatagtgttcactctctgaagtgtttgaatcttcttgaatatttcaagcaattaattttaagaatatgtttactgttaattgtaatgacacctattgtttgggtatatatgccttataagagcttgagtattatggatattatactaaacatattgtttataatgtttttactgagcattgtagcttttcctgtgttgctcaatcgaaatgaacataaaataatttttacttttgtatctaaggttttaagaaaggtttaa

SEQ ID NO: 62615 - DNA, 321 bp, Acinetobacter baumannii
atgaaatcaaaatggattgaccaccataagcttcaaaactcaaatgcacttttagatactttaagtccatttcaaaacgtgaaggccctagtctgcggacatgttcatcaagattcccttaatatctggcaaggtatcgagtttttttctacgccttccacaagtgtacagtttaagccgtttagtaatgattttgcactcgaccaaaatgcaccgggttatcgttacattcgtctgaacaacgatggtagttttgaaacaaaagtgtttcgccttgaaaatttcaaaacccgtataaacactgatatttcaggttattag

SEQ ID NO: 62616 - DNA, 1674 bp, Acinetobacter baumannii
atggcgagtccggcacaaatcattcgacataaatttctcaatacattcttttcacgccactctatttggttcttgtgtatttttactgcactcacaattacgtggtttagaaccgtatatacgcctcatagtatttattattttatttcggatactctactcaacggtttatgggtcgtcagtggcgcattaagcttattaggtctatatgatgtcctacaaaatagacattcaatcttaagaaattacccgattatgggccatttccgttttttatttgaagatatacgccctgaaattcgccaatactttattgaagcggatcaagatgcccttcctttctcgcgtatgcaaagaagtttggtttatcaacgtgctaaaaatgagaatgcagataaaccttttggatcaattattgacgtctatcaagaagattatcgctttattgttcattccattagtccatgtccaccagcggatcctaagagtttccgtattcaaattggtaatgcccaatgccttcaaccttatagtgcatccattatgaatatctctgccatgagcttcggtagtttaagtgcgaatgcaatacgtgcattaaataaaggagcacaattaggcggtttttatcatgataccggtgaaggtagtctcagcccttatcatttagaaaatggtggtgatattgtttggcaaattgccagtggatattttggctgccgcactttagacggaaaatttgatgaacagaagtttgctaagcagtctcaattgccacaaatcaaaatgattgagcttaagctttcgcaaggagctaagccaggccatggcggtattttacctaaacataagattactgctgaaattgccgagatccgtggtgtttcccgtgaccatgattgtatctctcctgccaagcattcaagcttttcgacaccaattgaaatgatgcatttcttacagaagttacgaactttatctggtggtaaaccagtaggtttcaaactgtgtattggtcaaccttggcaatttatgagtattgtaaaagcaatgcttgaaacaaaaattgtgcctgattttattgtagtagatggttctgaaggtggcactggcgcagcccctattgagtttagtgactatatcggaacaccattacgtgaaggcctacgctttgttcataatacacttgtaggtgctggcctaagagatcaagttaaaattggtgcgagcggtaaaattattagtgcatttgatattgccagcacatttgctctcggtgcagattgggtgaactcagcacgtggctttatgtttgcagttggatgtattcaagcgcaaagttgccatacaaaccaatgtcctgtaggcgttgcaacccaagataaagatcgccagaaagcactccatgtaccgaccaaagcagaacgtgtatttaatttccacaaaaatacattacatgcattatcagaaatgattgctgcggcaggtttacgtcatccatcggatattaaagctcatcatttagctcaacggattaatgaccgtgaaattaaaaactatgctcaattacacttcttcttaaaagaaggtgagcttttacaatctgaactgaaaaatgatgatgataatttctattatcgtatgtggaatatggctgacgccaatcatttttaa

SEQ ID NO: 62617 - DNA, 627 bp, Acinetobacter baumannii
atggtgccaacacctatacgggattatcccgaatggcaccttgggcgtcaaaattacgcattgtggtatctagaaattaatgatcagaaattagttcattatctagatcaattgcgtgcgcatttttcagaatatctagtagaacctaatcaccgtcaatatcatatcacattgtttatatgtggatttttaaaccacgaaaccaaagtctatagtgatgactttagtttgagtgacttagagcagcaaagcgaaattttaagaaaagagaattttccctcatttcaactaaaaattggttcagttgatagttttactagtgctttgtttgtagaagtccaagacactgaaaatattttatctaaaatacgccaaaagttaggtttaatttctaatgaaattgcggctttagattattatccacacatcaccttgggattgtataaaacggactatagtagtgatttgattttacgaaaaatttctgaattacctgtacaatataaacaggctgaatttgaccttaaagttgagcatttaacatttggttattatcaagctcaaactttacaaggtaagttatatccgtatcagcatttgtttttaggtgattcatgttgcaactga

SEQ ID NO: 62618 - DNA, 420 bp, Acinetobacter baumannii
atgtataaaacgagactatctctagctttaatctgctctgttttaatgaatgttgggtgtgctcaacctattagtcacgagttaaaagttactgttaaaaataatgatgtatgtatctatactgataatgaacatacatatcttggaccagataactatttcattgtctttgttggtgaatataagccaacccaagaatttaaaagtatttatgataaagcttatcaaggtaaatacgcaaaatttcctattaaatcagaggattgtttgtctattccagcttcagtttttgaagatacaaaagtatatgatgttaacttagaatctaataaaaatttctctgagttaatctgtatatctaaaaagaaaaatattttaagtgctaaagtagtaagtccagaagatactacatataattaa

SEQ ID NO: 62619 - DNA, 252 bp, Acinetobacter baumannii
gtgcatataggaaaaattgatttttctaaagaatataaaagcgaatatgagaaagcctacgctaaaactattttacctgtagaagaaagtaattgtgtatatattcctttaagtaaaataaaaaaggatactccatataaagttactcttagtactataaatagctcatttagtgctcatatttgcgttcaacaagaaggttctcaatcttccctcaaatatttagaagctggcaaagatgtatgtaaatag

SEQ ID NO: 62620 - DNA, 291 bp, Acinetobacter baumannii
atggtgctaaaacaaaaaaatggtggactcattcgggcatcgggatattctccaaaatttaaaggtatttccatagcattagttggtgatgaagcaatttatgcagatggaacaacagcaaaaattattacaggggctggtgaagctttaactataagagatcatccagtagctttgattggttcacatttagataataatgatgaaattatagatagtcctaataagtcagtttatatatgtatatatcatgatcaaccaaaacctttaggttttttaagtaatatataa

SEQ ID NO: 62621 - DNA, 288 bp, Acinetobacter baumannii
atgcaatttataaaatataaaaaagaagtaatttacgcatcatcattttttttaataattttattttttatgcaaccaatgtattttggaaaagtagaagccaaaaaaattctgaatgacaaggaaatatacttaagtaaagctttactcaaagattcaattaaagaatggtatttaattgaatctatgggggataaagttttgttaattgataaaagaaataatataaaaatcgttgaatataaagaacttgacttaatccaaacaaataagaaatcaaataattag

SEQ ID NO: 62622 - DNA, 684 bp, Acinetobacter baumannii
atgaacaaaaagcaattatatgcggcaaaagcacgacgcgcagcggatctaaaagcccagcaagataaagctgctcaaggaccttatgaacttagcatgactttctgcgttgatgaagtaaatgaggttatcgataaatatcgtgaagaatcaggcttggaagatgctgaacttactccagagcatgtggcttacatggtttataagggggatctcatcatttgccttaaaaatattcttatcccgttgtcacaggaatggacactgaaggtagacagttattactttaatcaagaaacagatgatgaaatgacggtttccgttgaatttgaaatggaaaaaatgcctttcaatgagttcaaattcggcagcaaattaaaggtagatcgtggacacggtttaaaaacaagatggaagggaataaaccaagaattaaacgatctgttacttgctgaagttcctgaaggttatgaacgtatacgtagtgaagcaaaattgacctgtacgacaggattcactgactataaatgtctacaggaatttaacttcgtaaaaagagtacttcgaaaaaatggcacggatggcatccgtaaagtgaatgaagccgttcatcaatataaagaatttgatgtggccaaagtgaacgaaaccattcagcagcacaaagaacctgaggtggcttaa

SEQ ID NO: 62623 - DNA, 333 bp, Acinetobacter baumannii
atgtctaaatatcattgcgaatgtggtggtcttatccttcctaactttgaagccttcaaaataggtgatgaagtcaacttcatgatccaaaaaagagaaggtgcgtaccaggggaaaattttcgttagccaaaaagcacataacggaacaattactgaaattaagggtgacgatatcaccgtaaaaactcgtgtaagaacctatgttctatacagatatgcaatgactccaaaggaagcaccaggaccaattgaatatttacgaattggtcaatgtcgttgtgaacttgataaacaaagcaaaagaggtaaagagcatgcagttcaatcttaa

SEQ ID NO: 62624 - DNA, 495 bp, Acinetobacter baumannii
atgacaaacactttttttccttctcaacttactgaagatatgtacaacaatagcgtctattttcacaaaatcctgcatgttccaacacttggagttgctgatcacgtctcggaggactttgaggaatttttatgggatatggatgcagcaaatgcaactgatttgattgaaaaacatccacaacttcaggaatatatttctcatattcagctaaatactagtaaagattggtttgtagatcatgcaaatgatttagcacgtgatcatagcaatttagagtttttgattgagctttatatagcaattcctaaaaacatcagtctcactgaagatggtaagttttccagttgctcttttgatggttatcgatgtcaatggatttttgccattgatatgaaagatgcggctgaacaaggtattaagttagcagaaagaatgcttgctgaaaaagtgactgaagcacgagttaaacaaggcttggagtcacaatcatga

SEQ ID NO: 62625 - DNA, 432 bp, Acinetobacter baumannii
atgcaaaacgattctaacgtagaaacaacacaagcggaaattcctgcttacttacagtgtaaaccacgtacttataaggtcacttttgacaagtttagcgatgtttgtgagcttgaatttaccattgtgattaagtgcactgatgaaatgcttcatgaacacaatgaattttggtctaaccacaaagacagacttaaagaaaataatggggatattgtaaaagttattttgaaaatgattagtcgagatgtgttttatgcctgttttggaggaaaaactagtgttggctatcctccttataaatggggaataaatacaatttttgatgaagaagggtggtcaaaagactgttttgaaatcatagaacttgattttgaaggttacgttgatggagaacaatttgaaatcacgcctgtagtggtggaggaataa

SEQ ID NO: 62626 - DNA, 597 bp, Acinetobacter baumannii
atgaaaataatttatttaacttttctttgtgctctgggtgtaatgggttgctctgataatcaggcgcctaaagtaacttcagatactgcagctgctgataaaaaagctgctgagattcgccagcaatatgaagatcgtcaggctgaacttgagggagaagataaaccacattttgactggccaaaagtagactatacgcaagcagtagctaaggtcgacataaaagatgaccaggcaattattaaagctgtaggtacacccgttattgaacaagaaaaacatacaaatgagagcggagagccagcaacaacttattattttagtaagaatgtttcaagtggtctagaaatcacgttaagccgtgagtttattgatgttgcttggcaatttaatagtaaagagcctgtaaaagcatctgcaatatttattgatggtcaacgtattacacgtgcccttcttggtggtaaagaaggtgctgcactttacgagaatatcgctaaaggtggtaaagtagacttccttagcttagatgatggtaccgagattcataatgcgcgttgtggtgcgtatgcttgtcgatatcaaatttctagataa

SEQ ID NO: 62627 - DNA, 225 bp, Acinetobacter baumannii
atgcatcctgaagaactttttgaactgttttataaaaatgtacgtttagacatgaatcctccgggctttcctaagcattactgtgaaggtatgaagcgtttctggtatgagcgctttatgaatgcatataacaatgaacgtgagccatgggggttaatgagttgggcagaggcaccacaaatgtggctggcaggttatagagaaaaacaaaatgaagatagctaa

SEQ ID NO: 62628 - DNA, 450 bp, Acinetobacter baumannii
atgaaaaaagtccagcatcttactcccattttaaatactgcatttcagggcaaagttttcttattaagccgtgttaatggccgtgaacttttcttgctaaaactttgtgcaaaattgttgcctgaactggagtgggactttttattagactttccttttaaccccaaaagtatttcaaaagtaaaggatagaagacttcgtaaagcttgctatcagtcatttgcacaatataaaaaaacatttaaaccgcgacctattccaaaactaaaaattataaaagatgaatggccatcattagaggaatggaaagcttcaatgctggaggcaactaaaacggctgttaaaaaatttagtgatacagcagatgcgatggcttatgcgttccattcgtcaaattactttaaaagccagtattcatgtgcatgggatctagcagttattgaggaataa

SEQ ID NO: 62629 - DNA, 2739 bp, Acinetobacter baumannii
atgtcagatatatcaagacgcatagatgaccgtcttaaccagatcttcaaattcaaaaaagttggagaatggtacagacaaggcatctgcccacagtgcagcagaaaggagtgctatacccatgcgatcaagcctcgcgtggtgaaatgtagccgtttaaataactgtggttatgaagaacacgtcaaagatatttgcgaagacttattcaaagattggtctaaagaatttcctaaaactgaagtaaatccacatgcagctgctgatgcgtatttacgtcatggtcgtggcttggatattacccctttaaaaggtttatatactcaagatacatttagcaatgaacaaaaatatccaggtctttataccggtacagtccgtttcaaattagctgaaggaatttattgggaacgttttatcgaccgtcctgaacgttttggacgtcaaaaagcaaacttcattggtaaatatgagggattgtcttggtctacagtagatcttgatgatctttgcaatgcaccttcattttggattactgaaggtatttttaatgccattgcattaatccaatctggtcagccagcaattgccaccatgtctactggtaattatccatctgttttacttaaacagattgccgaccgttgccatgagttgaaaaaagacaaaccacgtctgatctgggcttttgataatgacaaagccggaaaggatgcaattaaaaaattccacctccgtgcgcttcaggaaaaatgggcttcttcagctgctctacctcctcaccaagtcaaaggtaaaaaccttgattggaatgacctgtttatgcacgacttactacacagtgaagaacgtgccaagtatcgtcattacggtgaattactcattgcagaaacggctgagcaagctggtttactgatctataacttcaaagaaggtcgaaccaagacttttttctttaatcacaatttccgtctgtactggttcaacttagattacgacaaatacgctaaacgtatgaatcagattgaagaagatccaagttttgatgcgctacttgatcaacagaagcgtgagcaagctttacgtgactgtgccgctgtcactgagatctgcaatgctcaaattgatcccctttattttgaacgcaatgaggttacaggcgaagcttggtattacttcaacgtgcaaagccaatgggcagaaaagaaaactcaatttaccccaagccaaatcggcagccgtagcaaattcaaagatgcaactatggaagtcatggctggtgcaatgtggaccggtactgatcaacagcttgaattttttatgaagcgtaaaacggaacgtttaaaggaagttaaaactaccgattacataggctattcaagtgaatatgaaacttacatcttcccaaaacatgctgtgcataaaggccaagttatccccattaatgaacatgattacttcaaaattaaacgccttgaactcaagagcttagcaaaatcccctgtcattacactaaacccgaaaaaagaatttaaacccttttggtggaaagacttttaccgggtacgtggcagtaagggattaattgccctggcgtggtggaccggtacatattttgccgaacaaattcgctctatacatagctcttaccctttcattgaaattattggccaagctggtgccggtaaatcacgtttgattgagttcttatggaaattaagtggtcgtaaagaatacgaaggctttgatgcaaataaatcaacaaacgtggcgatttaccgtaactttgcccaaatctccaaccttccagttgtactgattgaaggtgaccgtaacgatgcacaaggcaacagcgtcaaacaagcaaagtttagttgggacgaactcaaagatgcttttaacggtcgagcaattcgttctaagggtctaaaaactgctggtaatgaaacgtatgaaccacctttccgcggtgccatcatgatttctcaaaacagcgcaattgccgcatctgaagcaattttaactcgtacattgcatctttcatttgaccgcaaaggacaatctttagaaacgaaacgtattgtggatgctctggaccgtatagaacttgaagaagcatgtacgtacatgactcattgcctacgtaaagaaaatgagatccttaccacatatcaggaacgtctaaaaagccttgaagaccagtatcacagtatgggtattacacatacacgtattgctctatgtcatgcccaaattgctgcactgattgaggctatagctgaacacgtactgaatggttatctggactatgaagaagtagctccagcccaagaaatgctaatggaaatggctcaacagcgcgtagaccaactcaacggtgactgtcaggaagttgaacagttctgggaagcgtttgaatacctacaaagtggtcgatctgccccattcagtcttaaccatcatgacaatgatgctcagactatcgctatcaatttaaatgaaatctacaaagttgctgcccaacagtatcagaaacttcctgaaattacgttgatgaaaaacctactgaaatcatcacaaaaattcaaatttatcgaatctaaccgagctgttagctcaagccgttacccaactgacgctgctaaaaacttgaatgctgacaatgaaatgtcagacagacgtagaacagtgaaatgttggattttttccaaccctaactatggagcaccacaatcatga

SEQ ID NO: 62630 - DNA, 429 bp, Acinetobacter baumannii
atgattagaatattactaatttttttaggtttattgattattagcccagcgtacagtgctgatgattttttcgaaaaaaaaccttctatcttaattgctaaagatgaagggattcaaaataataacagtcgtgagaaagttaatttttttgagttatcaaatcaacaaaaaatagatcgtacaaatcaaatttttagaagggcagagcgaagtaatgacattctattacaaacggcgaatatgactgattatgataaatcacaatattacagagaaaataggtatgctaataataggggttattcaccatatattgaatctacacctaatagaaaagtaatttcagaagaagaatatcaacaggaacttgagcaaaaaagaaaagagagaaaagtcgatcgaacccttttgtacctattagacaagtaa

SEQ ID NO: 62631 - DNA, 411 bp, Acinetobacter baumannii
atgaaatctctagaagtcgttgccgcagtcatccaacaccaggataaaattttatgtgccctgaaaggtgaacataagtacccctatttatcgaataaatatgaattcccgggcggcaaagttgaagctgaagaaacactcgagcaagcactcattcgagaaattaaagaagagctcaatttagatattgaagtaacagagtatctattaactgtagagcacgcctatcccaactttaatatcgagctggtcacttttatgtgcgtgactaagactattgaagaattggctttaagtgagcaccaggatgtacaatggtgcacaatcgatgaactagaacagctcgactgggctgctgctgatatccccatcgtgaaatacttacttgataataagactgcagcatgttga

SEQ ID NO: 62632 - DNA, 948 bp, Acinetobacter baumannii
atgaacttaacgcaactggttaaccaagctatagataaaactagatttacaacaatcgataaatatatagatttctgtaaattctacctcgaatatatagatataaatattcaagctcgtattgtttctcaaaatgagaataaatatcaatttattcaatataatgaagaaggcaattttaatattaccaggccaattaactctgagttaatgtatggaactgtcgaatttgataatgctactctaattcttaaagatacattaagaatgttagctaatggagagcaaccgcctgaaagtaatcgaaagtttttaattaattctatttatacaattcaacaatcaatcggcgcaacgttagatgctcttcctgcaggaaaatctaaccaagctagaaaagttaatggtgatttgttcgaaagatttattcaactattaattaacgctttaaatatagagtgtgtagcaggggtagttaaagttccagttaaggataataaaggagagatattattttcatctaattatcaacatgacttaatgataagtaaagatggagagttaaaagctattggatcagtaaaaacctctagtaaagaccgaatagacaaagttttcatcgataaatttctttataatcgtcttactgatacagctttacctcatatcgctatttttctaaatgatgtacaaagaaaaaaaaccaataaagaaaatgtatatggcataagcggaacatttttatcaggtcattttaaagcttatactattaaacttaatccattagatggagtctattactgtgatatcagacctaatatgatttctgatcctttaatttctcagtatatcaaaacaattgatcatttcttctattctgatttatggaactttttagaagttaagggtaatgatttggatgaggtagaaattattgaggaagaatga

SEQ ID NO: 62633 - DNA, 975 bp, Acinetobacter baumannii
atggataaaagtcattcagcatctaactctcgaattatgaatgcttctctagatttatttgatacaacagatcaaattaaagtttatgaagtagaatctgtgtcggagggatttcaaaagcaacttgagcatccaaatggttctttatatcaaggtaattcaattgattggttaaaaagtcttgaagcttctagcgttgacttaatcttagccgaccctccttataacataaaaaaagcggagtgggacaattttgactcacaggaagagtatattgcatggtctattcaatggattaaagaagcatcacgtattctaaaacctacaggatctttatatatatttggtttttcagaaattttatctgatttaaaacatcctgtatcgcgatattttgaaggatgtcgttggctgatatggcattacaaaaataaagcaaatttaggtaatgattggggcagatctcatgagagtattattcattttagaaaatctaaaaaagtcaagataaacatggatgatgtaaggattccttatggagctcatacattaaaatatccatcacatcctcaagctgagacaagtgcgtatggaaaaggacgcgataataaaaaaagggataattgggttccaaatcctaaaggcgctaaagcaaaagatgtttttgatatcccaactacatgtaatggtatgggagaaaagacacctcaccctacacaaaaaccagaggaattaatccgtaagtttattttggcttcttctaatgagggagatcttgtgctggatcctttttctggctcaggaacaacaattgttacttgcgagcaattaaatagacgttggttaggatgtgatctaagtagtgaatataataattgggctattcagcgtataaaaaatgttcgacgtatgagtaaagatgagtggattaatcatgatagaaaaaatgctgagcgaagagaagctatacgatga

SEQ ID NO: 62634 - DNA, 432 bp, Acinetobacter baumannii
atgtttatttttaatgaaggtcgagaagcctacaataaaatcatgacaactatactcgctcaaattatttttggtggtattgcaattctttttttatataaatcgaatgtattgaaattagcagttaatcacattcctttttatattttcactatatttctatggcttgcacttgttttatggatagtcaatgcatacatagagtttaataactcctacaagtgttatttatatccaaaggttaaaggtgctcaatttttagaattttcaaaaaatggagcaataaaattttcagaaatatggaaacgtgataaaaagctagccattgaatatattttaatacaggctttagttgttggtattcttatgtttatttgttttggatcaattctttcagctgtccaaatcgcggaaggtgctaagattcaataa

SEQ ID NO: 62635 - DNA, 693 bp, Acinetobacter baumannii
atgaaaacattagctgaacgtcttaaatatgcaatggaagtattgccacataaaaaagttaagggagtggatcttgcccgcgctgtgggtgtgaagccaccttctgtaagtgattggcttagcggtaagtcaaaaacaatggaaggagaaaatctgttaaaagcttctaaatttctcggagtaaatcctaattggcttgcttctggaaatggctcaccaactgataatgataaaaaaaataaggacgaagaactttctaacgtcctatttagagatttaaatttacataaaattcctgttcttgattatgtgcaagctggcttttggcatgaagtagtttatgacggtacaacacctcatagttatacatataccgattatctaggttcgacacctgaggctgtctttagtgttattgttcaaggcaatagtatggaacctgattttaaagagggagacatgcttattgttgatgcttcattaactcctaagccaggatgctttgttatcgctcaaaacggttcatatgaagcaacttttaaaaaatatcgagttttatcacatgatgaatatgggagagatatttttgaattaataccattgaataaagattttccaattttatcgtctacaaaacatgaaatccgtattattggggtcgtagttagacatatgcgtgattttaattattaa

SEQ ID NO: 62636 - DNA, 987 bp, Acinetobacter baumannii
atgtctgaaacagaagctatagccaaaatggctgagatcatttcaaatgatattttttattttttccgctggaattcgattggtggcaaaaatttaaactggaactgtgaaaaaatcacggaacataaaaaagagaaagtaaaaactcacccagctgatgtcgttttttggtacaaagatccttattctaacaatattatatatatgcatacggatttgaaaagttatgggaaagcaactattcaaggtaaagacttctctcccgctttaaaaagtttagcacagcaaattgattgtgcagaaataagccaatcttggaaagataaatatttaaaagataattcgaactatattattcacggtttattatttgtttataatcataatagtgatgcggacgtatctttaataagtagacttgcagctgttaagcaaagtaatattcaattaccggcagataagaaaatttttgtcctagatcctattgatataggatggttaattgacgtaagtaatggtataagtcaacttctatctagaaatgaaatacaaaaagattatgttttcttctaccctcaaaagacatatcaaggtgttgatggatatgaagaaagcgcgacaattgaacttttaaaatctaatattattatcatcaagtcttcacaaaaaagtcggtcattaaaacttaaggtattctatcgcggtagaggtgaaactactgaagaatttcaatatttacttgattatttccgtcataatcagtttctagaacatgaggaagacaatattgagatttttttcagtgaaaaagttgattccaatgcatcaaacttattcgataaaagtagacatgaatatattgaaagatatacaaaaaatcaggaaacaatgactaattgtctaaaagctataactttaaggcctctagatcatattgataaaagtaaaagttttaatgaaaatattattgggatgactgcaagatga

SEQ ID NO: 62637 - DNA, 756 bp, Acinetobacter baumannii
atgttttttatagcgtgtttggagtctcttcaaaagcaaactatttcttttgataaatttaaggttactattatattaaatggagataaagaaccatattattctaatattcaattagccttggaaagttttgattttgattgctctttaatatatacccatgaaaagggtgtgtcaaacgcgagaaatttgggtatagagaaaacaattaatccatatataatttttctagatgatgatgatttattgacagaaaactatttggaacaactatttttattagtagaacctagtagtatagttgtatctaatgtattgggttttaaagaaagtaaagaaaatcctatcagagattatttaagtttcgaaaatagctttcaatcaaatgacctagttaaatatagaagatatttatcaaattcatgttgtaagcttatctccagagagctcataagagatgcaaagtttgataccaatctatttaagggtgaagatgccctgtttatgtttgtcttatctcctagaattttaaaaattatttcgactgcaccagacgttgtatattttcgccgtataaggccgtattccgcttctcgtacaaagtattcattttttaaagaggtagaaatcggatttcaacaacaatggagatatacaattttttatatacaaaatattagtaaatacagctttgctctttatatcagtaggatattagcagtatttaaagtaatgttaatgaaaatgaaaggatag

SEQ ID NO: 62638 - DNA, 234 bp, Acinetobacter baumannii
atgaaaatgaaaatcacatctgtagaaaagcatcaacgtactcatagctatcgatttgaccaaaaatctttagagcgtttagctcttgaaaaaatagcagcagagttaggtctagacttaacgaaaaatagtttaaaaactgaatcccgaattattcctaactctgggggcattaatccaacaacttatgagtgcgaagtttcaattattgagagcttggactgtaaggattaa

SEQ ID NO: 62639 - DNA, 390 bp, Acinetobacter baumannii
atggctaaaaaaatttctggaattgatgaacattggacagcttttataatatgtatacttgtacatatgttattgcccttattaccattatttattgaatggttattgattgataagatatctaacagctcttatacaataacaatagctatttatgcgatgactatcggagcttcttcgactaattctattattgcaattctttgtatttttataggaataattttctccgttttatatggtgctaccgtgagtaatcctaagcttgtttttgatattcaactgtggtcgattatggcattaattaccatatttgtacctcatgcactagaaagatataatagacatgtctatgaaaaacaagcgttcaaaatttttgggcaaaagtag

SEQ ID NO: 62640 - DNA, 408 bp, Acinetobacter baumannii
atgcaagaaattttaaactttctcgaaaataatcatggaattctttcaatcatgataactgtcttttctgcttttgctcttgtgttatctctttatgtaactcggaaacaatatttagaattaagaaaagcagaaaaagagtatgtagatctcttaataaaagaaaaggagttcttgaaactacttaaagactctgaagagctagatttacaaaaaaccttagcttcaaaatatataagcaaaactaattttgatgaaaaggtttttactaatgtatttcttaagttggatgatagtaacagaagcctcctacagtcagcagtttttcaaaagactgataaaaatagaaaagcatattttgaacatttagttgatatagcaaaaaaaattgttatgactcatagttaa

SEQ ID NO: 62641 - DNA, 132 bp, Acinetobacter baumannii
atgtcgcgaaatatacttattatcattgtaattttattgctaatttggataactaattctggaaatataccttctttagtagacctcggccataaaattgctgaaaacctatttcctccagtaaaacattaa

SEQ ID NO: 62642 - DNA, 501 bp, Acinetobacter baumannii
atgatcttagatagacagttacagctagaattattaaataaaatgagtacgacatatcctgagtactatgattttagagatgaatatgaatacggtactgatgcatataacaaagttgtagctaatctaacatacctaattcaacatgatttgatagaagaaaggagcctattattttcacgttctatgagtggaaagaaacaaccccaaattcatctaccaactatcaatcacaatgggatggattttctggctgatgacggtggtttatctgcaatacttggtgtggttactattaaatttgaagcaaatcagttaaaagcaatcctagaagctaaaattatggcttcggatctgtctcctgaacgtaagcaatcaatgattgatgtgctgcgagagcttcctgccgagagtataaaacacctgacaacgaaaattgtggatacgggttatgacaatcttgagtctctaatgaacttaattcaaagcacccttttttag

SEQ ID NO: 62643 - DNA, 252 bp, Acinetobacter baumannii
atgtctgatgctaacgacaaccatcgtctcacacctgaacagttacgccatgcaggcgaactgttatacggaaaccaatggcagagtgatttagctagagctttagaggttgatgcacgtcgtgtaagagattggcttcaggaaagaaggcctattcctgttggggttagagtggaaattattcaattattgaaacagaatagtttagatacagctaattttgcaaaagcactcgatattgtagaagattaa

SEQ ID NO: 62644 - DNA, 846 bp, Acinetobacter baumannii
atgaatactattgcaaatataaatgataaagaaatttctattattaactataaggctattcctatagtaactacggaaatgcttgctgatttttatggcacagatatagataacatacgccagaacttttctcgaaatgctgaaagatttgtagagggtaagcatttttataagctagaaggttctgaactcaaggcttttaagaacagcgtgactaattgtcacgctgttaaaaagaatgccagaatcgtaaacttatggacagaacgtggcgctgcacgtcatgccaagatgctagacacagaccaagcttgggaagtgtttgagcaattagaagattgttacttccatcgaaaagatattctgtccaaaacacataagtcagaacgtgaaccactcacaagcgctgtaaatatgcttgtatctaaaaccaagcacttaaactatagtgaggcatataaattagtacatcaacggttcaatgttaagagcatcgatgaaatcccatacgatgtaattccaatcgccgtcgagtatgtgcatcacttgattgctttatatagtcaagcagataagaaacagcaatatgaatctaaacatgtagattctatagctcgtcatatgctttggcttaatcactggtggtcagagtttggcgagtctatacgaagacttggtccatctatgggacatggaatccatgaccactttaagttcggtgctgaagatgcaaggcagttagtagggcgagacgtctacatgcctatatttgaattagctaaaactcatgactggcataaaggtggagtaagttatatcgaattaagacaatataatctagtttaa

SEQ ID NO: 62645 - DNA, 603 bp, Acinetobacter baumannii
atgtgtgatgaaaaaaatgctgacaaactttcagagttaaaggctgtttataaattagcaattgaaactagaaattttgagattcagcaacttattaatcgcaataatttctttatgttatttcaaggggttttattggcggcagtttttagcaatcaagcaagtaagccatttgttgagtttgttatttgttttgctggaatcattatctcttggcaccaagttggagtcgcagcaggggcaaaatattggcaagagtggtgggagttaaaagcaagtgagattgagaaacaattaaaggattcaattggagaaaagggctttatttcactttttaatttagaccatactgatcaagataatcaaagatcgaaagtaatgctcaaagtaaataagcaatcaggatgggtagagacaatagtaaattcacttattctgaagaaatattctgttagccgagtcccaatcagaagtggtttaattttaatggtaacttgggttgtcttatttttaagtactatacattggagttcatttaccaattgttttgagaattttaagtttttagatggacattattttactccagatcagaaaaaatag

SEQ ID NO: 62646 - DNA, 150 bp, Acinetobacter baumannii
gtgcataagcatacatcaaaaactgaactaaaggtagatgggaaaatgagcgaaaaaggtgctgaccgtgcaggactaatgcagtcaattaccaatttgggcttagccttaggaatcatcgttatcgcgattattttggcactgaaataa

SEQ ID NO: 62647 - DNA, 630 bp, Acinetobacter baumannii
atgaaaaagtttttaaccctatttattatttattcatcatttcttggtggctgtagtaatgcttcggatagtgcaaaacaaagcgaaattacatcacctaagccgttgtcagccgaagataagaagattattgataagcataatgaatacattcaaaaatactctatggaagataaagaaatctttcagaaacacatgcgcgagatacttcccgatgtagacaagatcacggacaaacataaacgtgaactacttcaaatgaatatttatatgattttgaatgactatgagagagcacacacattgaatgataagcaacttgcggagaagccaaatgacaccgcaagacttacatttagatgtcagttatttaccatgcaagggatagaagcaactgtggttaataagtgctatgaccatgttgcagaggttctaaaagtggaactagacaaatcggaaaacaagtccgaccttgattataagataggcgagttctcatacttatatgcaaaatataaagctggacacattgagtataaagagaaaatgcaagagtacattgcagaaactaaagatagaaaattaaaggctactttaacatcactttatgatgttgaatttgaaaaatag

SEQ ID NO: 62648 - DNA, 522 bp, Acinetobacter baumannii
atgagagtatttttattaactttgattgcattagccctgacagcgtgttctaaaccatacgataaatatattggttactggaaacttgaaaattctaattctccaagaattttaagtatttataaagaagataaagagacatatttagtaaacgataatattcttgctgaaaaagatttctttggaaataaaaaaacaggtactgttttagagaaaaaagagaaagaattgggtgtaaacaatggcttaactgttataccttttaatctatctgaggatggaaaaactttgcgtataggcaataaaatgtatactaaaattagtgaagaagatgctaaagctgcattaaaaaataaagaagattgcaataatctaagagcgaagtatcaggaggaatctaaagcctttaatatatttgctaaaggagcggaaaaagaaaaacaagatcagattaaaagaaaatatattgatcttcaaaaacaaatttcggattgtaagttttatatagctaacgcatattaa

SEQ ID NO: 62649 - DNA, 846 bp, Acinetobacter baumannii
atgaaaaaattgatagtcgcaatcgcagctaccctcacattaactaatgcatattcatttgatgtttatcaatttatcatttggaaaagctatatcgatgataagggacaactcaaaactgatcaaaaacaacttcaaaactatttcgcacaaaacaacttaaaacccataaaggtaatttatcacaatagatttcttacaaagggtcagccagatgaggataagattaagatcattgccaacgctaccaaggcaaatccttctatccccgtatcatttgatatagaggtaggtaataaatttaaaccccaaacagtactaccaatcgtcaataaaacattagatctctaccataagtatggtggagctgcaccggttggtgtttatggagttctaccacaaataattttcgcagatgagcaatttaattcatctactaaaaatcgttataagcaattaaataaagatgcagaagacatagcaaaaaaagtcgatttcttaagtcctgtcttatacaacacatggataacagacttcaatcaatggaaagttcgtgttgacttccaaatgtcagaagcacatatgtatgcagataagtacaatttaaagatcattccatatatttccggatcatatttggataaaggtttttttaaaaataagataattcatccattgactgaatctgaaatgaaacaacgcttagactatattaaaagcaaaggggctgatggcgtaattgtatgggaaggtagtacagctacgcttaaaaatggtaaaactccaacttatgataaaagagctggtgcatataaagtaattactgaatatgcaaattctaaataa

SEQ ID NO: 62650 - DNA, 192 bp, Acinetobacter baumannii
atgaatcaaagaattgaaaagtacaagtttagccaagccttccgggatggctcgaaagcattcgtagctttctggattatcaccttcattgcatttgcttttttaaaaggctgtgccgacgagcaacacgtcaacgaactcaaagcaaaacagaacatgtatgtgcgtgtgcaagttgagggggtgaagtga

SEQ ID NO: 62651 - DNA, 1014 bp, Acinetobacter baumannii
atgaaaaccgccactgcgccgttaccaccgctgcgttcggtcaaggttctggaccagttgcgtgagcgcatacgctacttgcattacagcttaccaaccgaacaggcttatgtcaactgggttcgtgccttcatccgtttccacggtgtgcgtcacccggcaaccttgggcagcagcgaagtcgaggcatttctgtcctggctggcgaacgagcgcaaggtttcggtctccacgcatcgtcaggcattggcggccttgctgttcttctacggcaaggtgctgtgcacggatctgccctggcttcaggagatcggaagacctcggccgtcgcggcgcttgccggtggtgctgaccccggatgaagtggttcgcatcctcggttttctggaaggcgagcatcgtttgttcgcccagcttctgtatggaacgggcatgcggatcagtgagggtttgcaactgcgggtcaaggatctggatttcgatcacggcacgatcatcgtgcgggagggcaagggctccaaggatcgggccttgatgttacccgagagcttggcacccagcctgcgcgagcagctgtcgcgtgcacgggcatggtggctgaaggaccaggccgagggccgcagcggcgttgcgcttcccgacgcccttgagcggaagtatccgcgcgccgggcattcctggccgtggttctgggtttttgcgcagcacacgcattcgaccgatccacggagcggtgtcgtgcgtcgccatcacatgtatgaccagacctttcagcgcgccttcaaacgtgccgtagaacaagcaggcatcacgaagcccgccacaccgcacaccctccgccactcgttcgcgacggccttgctccgcagcggttacgacattcgaaccgtgcaggatctgctcggccattccgacgtctctacgacgatgatttacacgcatgtgctgaaagttggcggtgccggagtgcgctcaccgcttgatgcgctgccgcccctcactagtgagaggtag

SEQ ID NO: 62652 - DNA, 444 bp, Acinetobacter baumannii; identical to SEQ ID NO: 43089

SEQ ID NO: 62653 - DNA, 234 bp, Acinetobacter baumannii
atgaagagattacaaaaagttaattttctgagccctgttatatataacatctggtttagagactttgaagagtggaagaaacgtactgatcaccaactaagtgaaagtaaaaagtatgcaagtaaatataatttaaaagttattccttatttttcaagttcctatctagataaagacttttttaaaaatcatattatatatccattagccgaacaagaaatgaacaaagattag

SEQ ID NO: 62654 - DNA, 342 bp, Acinetobacter baumannii
atgaataaattaaaaaccatccgagttatttatcatgataaatttctaatctatggaaggccggatcctcaaaaaataaaaatgattgctgatgtttccaaaaaatacccacatatacccatatcctttgatatcgaaataggtaataaatttaaacctcaaactgttttacctattgttaatcaaacactagatctttatcatcaatatgaaggagctgcacctgttggagtctttgctgtactactacaaacagtttttggttcagaatccatggatcagatgactaaaaacaaataccttaaattaaatcaacaatatgaagagattacaaaaagttaa

SEQ ID NO: 62655 - DNA, 240 bp, Acinetobacter baumannii
atgctagtcgcttacgtttttcctcctcgtcttttaccgttttggcaatttcttctcgctccaatcggtaacgttcttgcattgcttgcgtttcggaaagtaatgataagcgtgcctgaaataaacgttgttcctgtgcgagttttaacagtccgagttcttgctgatattgttgattcagcaattcaacagcttgcttctgctcagacttacttaattcaatgtcatgagctgcattga

SEQ ID NO: 62656 - DNA, 354 bp, Acinetobacter baumannii
ttggaaagaataaataacaaaaattattatatttttagatttaatcaaatttttgattttaaaaatgtcttggatttaagtaagtcaacttatagattggataatgattttttagttttagaaaaggcagagtttttaaataatttagatattgatatattgaaaattgataatgtggattctgctcaagatactttttttatcagtgagtttgttaaagaagaaattgaaaaaaataaatatcaaggtataaatatttttgatcttagtttggctcaatggagagactctgatgattttagttttatgtttttgagtgaagatgaggtgaataaatttgtgtggccaatttag

SEQ ID NO: 62657 - DNA, 240 bp, Acinetobacter baumannii
  misc_feature (222)..(231): n is a, c, g, or t
atgaagtattttgttttaagttcgacgcaaagtagtctttgttcaatttcacttgtggatgatgctgttctatatatgaataaagagcaagctagccaaaatatcgaatatggatctttaccatggtatagttataaaactagcaaaaactgtgatttacctattgaaggtgtacttatcttaaaaagtaaaaaaatagaaataagtattagaaatataaannnnnnnnnngttgagtga

SEQ ID NO: 62658 - DNA, 570 bp, Acinetobacter baumannii; identical to SEQ ID NO: 13730

SEQ ID NO: 62659 - DNA, 435 bp, Acinetobacter baumannii; identical to SEQ ID NO: 26756

SEQ ID NO: 62660 - DNA, 846 bp, Acinetobacter baumannii
atgttaatcaactcagatttctcacaagctattactagttttacacggagtagtgatcaaggtgctcgtgtgctagagagttatgctggtgcaagaggactgggtatcgctgacagtagtgcatttggttttgctattgttatgggattactaatttttttgacattttttgcctataaaaataattttatttcttttaagtattttattgtccttctgttactaggaagtgttgcatcaataagtgcagggcgaactgccgtattaggtataatgtttggtttagtatatttgttattaaattttaaaaattatagatctttattgactttaatttctatttttctattttttattttaattggttctattttaattagtatagatagaaactctatcgaaaatgaaactttgggttatttttattcatacagtatggagccaatattaaattatataaatgaagggagttttgcctctacttctactgatgctttgcaaaatatgtatttccctttaactgaacaacaatatttaattggtgatggccgttatatggatggagaaagttattatatggcaacagatgctggttatatgcgcttcaccttattttatgggggggttttttctttaatgttttatagttattttatatattttaccatgaaattgatttttataaagaaaaataatattatattattgttatttcttttggtaatttcacttgctttgcactataaaggtgaggttgtacttttttctatttcttataataaagttttatttttaatcttattttttatttatatgaagtctataggaattaataaaaaggcgtag

SEQ ID NO: 62661 - DNA, 324 bp, Acinetobacter baumannii
ttgctaacaagtcaagtatttaatagcttttcagataaaggttattttattagtaatatcacatggcttgtttcagaaaagaaaggtgaaaagagaaaaattgaatatagtgcgggtttttctgatccagactctagaaatacctttatttatgaaagtaggggttattatgaaattaactctgccacagatgaatataagaaaaataaaacaaaatggaaaagtacacagaaaaaagctatagaatttaaatttcaggagattgcatttaagaaatttgttgcagttatagaaaaactaaaaagtggtgactctgatggataa

SEQ ID NO: 62662 - DNA, 186 bp, Acinetobacter baumannii
atgtctgattgttatggtggtggtggtgcttactttattgacatagacgccgatactgaaaacaaactcttagatgcggaccctgattgtgagccacaactcgatgttgggtatgcagagagccttgaagaagctttggagtttattgatcaattgccaagtttaaaaggagccagccatgcgtga

SEQ ID NO: 62663 - DNA, 435 bp, Acinetobacter baumannii
atgtggagtcgtttaaagaatcactttaaatactcagcaagttaccgagaattacgagctattcactttgaggatgctaagcattatttagaagttatggatttaaaggcaaagccagaggaaaagaaacctcaagatcctttatttgataaagacgcctatgagctggttcgcaaacttactgaagcagtcatcatagaaaatgatgaaatcgttccggttctgcttgctgtaaaaatgcttgatgtgaagaagttcgcgtattactcacacttagtagtgaaagcgaatgaagcagcacgagatatcgctcgattgttggatttcaggaacctacaaaatgagccgttgattgatgcagactgttcggtgatagccatgtctaatggacaaagatttctagcacgaccgaactggtttaactgcccagcttag

SEQ ID NO: 62664 - DNA, 234 bp, Acinetobacter baumannii
ttgaatgaagaagaattagaatatagctttaaaaattgctctaagaatatcaaagacacttcttctgacttattatattattttgagcaaggtataactgaattaaaagatcatttagacaacggaagaattgtgtttattgccatggctacagcagaaaagttagcgaatgttttgctcgagtctattaacctagatgtacaaatcattgtactcctttataagataaactag

SEQ ID NO: 62665 - DNA, 324 bp, Acinetobacter baumannii
atgcaaaagaactttgccaaatatgtagccgatgttgaaatgcaaaagctagatcggcttattactaatctgggaaatgtatataccgtttatcatgattgggggaatgcgattcaggcgcaaatcttacaaattgaaggaacggcagcaccagatgattatgaccgtctttcccagtggtggttacgccgccaatatgatattgccattcagcagcattctttcgatgaacacactctcattaatatttctccagatgcgggaacggtaaataagaactctatttttagtgatgaagaactacgtacgcttgagcaaaactaa

SEQ ID NO: 62666 - DNA, 174 bp, Acinetobacter baumannii
atgcataaatgcaaccactgtgaagctgagcaattaattaattcgttgggtggtcaaacaagattcttcaaaatagatggcgacaatttaatgtgctggtatgaagaacttggcgcatggaaatatcctgctgcttctaattggcttatgaaaaatataaaggtgattcaatga

SEQ ID NO: 62667 - DNA, 2223 bp, Acinetobacter baumannii
atgctgaagcagatcatcctaaagggttcagcaaagtcacgtcagacagttggtgcaacactggatatggtgacatttcagggtcgctgtagtgtccgcgcacgccgtttaacaccaacaccggcagttacaacagtagttgatgaagtaaagtggcaggcgctttatggtgcttatcccttgcaaagcacagtgtatgaacatgaaacggtttttcgtgcacgtacttatgcaacgaccggagctttatctgttaagtcccgtaagatcaatttcgatcttcagcgaatgttgccgacctataaaaatggggctatgacgacagagctatttccaacatcaagctttgctgatgcactggtttcaatggcactggatgacaagattggccgccgtacgatcgacgaaatagatctggaaaatatctatcggacttataacgatgtagtggattatttcggtacaccactagcggcagagttctgcaccactattgatgatacaaacctatcttttgaagaactggtcaccaatctttgtgatgccgtgttttgtaccgcatatcggcaaaacaataaactcaagctttattttgaacggccaactgataactcggtaatgctgtttaacttcaggaatatcattccggatagttacaagcatgacctgacctttggcgtgatggatgactacgacggactgatctatgaatacacggatccgaccgacgatagccgtatcaatatctatttaccggataaaggagccaaaaacccaaaagaggtgaaatctgttggtgtacgaaacaagtggcaagcgcatttcaatgcataccggatttggaacaagatgcgcttccagcgcaaatccattacctttgatgcggcaccagaatcagaattactggttttacgtgaccggattgctgtagcggattatcgcaatggtattcatcaaagcggcgaggtggtacagcaagaaggtttaattctcaccctaagccatgatgtcgatttcattgcaggcaagagttatgtgatttatttgcaaatgggggatggtaccgtggacctgattcccgttacgccgggttcagccaagaacaaagtagttttagggcgtttaccgaacggggccttaaagcttagtcccgatgactttgtgaatactatctacaccgtagttaatgacgatactaaaggctcattgccttatctggttgcaaaaagagaacctgctgaccagttctctaataccattacggcaattaattacgatgaacgttattacctcaatgacaaggactttattgatgtgccagtagatgattcaccgatttacattcgatatgaccagctggatataaatctggtgcgtttgtatcagatgcaaagaggtgatttaccaacgactggcgaaatcagttttgtagttgaagcaggtgcactggtttcaagttcaagttcttatcgaccggaaaccagatttgtccataaactcgactataactctagtcctgcaaaacgagagtatatcgttccagctgcctcagaattaccggcgatagatacaggggagttcccgcccgatctggtggtaaatctgacgattaaaggtgctgttgttggacgtggtggtgatggaggattgccacatttgtcatttggtgcatggtctaccgatccggattataactttaccaaaacccgccgtgatgggtatcagggagcacccggtttgttgaaccggcacagtaaactaaatctgattattgatggtggaactctggctcgaggcggatctggtggcggcgcaacaccaagcggtatttacactgagttaacatatggagtccaaggtatacccggtggagctggtgcaccatttggacgggtcatgacgggacagcccatttcaaatgactcgcaagactggcgttggtacttaaatggtgactttatggtggtaaaaatcactgatgctgaagctgcagtgcccggtaaaggttaccgaacccaaaatgaccgttatggatctccattatcaggggatggcggaaactggggcgaacgtggtaccaagtctaccaatgatggaacatggaactggaaataccatggcacaactgaaggtcagccgggaccgggtggacctgcaattgttggggtggcacctctaacaactcaattgattaacggagggaaaatcttacaaaccctttaa

SEQ ID NO: 62668 - DNA, 609 bp, Acinetobacter baumannii
atgaatttacttcctccaaatactacagctttcgaaaagaaaattgttgagactacagccaaatcaactgaactcaataccaacttatcaagcttaattcgtattgatgatgccccagcagatttcttatctattttagcctggcaattttctgtagaccgttggcaagatgactggcccgatgaagttaaacgtgcacaaatcaagaactcaatcaaaatccacacacataaaggaacaaactttgctcttcgttcaatcgtagaaagttttggctattcactcactattcttgagtggtggcaagaaagtcctatgaatgtaccaggaacattccagatcacgattgatacaaatggtcaggcactatctgaaaaatcatacaacacgttggttgaacttattcatgatgcaaagcctttaacaaggcagcttaagggaattgagctaaatgtgatttccgtaaagggagattcaaatgttgcatgtgcaatgtatgacggtgaagaagtcacaatttacccaaaacaacaacaacccatcccctttatttacccagtttttgtccattacggacatgacgaaactacagtttatccgagaacctaa

SEQ ID NO: 62669 - DNA, 2457 bp, Acinetobacter baumannii
atggctgagcaaatttattattccgtatttacacaaaaaggtttggagctattaacagaatcaatccagaacgggacaaaactaggtattacttcaatggcttttggagatggtggtggtgaactgcctacaccagatgcaagttttataagtcttgtaaatgaagtgtatagaacacagcttaattctatttcaccagatcctaataatagaaactggctacgtgcagatgcaattattgcttctgcaattggtggttttaatattcgggaattaggtctttattctggcgatattcttgttgcatattcaaattatccgtcaacatacaaacccaatcccgctgatggcacggcaagaatcatgacattccgtatggttctacaaattgataatgttgcaaactttgaacttgttatagatccagatgttgtacttgcaactcatcaatatgtcgataatgaaattttaaaacacagacctgttaagcctgaagattttggtgctaagggtgatggagtcactgatgacttaattgcatggcaagctatgcttgattctagaccaagtcaaatcgactgcaatcctaatgcgaactatattgtaagtgacaaggtttatatccgtaataacgttgttattaatggcaataatgcgatatacacaagtcctaaacctatttctacaacacagatgctttcgtatgacattgttggtgcaccatcaaaatcaacaatatcactttcattatcctcagtgcttggcctcaatgttggggatcgtgtaatgatttattatgggggagataatagtgatcaatggtataccgataacagaagaaaccctgaaaaaataggtattacatctcaaattacgaatattctctcaattgagggaaacacaattacgattgcgaatggtttagattttgatcttgatcccaccaaaacttcacgtatttataaaatacataacatcactccaagaattaacaacctaaactttaaactacatggcaactattatgatcatacatattcatgcaatatgtatttttataagtgtaccttcagtcatcgtgatttagagggagaaatcactttccgagatcaaacatcttacaatacaatttttaataactgtatttttaatacacgtttaaagctcatgtatggatatggttctcattctggaattgttgaggactgtactttttttgatggggttgaacatgatgctgttcttattacctatgcaggtgctgttggcattttatccatgcgaaataaattttatcgaaatggtagttattacagtccaaatgtagctggaatttatttcggtgcaaaatgtcgtgattgcgtatcaatggatgatttcgtggatggcttggcacttggttttaggatcatgtttggtgcagtgggttgccaaattgtcagaatggtaacacagcatattaattctacttatgtaggtttaattgataaatcacaacgtattaaaattaaagattgtacgttcaaggaaaaaatagttcgcacattagatgttgatgattttgaatttagtggaaacactatgttatctaattatcgcggaactggtgtgccgccattgaagcttgatctcaatagagtagataccgcagtaaaagcgaaaaactatttaattaaagacaatgaaatacaaggggaaatgagaacctggatcagtgttgataacttaaaggtacttaacaatattgcagcaatatggaatagcgtcaccagtgttacatcgtttgacacacaaattaaggacaatcgatttggctgggttagattatatcattgtatgcgggccttaataacaggaaatattattgattataatttattagatagtattgagtttccaaaagattcagctcttgaactctatggtaatactttcattaatgagtttcggggtaatacaattattcatccatcaaaaggggtacttaaaacgggcggtggttttaatatcgtgtctattggtgataacaatatattttctcccctagcttatgatattggtgtttcacaaagtacacctccactcacgggtgaatctgttctcaaatatgttggaattggaactaaagcacgtacaaatgaatatggaatttcttccaagaaatatttttcatgggatggggcgaaatgggtcttagatagcgatttcggtaaaatttatacttatgaattgaatttcactcctgttgccaatggtgtatttgaagcttactctcgaattattcaaggaattagtattggtgataatgctatcattgagtgtgcaggagttagccctgacaaagcggaatatattgctaaagtcacagcagctaatacacttcaaatttactaccgtaacttcacctcagatataacatcggtgaagcacaccgtatacgttactatcttaaagtaa

SEQ ID NO: 62670 - DNA, 192 bp, Acinetobacter baumannii
atgatcgaattcgttgattacaccgcaatgatgagcctacgcagagcttacaaccttggcactcgtaataaagaaactagagctgctgcaaacctttacgagaagctaagaaagctaaaaatgctggaccagttgaaggcagaaagcatgaacgtgaccagacatgacaaacgtgacggggtgaagggatga

SEQ ID NO: 62671 - DNA, 153 bp, Acinetobacter baumannii
atgaacggagctacacttgtagatgatgatggtgactattggatcataactccagttgtttgttttatctggcacagttcaagaaaagcttgggttgaatatgcaaatcgcgatgaagttgatatgagcaaattgagggagataagccaatga

SEQ ID NO: 62672 - DNA, 240 bp, Acinetobacter baumannii
atgaacgccacccagtttatcaaagaccacggtttagaacgggcgagagataagggaatgatctacaaacacaataagactggaaatctctattcgctaattgcagttgctaataaatgtgacaacgagaagtttccaaagatggttgtctatcaaagcttgagcgacgggaatgtttacgcacgaccatacaaagacttttttaattcgttctcgatccaaggagtcagccatgtgtga

SEQ ID NO: 62673 - DNA, 360 bp, Acinetobacter baumannii
atgtgtgagtttaaagaaggtgattggcttacaagtaaatctcatgcaggcctattgatattttacaaacaagttggcgaaaaaggttttgttgatgtgattagtagatctggtaagtcgattggcttatcagcctacaagctgtcagaacttgagcatgcatcagaagccgagattaaagcaggccaccgcattgatgaagtggttctagtttatgcgaacgttaagttcccctacaacgttttaactggtgagcaagttggtgctgttatgcatgccacacattttggctgcgacctaggcgacgacttccccatagaaaaccacatttcgccaaactgcaaagctaaggatgtttga

SEQ ID NO: 62674 - DNA, 255 bp, Acinetobacter baumannii
atgaagctacgaacaatcccacaagagtatgaatcaatacagtttgagggaataacagaagagctagaagcttttctaaatggtacagagtcaaaggtgtatctgcaaggtgaagactttgtattgtctggatttgttgggaatcaaggcatagacataggtgattatttgtataagacagactcaccattaacccttgttcatgtcgcacataacgataaatcgtttggtaaatactttgaggtgctgcaatga

SEQ ID NO: 62675 - DNA, 711 bp, Acinetobacter baumannii
atgtctagttattcaactctaaaacaagctttattagagcttgagaagaatgaagaacaatttaaagctgtaagttgtagaaatcattgtgtcgttttagcaggccccggtagtgggaaaactaaaactcttactactgctatcgctcgtactcttaatgaagaaattattagtccaagagggattgcatgtataacttataataatgaatgtgccattgaactcgagaataggctatctaaatttggtatagagagcaatggtcaaaattttattggtacagttcatagttttgctttaactcagataataatcccttatgcacgctgtatagagggccttgtacctaaagattttaaagtagcaaatctccttgaatgtaaaatagctatcgaaaatgcctataaaactgtatataacgactcagaagattctaagaagcaatgggattttgctagcgaaaaaagaaatcgagaggtagatagaagtcttccaacttggaaaggtcataatagagaattagctgaatttattgaagaatatgagtcagagttaagaaaaaaaggtttgattgattttgatgatatgcctctcatagcatatagaatgattaaagaaaatccttggattcggcaagctttggaatctcgttttccaattttatttattgatgctctgtacacgacaaaaatagataactcattgaaataa

SEQ ID NO: 62676 - DNA, 606 bp, Acinetobacter baumannii
ttgaagattcctaaacataaaatcgttgtctttactggagtctctggttcaggtaaatcttctttagttttcgagactattggcgcagaagctcaaagacaaattaatgaaactcaagatagttttgtacgtaatcgcttgcaacattttggtgttactgacgttgataaaattgaaaatttaaatgtacctgtgattattaatcaaaaacctttaacgggcaatattcgctcaactgttgcaacaattacagatatttatgccaatcttcgcttgttattttcacgtatgggtgagccgtttgttggatactccaatgtcttttcttttaatcacccaaatggcatgtgtccacaatgcgaaggtattggaatcgagcaaacaattgatatttacaaaatattagatttagataaatccttaaatgaagaaggtgctatagacttccctacttatcaacctacagcatggcgttggacgcgatatgcagattcaggttactttgatttagataaaaaattaaaagattatagtgaaaaagaatgggacttatttttgtatgctcctcagcacaagcctgaaaaaccgcactttatgaaggactaa

SEQ ID NO: 62677 - DNA, 915 bp, Acinetobacter baumannii
  misc_feature (881)..(890): n is a, c, g, or t
atgagaatcttatattttcaccaatactttaatacacctgatatgtctggtggtacacgctcatatgaaatggctaggcgtttagttgcagcaggtcatgaagtgcatattattacgtcatggttaaaagaaactgatgagaaaacttggtttactacagttgaagctggtattcatgttcattggtttcctaatttctataataacaaaatgtcttatacggatagggtgaaggctttttttagatttgcataccatgcaactaaaaagggtaagagcctagacgcagatttagtatttgccaccagtacacctttgactattgctattcctgcagtttttacagcccgagctttgaaagtcccaatggtgttcgaggttcgggatctatggcctgagttaccaattgcgatgggggctttaaataataaagttgcccagaagttggcttatcaattagaggattgggcgtataagaattcaaaagctattgttgcattatcccctggaatgaaagagggcatagtaaagacaggatatccaaaagcaaaagttgcagtgataccaaatagctcagatttagaattgttcaaagtcgaggacaggagagttgaggagttccgaaagtctcatgaagggttacaggatcggccattgattgtctatacaggtacttttgggcatattaatggcgttggttacttgatagagatagctgcgaaattaaaaactctgaatccagaaatacgaatcttattagttggtgatggagttgaatatgaaaaagttgagagacaggcagctcagttaaatgtcttgaaacaaaatttatttatgatgaagcaattacctaaaaaagaaattccagtaattttaaatgnnnnnnnnnnctttaagtacagctttatttcttga

SEQ ID NO: 62678 - DNA, 924 bp, Acinetobacter baumannii
atgaactttcaacaattaagaattattcgagaaacagtacgccaaaactttaatttaacggaagcatctgccgcgttatacacctctcaatcaggtgtaagtaaacatattaaagatttagaagatgaattaggcgtacaacttttcgtccgtaaaggtaaacgtctgctgggtttaactgaacccggtcaatcactccttagcattgtagaacgcatgcttgtagatgctgaaaatattaaacgtcttgccgatgactttaataaagtggacgaaggtactttaacgattgcaacaacacatactcaagcacgttatgtattaccaccaatcgtcaatcaatttaagaaactatttccaaaagttcatttgattttgcaacaagcaagtcctgtcgaaattgcagaaatgcttttacaaggtgaagctgatattggtatcgcgacagagtctttaacaactgaagaaaatttagcaagcattccatactatcaatggcagcacagcattattactcctcaagatcacccacttacacagctcgataaaattgatcttgatgctttatctgaatacccactgattacttatcacggcggttttacaggtcgttcaaagatcgataaagcatttgaagatgcacaaattgatgccgatattgtaatgtctgcgcttgatgccgatgttatcaagacttacgttgaactcggcatgggcgtcggaattgtcaatgatgtcgcttacgatgcagagcgtgactatcgtttaaaacaaattaaaactgatatctttggtgtcaacaccacatggattgctgttcgcaaaggccatttattacgtggttatggttatgagtttatttctttatgctcacctgatgctgacattaaagcattgaaaaaaattgcctatccagatgaataa

SEQ ID NO: 62679 - DNA, 1062 bp, Acinetobacter baumannii
atgagtattcaagttaaaaatattgaaaaacactttggtgcattccatgcgcttaaaaatatttcactcgatttcccagagggtgaactggttgccttactcggcccatctggctgcggtaaaacgacgctacttcgtattattgcgggtttagagtcagcagatggtggtcaagtcttactagaaggcgaagatgcaaccaatgtacatgtccgtgagcgtcaggtcggttttgtttttcagcactatgctttattccgtcatatgaccgtatttgacaatattgcctttggtttacgtgtccgtcctcgtgccacacgcccatcggaagccgaaattaaaaaacgtgtgactcgtctacttgatttggttcaattgggctttttagcagaccgttacccagcccagctttctggtggtcaacgccaacgtattgccttagctcgtgcacttgccgtagaacctcgtgtgttattgcttgatgaaccatttggcgcactagatgctaaggttcgtaaagaattacgccgctggttacgtaacttgcatgatgagctgcatatcacttcaattttcgtaacccatgaccaggaagaggcacttgaagtagcagaccaaattattgtgatgaataaaggtaacgtcgaacaaattggttctccgcgtgaagtttacgaaaaacctgcaacgccatttgtatttgatttcttgggtcaagcaaatcgttttgaaggtgaacatgcaagcggtattatccgtattggcaatgatcgtatcgaattaccgaccacagttcaggcaccgcaaggaaaagtaattgcttttgcccgtccggatgagttacatattcatgcgcaaccacaggcaaatacaattgaagcaacttttgtacgtgaagtctggattgctggaaaagtagtggcggaattacaagatcgtaatggacgtttaattgagattgctctgagcagtgaagctgcaaaacaacatgcatttaaaccaaatcaaactgtttgggtaagtgcatctcaacttcacctatttgcagatcaagttgcttaa

SEQ ID NO: 62680 - DNA, 885 bp, Acinetobacter baumannii
atgaacctacataccgacagcaatgcacttgccttgaaattgcaatctcgtgacgcgacacgtgaaccaacttgggtacgttatacgctcattacaattgcactgatttttttccttagctgcctcatgctgccacttattctggtttttgttgaagcatttaaacaaggtcttgaagtctatgttcaagctttaattgatccagatacgttatcagcagtgaaattaacactattgaccgcagcaattgccgttccgattaatgtgatatttggtgttgccgctgcatgggctgtttccaaatttcagtttaaaggtaaagcaattttaaccaccattattgatatgcctttttcggtctcacctgttattgcaggtttaatgattgtactgattttcggtgctcaaggctggttaggcggttggctcatggaacatgacatcaagattctatatgccgtacctgccattgttttagcgaccatctttattacagttccatttgtggcgcgtgagttaattccacttatggaagcgcaaggaactgaagaagaggaagcagcgattgtactcggtgcatcaggttggcaaaccttttggaaagtcacactccctaacattaaatggggtctgatttacggcgtgattttgtgtaatgcccgtgcaatgggtgagtttggagcagtatcagtagtttccggccacatccgtggtgagaccaataccctgcctcttcatgtcgaaattttatataacgagtacacctttagcgcagcttttgcggtgtcctcactacttgctttcttggcactattaacactgattttaaaaacctggttagaactacatcaagacaaaccagaaccgcattcaactgattcgtaa

SEQ ID NO: 62681 - DNA, 834 bp, Acinetobacter baumannii
atgtcgcagcgatcccgagtgctgcctgggtttggtctatcattgggcttcaccctcgcttacgtttcttttattgtgcttattccattagccgcagtctttatcaaatcatttggaatcggatgggacggactatgggaaattttaacctctgaacgtattttaaaatcgcttcaactcagctttagttcagccttaattgcggcttttattaatgttgttttcgggctacttttagcttggtgccttgtccgttataactttcccggaaagcgtctggttgatgccttagtggacttaccttttgcacttccaacagcggttgcaggcattgcgttgacctcactctatgcgcctacaggctggatcggtcaatatttagaacctcttggtattcaagttgcatatacccctatcgggattacgctagctttggtgtttatcggcattccttttattgttcgaaccgttcaaccagtattaagcgatattgaaactgaacttgaagaggcagcttccgcactcggtgcaaatcgttggcagaccattactaaaattattttaccaatattactccctgccctatttacaggctttgctttagcatttgctcgcggtgtaggtgaatatggttctgtaattttcattgcaggtaaccagccgtttaaaactgaaattgctccgcttatgatcatttctcgcctcgaagaatatgactatgcaggtgcaacgactattgcagcagtgatgttggttctctctttcattattttatttgtcattaacttacttcaagcatgggcaaaccgtcgtacagggagaaatatcacatga

SEQ ID NO: 62682 - DNA, 609 bp, Acinetobacter baumannii
atgacacacactgtaattgttccgggtgtaggtggaagtgaacatcaacattggcaatcttggttgcagcgtcaactcgtgtctagttctcgcgttgagcaaaaaaactgggatagacccgtattaagcgaatggattgagcaattcgttaacacagttcaagcagtacaaacaccagtccaaattgttgcgcatagtttcggctgcctaactagtgttgctgccttaacagagcatccagagttacaacttcaagttaaaaaactgattttggttgctcctgcaaatccggcacgttttggtgaagcgggatttgcccgtcatagtttgactgactacaaagattattttcatcagctaaaaattaatgtgcctgcaacgctactcattagtgaaaatgatccatggttagacttttttgatgctttacagcttgcgaaatcttggcaattagccccgattaaccttggacaagtcggtcatattaatgttgcttcaggctttggtccgtttcctgacttactgaatcatctacttcctgaagactcgatgtgtagccactcatctattgatccggtaaagacacatttctctttgaaatttgcttaa

SEQ ID NO: 62683 - DNA, 1008 bp, Acinetobacter baumannii
atgcgtttttctcagttaaaagtcggggttattgctgcattactttctgtttcatcgtttgcagctcaagaattcttaaacgtttcttacgatccaactcgcgagttatatacagatttcaataaacagtttggtacttactggaaacagcgtaccggtcaagatattgagtttaaacaatcacacggtggttctggtaaacaggcccgcgctgtaatcgacggcttaaatgcagatgttgtgacattagcacttgctgctgatattgatgaaattgctgaaaaagcaaaattgcttccaacagactggcagaaaaagttaccgcaaaactctactccgtacacatcaactatcgtgtttttagttcgtaagggtaaccctaaacaaattaaagattggggtgacttaatcaagccaggcgtggaaattattacgccaaacccgaaaacttctggtggtgcacgttggaactatcttgcagcttgggcttgggcaaaacatcaagcaggtggtaacgatgcaaaagcgcaagagtttgttcgccaaatttataaacacaccaaagttttagattcaggtgcccgtggtgcaaccactacatttgctgaacgcggaattggtgacgtattactggcttgggaaaatgaagcacatttagctatccgtgaacaacctggcaagtttgagattgtgacgccatctttatctattttggctgagccaccagttgcaattgttgaaaaaaatgcagcgaaaaaaggcaacttaactattgcgaaaggttacctcaactatttgtactcacctgctggtcaagaaattgcagcacgtaatttctaccgtcctcgcaatgcagctgtactcaaaaaatacagcaatgtatttaagccattgaaacttgtcaccattgataaagagtttggcggttggacaaaagtacaaaagcaacactttgataatggtggtgttttcgatcaaatcgtgaaaatcaatagtgcagagaagtaa

SEQ ID NO: 62684 - DNA, 315 bp, Acinetobacter baumannii
atgaaaattgaaaatattgtttttatcgaaaatcgattatatccaaactcaacacagatttattttgaaaatattcaattagattgcaaagagttttatgttcctgtaggtgattatactcagccaattggattcttaaagtttaagcaaatagctaaaaaagggtgctttgaattaagttcattagagactcaagattgtcataacccgtatccacaattttcgttgtcaggtgttttatactctcggcaggaagctctcgcagcacatcaatcattgattgcttacgttcaggagacagatccgaagccataa

SEQ ID NO: 62685 - DNA, 378 bp, Acinetobacter baumannii
atgtcaaaaaaatttgaagatttcgataatccaagacaaaaggcattactggggatgaagaatagtattcctacagaacagtgggaagaaaatctaaaatttctcaaacaattaagagcgagaattgctgaattaccagtatgtaaacattcggcgatcgaagttttaaataatggattgcttgataaattcactttaacaagaattcatttagaatatcgtcatgcgattgttcagatctttactgatgccttattaatggcccagttccagacaaaacaattggagcctaaactccattctggagctaaaatgtttccacgtgttttaatgaatttggttttagaccaggaacagacccggacaattattatctag

SEQ ID NO: 62686 - DNA, 543 bp, Acinetobacter baumannii
atgaaaattgaacaatatcttgatgatttgattaaacgcgaaggcggttatgtaaataatccaatagatcgaggaggtgctaccaaatacggtattactgaagctgtagcacgtgaaaacggctataagggcaatatgaaagatttgcctcttgatgtggccaaagcaatttatcggaaacagtactggatagagccacgttttgatcaggttaatactcttagctctgcagtagctgaagaacttttagacactggtgtgaactgtggtatcaactttgcaaaaccacttttacaacgtgctttgaacttgcttaacaatcaaggtaaagctggttatgcagacttgaaggttgatggcgtttatggttctaacactttaggagctctaaaaacttacttggccaaacgtggcaaagaaggcgaaaaggtcttagtgcgcgtgttaaatattatgcaaggccaacgatacattgaaatctgtgaacgtaataaaagccaagagcagtttttttatggctggatcgctaaccggatcggctag

SEQ ID NO: 62687 - DNA, 843 bp, Acinetobacter baumannii
atgtcagtcggctcactaaactggactatattctgtgcggagtctaatgaatatggtgtcgataaagccgcatgggcagaatcagtttgtaaggttattggtagttctagctacaatgcctatgctgaggcgcccacatggttacaaatgttaggttctggtgtctttactatggtttggactgccattgtagcctttcttatcgcatttttattaggttctctcctcggggtaattcgtactttacccaataaaccacttgcttttatcggcaactgctatgtcgaaatattccgtaatattccattaattgtacagttattcttctgggcttttgtttttccggagttcttaccggacagtttaagtgcaggaagtggagatgttgtagcagggggatggtggaaaaacattttaaatcaacaacccgctgttatcggtgtttttgctttaggcctttatactgcggcgcgtgtttcggagcatgttagagcaggaattaacacggtttctcgtggtcaaaagtttgcggcatcagctatgggatttaccaccgctcaaagttatcgttatgtgattttgccagttgcgtaccgtacggtatggccaacgattacgtcagaagcaatgaacgtctttaaaaactcggcagttttatatgccttaagtgttttaaatttctttgcttataccaaaaccatgcgtgaagagacttcacaggacattatcattcttatcctgtctacacctgtctatttaatcattacatacaccattaaatttataatggcatggattgaaaaacgcatggctgtaccaggtttaggctcgggaggaaaataa

SEQ ID NO: 62688 - DNA, 1347 bp, Acinetobacter baumannii
atggcagttactgataaacatccgcagtatattgctgcacaaaaaagctggttgattatgcgcgacgccgtagcaggtgaagagcaaattaaacaggcacaaactaaatacctagctaaatcggccggaatgattgaggctgaaaagcaaggagatacgactggagagatttataaagcctatctaagtcgcgctcagtatccattatgggttcaggattcattacgtacgatgattggtttagtttcaaagctggaacctaacatcataattgaaaattctctgttaaagggtttgatagagaatgcaaccaatgatggttttgggcttaaacaactctttatccgtatttgcctagaattacttgaatatggtcgctgtggtttgcttgtcgatgttgatggggctggtgtgccatatttcgctctatatgatgcgctatcaatcattaactggaaggaaaacagtattggtggccgtaaggatctaaagctgttagtgctcgaggaacaattcgagaatagtgaagatgagtttggacatgatactaagacggtccatcgtgttttatctatggttgatggtgcgctaactgtacggttatttgatggctctgttgaagaagataaaacgccagatctcggcggaaatcagctatctttcacgccgtttgttttctgtggtacaactgataattctccacaagttggtacggtaccattgctcaccatggcaaaagcagcacttaagtattaccagctcagcgcagactattttcagtcacttcatcacacagcacatccacaaccttggattaatggtttagacggggatgaagatgatgatattagtgttacaggtgttatggctgtctggagtctacctaaggaatctcaatgcggttacttagagatttctggaaatggtatcgaactcactaagagtgaaatggatgcccagaagaatgcagcattagaagccggtgcaaaggttatcgataccaatacacaagaatcaggtgaggctcgccgtgcacgtcaggatgaccagcatgcaagtctacatagtattgtgatgtgtgcagctcaggcgatcgaacaggcaattaaatacgctgctcagtggttaaagctggatgcaaccaaatatacatttacggtagaacctgagtttatcgttcagcagtatgacatcaatctcgcaaagcagctttatgaaggtgctttagcagggaagaactccttccagacgtattgggaatatatcgctacaggcaaactaccagctcatgattttaaagaagaattaaaacgtgttgaaggtgagcgagatagcatgtcgctttag

SEQ ID NO: 62689 - DNA, 213 bp, Acinetobacter baumannii
atgaagcaaggggttattaaacaggttcgggaagaaatgcagggttatgacctgatgttattaaatcttgagttaaagcaacttgagattgaaaagttaagagagggtgaaggtgatgaagatccaacaccagtcaaggtaactattcaagttgtggatgcgagtaaaaaagatgccgaacatcaatccgacactgaatgtacctcaggctaa

SEQ ID NO: 62690 - DNA, 213 bp, Acinetobacter baumannii; identical to SEQ ID NO: 62689

SEQ ID NO: 62691 - DNA, 213 bp, Acinetobacter baumannii; identical to SEQ ID NO: 62689

SEQ ID NO: 62692 - DNA, 213 bp, Acinetobacter baumannii; identical to SEQ ID NO: 62689

SEQ ID NO: 62693 - DNA, 213 bp, Acinetobacter baumannii; identical to SEQ ID NO: 62689

SEQ ID NO: 62694 - DNA, 546 bp, Acinetobacter baumannii
atggcaattggtactttaatcttagtacctcttagtattatggtggggatagggttttggggagagagttggattggtttgtgcttttttttggcaacaagttttataacttatattttttttgatgtttttaaaagaactaagaatcatagtggtttattaggtgataaaaaatatacacagatgagtatggcattaatttttatgttaggtttccctgtctatttttatagtttttttacagaaaataaaaagttggtagatttttctttaaaatcacttcaagaaaatgataagaatgctatctatttcgtaaaaaaagaacataaagacttattcccaaaaaataacgtaatagagcaaggagattatattatattaaaacatgcaaaagtcatactgcgagggtttggacgtaatgctttaattgaatataagccagttaatgataaaaatgaagtatcttctattagtgataaagttgaagtacctaatgaagacctacaaataaaatgggtgattgatcaggaaaataataaaatttag

SEQ ID NO: 62695 - DNA, 399 bp, Acinetobacter baumannii
atgctcatcggtatcaatcaccacagcatcacctttacgctgagggatttcaactgccacgatttctttagaaaaaaagcctttggcttgcgcgcttgcggtgcgttgttggctcaccaaggcaaactggtcctgatctgcacgattgacgttgaactgttcagcgacgttttcggcagtctggggcatggtgtctacaccatacaattctttaagtttagggttaatgaaacgccagcccatggtggtgtcttcaatcttctggctacggccaaaggcactgtcagacttacccatcacatagggtgcacggctcatgctttccacaccaccagcaattaccaagttcgcttcgccggctttaatggcacgggcagcaatagcaatggcatcgagtga

SEQ ID NO: 62696 - DNA, 267 bp, Acinetobacter baumannii
gtgccatccacattgacaactacagtggctgttgggtcacttactgtacctgttaatgccggtgtgctgtcgctagtgagtacatcatcaagtgctactgtcggcgcaactgcatcaaccactgctgttgctgggcctgatgtattgcctgcagggtcagtcgctgttgcagtcactgtatcgccatccaccaggttacccgggtttggtactgaccagctaccatctgtgcctgctaccactgttgcagtggtgccatcaggataa

SEQ ID NO: 62697 - DNA, 573 bp, Acinetobacter baumannii
gtgtttatctaccgtggtgtgcaggtaaataccggtgaaatcaccattcaaacaactgggaaaatcacaggtaactttggacttgttggtagctcatttacccgtcagcaagtcaatcctgtcactaatcctatagcggcttcaacccgtccattggtcagtatgccaaacgtggaaaacttgcttattaatggtcaatcaattcaaggtaaagcgtgcatgcaatcgcttacgctttcaattaataacaaccttgaagcaatccgttgtatcggctcaggcaaatacacaccagagttctacattgaaaagatgatggatatcgaagcaaatgcttcattcatgttctcttctactgcagcaggatggatcgatgccattaaaacccgagatgtgtttactctgacctttgatattaaagacagcaaaggcagtaaatactcgtttaatttccctcaattagaagtgatggaagccaatcacccggatggtggtggtgatgacatcattactgtagacatcaactttgctcaagttcgtacagctccaacgattgtacgtgctcttgtgtaa

SEQ ID NO: 62698 - DNA, 384 bp, Acinetobacter baumannii; identical to SEQ ID NO: 49258

SEQ ID NO: 62699 - DNA, 1713 bp, Acinetobacter baumannii
atggaacacatcgaacgtgaatcgatggagtttgacgttgtcatcgtaggtgcaggacctgcaggtctatctgctgcgattaagatccgtcaattagcgattgaaaataacttacccgatctttcagtttgtgtagttgaaaaaggctctgaagtaggtgcgcatatcttatctggtgctgtacttgaaccgcgtgctattaatgaacttttcccgaactggaaagaagaaggcgcgcctcttaacgtacctgtaactgaagacaaaacattcttcttgctttcagaaactacctctaaagaagcacctcactggatggttcctaaaaccatgcacaatgacgggaactatgttatctcgctaggtaacgttgttcgctggttaggtcaaaaagctgaagaattagaagtttctatcttccctggctttgctgcatctgaagtgctttaccatgaagacggtactgtaaaaggtattcaaactggtgacatgggtattggtaaagatggcgagcctacacataactttactccgggttatgaacttcacgctaaatacactctctttgctgaaggctgccgtggccacttaggtaaacgcctaattgcaaaatataatcttgataaagatgcagatcctcaacattacgggatcgggattaaagaactttgggaaatcgacccagcaaaacataaaccgggtctagtgatgcacggtgctggttggccattgtctgaaactggttcttctggtggttggtggttataccacgctgaaaacaaccaagtgactttgggtatgattgtggacttgtcttatgaaaatccacacatgtatccattcatggaaatgcagcgctggaaaactcacccactcatcaaacagtatttagaaggtggtaaacgtatttcttacggcgcacgtgctgtagtgaaaggcggtttcaactctttacctaaattgactttcccgggtggttgcttaattggtgatgatgcaggcttcttaaactttgcgaaaatcaaaggctcacacactgccatgaaatcaggcatgttatgtggtgaagctgtatttgaagcaattgctgccggagttgaaaaaggtggtgatcttgcggttgctcgtgtaaccgaaggcgaagatttattcgttaaagaattaacttcttacacagacaaatttaacaacagctggttaaaagaagagctttataacgctcgtaactttggccctgcaatgcataaatttggtcaatggattggtggtgcatttaactttattgaccaaaacgtctttaaagtgccattcactttacatgacttgaaacaagacttcgctgtattgaaaactgttgatgcaacgagcttcaagccaacttatccaaaaccagatggcaaactgacatttgaccgtttatcttctgtgtttatctcaaacactgtacacgaagaaaaccagccagctcacttgaagcttactgatccttcaattccagtgaacgtaaacttaccaaaatgggatgagcctgcgcagcgctattgccctgctggtgtttacgaaatcatggaaaatgatgacggctctaaacgcttccagattaacgcagcgaactgtgttcactgtaagacctgtgatattaaagacccatctcaaaatattacttgggtaacacctgagggtggtggtggtccgaattaccctaacatgtaa

SEQ ID NO: 62700 - DNA, 141 bp, Acinetobacter baumannii; identical to SEQ ID NO: 42356

SEQ ID NO: 62701 - DNA, 909 bp, Acinetobacter baumannii; identical to SEQ ID NO: 48575

SEQ ID NO: 62702 - DNA, 369 bp, Acinetobacter baumannii; identical to SEQ ID NO: 48574

SEQ ID NO: 62703 - DNA, 504 bp, Acinetobacter baumannii
atgtcccaatttaaacttgaagatgcagatattcttatcgatttagcaaatcaaactttaagcttacctaaacataataagttttacgtggtctctactggcaaaaatggaattggggaacaagaaaatacgggtaaaaccccacgtggatggcatcgggttgctaagaaatttggtatgcaatctcccaaaaatgcagtttttattgcacggcagcccacaggtgaagtttatagcagtgaattagccgcacaatttcctgagcgagattggatattgtcacgcattctttggttagatggtttagaagagggctttaacaaaggcgaaggccacgacacgatgcaacgttatatctatattcatggtacacctgataaagaaccgatgggggttccaatgtcacatgggtgtattcgaatgcgtaatgaagaaatcattgaattgtttgatttagtctctgaagacgcattagtttatttgtctgaacaatctttaacctaa

SEQ ID NO: 62704 - DNA, 831 bp, Acinetobacter baumannii; identical to SEQ ID NO: 51030

SEQ ID NO: 62705 - DNA, 219 bp, Acinetobacter baumannii
atgttgcctgtattgtttacactcgcttttctgatctggattgctgaaaatattagtaccttttataaaatttggctttatccaagtcaggtagaggcttggcatatggtggggtggggtaaacttggatcatggtatttattattgcttttgagtttagtgttagtacttaaaatattaggtcatcgagataatcaaggtaattggaatttaagataa

SEQ ID NO: 62706 - DNA, 300 bp, Acinetobacter baumannii
atgctagacagagaaatacttctaaaaaaatggttagatgaatatttattagcaaataaatctaatgaaacaatatacacgcttaaaaatagtttaaatctattctttgaatataccaatttagcattagaggaaatcgaagcatcagatattagaacatttatagcttatagagctcaaaatggagtaggagtttctacactaaaaaaaaatatctctgctataagaacatttttccattatttaactaaagaaaaattaattaatttcaatccagcagaagatattagtaataaatga

SEQ ID NO: 62707 - DNA, 201 bp, Acinetobacter baumannii
atgcaacaattacaagatcatccgtttttaaatcaaatgtttgtatgtctgggtttacataaattctgtcaccgggtaagaaagttggcgccattgagtatccaacaacttttaatgcatatccattttttccacatctacgatttgggggaaggtattcctcaatttcagtatcttttaaaacagtttcaatgggactaa

SEQ ID NO: 62708 - DNA, 1851 bp, Acinetobacter baumannii; identical to SEQ ID NO: 48486

SEQ ID NO: 62709 - DNA, 180 bp, Acinetobacter baumannii
atgctagccaaacaagctatcgaccgctttatgtctgctatgttaggcaatatgccaaattacgaggaagcaacacgcgccttatatcaaggtgatcgagatatatttttaaagatgattcagagctatcccaaagatgtaagggaatatttaactttaaaaactcaaaatattttctaa

SEQ ID NO: 62710 - DNA, 969 bp, Acinetobacter baumannii
ttgattgcaggtttaccgtcatcaaaagaccatcagtctggtcgtcttgtcattggtccagaccaaaaaatctactatacgattggtgaccaaggccgtaatcagttagcttatctgttcttaccaaatcaggcacagcatactccgactcagcaagagctcaatagtaaagactaccatacatatatgggtaaagtattacgcttaaatctggacggaagtattcctaaagacaacccaagctttaacggggtagtgagtcatatctacactttagggcatcgtaatccacaaggtttagcttttgctccaaatggaaagcttttacaatctgagcaagggccaaattctgatgatgaaattaaccttgtattaaaaggtggtaactatggctggccaaatgtagctggttataaagatgacagtggttatgcctatgcaaactattcggcagcaaccaataaatcacaaattaaagatttagctcaaaacgggataaaagtagcaacaggtgttcctgtgactaaagagtctgaatggactggtaaaaactttgtgccgcctttgaaaactttatatacggtacaagatacctataactataatgaccctacttgtggtgagatggcatatatttgctggccaacggttgctccgtcatcggcatatgtatatacgggaggcaaaaaagcgattccagggtgggaaaatacattattggtcccatctttaaaacgtggggtgattttccgtattaaattggatccgacatatagcacgactttggatgatgctatcccaatgtttaaaagcaataaccgttatcgtgatgtcatcgctagtccagaaggtaataccttatatgtgctgactgatacagcggggaatgtgcaaaaagatgatggttcagtcactcataatttagagaatcccggttctctcattaaatttacatataacggtaagtaa

SEQ ID NO: 62711 - DNA, 444 bp, Acinetobacter baumannii
atggattttattgagaaagataatggagcagaaattcctctaggtttctttactacttcagagtatgaagatattagtgctgtaatttataacccttatgcaacttgggggaaagttcgagcattagctgaagtaactgaagcaaataaaactactttctttaacgcactttacactagggatgacgtaagtgagagtacattaattcctgatatccacaaaggaattcctaaagaagaatatacagaatcaatctttgatggtttatatatttttcataatcctcatgctaaatatccattccctgattttttatttaatgatcctcatattgctcattttagtgtagatgatcatggtaatcttcttgaaagtgttggagaaaaatttttactctcacgaagtttaattagttcatatgcaagttcaatgattcccgaataa

SEQ ID NO: 62712 - DNA, 552 bp, Acinetobacter baumannii
ttgataatattttctgcaattgtatccgcaataattgcatattttgatgaggttcaagagctatctattggaggcaatatcgttaaactaaaagaagcaaaaaaggagttacaagtaacaatagatcaattaaagtcaattaaagtttcaacatatcggatgttacttttgaaaagtttacatttttcaggtgtttttggaagcagccatttagtggatagtagagcagaatattttttttcactcatcaatgaaattaaacaatcggattgtttcaatgatcttaagtctgaaataaaagttcaattaacaaggttgttaattgatcaattaaataaattttatcctttattttatggcaaacaattcaatgatagcgatgaattccctaaatctacggttttttatatcgagttgaaagatgagattattgataaagttcatcaaaaacggacacctgttataccatttgatcaaaaaaagcaggaaattgttacagctatagataactatgcagctttgtatattttatttaaagaagttgaacagtag

SEQ ID NO: 62713 - DNA, 981 bp, Acinetobacter baumannii
atgacattatttatgtattgttttctttgtttaatagctttaggttttacttttgtgcaaaaaaaacattttctaaattatgtttttattttctcctgtttgatggggtggtctattgttgtgcggtttaactcaattcaacaagatttgatagtttattcggaggtaatgacttatgattgggaattttttaaaagcttttatgtattaagagagccagtttattggattacaagtaaatttctttatgatttttttaaagatcctatttttgtatttattatatgggatgctataatttttagcttacttacctatgttgcttataaaaaagatgtaaaaccatattttattttggtttttatattgttctttcctaatgttatgggttttttaaacgtttataggcaatatatatcaacagtatttcttttcttgtcttttttgcttgtttatgagaatcatataaactccaagtttttttatttagcttctttttttagtcataatgtgggagctatattcttgcctttgattttcataaggaagaaattttttcaaattaaatttattttagcttctattacttctatatttgctatgattctcttatcgggctcaaaatctgaagtagataccggagaaacatctccattgcttttttttgctgttgtgtgcgctggaatgctgttttttttatcattgaataaattaatattatataaaaaaaatatagatttatattatataaatatgtactgcatatttgtatctcttttttctgttttatttttatctaatgctccagcaaaaagaatttgtatgattgctttaatttttttattatattcaatttattggtttattgaagataataaaaagaatattcttgtttttagatttgctttggtatttgttgctatagtcccaacgtttatattcccatcagtttttaatatgcttttatatgtaggtctttaa

SEQ ID NO: 62714 - DNA, 612 bp, Acinetobacter baumannii; identical to SEQ ID NO: 62580

SEQ ID NO: 62715 - DNA, 1110 bp, Acinetobacter baumannii
atgaaatctcgtgcagctgtcgcctttgccccaggaaaacctttagaaattgttgaagttgatgttgcaccacccaaggctggtgaggttttaataaaaattacccatacaggggtatgccataccgatgcttttacattatctggcgatgacccagaaggtgttttcccagcgattttaggtcatgaaggtgcaggtgttgtagttgaagtaggcgagggcgtaacaagtgttcaacctggcgaccacgtgattccactttatacagctgaatgtaaagaatgcttattctgtaaatccggaaaaactaacttgtgtgttgcggtacgtgcgacgcaaggtaaaggtgtaatgccggatggaactacacgtttttcatataacggcgaaccgatttaccattacatgggttgttcaacctttagtgaatatacagtagttgcggaagtctctttagctaaaatcaatcctgaagcgaatcacgaacaagtttgtttacttggatgtggtgtaacgaccggtattggcgccgtgcataacacagctaaagtacaagaaggtgattcggttgctgtatttggtttaggcggtattggtttagctgttgtacaaggtgcacgtcaagcgaaagcagggcgcattattgtcgtagatactaatccagataaatttgaacttgctaagcagtttggtgctacagatttcttaaatccaaaagattatgatcaacctattcagcaagtgattgtagaaatgacaggttggggcgtagatcattcatttgaatgtatcggtaacgtcaatgttatgcgctcggctctagagtgtgcacatcgtggttggggacaatccgttattattggcgttgctggtgcagggcaagaaatttcgactcgtccattccagttagttacaggccgtaaatggttaggcactgcttttggtggagtaaaaggccgttcacaacttcctaaaatggtcgaagatgccatgaaaggcgatattcaacttgaaccttttgtgactcatactatgcctctacaagacattaataccgcttttgatttaatgcatgaaggtaaatcaattcgtactgtcattcatttctaa

SEQ ID NO: 62716 - DNA, 612 bp, Acinetobacter baumannii
atgccaaagaagaaagaattcgagcatggcggtgcacgggaaaacgccggccgtaaagcacagttcaatgaacccaccaaagtgattcgtgttcctgaatctcaagtcaactttatcaaaaattggttactgaataatgtcaaaaccaataaccagacagatttcacttcaaaactaaagatacagcaggttcatccgaacaacgataaaatttaccacattcctttggcgacagaacgtgttgctgcgggtttcccatcaccagcgcaagacgatattgagcaagcactcgatttaaatgaatatttaattagaaatgaaaatgccacctttattgtcaaagccaattcgttgtctatgttagatgccggaattgatattgatgatccgcttattgtggaccgtagtattcccgctaaatcgggcgatatagtgattgcacttatcgacaatgatttcactgttaagcgcttaatgattgatacccaatttcacccccctaaagtgtggctgaaagcagaaaaccctgattatcaaaatatttatattgaagaggggcaagaactggtgatttggggagtcgtgacctataacctcaaacgaatgagataa

SEQ ID NO: 62717 - DNA, 1617 bp, Acinetobacter baumannii
atgagtgtatctgaacatccaaatctggacactgtgcaaggtgcagattcacaaaaagcagtgaatgaaaccttagaagattatactttacgttatgctccacacagctttcggcgctggagtcccaaagttgttgctattactgcacttggtggtattgcctatcttgctgacttttctattggtgccagtattggtatgtcttatggaacaaccaatgctgttttctccattttatttgcagcgattattatcttcttaaccggcatccctttagcctactacgcagctcgctataacatcgaccttgacttgattacccgcggtgcaggtttcggttatatcggttcggtcctgaccagtatcattttcgccagtttcacctttattttctttgcccttgaaggttcaatcatggcgcaaggattattgctcggtttaggcattccgctttgggctggctacctcatctcaaccgttatggttattccgctggtgatttacggcatgaaagctttaagtaaattacaagtctggactaccccactttggctcgttctgatgattggtccggtggcttatctgatttaccaagaacctaccttagttagccagtttgcaacgtttacaggtcatgaaggttttgcacctgtagatatggcagcgattatgcttggtgcaggtatatgcttatccctcatcatgcaaatcggtgagcaaattgactacctacgcttcatgcctgcaaaaacaaaagaaaatagcaaagcatggtgggcagcggttatttcagcgggtccgggctgggtaattttaggagcgatcaaacaaattattggggcgtttttaggtttctatttactcactaaaataccgggcgtaaacagcactgaacctgttcaacagtttaatgcggcgtttcatgacatgcttccgggctgggcggctttaacacttgcggttattttggtggttatttctcaaattaaaattaatgtgaccaatgcttactctggttccctcgcatggacaagtgcctacactcgtattagcaaacattatccggggcgtattgtctttgtgatcgtaaacttggcaattgcgcttgctttgatggaaggcaacatgtttgcggtactgggtaaaatcttaggattctattcaaactttgcaattgcatgggttgtggttgtcgcaacagacatttcaatcaacaaatatgttttaaaactttcaccaaaagaaccggaataccgccgtgacatgctctacaacgtaaaccctgtcggtatggttgctttccttgtatcagcaggtttatcgattgcagcattcttcggattattgggtagtttcctagcgccttactctccaattattgcacttgtacttgcctttgtattaacaccaatcatgggcctattaaccaaagggaaatactacatcaagtcacacgatgacggcgttaaagaaccacgttacgatgctgaaggtactcctgtagcaactgtttatcactgccgcgtatgtgagcaaggctatgagcgtccagatattatgttctctcacaaacataacggtacaatttgttctttgtgtaaaacactcgatgcttag

SEQ ID NO: 62718 - DNA, 285 bp, Acinetobacter baumannii
gtgaatattcaacaaaaagatgatacaaaacacggcagctttagcttacttgatggtgaaaccgttgcaggtgaaatgacttatacatgggcaggcgaaagcatgctaattattgatgccacagatgtaaacgaaaattatcgtggacaaggcgtaggtcgccaattacttgatgctttggttgcctttgttcgtgaaaaagacgtaaaagtaattccactttgcccatatgcaaaatcggtttttgataaagacccaagcattggtgatgtacttagaaaataa

SEQ ID NO: 62719 - DNA, 732 bp, Acinetobacter baumannii; identical to SEQ ID NO: 61660

SEQ ID NO: 62720 - DNA, 867 bp, Acinetobacter baumannii
atgacaacattaacatttcaaaacgtgaagcatattttagctgcgtctttactgagtttaggtttggttgcatgtgacaaaggaactcagtctactgaaaaaacggccgataccacacaaactgtatcgagtattgaacagattaaaaagaatggcgtggtacgaattggcgtatttagtgataaaccgccgtttggatatttggatgctcaaggtaaaaatcaaggttttgatgtagagattgctaagcatgtcgctaaagatttgctgggcgatgaaaacaaagttgagtttgttttaactgaagcggctaaccgtgtcgaatatttaaaagccaataaagtagatattatttttgccaactttactgttacgccagaacgtaaggaagttgtcgattttgctaagccttacctaaaagtggcactcggtgtggtttctcctaaaagccatccaattaccgatgtagctcaacttaaagataaaaccttgctagtaaacaaaggtacaacggctgattcattcttcaccaagacgcatcctgaaattaaactacaaaagtatgaacaaaacactgaaacttttgatgctttaaaagatggacgtggtgctgcgcttgcccatgataacttgctggttttagcgtgggctaaagaaaatccaaattacaccgttggcattaccaatttaggtgagcaggacttaattgcaccagcagttaaaaagggtgataaagagttattagactggttgaaccaagatttagagaaactggcaaaagaaggcgtgattcatcaggcttatgaaaaaaccttaaaaccagtctatggcgatacgattaatccaaaagatttattggttgagtaa

SEQ ID NO: 62721 - DNA, 834 bp, Acinetobacter baumannii; identical to SEQ ID NO: 46183

SEQ ID NO: 62722 - DNA, 576 bp, Acinetobacter baumannii; identical to SEQ ID NO: 53551

SEQ ID NO: 62723 - DNA, 171 bp, Acinetobacter baumannii; identical to SEQ ID NO: 51532

SEQ ID NO: 62724 - DNA, 333 bp, Acinetobacter baumannii
gtgggctcggagatgtgtataagagacagattacatattgataaccctgaagatgagcgatctaaaaatatatttaaattaatagattttaaacttaaacagtcagagaggttaatacaacctatatcagaaaaagaaaaagagcttgaagaaaagcatgaagaaattgccgaaaatattaaaaaatttacaaatgaacttaatgaaggagttactgaagtaatttatttattaaggaaggaaataggggctaagacggatattcatcttgataaaaaattatcaataaattatcagtctcaacttccaaaaaaagaagatgagttgaagtaa

SEQ ID NO: 62725 - DNA, 720 bp, Acinetobacter baumannii
atgacattaaaggaacttgaatactatatcgtttattggattactaaagtttatcatcagaagaagcattcagctttaggaacatcacctattgttaaatgggaagaaggtgtttggggaacgaagacgacagcaggaacaggtttgaaagaacgtgtatcagatgaagataccttgtttattgattttctacctgaatttgaagcgactattcagcgtacaggggtgcaaaaagataacttattctattttgccgactgtttaagacaatgggttaattctattgatccagaggacaataatcgaaagcgcaaaagaaaattcttatttaagcgtgatccgagggatatttcacagatttggttttatgagccatattctaatacctattttaaagtacctaccgcaaagcgagagataccaccgattagcttatttgaatataagcaggttcagaactatctcaaaagtgaacgtcaggatgttcagaatcaggatgagatttacaaggcgattttgcatctacgtgatcaacttaatcaggctagaagcttgactcgaaagcaacgtcgctcaaaccaaagaaaaaaggaaaatgcaaaagccattactcagctttccgaacagaatcagtctaaaaaggctgtagtttctgaaagtcttcagacaagtgatgatttgtggagtactcctttaactgcatttgacgatttaaggtga

SEQ ID NO: 62726 - DNA, 699 bp, Acinetobacter baumannii; identical to SEQ ID NO: 46122

SEQ ID NO: 62727 - DNA, 993 bp, Acinetobacter baumannii
atgaatgcacaggtgagtgttaccgatctatttagcagagaagaaatacaagagcttacagaaccttcagatgcatatggcgcttgggccgttgctagcacatgggctgttattggaggaacatttgccagcttaattatgatgtgggattacttaccgagttgggggaaattattagcatgtatgcttgctctagctgttttagctggccgtcagttatgcctcgcaattttaatgcacgatgcatcccataaaagtttattcaaaaataagaaaataaatgatttcgttggggagtggctatgtgcccgcccaatctggaacgacctacaaaaatatcgtgtacaccatgttcgacatcacgcaaaaacatctacaccggatgatccagatctttctttagttgcaggctttcctgtcagtaaacaatctcttactcgtaaattcttacgcgacttaaccggtataacaggattaaagtttagcttaggccgtgtgttgatggaccttgatgtcatgaaatggactgtagccaatgatcaaatctggttagaccgcagtgataaaaatttcgttgactatgcaaagagtattgcaaaaaacagtacaggcgctattgcaaccaacctattactttatggtgttttaaaagcatgtggtcaacaacgtttttattggttatggcctttggcttatttgactccatttccattatttttaagaattcgttcaatggcagaacatgcaggtatgcaaaccagcaatactgctttaactaacactcgtaccacacgtgcaggttggattgcgagaagctttgtggcccctattcatgtcaattaccacatggaacaccatttaatggcgtctgttccatattttaaattaccgcgtatgcacaaaatattaagagaacgtgggcatgtgcccactccaccgagctattttgaagtaattcatatactttcatcaaaacaagagttaacaaattaa

SEQ ID NO: 62728 - DNA, 801 bp, Acinetobacter baumannii; identical to SEQ ID NO: 46123

SEQ ID NO: 62729 - DNA, 813 bp, Acinetobacter baumannii
atgaaaaccgccactgcgccgttaccaccgctgcgttcggtcaaggttctggaccagttgcgtgagcgcatacgctacttgcattacagcttaccaaccgaacaggcttatgtcaactgggttcgtgccttcatccgtttccacggtgtgcgtcacccggcaaccttgggcagcagcgaagtcgaggcatttctgtcctggctggcgaacgagcgcaaggtttcggtctccacgcatcgtcaggcattggcggccttgctgttcttctacggcaaggtgctgtgcacggatctgccctggcttcaggagatcggaagacctcggccgtcgcggcgcttgccggtggtgctgaccccggatgaagtggttcgcatcctcggttttctggaaggcgagcatcgtttgttcgcccagcttctgtatggaacgggcatgcggatcagtgagggtttgcaactgcgggtcaaggatctggatttcgatcacggcacgatcatcgtgcgggagggcaagggctccaaggatcgggccttgatgttacccgagagcttggcacccagcctgcgcgagcagctgtcgcgtgcacgggcatggtggctgaaggaccaggccgagggccgcagcggcgttgcgcttcccgacgcccttgagcggaagtatccgcgcgccgggcattcctggccgtggttctgggtttttgcgcagcacacgcattcgaccgatccacggagcggtgtcgtgcgtcgccatcacatgtatgaccagacctttcagcgcgccttcaaacgtgccgtagggcactgttgcaaatag

SEQ ID NO: 62730 - DNA, 864 bp, Acinetobacter baumannii; identical to SEQ ID NO: 53541

SEQ ID NO: 62731 - DNA, 1014 bp, Acinetobacter baumannii
ttgtcaaaaaaacgtaagttgatcgaactaaatattgatgctgaatggcaggtcgaaggtattatggactcggtgcatacagataatggacccgattttagaaccaatcacatcagtaaagcttgcctaaaatatgggattcattgggaatatagaccaattggtggggcgagatttggcggtcatattgaacgtatgcttggtattgtcaatcttgaaatgcatgtgctggatggtacaactttttcaaatgtgcagcagcgaggaacttatgattccgctaaacaagcctgtatgacattaaaggaacttgaatactatatcgtttattggattactaaagtttatcatcagaagaagcattcagctttaggaacatcacctattgttaaatgggaagaaggtgtttggggaacgaagacgacagcaggaacaggtttgaaagaacgtgtatcagatgaagataccttgtttattgattttctacctgaatttgaagcgaccattcagcgtacaggggtgcagaaagataacttattctattttgcagactgtttaaggcaatgggttaattctattgatccagacgacaataatcgaaagcgcaaaagaaaattcttatttaagcgtgatccgagggatatttcacagatttggttttatgagccattttctaatacctattttaaagtacccactgcaaagcgagagataccaccgattagcttatttgaatatagacaggtacagaactatctcaagaatgggcgtcaggatgttcagaatcaggatgagatttacaaggcgattttacatctacgtgagcagcttaatcaggctcgaagcttgactcgaaagcaacgtcgctcaaaccaaagaaaaaaggaaaatgaaaaagccattactcagctatccgaacagaatcagtctaaaaaggctgtagtttctgaaagccttcagacaagtgatgatttgtggagtactcctttaactgcatttgatgatttaaggtga

SEQ ID NO: 62732 - DNA, 171 bp, Acinetobacter baumannii; identical to SEQ ID NO: 51532

SEQ ID NO: 62733 - DNA, 171 bp, Acinetobacter baumannii
atggaaaaatatgaacatcttgcagagcatgtacttgaaatcatgcaattaagcgatagtgaacggattgagacattattcactgatcggtggattggctataagaaagcccactctattgtaaacaagacatttttatcttttatattcaatggcttattttcctgctaa

SEQ ID NO: 62734 - DNA, 162 bp, Acinetobacter baumannii; identical to SEQ ID NO: 46255

SEQ ID NO: 62735 - DNA, 612 bp, Acinetobacter baumannii; identical to SEQ ID NO: 62580

SEQ ID NO: 62736 - DNA, 171 bp, Acinetobacter baumannii; identical to SEQ ID NO: 51532

SEQ ID NO: 62737 - DNA, 162 bp, Acinetobacter baumannii; identical to SEQ ID NO: 46251

SEQ ID NO: 62738 - DNA, 2895 bp, Acinetobacter baumannii; identical to SEQ ID NO: 45648

SEQ ID NO: 62739 - DNA, 1113 bp, Acinetobacter baumannii; identical to SEQ ID NO: 46111

SEQ ID NO: 62740 - DNA, 504 bp, Acinetobacter baumannii
atggctaaacgctacttgccgttttacaacaacgctaaatttattgcattagtgttagtagctctatttgtcattttttcagttacttttaaatttcttgcccttgatgtaaatatcaacttggttcaattttcctttgttttgttattaccgttaagtcaaatttatctagcctacaaaggtatgctcgatgcattgaagcttgatggtttaaatcaatcagagcgggatcgcctcacgtctactgtggatataaggagcaaatcatcactatatgttgccattttatttatagtgattgtttttggaatgtatgttttcaatgaattgaatttactatcaaatcagcatcttttagcattagtcttatctgtaggcttaacctcaatattaagtttctttttggcatggagtgatttaaaagaaatatctatgcttgagaaaacccttaaggctcgtaaagaggcgagagaggccagaagcaaagtaatgagcaataaataa

SEQ ID NO: 62741 - DNA, 951 bp, Acinetobacter baumannii; identical to SEQ ID NO: 62473

SEQ ID NO: 62742 - DNA, 951 bp, Acinetobacter baumannii; identical to SEQ ID NO: 62473

SEQ ID NO: 62743 - DNA, 171 bp, Acinetobacter baumannii
atgcttaatatgactttagcatataaaaataagctatctcacacagaatatgatttattctttaaagcgaataatttacttgatcagaaagtctatgcccatgaaacatttttgccatatattccccaaattggaagaaattttagtttaggcttaaatcttaatttctag

SEQ ID NO: 62744 - DNA, 840 bp, Acinetobacter baumannii; identical to SEQ ID NO: 45719

SEQ ID NO: 62745 - DNA, 4296 bp, Acinetobacter baumannii
gtgaaagcacttagaaatgtccaagatgaagttgatgctctttttgctaaaactgacattacaattggtcaatcattaactctacttaataatgaaattactaaatttgtaggagaggctggtaaaggaagcggagcagcacaggctttatcaggatcgattcagttattagcaaataatttgaatttaattgcagacagtgcatttgccataggtattggcttaatgacaaaagccgttttaacaaaaacggttgctgtacaagcgagtattgctgcgtcaaccaaacaagtgtttgccacaattgctgaacgtaatgcaaatattgcagcagcaaaagctgaggtggaatctgcgcttgccgaagcacaaagtacgcaggtgacactaacgaacatcaaagctactcatgctcagatcatggcagaaatagaactcgaaaaagttcgtttaaaagcccaaatcactgaacaaggtcgcacggctaccatcacacgaatggctcagctaggacgattacaagctcaagttgcgttagaggttgctgccgcagaaacagctcaatcagcatcatctgcaagattatcagcagccttaacagcgcaatctgttgctacaagtcgtttagctttggcaaagtcagcgcttatggcgatttttagcccaatgggtttagcaattgcagcaacagccgcatctttctatttactaagcagcagttcggatgaagtcaaagagtcccttgcaacacaatctgactcggttagtgatttaacagataagtacataaagttaaatactgtgcaagcattaacagagggtgtgcggttacgcaaagagattgagcagcaaaatgatgcaattgatgatgctagtggagctatcaaacgttttgcttatatccaaaaggaattatttaaattatctggcagtgattatgaagattatcaaaatgccattaagtctattgctacaggtgcaagcgatgcaggtgatctcttaaaaaagatgatttcttctggtcgttttagtcagactcaaattgataaacttattgagttctctagtgcagtagcagaatcaaaaaataagattgagcagggtaatactgctctaaaactcttaaatgctacttctggacaacatgttgatgtaacggccgaatcaattaagcaattaacaattcaaacaaacttaacaaaagtcgctactcaaaatttcactgacatgaaaacacaaatgcttgattcattacgagcacaagtggaattcattcggttaaatggtggtagcgaagaacaagttaaatcgttgaataaggtaatccaggcatattctttaaatcaaatttcagcaactgatgctgtgagtaagttcaacagtaccgccaaagttccggttgataacattaagaaattgcaagaatatgccattaaaacggatcagtctaaaattgcgttaaatcaggctaatgctgagctgaagaaacaaaacgacttgcgtaatgagtacctaaaacaacatcaaactgtacttggtgctcaacaaggagaaacaaatgaattaaataaccaagtcgctgcacaagaaaagctaaataaattacgagacaatgccaacaaagataatctgaaaaatgattttcttataaaaaacactaaggcatttggtggtggcgaaaagggtcttgataaggcgcgtgcggcatcagagttttataccgacaataaaattccgatgactagaagtttaactggtcaggaatatgcaatttttgaggcttggtataagaagcagaaggaagtcaaggacttacaagaaagcatttctgagtctaccagaaagcaaacaaaagaggttgaaaaacaaaccaaagagtctgccaaacaagctgttctacttgcggggaataatgagcgagtgagaaatatgcttcgggtttaccaatccttccgtaatgcaggcttaggcgataaacaagctcgtgtaatgacagctcaagttggacgagagactgattttagaaatgaggcaatgtttggtagtcacaaagatgccaataatggttataccaacacaggatttttatcatggcaaaaaagtcgctcaactaaattaatgcagtctttacaagggcaaggagtcttggataaaaacggtaaaatccagcaaactcaagatgcattggatgcaatggctaaacatgctgtgcaagaggcgatgaccgataaaagttatagtaaatctaaagcagctcttcttaatgacgatttagactatcgaagtttagagagaattgttgccaaaaattttgttggctgggactatgacgggaaaaagcttggcaaagctaaagcttcacagcatttagccaaacaagactcttactataatcagcttagtaaaattttaggagataaccccgaagcagcctcaaaagcaatcggcgatctttcgaagttcgaagatgaagcatataaggcacgtgctaaaactcttgaggaagttaagcagctacaggcaacatatgattcagaaacagttgctagaagcaaaaaacgtgaggaggaaatcaacaaagcaaccattttaggtcaatcaaatttaatcccaaaaattaatgagcgttatgatgctgaagacaagttagctcagaagcaatttgattttgaagtaaatggttataagtggactgaagaacaaaagcttgattacacatatgaaactaattctttgcgattagttgctgaaggcaaactctctgaagatcaaagaaaggttgctttagatggcctgaaattgcaaaagcagcaagagttaggattactaaaacttgctcaagagcaacgtttgtttcaagctaaattattcttgctttcagaaactgaggcaatgcaagaacgctaccgattggagcgagaagaaattgccaaaacggtaaaagatgaggaggaaaaacgtaagcgactggcattatcacgtgatcaagaacgattagaagcacttgatcgtgcagcaaaagctggtcaagcatggggtggtattcaagctgatatgaatggcagtggtgagttctatagactagatcaagaacgatctagccgcctaagtgccgcgacaaatctacttgatagtcagcaaggtgtggttaatttaaatgaacaaaattctattgaggctttaaacgcacaatttgagcaacagcttataagtcagcaggattacgaaaatcagaaaacagctatcattcaagctgctaaagatcaacgtaatcagattgctgccgaatatgcaaagaatgctcaggatattgaagataagtatcagcaagaccgcttgaacactcaaattgcatttggtggccaaatgatgggttctcttacatctatgtttggttcaatgtttggagagcaatctaaagcttacaaaatcatgttcgctgcagataaagcttatgcgattgcagctgcgggtattgcgattcagcaaaatattgcagcagcttcaaaagctggttttcctcgtaacattccattaattgctggagctgttgcacagggtgcaagcatcattgcaaacatccgggcaatcaaagatcaaggttttgcggaaggtggttatacaggtcgaggtgggaaatatcagcctgctggtattgtccataaaggagaggtggtctggtcccaagaagatattaaacgctgggggggagttggtttagttgagaaaatgcgtaagagtgcaaaccctgaagcttttctcaataacaatgcctcagctgatagtgtcatgcgccgtgcattgatgagttctaatgcctttatagaaagccaaaagcaagctgacatctttaatcaaccggttcaagatactcagattatctataaaggtaatagagacacacctaagttggcgtcttcggcaaattctgacttattccatgatggcaaggtctacttctcatccagtggtttagttcaggatcgttcaaatctggatgatgttcaagacttcacgatgggtaaagctgctcgacctcaagctgagattatgccttcaattgagcctgcttcaccgacaatcaatttcaagattgaagtcgtgaatcaagtcagcggtgcaactgttgaagctgaacaactggatgagcaaacagtccggatcattgttacagatgaactggataagcagcttccaagaaaggtaccgaaacttgtaagtgaccaaatcgcaaatccaaactcaaccattagtcggtctttgactgagaatacgacagcaagacggaatcgttaa

SEQ ID NO: 62746 - DNA, 507 bp, Acinetobacter baumannii
atggataacgaatatgccgaattctttttcaatcgaaaagttgatatttatcaactggaatgtattgaactctcacacccttcttttatgaatacttaccgggtagtccgtaatgatgaccgaggggtgtatgttcagcacaatgaaggtgaagggcaggtgctttatgaatacctgcctatgacaattcaaagatccggaatgctgggcgatctagaccagactttaacagtctctatttcaggtcttggtgatattttgccggatgagtttgaacgggtaatagaaggtcaatttccggatgtaaaaccaacagttaattatcggctttatagttcagataatttaaatacaccgatgcattatctgcttggcttacaactcgccggtgtttcaatgaaccataaagctgtgacgttcaaagctgaatctccacgattaaataccgctaaaactggagatatctttgcactagaccgctttactggtctcaagggggctatatga

SEQ ID NO: 62747 - DNA, 546 bp, Acinetobacter baumannii
atgaacatcgaacaatatcttgatgagttgatcaaacgagaaggcgggtacgtaaataacccagcagaccgtggtggtgcaactaagtatggaattactgaagcagttgctcgagcaaatggattcaaaggtaatatgcgagatttacctctggatgtggccaaagcaatttaccgcaaaaactattggacagctccacgatttgaccaagtaaatactgttagttccatggtggcagaagagcttttggatacaggtgtaaattgtggtaccggttttgcaaaaccccttttacaacgagctttgaacttactaaacaaccaaggtaaagctggatatgcagatttagaggttgatggggtttatggatctgaaactcttagagctctaaaaacctatctggccaaacgcgggaaagaaggtgagaaagtactggtgcgagtgctcaatattatgcaagggcaacgctacattgaaatctgtgaacgcaataaaagccaagagcagtttttctatggttggattgctaatcgagtatcaatgtga

SEQ ID NO: 62748 - DNA, 399 bp, Acinetobacter baumannii
atggcaatgactttagagcagacaaggcaagctattatcgatcgtatgcaagcttttaccggtattacgcaagacagaatccagtatccaaatttaccaggctttaatgtacctaaagatggtgtttggtgctgcttaacgattgcaggtggtcccagttttacttctggcattgcagataagccatgtactcgccgtaccggtaatatcatgattcaatgctttgcacgtcccaattcaggaataattgaaatcacaaaattgagtgatgcattacttgcccattttgaatatttcacaatcgaacacttagaatgtttgaatggtcaatccatctatgcgggtaaagatgctgatttcattcagtataatgtgagcattgggtacaaggtgaattga

SEQ ID NO: 62749 - DNA, 1089 bp, Acinetobacter baumannii; identical to SEQ ID NO: 46100

SEQ ID NO: 62750 - DNA, 1578 bp, Acinetobacter baumannii; identical to SEQ ID NO: 46099

SEQ ID NO: 62751 - DNA, 621 bp, Acinetobacter baumannii; identical to SEQ ID NO: 51631

SEQ ID NO: 62752 - DNA, 255 bp, Acinetobacter baumannii; identical to SEQ ID NO: 44740

SEQ ID NO: 62753 - DNA, 435 bp, Acinetobacter baumannii
ttggcagaagatcgaactgatgtgtgggcaacgcctcaagatttttttgaaaaactggatcgagtatttaactttgatttagatgtttgtgctctaccagaaaacgccaaatgtgagcgctatttcacacctgaaattgatggactaaagcaagagtggactgggacatgctggatgaatccaccttacggcaaggaaatcatagattgggttgctaaggcagcggaaacagcaagtaaggggcatacggtagttgcactagttccagtacgtaccgatgctcgttggttccaagattactgccttgggcgtgaaattcactttattcgtggacgtttaaagtttggcggttctaaaacaaatgcaccttttggatgctgtgttgtggtgttcagaccaagcctcatagacgtcaattgggagaaatctgcatga

SEQ ID NO: 62754 - DNA, 123 bp, Acinetobacter baumannii
atgcgatttaaaaaaatttcttgtctacttttatccccgctttttatttttagtacctcaatttatgcgggcaatacaccaaaagaccaagaaattaaaaaaactggtagatcaaaactttaa

SEQ ID NO: 62755 - DNA, 537 bp, Acinetobacter baumannii
atgaaaaaatttatttttattgcggctagttctctttttaatattgcagcagcacaagcagctgatggtacgatcactattaatggtttagtaactgataatacgtgtacgattgatactggtgataaaaatctcactgtaaatttaccaacagtatcatctcaatctttgaaaaatgcgggcgatgttgctggtcgtacaccttttcaaatcaatttaacgaattgtgcttcagttggtaaagtcgcgacttattttgaaccaggcgcaacagttgattttaatactggtcgactattgaaccaagctacctctggtgcagctgccaatgtcaacatccaattattgggtagcaacaatgcagtaattcctgtaattgcgaaaggcgcttctggtgcacaagataactcacaatgggtaaatgtttctgctggggggaatgccgatcttaattattatgctgaatattatgcaactggagcatctacagcgggtactgtaacgtcacaagtgaaatacacaattatttatcaataa

SEQ ID NO: 62756 - DNA, 966 bp, Acinetobacter baumannii
atgaatgcaaaagatttaaagagacacctacagtctattattgaatctaaactatcacctttaattgatagtaattatgtttattgggatttaccttaccatataaatattggcgatacattaatttggcaaggaactttggattttttatcagataaaccatataaaatgatggattatggaaattcagctacggcttctctaacccctcttgattctaatgtagttattttattacatggtggagggaattttggtgatatttatggctcaagtcagaaatttagaaaagatgtcataaagttatatcctgataataagatcattattttaccgcaaactatttattttaaagataaggacgttgagaaagaagattttcaatattttgctcaacataaaaatttatatttatgtgtccgtgatcagttctcttataatttggcttgtcaatatttagataaaggtaaggttctatttttacctgatatggctttttgtattaaggatgaaaggtttattaaatctcaatctacaggtaaaaagttattgatgagtcgtatagacgtagaagctgtccctttagataaaaaatatagagatcaagtaaatttacagtcagattggccgacttttgaaaagactccaatatattgtaattatttgaaatttttattcgctataaatcgaaaattatcaaaagggcagcgaaataaacagcatccttttcttattaaatatattaataattttgcaatgaatacagttcgtactcaattgattgatacgggtatccgatttattaatgattttgacgtgatttatacaacacggttgcatggctgtattttgtctttactattagataagaaaatcattttacttgataattcttatggtaagaatcgagcatattatgaagcttggttaacggatagtactaatattgaggtggaatcatgttag

SEQ ID NO: 62757 - DNA, 432 bp, Acinetobacter baumannii
atgagaaataatcaagagttagatgacttgatagaccaactatatgatttggaactagagcaagcatattttgtatacataaaattttgctataaaataatacctttattaagtaatattaattcagaatatattatagagtctattcaaaaagctaagtcattctggtttgatagcaaaagtaatattgatgaaaaagagataattaatagaagagtaaaaataattaaatatatggaggagaaagatattgactttaatattaatagtgagcctgaattaaagttttctattatacctttatggaccaaaccaccttctgaggatataggtgatagtttagattgggcttttacattacttaaagtaattaatataccagatgatattgttaaaactaaactatatgaagctttaaatgatataccttag

SEQ ID NO: 62758 - DNA, 747 bp, Acinetobacter baumannii; identical to SEQ ID NO: 49089

SEQ ID NO: 62759 - DNA, 660 bp, Acinetobacter baumannii
  misc_feature (648)..(657): n is a, c, g, or t
atgaaattctttttgatttttttaattactttactatatcctatatcaggttatagctttgaaatttaccaatatattttttggaaagattatattgatcaacatggtaagcatcattctaatagtaataatttccaagtttttttaaaagaaaatcatttaaaacctattgaggttatttatcaatatagatttctaaaaaataataagcctgataaagagaaaattaaaaaaatagttgcaatatcaaaattaaatccaactattcctatttcttttgacattgaggtaggtaataagttcaaaccagaaactgttttacctgtagttaatgaaacactagatctttaccatcaatatgggggggctgctcctgttgggatctttggagtattgccacaaaatctttttggttcagaggacctgaatccaaaaacaaaacagttatataaagaattaaataaacaatacgaaggagttgctcaaaaagttaactttcttagtcctgtagtttataatttgtggttcagagattataatgagtgggtacaaagaacagactttcatattgaagaagcaaaaaaatatgcaaaaaaatacaacctaaaagtgattccctacttttctagttcatatctcgatagagannnnnnnnnntag

SEQ ID NO: 62760 - DNA, 870 bp, Acinetobacter baumannii; identical to SEQ ID NO: 49028

SEQ ID NO: 62761 - DNA, 255 bp, Acinetobacter baumannii
ttgacttcttcaagcgcaccagttgaagccttgtcctctaaagcagcattgatttcattaatagataatgcattagcactagaagcatcagcagcagcttgcgctttactgatagcagttgcagcattggtttttgcagttgcagcatcactactagcggtattggctgtattaatagcaccatctgcttttgaacttgccgattgtgctgttgctgttgcttcccgtgccattgatgaagctgaacctgcttga

SEQ ID NO: 62762 - DNA, 225 bp, Acinetobacter baumannii
ttggcaccattggaagtcgtagaatattcaatttccgtatatgcagtatctaatgcgccagttgcaggaaattcccattccactttcattccgaacattgtgccaactgcacggataaaagctaattttggtggtaacccctgcttaccagtcaatgcagtcaaaactgagtatgccggtaaagaagaaatttcaaatgctgaaattgctgttacacgcgcctga

SEQ ID NO: 62763 - DNA, 318 bp, Acinetobacter baumannii
atgtttgatatataccctgataatttaaaaacttgggtgtttggtgatgttttttatcgtacagaagatggtgggtattataagaatacagatgttggatattttaggattatttttagtggagggataattggcttaatttattatatgtttgtttctttttttatgattttgaaatctagatttatccaacaatcaaaagttctaatgtttttgcttattttactatttttagttttaaattttaagggagttgctaatatttattattttttggcaatattattattcttgaaaactggtggtagatctaaatga

SEQ ID NO: 62764 - DNA, 597 bp, Acinetobacter baumannii
atggctgaagatcaaggcgaaatcttagcttacgtgcattcccatccagatggaacaacaagagcatcggaactcgatctgattcagattgaactacataaaaagccatgggtaatttgttcatatccggatctggattttcaaatatatgagccttgcggttatcgcgcccctttagtggggcgtaattattttcatggctggcaagattgctatgcgcttgtacgtgatttttatagtcgtgaattaggtatagagcttatggattttaagcgggatgatgcatggtgggaagataaagaccatccatcactttaccttgaaaattacgaaaaagcaggtttctttgaagtagataaaccaaaatatggcgatatgcttgtttgtcgtgttggacgtactgaacatccaaatcatgcggttgtctggctcggagataacggaaaattgaaatcagaagaaagtgaaaactgcattggttcagcgttaattcttcatcatccatataaccgcaaatctgttcgggaaatatatggtcaacaatggcttgaacgtactgtaaaaatcttgaggcatagagatgttaaaaacaattaa

SEQ ID NO: 62765 - DNA, 597 bp, Acinetobacter baumannii
atggctgaagatcaaggcgaaatcttagcttatgtgcattcccatccagatggaacaacaagagcatcggaattagatttaattcaaattgaactgcataaaaaaccatgggtgatttgctcatatccagatctggattttcaagtctacgaaccttgcggttatcgcgcccctttagtggggcgtaattattttcatggctggcaagattgctatgcacttatacgtgatttttatagccgtgagttaggtgtggagctgttggattttcagagaaaagatgcttggtgggaggataaatcccatccatcactttatcttgaaaactatgaaaaagcaggcttctatgaagtagatacaccacaatatggcgatatgcttgtttgtcgtgttggtcgcactgaacatccaaatcatgcggttgtttggctgggtaataatggtcagcttaaatctgaacagacagaacaatgcataggttcaagtttaattctgcatcatccgtataacagaaagtcagtacgcgaaatttatggtcaacagtggcgtgaacgtactgtaaaaatcttgaggcatagagatgttaaaaacaattaa

SEQ ID NO: 62766 - DNA, 186 bp, Acinetobacter baumannii
atgatgggaaattaccgtggtgaggaatgtggatataccggagcgtcaatgttcaccgataaagatgagcctaccaatgatccagctttagatcgatgtagtgggagtttgcgttcatgccgtttgcgttttggagaaaacaagccattaccttttggcgggttccctgcatcaagtttattgtga

SEQ ID NO: 62767 - DNA, 264 bp, Acinetobacter baumannii
atgctaagagacaatgcaggtaccaactatcatccgtgctgtacatgccgtatggggcacgatgaaatgagtgtggttgatgagtttggccgtgttcacaccttagacaatgtgcggattgtggatgcatcgatcatgcctgagatcccgagtggtaatttgaatgcaccgatcattatgatggccgaaaaaatggccgatattgttaaaggagttaagcctttgacactgaatcaacctgtagattattacaaaccgaattga

SEQ ID NO: 62768 - DNA, 1296 bp, Acinetobacter baumannii
atggatactaaaaagaaaggcgatatttttgaaaattttgtttttgactacttttcagctctaatccaaaaagggtatatggggcttaatccaagtcacactaaaatttacaagcaaaagaaatattattcaaaggatcgagaggactacattatctttgatgtagctattgaagttttcttatttgatcaaaaggaaccatatttagtaatcctaattgaatgtaaaaattatgaaaaaagcgttcctgtggacgatattgaagagttttcaaccaaagttagtcaagtcggaaaacattatacaaaggctatctgcattactaaaaatggctttcagaaaggagcattaaatgttgcaaaaaatagaaagatagggctgtggagaattacagctaatgataatcatgaagttatatttaatagaactattaatagaataaagaataacgatgaaatcataagtaatgcgctcacttcagaaaatttacaagatatttctgctacgaatatctttattcagacaccactacgctttacaagcattccaaaagatttaatttatgatttcctttctttgcagaaagatgtgtctccaaaagaatttttcacacaacaccgtgtaaattcatactctaaaactatcccttataaatctaaaaaagagttaagtatccttgcagaaaacttatttgataaattttataaaaacgatgagatagatttaaatgaaataataaatactctaggttataaacttattgagattgatactcccgaacatccaaatattattggtaagctagaaactaaattaaaaactattaccatttttggagtagggttctattctcaacatcaaattaattttgcaaaagcacatgaaatagcacatatttttcttaaccatagcaaatatataatttcagagaacttttcaccagctatggaatctcactctatagatatagaaattacccaaaatattgatcgactagaatttcaagcaaattattttgcgggttgcttactactgcctgaaaatcgattaaaagcaactttaaactattatttacgcctttatggaatcagaaatagaggtttctcgccattatatattgattcacaaccctgcaattttgaaaattatagtagaatcattttacctatgactggaatttttaatgtttctcaagaaacaatgaaaattagactcacagaattaggtttagctcaattcgcttttcaacctacttctactcataaggtaacgaggtcatatatagatcggttctaa

SEQ ID NO: 62769 - DNA, 237 bp, Acinetobacter baumannii
atgttattcaaaaaattcgctgttgctgctgctgttgctgctactttagctttcgttggttgttctaagaaagaagaagctccagctgctgctgctgcttctgaagcagtagctgctgcttctgaagctactgaagctgctgtagctgttgacgctgctgctgctgaaactgctgctgctgcttctgacgttgctgctgctgcttctgacgttgctgctgcttctgctgcacaataa

SEQ ID NO: 62770 - DNA, 498 bp, Acinetobacter baumannii
atgattaattttagtcaatcgaaacaatctttttatgatttaaatcttgagtatgtcgaactgccagatgatttaattgaaattaatgaagaacagcattttgatttacttcaaaaaattagttcggggcattatgtattttctgatttgacttcatcagatccgaaaccaagtccttatcatgagatgaatatcaaaaaaaagaagtgggaagataatcgtactctggaacagaaacgaatcgattttttgtggactttaaggcctttaacacgtcgacagtttaagttggcgttattagaaaatggtcttttagacttaatcgaacaacgaattaatgcaattgaagatcaacaaatgcgtacaaggattcaaattgaatatactgaatctgttaattttgaaagaaaaagtgagtctgttttatacatggctactttattaggattaaatgaagaacaattcgatgagatgtggatatacgcaatgacactttaa

SEQ ID NO: 62771 - DNA, 516 bp, Acinetobacter baumannii
atggctctaccaaaaaaattaaaactgatgaacctttacaatgaagggaattcatatcttggccaaacgggtgaagtaaccttgcctaaactcggtcgcaagtttgaaaactggcgtggcggtggcatgaacggcaacgttaaggtcgatttcggtctcagtgatgatgctatcgaaatgacttggaagttgggcggtatcgacccactggtattaaaacaatttggtgcaaaaactattggtgctcttggcttgcgctttgcaggttcataccaaaaagatgattcaggcgaagaaacctcgatcgaaatcgtcattcgtggtcgacatgaagagatcgattttggaaatgccaaagcaggtgatgacactgaaacgacagttaaaaccatttggtcatactacaaactttctatcgacggtcaggttgttattgaaattgacatccctggttgcaaagaaatcgtcaatggtgtcgatctgcttgaaaagcatcgcgacaacattggtctataa

SEQ ID NO: 62772 - DNA, 336 bp, Acinetobacter baumannii
atgaaaactttacagcaaactgaaaacactgcagccattaatccagatattcaaactgtcgatttagaaaaacccgtcttaatgggaacgctggaaattacgaccttagaaattcgcaaacccaatgtgcaagccttacaaggcgtaaaaattgctgatcttttacagggtgatgtcacagcaatttgcaccgtattaccacgggtatgcacaccagaattaaccaaaactcaaatcaatcagcttgaacccgcggatctcacccaaatcggcggtgcaatcatgctttttttgcaaccgaaatcagttcgtgcggaagtcttacgccaacagtag

SEQ ID NO: 62773 - DNA, 456 bp, Acinetobacter baumannii
atgacacgaaacctctcaccacaatacaatcctagtggacatagtttcagtggttggctcggtggtaaatcacaactagctagaacaatcattgatatgcttccagaacataaaacatatgttgaagtcttcggcggagcaggatgggttctatttaaaaaaaccccttctactgtagaagttattaatgacattaatgacgatctgattaacctgtatcgcatattaaaatttcactttgatgcgtttttaactgaatttgaattattgttattttcacgtactcaatttgacgattttaaacgtgaccaatctggtcttactgatattcaaagagcagtgaaattttattatttattacgttcagcatttggctgccagcttgatgctcttttacctattctaaagatagaacgaaccgcatgcgactgggcgaacgtctacgggaacatttag

SEQ ID NO: 62774 - DNA, 300 bp, Acinetobacter baumannii
atggctaacgtgaagacatgggaacaaacttatattgagtttttagtaagactatccaaaccaattaatcatgatttacctatgggatggtctatctggactatagattttttcatggtgatcttatcttttgtaagttctttgcaaacctaccgccattctttccacggaatggtagcagaccgaacaaggctaggaaaaccgtccacaaagctaacggccagcgcgaagctgccctgcccgatctaccataacaagtatagccgatcagacatttttggcaaaaaaatagtcgcttaa

SEQ ID NO: 62775 - DNA, 384 bp, Acinetobacter baumannii; identical to SEQ ID NO: 49258

SEQ ID NO: 62776 - DNA, 840 bp, Acinetobacter baumannii
gtggttttgttgaatattaaaaataggaagtggaaagatttcccaaaaaatttttgggagaattttactggtctaagtataattttgacagttataggatttattttaggtgtaggtggctggaagttagatgaagggtgggtacaatattttggagtattaagtataatttcaggaatatttctaacaattagattatcatggcctgagcctgtcttgcagcttaaagaattagttggaaaaaagctaactttagaagaggtaaattctatctatccaattccatttttattaggtgttgttggaaccacaaaatctggaaaaacaacttttttaaatcaagctttaagagcctccactcagacgaataggacaaatatcatttatggtgaagtcttatcagtccctagaaaatatgataattattttattgtaatagatggtgatggagctaaattaaaacagcaatttgaaattattaataaagttgattatttattggtttttttagaccataatatgagtcatacaaaaaagcaactaaatactcatagattacgtgagcatgaaaatttttttgaacatttaaagggatatttatcagagcataaaaaaataaaaaaaattcatttagttttaaataagcaagatttatgggatagtagtgcaaagaaaaaacagctttgtgattggcttgaaacaaaagttcaagattgtattgatagtttgaatattgaggtttcctactcatttcatagtaatttgaattcggcatccgttaatgaactaattaataatatttctcaagaggttgtgagtgcaaatgataggaagaaatga

SEQ ID NO: 62777 - DNA, 1290 bp, Acinetobacter baumannii
atggtattgattgggaagttaaagaacaaagtatttgccaattctgtttggatgatgtctgaaaaactaatttcaatttttggtttaatctttgttacctcatttgttgcaaagtatataggtcctgaaaactttggaaagctaacctttgcaagttcaatttttgcgatcattcaaacaattgcaatgtttggatcggaaaatattatttttcaaaaaacatctaaaaacaaaaaattaggtgaatatataattgattccacaaaaataattagagatattctgtatcttggcttttcatcacttacattgttttatatttattatgctactgattatctaacttttgtattttcacttgcgacaagtgtggcgatttattttgctgttcacgatgtatatttaatatattttaatgcaattttgcaatctaaaataaatgcatattgtaatattttagctttgattatttcactaattataagatattgtatcgcaaaatttcagttagcaatagagttattatgtattccgataataatgattaccttggtacctttttttattagaaagtatttgtatgcacagaaaaaagtgagtgaaagtgatattgtagtagaaaaatttaagcgttatcgaaaatttatgttgggtgtggggcgtaaacttgctttctactcactttcagttgcaatttttacaaaaacatcgcagttatttctaggtattaagtcccaatatgatttgggtatttatactgtagcaatgacattggggaatagtttctattttgttttggttgcaataatttcttcatattttacacaagtttatgttgagaaggattttgaaaaaagccaaaatatggttgctaagctaagtttggttatcattttaatctgtctgttagtaatggttattttttctttaacaggacattatattattgaatggttatatggtaagcaatatgcaagtgtaaataatattctaatatttacagtatttgttacgttattttcagggctttccacaattgcggagaagtatttgttgaaatttaatgcatatgactatttgaagaaaaaaacactttatttagttgtctttaatatcatactaacagctttttttgttcatttttggggtttaaatggtgcagtttttgccattttaactacagaaattatgtcattttctatatttaattatttttataaagatagaatcatactcgatgttcaaaagagaatttttttaccttccacttatagaaaagagtacaactaa

SEQ ID NO: 62778 - DNA, 231 bp, Acinetobacter baumannii
atgaatccagaacctactaatttaaatcaaacacaatccatccaatcaaatcatatagaaaatttaaaagttattagtgttaataagtttatctttctatccttaatttcctttggcttatacccaatttggtggatgtttaaagcatggcgattttttctaatcaaagataagttaaatattatgcccgctgctcgtaagcgtccgctgaatcccatacctattttttaa

SEQ ID NO: 62779 - DNA, 1086 bp, Acinetobacter baumannii; identical to SEQ ID NO: 50288

SEQ ID NO: 62780 - DNA, 138 bp, Acinetobacter baumannii; identical to SEQ ID NO: 50167

SEQ ID NO: 62781 - DNA, 999 bp, Acinetobacter baumannii
  misc_feature (978)..(987): n is a, c, g, or t
atgtcttcaaatagctttgaacaacatcaacttttccaagaagaaataatatttgatcaatttctctatacttattgggataaacatagtcgtcttggtcaaatccaagaattagcattacctgaaagaaaaaatactttcgccatctgttatcaagataaaagtacatatactttaaaaagtttaagtacaaatcttttatttaaggccaccttgaaaagaaatcaaggaatactaaaagttgaaaaaaatctacttattccattatttgaatttattactacatcctctgcaattaatatcaatgcaattaatgaaaatggagaaagattaagagcagctcaaattggtgctctatactcattaatagcacattggactctatctaaagagcctgcaacggtagtcttacctacaggcactggaaaaacggagactatgctattaacaacattagtcgaccaatctaaaagaacattagtaattgttcctactattgaattaaaagaacaactctttcaaaaatttagtagttggggaatccttaaagatctaggtgtgatacctcaaaattttcgaaatcctaaaattattgctttaaaagagactattaaatctgaagaagaagttgaatatttattaaatgcagaagttattatttctactccagctcttttagcaagaagcccatctgctataaaacataaattaaaaaacttttttagtcatgtatattttgatgaagcccatcatgtaacagcaaaagaatgggatatgctaaaacaattattctcagcttcaaaaattgtccaatttactgctacgccttatcgattagatagacaaccgattcaaggaaaagttgtttacaattatcctttatcacaagctcttaatgataaatgtttttctaaaatttcattaatctcagtagatgaacgtcatccaagtaaaaaagattatgaaatagctcatacnnnnnnnnnntactgctattaa

SEQ ID NO: 62782 - DNA, 942 bp, Acinetobacter baumannii
  misc_feature (803)..(812): n is a, c, g, or t
atgtctgaacttattatgaatgaaaaaactgacttagagcctcaggttccaagtgtattaccactattagccttacgtgatgtggtggtttatccacacatgcagattgcgctatttgtgggtcgtgaaaaatcgatcaatgcagttgatgtggctcgtaacagtgacaatttagtatttgtagttgcgcaaaaagattcgcttacagaagaaattgatcacgacaatttataccagtacggtacagtcgctaagattgtacaagtagttaatcatgaaaatgatgaaaactgcattaaagtacttattgaaggcttacatcgttctaagttgaaaaaaattatcgatgaagatagttatttgactgccgaacatgaattaagtccaatgacgattaatgtagataaggcaacgcaagaaactcgtttacaagagttacgtaacttatttgctcaatatgcagaagcaaaattacgtaatgcacgtgaactggttgctgctgccaacaaaatcgaagacttattgcaattgatgttcttcgtagcaactcgtgtgcctctaaatattgaaattaagcagaaatttttagagtacgatgagtttgaagctcatttgcaagagttgatgaactacttgatgaatcaatctgctgaacagcaaattgagcaaactttacatgacagtgttaaacgccaaatggaaaagaaccaacgtgaatactttctaaatgaaaaaatgaaagtcattcaacgtgaactttccgacatgaatggcggtgctgaagatgacgttgctgaaattgnnnnnnnnnngaaattgagaaacgtcttgctgaagctgatttacctgaacacgtacgtaaaaaagccgaagctgtgttccgtaaacttaaagcaatgcagcctgcatctagtgaagctgctgtggtacgtaactatctag

SEQ ID NO: 62783 - DNA, 864 bp, Acinetobacter baumannii
atgtcaaaaaaatttgaagactttaataatccaagagaaaaagcattgcaggggatgaaagatagtattcccgcttcacaatgggaagaaaacttacagtttctcaaacaattaaggaataaaattgcgcaattaccagtaagtaaacaccctgcaattgaaatattaaataacggttatcttgataaacaaaccctgactcgtattcatttagaatatcgtcatgccattgttcagatttttaccgatgctttattaaaggcgcagtttctgacaaaacaattggaaccaaagcttcactcgggcgctaaaatgtttccacgggtgttgttgagcttaaatatattagatgaatttggttttcgaccgggtttagataaagataattattatttaggcaaccctgaatatgcacattatccattatatgaagatttgctaaatgactatggtttgactgaggctgaccgccgtaattataaaccttcaaaaattgcagatcaggtgagaacatttttagaagcttcttacgatcgttatattaatgtggtggcattattggcggtggcagaagaagaagttattctttttagcccaccattgcgacaagcaaccaagtttgtaaatatcgatgttgagggtggtggttattaccatgtacacggcgtttcaacagatgaaacagctgaagctgctgatgatgaccatcaggatgacctttggtttgcgttggctcaagccattaccaaagatgattatgaaagcttgactcaactatgtcttgattattgtgcactgtggactgagttttgggatgcacaaattgccgatgtccaatttattgaagaaaagaaattagcataa

SEQ ID NO: 62784 - DNA, 603 bp, Acinetobacter baumannii
atgaatgcaacaaatgatcaagatattcgtcatgctttacacagtagattgcaaaagcaatactacgttaaagacgatcatttagtcgttgatgagctatctttagagcatggtcgaaatcgagtagacatagcagtgtttgataactgtattcatggctatgaaattaagagttctaaagataatctacttagattacaaaatcagttatcacaatattcaaaaagcttgcaaaaagtcacctttgttgtagcagaaaatcattttaaagatgtaatgatttctacccctgaatggtgtgggcttattctagccactaaaggtcctagaggtggcgtaagttttcgttctattaggcgagctaaacttaatccaaatgtagacttcattagtctagctcatatcttatggaagtcagaagctattgacctactgtatcaatatggtattacagagagacttgaatataaaactagaaaagaattgtataagcaattgaatcaagttatgactgtccaacaattagccttggaaattaaaactaaattattgaagcgtggtaactggagagttgatgaacaacctttgtcatatgatggttga

SEQ ID NO: 62785 - DNA, 2715 bp, Acinetobacter baumannii
atgaccaatattttaggcagtcaatggtataagtttgactttcacacacatacaccagcttcactagattaccgagaacctagtgatatttcacctcaagattggcttaaagccctcatggaaaaagaaatcgattgtgttgctattacagatcacaatagtggggaatatgttgatactttaaaaagcgtttactcacaatgtgtaaatgaagattggttcagacctctcacaatgttccctggttttgaattaactgtatcattaggagcaagtagaattcacttgttagctatttttgatcctagtatatctagtgcagaactaacaatgatcctcgggagttgccaattaaataatactttattaggtgaccctgaaaattgcttttcaactctttcaatcacagatgctgtaaaacgaataaaagatgcaaatggtattataatgccagctcatattgagggccctaaaggtcttttacacaatatcactacatcaactcttgatttgaaagagcatttaaaattatttgattctgctcagtttattaatccaaatcacttgacagaagccacgattaatcctgaattaagaaccaactgtcaacatcttgccattgtgaaaggctctgatgctcatacattagcccaactaggtgcaagcttcagttggataaaaatgggcacaccgaaccttgatggcctaaagtatgcgttaagagataaaaactattgcattcgtaatcaaattcaaaaccctaatcaaattcctcaagcttatattaagaccctaactatcaaaaatatgaagtactgcgggagaagagcaaataacattccaacattccaacttcatccactattcaatgcagttatcgggggacgtggtacagggaaatcaacatttattgaatcattaagattatcattgggtaaatccgaagatactcatgagctagacaaaatccatagcgaaattcaaagtttcattgatgaagttacgtttgacaacacagaaatcgacatttcagtaaaaaatcatgcaagtgaatattgctcaaaatggtctaaatcatcccctctacaatttttcaaatatgaagaaggatcattagtactagatcaaggaaatatccaagagcggttccctgttcatctgtacagccaaaaacaaattaatgccttagcttcacatcctaatatcttattacagataattgatcgatcaccaaatgttactactcacacgtataaggagttaattgatacccaaaccagccaagttatgaatctccttgaagaagaaagaagattaaattacacaatatcaatggaaggatctcttagatcagaactgagtgctattgagactaacatctcaagttttaattctggaggacataatcatattcttctcaatcatgaaatatgcatgaatatccaaagggctttagcatcaagtcttgatgtcggtgaactgaatgaaagattaaatcaggtctctagcactaaattacccacactattcttagataatattaatggcttacaagatccattaaaaacggaattagcacaaattaacgccatattttccagtgaattgtcaaatattcttcaagaagttggaaatttaaaaattagattagatacggccattacacaagctagtacggcttatcaaaattcaagttggactttatttaaaagtggtagcgaacacgcgtaccaaacaatgttagccgactacaatgaaagaggtatatcattcgatagtgaacaatatgactcttggaatcgtcgcaaacaagaaatcctacaaaatattgaaataattaataataataaagttagaattaatgagaatcttagagaaagacaaagttgtattgatgaaatcattagacttagaagagaaattcaacaaagaagacaaagttttatcgattcagttttaagcaataataattatgtcaaaatgaccattttaccgtatgggcaaactgaaaatattgagtctactttcagagaaattataggaaccgctaatttcgttaatacgatttacaataaagaagataaagatagatgccttcttaatgagctaattaacggagatattaattctaagcttacggccaaaaataaccttttcgttaatatactgaatttaattaaaggaattcccctaccacaatttactatagatggcagattcacaactcacctccaaaatcgatatcataatcagcctgaatttctaggccgattactcacttggttccctgaagatttacttgaagtaaaatattcaagaaaaggagatggtcgagattttgttaacatctctagaggttctgcaggccaaaaagcagcggctatattagctttcttacttagtcatggtaatgaacctataattatcgatcaacctgaagatgacctagataatgagctcatttatgatcttatcgtgaatcagatacacaacaacaaaaataagcgccaaattattattgtcacacacaatccaaacattgtagtaaatggtgatgctgatttagtaaacgttatgcatttcaatggacaaattgaaattaaaaactcaggtagcctagttcacgaagcaatacgaaatgatgtttgccaaattatggaaggcggtaaagatgccttcaggaaacgttatgaacgaataggttctttcagctaa

SEQ ID NO: 62786 - DNA, 354 bp, Acinetobacter baumannii
gtggtaaacaccaataccatgccgtgggaatttattccaatttcctttttaaatgatgtgctgcctgtcaaaacctgtttacaggacccagatacaggcatgatggtttggaagttacgttatccagctggatttagaactgtggagcattggcataattgtgcacatggaatgtatgtattggaagggcatttagtcaccagtgagggcgagtttggaccggggagttttgtctggtttccagaaggatcggtgatgtttcatggtgcacggagtgataatgatgttttaatgctctttattaccaataagcctttcgatattcactttacggaagaagaaggcttgccttaa

SEQ ID NO: 62787 - DNA, 1107 bp, Acinetobacter baumannii
atgaaagaaattattgctgccgtgacagcatgtaagggtgcagactttgaattgcaaccgcttaaaatccgccaacctcaagacgatgaggtaatggtgaaagtagttgccacaggcatgtgccatactgacctgattgtccgtgatcagtactatcctgtgccattgcctgctgtacttggacatgagggcgcagggattattgaagccattggtcctaatgttacagacctgcaagttggtgatcatgtagtattaagttatggttattgtggcaaatgtacacagtgtaatacgggaaatcctgcctattgtgcagagttctttggacgtaatttcagcggcgctgacttagaaggaaagagtgcaatttgtacacatgatcatgctgtggtaaatgatcatttttttgcgcagtcctcctttgcaacttatgctttaagtcgtgaaaataatgctgtgaaggtgaccaaagaagttccgatagagttattgggacctttaggctgtggtattcaaacaggtgctggtgcgtgtatcaatgcactcaaagtcacaccagcaagtagttttgtgacatggggcgcgggtgctgttggtttaagcgcattgcttgcggcaaaagtatgcggtgcttcaatcattattgctgtcgacattgtcgaatcacgtttagagctggccgaacaattgggcgcaacccatgtcatcaatagtaaaacacaagatcctgttgctgcgatcaaggaaattacgggtggcgggattaattttgctttggaatcaactggacgacctgaaattttaaaacaaggtatcgatgcactaggtattttaggcaaaatcgcggtcgttggtgccccacctttaggcaccacagctcagtttgatgtgaatgacttattactgggtggaaaaactattctgggcgtagttgaaggtagtggttcaccgaagaaatttattcctgagttagtcacgctatatcaacaaggtaagtttccatttgatcagctggtgaagttctattcatttgatgacatcaatcaagctgctatagatagccaaagagggattactctcaagccaattattaagattggctaa

SEQ ID NO: 62788 - DNA, 1455 bp, Acinetobacter baumannii
atgtcgatattagcaaaagagatttgggataacaaactgtttaatggttcatggcagccagctcagcagacctataacgtggtggaagtggctacgggtcagattttgggtgaaattggttatgcctctgcccaaaatgttgtagaggcagctcaacaagcaaaaattgcccagcaaaagtggtggtctttgtcttatcaagaacgccaagcggtatttgagcgtgcagccgctttacttacagaacaccaatcggaggtgattgaatggttggtgaaagaaagtggttctttacagctcaaagctgggttcgaagtgagtatttcgattcaagtgctaaaacattgtatcggtttacctgcggcggatcagggtacattactgccgactcaaaatggaaaactcagcatcgccaaacgcgtacccttaggtgtggtcggggtcatttcaccgtttaatttccctctgtatttggctttacgagctgtagcaccagctttagcactaggcaatgcagtcgtacttaaacctgatgaacggacggctgtttgcagcggttatgccatagcacgtatttttgaactcgcaggcttaccgaaggggcttttacatgtcttaccgggtggggctgaagtcggggaagcactgacgctggataaaaatattgccagtattcagttcacaggctcaacaaatgtcgggcgtattgtgggtgccaatgccgcaaatactttaaagaaagtatcgttagagttaggcggtaaaaactcgctgattattttggatgatgctgatatagaacttgctgctgaaaatattgcatggggggcatttttgcattcaggtcagatttgtatgacatctggcaaaattttgattcatcaaaatatttacgaacaagttaaacagcgtgtaattgaaaaagtgaaaaactttgtggtcggtaatccgtgtgaaagccatgtcaccattggccctttgattaatgccaaacaagcacaacgtgtcgaacaactggtgaatgccgcagttgcagagggcgcaacactggaaattggtggacatgctgatgacgtcttctttgaaccgactgtgcttgctgacgtgacgtcgaataactcaattttcacagaagaaatttttggaccagttgctgtactgatcccttttagtacagatgcagaagccattgagttggcaaatgatgggaactatggactttcagcaggcgtgattagctcaaatgtggggcgtgcgatacagctgggggcacagctcaaagtcggtttactacatatcaatgaccaaaccgtgaatgatgaaacagtcaatccatttggtggtttcggctcatcaggaaacggaacacgtatcggcggccctgccaatgcagatgaatttacccaatggcagtggatgaccgtgcaggctcaagcgccacattatcctttttaa

SEQ ID NO: 62789 - DNA, 882 bp, Acinetobacter baumannii
atgcattttaggaataaaaatgcgttacttctcatgctgagtggtttacttgcacaacatagccatgccattgatgtgaatgcgggggattatacggctttaccgagtggaaccaatgtcggtgttttttattatcaacatagtgaaatggatggctactatcaaaatggcgataaagtccgtgccgaatccaaatctgatattgggattgcacggtttattcattacacagatatcgcaggcttacgagcgaccccgcaagtggttattccctttggatccgtgcgtaatactcaaattggggatgcgcatttaaacaatgcatcgggttttgctgatcctattattgcctccgctttttggttcatcaatcaacctgaacagggcgtttctggtcgctatcttgcagttactccatttatttatttgccgcttgggcaatacgataaaaatgatgccgtgaaccttggtgaaaaccgttttaaatatgatgtgcagttggcttgggtacaaccgctttatggcaaatggggttttgagttttatcaagatgcaatttggtatggagacaatgatgaagcgggtagtggcaatcagaccctgtctcaagacaccagttatcaaacacaggtcaatttacgttatgacctgaatgccaagcaacggattgcccttggttatgctgccaactatggcggtgagcaatctttagatggtattaaactcaatcaaaatatggaaaagcagcaggcgagatttgagttccagcaaatgattaatccaacaactcaattaagtgcgcagttggtttcggatactcaagtcgaaagcggattcaagaaagatttaggactgaattttcgacttttttacattttttaa

SEQ ID NO: 62790 - DNA, 1797 bp, Acinetobacter baumannii
atggatggtttatctgaattttcttggcaaaatataaaatacaatttttatactacaggcgcactaccagagctagtggagcgggattcaccgattttacaaggatgggaaagtgctaaacaatcaggcttaagccctttttctaaactgacgtctttatatgactttcctgtcgatcacctttctaaagaagatatgaaattcgcgaaattggcagaagtggttctaaatgacatttggcagttattcggacagcaggatgtcagtattttcttaattaatcagcaacttaagattattgcagaacgacacaatccagaccttgatgaacaatatcattttttacgtacaggtcgggtgatagatccttctatatttggcgcgattgcaccgacatgtagtgtgcggtcgaaacagccgatgatcatgactggacatcagcattatttagatgaatttgctaattattcttgcgcctcagtccctgtgtttaatggggctggtgaggttttgggcgctttggatatcacctcaccgcaagggcttttggcaagcaattggctcagacatttgctttatcaaagttatattttagaaaataaagtgattcttgctgaaatgaaaccaaatcagcgcatactttattttcagcactccaaagacttacttgaaaatgcctatacaggcatgatcgtactggatgaacattgtcgcgttattaaagccaatcaaatggcattgaaactgctcaattgttctattgaacaggttctggctcagaccattaatcatttctttttcactgagcatttgactcagtttgatgccaatgatgccttttttattcaaagccatgaccatgcttttttctatgcacagcttcgtcagttctgcgtaaatgttcccaagcaagccagagccattaccgcgctttattcacttgatcaggcactgaaagccttaaaggcagatattccagtgctgattacaggagaaacagggacagggaaagaccacttcgcacagcaattacatcaaaagctggatgctgacttaccttttatttccattaactgtggtgcgatacctgatcatttattggaggcagaactgtttggttatgagggcggtgcttttacaggggcgaaaaaacagggtgaaaaaggtctcattgagttggcggatcaaggaattttatttctcgatgaaattggtgatttgcccttacatttgcaagtcaaaattttacgcgtcttgcaagaccaacggttttatcgggttgggggacgcaaaccgattaaatcagcatttaagttattatgtgcaacccatcaagacttaaaaatgaaaattgaaaagcagacattccgtagcgatttatattatcggatctgtggctttcaagtgcatctggagcctttacgtttacgtcaggataagcaggctattttccataagattctgcatcaatttggcatatctcaatggtcagccaaggttgaacagcagtttcagacctatacatggtcagggaatattcgtgagcttattcatattgtaaggttatcggctgcatttaatgagggcgatgttctgacacagttgtatttgcctgagtcctcagttggtgttcaaatggcgaatcagcctatgctaacagtggaaaaacaaaacttaaatgcgatgaccaaacacatggtcatgcaggtattagatgaagaaaatggcaatattgcacgcacggccaagcgcttaaatatttcaagaacaacggtgtataaatacatcagcagttaa

SEQ ID NO: 62791 - DNA, 297 bp, Acinetobacter baumannii
atgaatcctatgtcacaggcaaagactagcttaaaccccaaaaattatcttgctacttttatctttattttagtcatggtaacagctgcttatgacctacatgatcgtgaaattattttacctgaaatggctgcgataggtgagtatgcttttccatttttggtttttgtctatcctcaagacagtgtgatgcatttaccagttgcttcatgttttatggcgattttttcacaaggctgtgtgtatttatatcgaacttattttcaacatattgctattgagaaatcttattcatag

SEQ ID NO: 62792 - DNA, 711 bp, Acinetobacter baumannii
atgactgagttctggggattcttttacttagtctggacagtgctttgctatttttttgcaaaacacctttttattcgaacccaaaaaatctatttatctccaattattgttgttcctgtactcagtatcgggctgatctttattttacagcaccagtttcaacactattaccgttatacccaatatttggtggcgatgcttggaccaattacggtggcttttgccattcctgtatttcgttttcgcagcatgatccggcagcattttaaagtcttaatgctcagttcaatgatggcaatgttggtagggattttaagtagttggttgttggccagtatcttcaatctagataatatcgtcaaaaatagcctcttggcacgttctatctccattccatttgcattggttttaacagaaaaacttggtggttccatcagcttaattccgctctttacagtgattactggcttggttggcatgcttttgggtgatttattattactgtggatgaggtttaaaaatcgaattgcatacggaactgcatttggcaatgccgcgcatgcgatggggattgctcgggcaaggcagcggcatgagttggaaggagtcatcgccagcctctcaatgattatttcaggcatcgtcatggtgctgtttgcgcccacagtgattgcattgatgaaatatatccttagcgctctctctttttaa

SEQ ID NO: 62793 - DNA, 351 bp, Acinetobacter baumannii
atgtttattttggcagtgtggggtttggcttatggtttgcaaaagctgttgaacttacccgtagcctcaggtgtgcttgggtttttcctactgttgttcttcctcgaaatgaaatggttgaaattggcacatgttgaacagggcgcagatttgttattgggtgagcttttgctatttttcattccgccagtggtcggggtgattcagtatcaggacttattgatgaccagtggctggaaaatcctgttggtgattctgatcagtactgctttggtgatgatggcttcgatttataccacgcaaattttctttagacaggaaagcatacaacaggaagattcgtatgactga

SEQ ID NO: 62794 - DNA, 1653 bp, Acinetobacter baumannii
atgtttttatatacagactttgatcaaaacttacttaatgaacgtgttgcacaatttcgtgatcaaactcagcgttatttagctgggaaactcaccgaagaagaataccgaccattacgcttgcaaaatggcttatatatccaacgttatgcgccaatgctgcgtttggcagtcccatatggattgatgaactcgaggcaattacgcaaagtggcagatgttgcgcagaagtatgatcgtggttatgcacatatttcgactcgtcaaaatattcagctcaactggcctcaacttgaagacgtacctgatattttgcaggagctcgcaacggtacatatgcattctattcaaaccagtggtaactgtattcgaaatacgaccactgaccagtatgcaggtgtggttgaaggggaactgacagacccacgtccaacatgtgaactgattcgtcagtggagtacctttcatccagagttttccttccttccacgtaaatttaaaattgcggtctgtgcacaccctgaacaagaccgcgctgccacaacctttcatgatgtgggagtttatgtggtggaaaatgaaactggcgaattgggctatcaaattaaagtcggtggtggtctaggacggacacctttagcagggcatattattaagcaatttttaccgcgtgaggatttaattgcttatttggatgcgattatgcgggtatataacttgcacggtcgccgcgacaataaatacaaagctcggattaaaattttagttaaagcactcactccagcaggttttgctgaaaaagttgaggctgaatttaaatacacacaaaccaaactgaaagttcagtccgaagtcttggcaaaaatggatgccgtctttgcaccatttatgtatgaggccttagaagatgagaaccttgaaacgctatttcagcaatatcctaagtttaagcattggtttaatctgaatactcataaacataaagtaactggctaccgtatcgttacgatcagtttgaaacgagcaggtgtagcgccaggtgatatgacctctgatgaaatgcacttaattgcagatttagccgacaaatatacctttggtgaattacgtaccacacatgagcaaaatattgctttaaccgatgtgcaacaaaaagatttatttgaaatgtggcaagtgttggatcatgccaatttagcccgtgcccatattggttttctcaccgatatggtttgctgtccgggaggagatttttgctcgctggccaatgccaaatcgattcctgtatatgaagcgattgctcgccgttttgatgacttagataccatttataaccttggtaaagtcgatttgaatatttcaggttgtatgaatgcctgcggacatcatcatgtcggtaatatcggtattttaggggtcgataaaaagggcgcagaatattaccaaattactcttggtggtaactcagatcatgatgcatcgattggcgatattttaggaccgtcttttcctgctgataaaattcctgatgttttggaagaaattctcaatacttatctagatttacgtctagaagatgaatcctttcttgaaacttataaacgggtttcgattcagccatttaaagaacgggcttatgcggacataaattaa

SEQ ID NO: 62795 - DNA, 822 bp, Acinetobacter baumannii
atgtttgttactgaaaaattaaatctagttgatgagttaattcaagatataggattttcaaaaaatcttatcgctttacttgaacaaaagttcattaatttagaagcaatgttattacgggctaaagttttacgcgaattttcaacgagtaaagtgcaatacatcattcagtctgaaattcaagaaaaccaagacagtcttggatttttattttcaccgtttattttatcaaatttaaattattcagttatttataatacacctgcttctgaaactgtattgaatgtattaaaacgctattatcaagctgatcatcacacaaaaattaaaattgatgaggttttgtccgcattaaatatttttatcgatttatctaaaaataaactgaatgaaacagataacttttattatgcattattaaaagctttatgccgcccagatgtttctgaaatctttttaattaatgatctaaatatcaacctaaaaaaaatatctgaaattgaacagtttttttacgtgaccattcaccttattcatccaaattcgcaagcaacatcaatggatatgacaacgttaaacatgcgcaagctgctctttaaaaataaagatgaacagtacatctcgctatgtgaaaacttttctaaacacaatgctcagttgcttcagtgctatggcatttatagccaaggacaagcggtacaactggtcgaagatatgttttatgccgaacatatttatgaaaaattatcggtctatggggaatatatacagacacgtttacaacatgatgagcacaacataaacgctaattttttagcttaa

SEQ ID NO: 62796 - DNA, 717 bp, Acinetobacter baumannii
gtgcaacaaagcctaaatcaattaaaacaaaacagtattattttaattcagccctgttgtcataatcctacaggcatggatttatctgaaactcagcaagatgagatcatacaaatcatcaaaaaacggaaaattattccattcttagatatggcctatcatgggtttgctcaagatattataagtgatcgaatttttgtacaaaaactcctgcaacaaaaaataagttttcttgttgcaaattcatattctaaaatcttttcactttatggtgagcgtataggtacgctgtctgttgtttgtcaaaaatcagatattgccacgcaggtttttggtcaattaaaatcaattgtgagaagaagttattcgacaccaccggctcaaggtgcactattgattgctgaagttttaaactctcaatatttatgtactatctggctggaagaactcaaaaatatgcaaaaaagaatggtggatatgagagagaaactcgcacaaggccttagtcaatccaatcttcgtcaagactttagctatatcacggcacaaaaagggatgtttagctatttaaaaataactcccagcgaagtcaaaaaacttcgtgaagtatatggcgtatatattttggaaagtggtcgtatttgtatcgcgggattaaataaacaaaatctagattatgttatccagtcacttacagacgttttatctaaaccatag

SEQ ID NO: 62797 - DNA, 804 bp, Acinetobacter baumannii
atgaatcaaaccattgacttaaatatttctaaaaaatcagctaaagcaggtgattcgattccacacgagagcgcgcatttacatgtgacggggcaggcaacttatattgatgatttacccgagcttgaaaatacgttgcatttggcagtcggattctcgaattgtgccaaaggcaaaatcagtaagtttgatttagatgcagtacgtcaggccgatggcgtccatgcagttttttcggcaaaagatattgaggttgaaaataattggggacccattgttaaagatgacccaatttttgccgaggaacaggttgagttttatggacaagccttgtttgtggttgtggccgagagttatcagcaagcccgtcaggcagttcgcttagcaaaaattgagtatgtgcccgaaaccccaattttaacgattcaagatgcgattaaaaaagaatcgtgggtgttgccgcctgttgaatttagccatggtgaagttgagcaggcatttcaaaacgcagcacatcaactttcaggtgctattgagctgggtgggcaagagcatttttatcttgaagggcaaatttcctatgcgattccacaagaaaatcagagcttaaaagtctattgctcaacgcaacatccaaccgaaatgcagctgctgatttgtcatgcactaggcatgaatatgcatcaggtgagtgtggaaagccgccgtatgggcggtggttttggtggtaaagagtcgcagtcggcacagtgggcatgcattgcatctttggcagcacaaaaaacgggccgtccgtgtaaataa

SEQ ID NO: 62798 - DNA, 480 bp, Acinetobacter baumannii
ttgggtggtatcaatagcttatggcctctatttggtatcggtaaccagatgttggctgcaatggcattgattctaggtacagtgattttattcaagatgaagaaagagaaatatgtgtgggtgacaattgttcctacggttttcttattcatcacgtgtatgacagcgggctggcaaaaaatattccattcaaatccaaagattggtttccttgcacaagcggataagttctctgctgcaattgccaaaggtgagattttaaaacctgcgaaaacgcttgaagagatgcaaaccattgtattgtcgaatcaaattaatgccgcactttgtgcattctttatgattgtggcaattatcatggtaattgcagcgattggtgtgattcgtcgtgctttagcaagtcctacaccaactgtaaatgaagctccagcagtttatgcagatcctgaagaaactattgtgacttcagcaaaacattaa

SEQ ID NO: 62799 - DNA, 303 bp, Acinetobacter baumannii
atgaatcttaaattcgccaaaggtggaaagacggtgatttataaaatcatcaagatgaccatcatgtcgcaaaaagacctgatttttaatcctaaaaattggtcgcgtatcgcgacgctgtggacacgtttacagcaaagttttcgtttgatggtgggtgttccagattaccaaaattatttggagcatatgaaaaagcatcatccagatatggatgcaatggatgaaaagacttttcatcgttattgcgtagatgcgcgttatccaaccgcaggtggtactttaaagaaatgtccatgttaa

SEQ ID NO: 62800 - DNA, 960 bp, Acinetobacter baumannii
gtgatttggggaacaacagcgcaaaaagtgtcggaacaaaataatgccaatgaacattcagatttagctgcctattacccaaaaattgatgaatttttaacgcaaatcaaccaaattattttagataaagaacaacaaaccaagcttgcactctgtagtttactggcaggtggacacctactgtttgaagatttacccggtttgggtaaaacgacattggcgagtagtttgtcacatcttgctggtttagattttcaacgtatccaatttaccaatgacatgctggcaagtgatgtgatcggaatcaatatgtttaaccaaaaagaacatcaatttgaatttaaacatggccctattttcactcaaattctgcttgctgatgagatcaaccgttgtagtcccaaaacccaaagtgcgcttcttgaagccatggaggaggggaatgtcactgtagatgggacacgttatgagttgccaaaaccattttgggtgattgcaacacaaaacccattgtttcaaagtggaacatacagtttgcctgaatcccaacttgatcgctttctgatgcgtttgtcacttggttatccatcacgaacagcagaaaaacagcttttacaacaaagttcacgtcatgatttgattggaaatttaaaagcaatattcgaacagcaagaaattttgcaattacaaagtaatgtgaatcaaattacgatgaatgatttaattttagattatatccttgatctggcagaagaaacccgcaaaggtcggcatggattgtctactcgaggtgtattggctctaaagaaagcggctcaagcctatgccttgattgaaaaacgtaactttgtcattgcagacgatgtacaagcagtctttgtcgctgtggtatctcaccgtattggtctaggtgaatccgaaactttggcattgatgcaaaaagttgcagttaagggttaa

SEQ ID NO: 62801 - DNA, 1017 bp, Acinetobacter baumannii
atgctacgtcaacgctttgaaaaatggttacatctccgttttcgttataccggtattcgtacgctgaagcaaaatgaagtcttggtttttatttaccaacaaggctttttgtacctagtattgattctaattacttttattgcagggattaattatgccaataatctaatcttggctttctgttttttaatcagcgcgattctatgtataagtttttacctgagttttaagcaattgcatgctgtgacgatacaagtcattgcagatgaagttgggcgagtgaatgaagcttttacggtgaaagttattctgcaacaatcaaaggcaacaccgaaatttcttaattttaaaatcaaagaaatagaacagtttgagcctcaaatttctactgatttaacagaaacgagtgttagttcaaagcgcactaaaaccaaaccttttaaaagcaacattaaaaaagtcgatgagcgaatccaatctgaacttttttcggaaaagcagaaaattgttgagttaaagtttattcctaaacagcgtggagaatttaaagttcctgcgattcaaattttctcaacctatccgctgggtttggttcgggcatggacatatatttatttaacagaaagttattggattgcacctgaagcaaaacctttggcattaaattttaatcactcctcaaatacgggtgaacctgattatgatgagttcaaagaactccgaaattttaaattgggagattctttgcaaagtatttcatggaaacatgcatcgcgcgggcaaggtttatttgtaaagcaatttgaagatttggtcgatgcacatgcagttcatattgattacgccaaaatgccgagtgcagatcatgaagaaaagctatgttttatgatggaattggttgatcaatgtgagcacgttcagacgccatattgtgtcattcttccttatgcgcaaactgaaaatggtgtcggtctaagtcactataatcatgtcaaaatacttttggcacaggcttga

SEQ ID NO: 62802 - DNA, 2004 bp, Acinetobacter baumannii
atgaatcgttctatacaaatctcgattttacttgccttgagcttaatttggcttgctcaaattgcatttatgcctgttgcactatccattttatttttaatcaacctgattggattaggattttattactataaatataatcagcatgcgcttatagattttcctaaatatcctaaacttatctttgcttttttggcattgatcattatttactttgatgcaaaaacatttttaggtgtagaagctgggacagctgtactgtctacttttttatttgcgaaagcattagaaacgaagaataaacgtgattttatcatcctgtttaattttgctttattcgtcagtgcaagtttatttctacatagccaagctttttggatggcacttctggttctgtgttgtctgatcagttgtttggttggtttataccgtgttcaaacagcacattttgatattcaacaatctgtatttcagtcattgagatctgattctttgcatattgtgaagtttattggtctagccttaccattttttattttattgtttatgtttttcccacgtttgccaccgctttggcaaatccctattcccaataataaggcgacaactggtctgagtgacaccatgtcgcctggagatattgcggaactttcacaatcgagtgctttagcatttcgtattattggtgatatgaagcaattgccaaagcgtgatcaactctattggcgagcactggttttagatcattatgatggaatctcttggacaagtgatagttcaaataagcaacctagatcatcgacaaatatacaaggtcaagtagatggctttcattatcaatatttagcgactgatccgactcagcaatggataactggtttggataaatctatacctgttgagcaacgcttttatttacatcaagattggtcgattacaccgagaagattggttcagcgtactcaaccgattcaattacaatggattggtgatcaagtccgtgatgttgtagatgaaaaatctgcccaatttctatttaaaaataatcttaattatccaaaaaatagtgatcgtcaagcgcaacaatttgccttaaaaatgtttcagcaaagtcaatcgaatccgcaaatttatattcaaaatattctaaattggtataagcaggaaaagtttatttacacgcttagcccaggaacactcggcaataatcgcatagatgcgtttttatttcagtctaaacaaggtttctgtgaacactatgcatctagctttgttatgttgatgcgttatgcgggcattcctgcacgtgttgtcacaggctatcaaggtggtgagttggcacctgatggtcaaagttgggaagtgcgccagcttgatgcgcatgcttggacagaagtgtatcaagatggacaatggcatcgtattgatccaacggcaatgattgcaccaatgcgtttgaatcaaggcatgcaaaatatgatgcgtgataattctgcaatttttggtgatgcaacatattcaaatttacggttacaacagttatctgtactaagaacattgagaatttggactgattacgccagctatcaatggcaaagtaaggttgttggctatgatgcagataagcaaaatagttggatgaaaaaattagggttagattcatcgtatagttatgggcttgtgcttatattcggtattttaggcttattggctgtatattggggaataagcaaattttatcatcgtcaacaattgtcagcatttgaacagatcatgttaaattttaatcaaaatctagagcctgattatcaaaaagcgcaatctgagacctttcaacaatggatgaagcgtttatctcaacatacagggcagcaggattgttttgaacaagccaatcaaattttccaaaatatcgtttatttaccgaataaaaatcagcaagatattcaaaaatttaagtttttgctcaaagaatgtgctgacgcattaaagcaaagaaaataa

SEQ ID NO: 62803 - DNA, 918 bp, Acinetobacter baumannii
atgccacaattaaaagttaaatcaacgaatcaagtcttagatcatgttgatacacttggacgatgggatcaaaaatatgtacaaatatcgtcaggaaaatttgaaggctcaattacggaaatagaagtcgaaggtttaaatattttccgtgaaaaaatgaacatgtctgtgcaacaaatgacttcaccaccacccgatacatttgcggtttcagtgtcactcaatcagtgtaaattagaatatttagactggcggaaaagcctgcaaaatggtcaaggtttaatgaattttaaatcaaaatatcatttattaaccaatcttagttcagaccttctagtccttgatatttgccaaaataagttaaatgaacgtgccgaaaaattaggatttatagatttgcctaaaaaaaatctaggcattcatttaacacaagattgtatagatacagctttacaattacttgaaggtgatgatttagatgagcagttttattcgcaagcaagtcggcaaatcttagatgaaattttattgtcattaaatgcacctatcgagccgaataaaattaattactggaaatcagatcgaaagaagatcgtgaatgatgcgtgttatggtgctttggaatctggtgtgagttcaatgaatttagaatcattatgtcagttctcaaatgtaggcgtcagaattttgcagttagcattcaaagaagttcttggaatttcaccgttaaaatggttaaaaattgcgaaattgaatcaagtgagaaagcaattattaacatcgaatgatttaaaaataacagacatcgccttagatcatgatttcaatcactttgggcgcttttcagcggaatataagcaactgtttttagaatatcccagccaaacagcgagagatttagcaaaatcattaaagtga

SEQ ID NO: 62804 - DNA, 1155 bp, Acinetobacter baumannii
atgaacaaatatttcttaataggcatctttccactcatatcaagtctaagtgcttttgcacaagatctcgataaaacagccacaaagaatgagaatttaacaatatcaggctttgtcagagccaagtacgagcttaaagactggaccaagaatgatcaaaagctgacatttgatgctgtaaaattaaacattaattatcaaaaagatgatgtgttttcgggtttggaatatcgctgctatcaattcagtaaattatgtgatttttcagctttggtcgatgcctatgtcggttataatttcaatgcacaaaatacacttaaattcgggattcaacctgtcatttttggtccaagccgtttttgggaaactaattattatggtggcatcatttcccaagtgggcttagccgattttcacaactttggtttaaattattcacttaacttcttggataacaataatttaaatttgggatattactatacggatgctggaaactattttggtcatagccaagattcagcaaggtatacatccaattttgtccaatctgaaccgaatgacgatattcaaatgaaaatgagtgaaaaaaatatgttaagtctttcactcgaccgaaaaatagaattcggtgataaaaatagtaaagctgttatcggtgcttcttatctaaggtctgaattaaaagatcaattttcacatcaagacggtacacgtcaagcgtggtctgcatttagtcatgtcaattataaaaacttagcgctgattttgacggtcggtcagcaaaaaataagtgactttaacactgatgacttagttatgggttcgtttgatgatacgtattatgtggcaaatgatggtgacttttatacattggatttgaattatcaatttggtcaattctatatgtttgatcatgtcaatatttatggaatgctaagtaaatatgacaagaaaaacaccaataaaaacaactataaagattccagtcgaaatgtcttaggtgtttcatttgtaaaggataaatttgagatcgcagctgaacaagtctttggaaaaaatgatccctttattggtggtggaaaatatgatcttgccaatggtgaaggctcaaaaggtgaactgacgaaacttaacttcttgtaccatttttaa

SEQ ID NO: 62805 - DNA, 1407 bp, Acinetobacter baumannii
atgaattcacaactacaaaattgtatttcaatcaatgaacgtgcaaataattttgaagaactagataaaaaagttcaatttcacccttttaccgatgctaaagccaaccttgagcaaggtggattcattattgaaagaggtgaaggtgtttatgtctatgatatttacggtaaaaaatatttagaaggtatggcagggctgtggagtgttgctgttggctttaataatcagcgcttaattaacgctgctgtaaaacagttgaatactttgcctttctatcatcaatttcaacataaagcggtattaccaagtattgaactttcagaaaaattaattgaaatgtcaccagtgccaatgagtaaagcctttttggcaaactctggttctgaagccaatgatactgcgattaaattggtttggtattaccaaaatgcaaaagggaatactcaaaagaaaaaaattatttctcgaaaaaatgcatatcacggaattactactgttgcatcaagtttgacaggtattcctaccattcataaaggtttcgatttaccactaaaaggttttcatcatctaacatgccctaatttttaccgtgaggctttagaaggtgaaacggttgagcagtttgttgatcgtttagcacaagagtttgaagatttgatccttgcggaaggtcctgaaacgattgcggcatttatcggtgagcctgtgatgggtgcaggtggtgtcatcgtcccaccaaaaaattattgggaaaaaattcaagccatttgtaaacgctatgacattctggtgattgcagatgaagttatttgtggctttggacgtacagggcatatgttcggctctgaaacattcaatatcaaacccgatatcttggtggtttctaagcaactttcatcatcatatcaaccgatttcagcgttgatgatcaatgaagaaattttcaagcatgttgctgaacaaacggctgtatatggtgcatttgcacatggctttacaggtggtggtcatcctgttgcagcagctgtggcattagaaaatttaaaaatcatcgaagaagaaggattggtagagcgagcttgtgttgcaggtgagcgtttatttaacaatttaaaagctttagaagatcatcctttggtcggtgaaattcgtggtgttggactgatcgcagggattgaattagtcgattgcaaaaccacgaaagcaccatttgaaaccgctggaaaattagggcgttatttctgtgcacgtgcgcatgaacatggcttaattattcgaaatattggtgatgtgattgccttatgccctcctttaattatttcagaagctgagattgatgaattggtcactaatttacaaaaagcactgaacgatacgtataactggcgtcaatctttgtcataa

SEQ ID NO: 62806 - DNA, 1413 bp, Acinetobacter baumannii
atgagtattattgatgaaaaagccggtgatttaaaaaaagggttaaagtctagacatatcacgatgatgtcgattgcaggggtgattggcgcaacgctttttgtgggttctggtagcgtgattcacagtgctggacctgctgcaattcttgcctatattttgggcggtgttattcttttattgattatgcgtatgctcggtgagatggcggttgctaaaccagatacgggttcattttcaacatatgcagataaggcaattggacgttgggcaggctttaccatcggttggatgtattggctgttttggggcaccgttatggcttgggaagcctttgttgctgggaatattttaaatatgtttttccccgcaattagctccaattgttttgtcctgattgtcacgctattgcttttagtagtgaattttttcaatgtaaaaagttatggtgaatttgagttctggtttgcactgatcaaagtaattgcaatcgtgagctttattgcactcggctttttagtggtctttaatatttaccatattgacgtgccacatggtctaagtaactttactgcacaaggttttatgccgaatggaatcgcgcctgtattcggtgctgtattgggcgttatgtttgctttcgtgggtgctgaaattgcaacgattgctgcatctgaaacagataatcctgcacgtgaaatcaagaaaaccattaaaactatcgtttggcgtatttgtattttctatatcggttcaattttctttttaatttgtattgtgccttggaatgatcctttactaggtcaatctggttatggtgcatatcgtcgagcattagaaatcattggtattcctggtgctcaaactttggtgaatatcgtggttttaacatcggtgagtagctgtttgatttctgcacattatgcaggttctcggatgcttcattcacttgctttacgtggtgatgcaccagcaatatttggaaagaccacacagaagacaggtgttcctttagctgcggtactggcgaccagtattattgcagttacattttctattattaacttaaaccctgcattttcatcaaaagatatgttaatcacattgatgaatttaactggtgcgatcggcttattgatttacttagtcattgcttgctctcagttgaaaatgcgtaagcaattggaagcgaaaggcgcagaaattgaaattaaaatgtggctttatccatggctgacttgggctgtgattattttcattattctctttctgatcggaatgttatttgttgaagaatatcgcttattagtcggttctactgcgatcacaatggcagtgattgcaatgattgggattgcggtacaaataaaatctaaggttgctaaacatcctgttttaaagaagctttcataa

SEQ ID NO: 62807 - DNA, 1431 bp, Acinetobacter baumannii
atgtataccaatacaaagctttatattgacggttcttggaaagcattaacaccagatcaaacaatccctgtactaaatcctgcaaatgagtctgttattggtgaagtatcgaaagcgacattggctgagttggaagatgcagtaaaaagtgcggaaaatggtttcaagacttggaaagcaacgccagcaaatgagcgagcaaaaattttaaataaaactgcggatctattacgggatcgagtggaaaatattgcgcaaatgatgactttggagcagggaaagcccgttaaacaggctaaaattgaggttttagctgctgcagatattattgactggtttgcagctgaagctgtacgggcttatgggcaagtgattccttcgcggaatcagcaggttttgtcttatacattgaaagtacctgttggggtggtggctgcttttaccccttggaatttcccaatcaatcaaatagtacggaaaatctcagcagctttagctgcaggttgttcaatcattgtgaaaggtccagaagaaacaccggcatcgcctgcacaattggtacaagcttttcatgatgcagggcttccagcaggcgtgatcaatttggtatttggtaatccacaagagatttcgagttacttgattgcgcatgaaaaagtgaaaaaaatatcctttacaggatctactccgatcggcaagcaacttgcttcactggcgggtttacatatgaaaaaagtgaccatggagctgggtggacatgcgcctgtcatcatttttaaagatgctgatatagataaagcactgactgaattgattgcattcaaattcagaaatgcagggcaagtgtgtatttcaccgacccgtgttttaattgaaaaagaaatttatgaagatgttgtagaaaaaattgcacaacgagttcgtcaattaaaagttggaaatggtttagatgaaggtattgatattggcccagtgattcatagtaaagcttatgccaatttaaaaaaaattgtcgatgatgccgtacaacagggtgcgcaattggtttgtggtggcgagcaaatgcaaggtaagggatatttctttagtccaactgtattgaaagatgtaccactgagtgcttcatgtatgaataatgaaccatttggacctgtcttaatttgtaattctttcgatcattatgatgaagtgattgctgaagccaatcgtttaccgtttgggcttgcagcatatgcatatagtcaaaataacaagacgtgtatcgagcttggacgtgatatcgaatgcggtatgttgtcgattaatcatattggattatcatatccagaacttccgtttggtggtattaaagattcgggctatggtacagagggtggtagtgaagcaatcaatgcttatttcgatacgagattggtgacggtctctgcataa

SEQ ID NO: 62808 - DNA, 273 bp, Acinetobacter baumannii
atgctcagtattacagctcaattattagatgttcaaactggtgacttttgtagtctagtttttaaaggaaccaaatgggattttggtttacaacaagaagttccagcttctgtacgtgttgcagtttccaaagatcatctttatttagttccgagttatcaggaagctaaagggaaaatggtttctgtagaagttaaagaaggtttaacaaagtcaaagcagatctggtttagaacaagtggaacaggtcaaatagttctacaggatgattaa

SEQ ID NO: 62809 - DNA, 156 bp, Acinetobacter baumannii
atgagttgcggtttttcaaaggcttatttgcaaaaccttgattcagaatcaaaaaataacgttattccattcgttcagctcgtcaaaatcgattttcagaatcaagtaccagattggtatcaagaacctgaatcacgctttgctaaggtaggttaa

SEQ ID NO: 62810 - DNA, 765 bp, Acinetobacter baumannii
atgattaataattatttttatttattaattaaaatggatacgaaaagctcagacagcacttcgacaagtatatttactccttatcaagaaattgcggataaatatttaaggacaatgagtattactactgatgcgagatttgcagctgcaaggagattgaaacatataaatgacatatgcttcatcaccaccactattgcatctttaggattgatattaattccactacttgatcttgctggtattaataaatttttttccagtataactttgacaattattcaagtatttcttgcagtctgtgttttagtatattcaactgcaatagccactgctaatttccaagttcgaagtaaagagtttttgcaatgcggagataggattaaaaagatcattgatgaatttaaggttcatttagtagatgtaagacataaaaatgaaaagccaaatcttgaaaaatatatgaatgagtaccgaaaagtgctagatggatttgagaatcatgatgacgttgactataagtcagcatattatgagtatgaaaataaaagatatatggcattaccagaatataaaaaagctctatatggtaaaccaaaaaaaccaaagaaattttggatttacattccatcttgcttaattgtaattttagaggttttaattatatctagtatgttgacatcatatttttattatgaggataaagtgaatatgtatttacctgcgaaagtgaaaattgttggtgaattgactaattcaaattaa

SEQ ID NO: 62811 - DNA, 237 bp, Acinetobacter baumannii
ttgaaggctccggccattgcttcccaagcagacatcatgatgcctttgatagcttcagctgcttttaaacctaaacgtgctaaaccacctgccgctgtaacgctagtacgtgttgcttcacctgcaattgttgcccctgtttgtgcagcttggccagaagcttcagctgccgtttccgctcctacaaagccgagttttcgagccaatttaattgcttggattcttagccagccttga

SEQ ID NO: 62812 - DNA, 456 bp, Acinetobacter baumannii
gtggatctaacgccgttttttcgtggtgctgatattcaggatgagatcgatactcaaattgctgcaaacgtctctttgattaagtccattccaagtcagtacactgataagcttgaagcactggttatgaatgccttgcagacagggcagaccaatgaggacttggcacaggaaattaaaaaactagggcatagcacggactatcgtgcgcgcttaattgcttctgatcagatgggtaaaattaatggtcagatcaataaggcacgtcagatatctatgggtgttgaaacttatgtatggcagtcagcaaaagatgagcgtgtacgaacagatcatcggattaaaaatggtcaaacattccgttgggatgagccacctacaggcggtcatccaggtcaaccagttcgatgccgatgtacggcgttgccaaactatgaggatatcttaattgactga

SEQ ID NO: 62813 - DNA, 1188 bp, Acinetobacter baumannii
atgaaattcatttaccaactcaaaattggtgactttgcaccaagcgaaagtacacgctcatttactcaagaagggtatctgaaatgcgtcaacgtacgcttggccaaagcacctcaagtccgtcagtactacgcttatgaatttccaaatctggaaggctattcagcggatcaggtcatcaatgtctatgtggcagcagaggatctattcaaaccggaagtgatcaagagctttgacggcgtagatgcaacggactatcacccacctaaaaatgaaatcaatgcttccaactggaaggactaccacattggcgattgtgagaatgtgcgccaagagggtgaattcatgctgggtgatctgatcatcaaggatcagaacagtattaatgctattcagaacaatgagcgtgttgagatctcattgggctacgcggctgatctcgtccttgaacaaggcacggcacctgatggtacgccgtatcaagccaaatttatcaattttaaaggcaatcacgtggcgctggtgaaatacggtcgctgtggcggtgattgtcgcgtcggtgaccaaaacccaaacccacaagagggaaaaacaatggaagtagttgtaaacggtattcgctttgacattggcgataacaagcctttagcggatgccttaaaaatccagcaagaccagcttgaaaacttaaaagcagcaaaactcaaagtcggtgataaacaatttgccatcggtgatgaattgccagctgtacaagcagtggttaatacattgcagactgaaaatgctgaactgaagcaaaaagtcggtgatcttgaaaaaaaccaaatcacacctgaaaagcttgatcaggtcgtcgctgaacgtgcgtcagtggttgcggatgccgttgcattggtaccaggtatcaaaactgaaggctgttcatgtgagcaaatcaaacgtgatgtgattgcagccaaagcaggtgacacattggtgactgctgtactcggtggtgtctccgtgggtgatgctaagcctgaacagatcgacacggtattccgtgcactgtcagcagtgaagtcgaccacaccaggcaatgcagtcggtgatgcattacatcaacagcaacaacagcaaaacaacaatcaggaccctaaagaaaataagggttatgacaagtctgctgcatacaaaacaatttaa

SEQ ID NO: 62814 - DNA, 471 bp, Acinetobacter baumannii
atggttcagcaattaaatgcggtagtcggtcagcgtggccgtttaactgctaaagaagttgtactgtcattaccgctttcaggtctgactttagtcaatgacggtgatgtggttgtccgcacgactgatggcaaatctgtaacggctgtggcaggtgctacacctacacgtttcggtgttgtggtgcgccacggcgtaggtaagtccggtaaaaccactgccggcaaagaagcctataaagccgctgatatggtgccagtgatgtttgaaggtgcgatttgggtcaagcctacagcgccaatcactgacattactgctgcggtttacgtaaaaactgcaaacggtaccacagcagcgccgttgggttctttgtcgagctcagcaactgacggaacagtattaccaggtgcagcatgggaaaccgtgacaggtgccgatggtttagcccttcttaatcttcgtggagcttaa

SEQ ID NO: 62815 - DNA, 996 bp, Acinetobacter baumannii
atgagcaaattagcaaaaatgaaagcgcgtttaacgccgatttcacatgccattcaggcacaagttggcgatgcgttcaacatggatgcattggcacagctcttcgtaaagatcgaagaacaaaacgaaattacaccacagcttgcacaggtccttgactacgccaagttcatcccagtgaccaatgtaaatgcggtttatggtggtggtgaaatcctgtctcgtaaaaaaggcgtgggtatcggcgaagactatgctggtacaggtgatgatattccgcttgcagaagttgaatacgatactgtaagtctaccagtgaaagtcggtgtgattggctaccaatattcagtggttgaattggcgaccgcacagcaaatgaacctcacgcttgaagcggataaagttcaggctgcaaatttggcagctgaaaagcacatgtcgaatgtggcttggtatggttacaccaaagcgaatgccagtggacagcttgaacaggtgaatggcttcttaagccaaacaggcgtcactatcgtgacaggtcagcatgattgggctacggcgaccattgaagaggttttatccgacttcaataactcattggctgattcgtcagatttgtttgatggtgattcttcaattgagcctgacacttacttaatggcatcagcgcagtacactcacttatcgacacgtgtcgtgccagattcaggtggtaaaacatttctgaagtacattgaagaaaacaatatcttctcaactcaaggcaaaccattagccatccgtggatctggccgtggtaatggtaagggtaccgcaagtgctgaccgttcgatcatctaccgccgtgatccatcatgtatccagttcaaaggtaatagcgttgagttcttgacggcgcaaccgaaaggcttggatgtgcttgtacctggtcactacaaataccagggcgtttggctgaagcgtgttgattcgcttcgttaccttgaccatgcataa

SEQ ID NO: 62816 - DNA, 381 bp, Acinetobacter baumannii
atggctaaatattcatataaatacagcggctctaatgccgcttttgtttttgcgggtgtggcaactttaccaacaggcatcgccgtattacttgaagctgaccaacacaaggcacttcaaaaaaataagttcgctaagcatttgattgatgtgggtgagctgaatattgaagaaattgctgaaccaaagtctgcttcaagtggtcgtggaaagccaaatcaaaacaaaattgacgatggcaaaggcaagggtgatgaatccaaaggtggtgagctcacgattgatgaggtacgtaaagcactgactgatcttgaaattaccttctctgaagaagaaacccttgagcagctgcaagctaaacttactcaagccactgaataa

SEQ ID NO: 62817 - DNA, 384 bp, Acinetobacter baumannii
atggacccacaagcttttaaattgaagtttaagtacgacacggcgctgatgaatctaccggatgcagaaattgcagatgcgttagaggaagcggatctcgttgtgaagtcacttgaatttggtgatctgaaagaacgtgctgtgggtctatatgcagcacacattctcaaggttgcactcaaatcaaagtcaggtaacagcttttcagatgcctcgagtatgaccattgcaggtcagagtgtgagcttttcacgttctggtaccgatgcgttttataaccaaagcatttatggccagcgttatctggcattaaaaaattcaattccaatcggtaatgatggtactaatcccaatcgtttgggtgttggtgctttcgttgtttag

SEQ ID NO: 62818 - DNA, 195 bp, Acinetobacter baumannii
atgtcatttaagtatcaagcgcctgaaaatttcaaagcgacttcgcttgaaattgcaggcaccacatacaaggttgaaaaaggtgtgattgagtcagatgctgacattgcgcacatcttggcaccgcatggttttaaacgtgcggtacctgaaaccaaagcagaacctaaaaaggaaactgctactgcaaagtag

SEQ ID NO: 62819 - DNA, 483 bp, Acinetobacter baumannii
atgagtgattaccgtgttgatgctgatgttgattttaacgaggttaatgaacgtgtccgcttcgaaatacggcatacggtaaatgcactcacacttaaacttcagcgcacaattcaagaagacatgctgacaggtcagcgtttgaatgtgcagtctggacgtttaagaggttccgtttcatccaaggtggaagaggataaggactggatcgaggggacagtcggtgcgggtggtgctttggtaccgtatgcctttgctcatgaatttggtttaaaaggtgcgatggccattaaggcgcatttgcgaacgatcaagaaagtctttggtcagccgattacaccacgtcaaatcatgatcaaagcccattctcgtaaagtcgatatgaaagagcgccgttttatgcgtgattcattggatgaggtggcgaagattgtgccgaagaatattgatgctgcaattgaaaggggattaagcagtgaatag

SEQ ID NO: 62820 - DNA, 441 bp, Acinetobacter baumannii
gtgaatagtgaagccatttaccaggcattgtttaattgcttgtcgggcattgagggggttaaaaccacaagtcgacgcttaaagcacttcaataacgttgcacctgatgagcgtccagccttgttcgtgacgcaaggtaatcaaaccgaagtaccagtgaagggcttggatgctaaggttgaacttgaagcagaagtatacgtttacattcatgaatcagatccatccataccgccatcggtacggttgaatcagatgattgatcaaatgcgtgccaagcttgcaccggacaatcctgatatttgcgaataccaaaccttagggggcttggtcgaacattgctggatcgagggtacgatcgaagtttttgaagcagttgaaaacatgcttgatgaccaagggattgccattattccgatacggatccttaccactacctaa

SEQ ID NO: 62821 - DNA, 762 bp, Acinetobacter baumannii
atggctcaatatttatttggtgccggtaaaatctttgccacaccattacaggatgtgcacggtaatccaatcaccaatggcacaccagttgaagtgggcgtactacagtcaacgtcagttgatatcagttatgacttaaaagaactctatggtcgtggtcaattcgccgtagatgctgcacgcggtaaaggttcgattaagtgtaaagcgacaatgggtcgtatcaacggcgcattgttgaattccattttctttggtggcgttgtcactgaaggtggtattactgcagttgcacaaaccatcaacggtgaagtggttacagcgtcagtaacaccagtcgttccgaatagcggtacattcgtgaaagatttaggcgtgacagatgccaaagctattccattaaagcgtgtggtgagtgcaccggttgcaggtcaatacagtgtggatgaagcgacaggtgtttatacctttgcatctgccgatgtgggtaaaacggtatttatcagctttaaatacacagcgacggtggcaggtgccaagtcaggtgtcgtaagcaacttggatatgggttatacgcctgaattcagtgttgatctgttccgtgactacaaaggtaaattctttggtatggaattcttccgctgtgtcagcaataagcttgcgttcagttcaaaacaggatgattacgatctacctgagtttgaattccagccaatggccgatgatttaggccgtgtcttcaaatggactacttcggagtaa

SEQ ID NO: 62822 - DNA, 699 bp, Acinetobacter baumannii
atgaaaaaagtattaggggtaagtttgttggcggtggctttagtggcatgcgctacaccatcatataactataagccgcaagtcactcatattagtacaccacccttaaatcaggtagcaacagcttatattggagagtcactacttgagcaagggaaagtaattcaagctgatggaataaaacttaacgatcggcagatgctagataaagcaaagatggctctttctgctggcacatatataaaaattggcgaaaatgaaaaacaagaattttatatgccacatagcggcagtgactcaggaaaggtagagaaagtttcaatgatgtcatttgacccaagtggtttacagtctatcgttgttgaaaaaaataccaacaaagtttctctaatatctgcaaatgtaaaaagttacgatggcgatcttattgattttacaaaaacaaaaataacaactaaggatacaaactcatttcagcaaactttaatttacaacggcaaagttggaaataaaatcaatattgggtatcgtgaattttcaggcgacctagcacgtccggcttttgcaaatagtgtagagtatgacctgaatgattcaaaaattattggatataagggggctaggttggaagtaatttctgccgataatcaaagtataaaatataaagtcctacaaaacttcaaccaagctattcagtaa

SEQ ID NO: 62823 - DNA, 159 bp, Acinetobacter baumannii
atggctttaaatgcacccgccatcgcttcccaggcatacatcatgatggacttgatcgcttcacccgctttgatggccaaacgcgctaaggcacctgtactggttaccatggtcttggtcatttcacctgcgactacagcgccagtttgtgcagcttga

SEQ ID NO: 62824 - DNA, 561 bp, Acinetobacter baumannii; identical to SEQ ID NO: 5006

SEQ ID NO: 62825 - DNA, 1578 bp, Acinetobacter baumannii
atgcgccagaatttaccagtgacgggtcgaaacttagaactcccaaaagatgccaatattctttcgactacctcccctcaaagccatatcacgtacgttaatcctgacttcattaaaatcagtggtttcactgaggaagaactattaggccagcctcacaacatcgtaagacacccagatatgccgcctgctgcatttgagcatatgtggagtacattaaaatctggccgctcatggatggggctagtaaaaaatcgctgtaaaaatggcgaccactattgggtaagtgcttatgtaacgccaatagctaagaatggttcgattgttgaataccagtctgtaaggaccaagcctgaacctgagcaggttttggctgcggaaaaattatatgctcaattgagaagcgggaaggccgcgaggccgaaattggctgctagcttttccgtgaaaatactcttgctcatatggggtagtattatatcaagcgcaatggctgccggcatgcttactgatacatcaataagcagcttattgttagccactttaatgtcaggaagcttaagctctgttagtgttttggctattctctctcctcttggaagactggttgaaagagccaggaatatttccaataacccattaagtcaatccctctacactgggcgcaccgatgagtttggccaaatagagtttgctttacgaatgatgcaagctgaaacaggcgccatagtaggtcgcataggtgatgcatcaaatcggcttagcgaacacacccgaggcctactaaaggatattgagtcaagcaatgtacttacagttgagcagcaggcagagacagatcaaatagcaacggcagtaaaccaaatggtggcaagcattcaagaggttgcgagcaatgcacagcatgctgcagatgcggccggaagagcagacactgagacggcatctggccagcgtctggtagcccacacaagccagtcaatcactgcccttgaaggtgaaattaggcaagccactcaggttattcatgagcttgaaggtcaaagtaacgagatatcaaaagttcttgacgttatacgagggatcgccgagcaaacgaatttgttggcactcaacgcagcaattgaggccgcgcgtgctggtgagcaggggcgtggttttgctgttgtcgccgatgaggttcgcagtcttgctgctcgcacacagcaatcgacaacggatattcaaagcatgatcagcgctctacaagagcgagcgcaatccgctgttacagtcatggagcaaagtagtcggcaagcgcacacgagtgtagctcacgcagaggaagcagctacagctcttgatggaattggccaacgcgttaacgaaattaccgacatgaacgcgcaaatagcgactgcggtcgagcagcagggagcagtaagtgaagacataaaccgcagtattatcaatatacgcgatgctgctgataccaatgtacagaccgggcagaataatttgcaaagtgcgaaatctgtcgctcagttaactagcgctctgagcgaactggcaaaacagttttgggaaaaacgaggataa

SEQ ID NO: 62826 - DNA, 249 bp, Acinetobacter baumannii; identical to SEQ ID NO: 50340

SEQ ID NO: 62827 - DNA, 273 bp, Acinetobacter baumannii
  misc_feature (255)..(264): n is a, c, g, or t
atgcaaataacgattcgtggacatcatttagcaattacaccagctatagaagaaaatattaaagcaaaatttaatcagttaacgaaacatcttgatcaggtgaatagtatgcagattaagttaacgaaagatcatcagattgataagcgctcacataagggtagctctaatcatgtggctgaagcgatagttcgattacctggaattgagctatttgctcaagcaacagcggatgatatgtatacttcaataaannnnnnnnnngaggcttga

SEQ ID NO: 62828 - DNA, 231 bp, Acinetobacter baumannii; identical to SEQ ID NO: 47478

SEQ ID NO: 62829 - DNA, 1308 bp, Acinetobacter baumannii
atgaacattacaggcaataccgctcaagatattcaggataatatccgtacactgattaaagagggacagcttcaagagggcgactttttaccgagtgtacgggaattagctgaacagctcggtgttaatcgtaatacagttgcggctgcctataagaatctagttgcgatggggattgtgatctccaaaggacgtttagggacacaggttaaatcctatcaatcttcacgtctattagaaggctttcaacccctattacaaggaactattgatttagcacatggcaatccaaaacgtgaattgttgccttctctcaagcacattaatttagctaattttaactgtgcactctatggggaaaatatttaccatcctgaactattaaaaatcacgcaggaaaaaatatttgccgatattccacagaactttagcattgaatttacttatggtgcagtggatgccatcgaaaggattctagctacctacttggtttcatcagatatgattgcggtagaacagcctggctttatcaccagtatttctgccattgaacaacaacagtttaaaatgtatccctttacagtcagtgagcatggttttgatctcaatgaattgctgcaagcattacaggcaaatgtgcaagcagtaattattacgccacgctcgcagaatccgacaggttatagtctggacacagtacaggctgaaaaaatttataatatccttgaagactatccgcatgtactggtcattgtcgatgatcatttctcattattagctcaggctcaataccagcatattattcccccctcaacaaagcactgggcactcattcgttcagtatcgaaatatttatctcctgattttcgttttgcatttgtatgttgcgactctgaaacttcagaaaaactgcatcttaaactaaatgcaggttcaacatgggtcagtcatattattcaggaaatggtttatcaactattcagctcagaacagttccctgaaacactacaaactgccaaatcttactatcaacaacaaaatcaaaaatttgttcattatttacaaaagtttagcatcccctgtgcaacccattatgatgggctaaatgtctggttatcactcccttatgcagataaaacgactcaaattctacggcagcgaggctggttagtgcgttcaggacaagactttagagtgaatcaggatatatcagcaatcagagtcagcacctcagacatgacagaaacacagatgcaagaattttgtcagcagctacaacaaatttatgaggtggtggttaatttttag

SEQ ID NO: 62830 - DNA, 699 bp, Acinetobacter baumannii
atgaaaacgatttatgcaattcaaagtttggcatttgaggacttgggaagttttgttccagtcctgaaagatttaggctatcaaattcaatatttacagcttggtgttgatgtactgaatgaggcattggcatcgaaacaacctgtcattgtattaggcggtcctattggcgtatatgaaactgaaacttatccctacttaacagattttattgcagcactgactcaacgtttaaaaaagaattatccaactttaggcatttgtctgggtgcacaattgattgccactgctttgggtgcagaggtctacaagggacatgtcaaggaaattggctggagtcgtttagtcctcaataatcagggcttagcctcaccattaagacatctggaaaatgtgcatgtgctacattggcatggcgatacatttgatattcccgaatctgcaaagcgtttagcaggttcaatgtattacccaaatcaggcattttctgtgggtttaaatattctggcactacagttccatgccgaagttgatccacatacttttgaacgctggctgatcggacacacggctgaattaaatcaggcacaggttgatattttaaccttacgccaagagaatacatactatggcaaaccattacaggaaaaagcgaacctgttactccgtgactggctcagcaatttaatccctgtataa

SEQ ID NO: 62831 - DNA, 1188 bp, Acinetobacter baumannii
atgagttatttaatgccgatttatcaacctttggcaatcgagttccagcgtggagagggttgttatttatgggacacacaggataaatgttatttcgatgccatttcaggcgttggcgtcacattactaggacatgtccatccagtgattcatgcagaaatcgtggcacagtcacaaacctttttgcatctttccaatctgtttaaacatggttggaacgaacgcctggcagaaaaattagcagagattacaggcttaacacaggcattcttctgtaactctgggacagaagccaatgaagctgcgattaaaatcgctcgtgcctatggtcatcatcggggtatacaacggcctaaaattattgtgatgcaaaatgcctttcatggtcgaacacttggggcgttatctgcaacagcaaaaccagcatatcgagaggcattcggacctttattagaaggctttgagtttgtaccttttcacgatctggcggctattgaacattatcaggatgatcccgatgtggttgctgtcttacttgaaccaattcagggtgaagcagggattaatattgcctcaccactatacttaaagcaattaagaaaattatgtgaccaacaacactggttgctcatcctggatgaaatccagtgtggacttgggcgtacaggaacatggtttttctatcaacaggctggaatctgtcccgatattttaactattgccaaaggtttagctaatggtgttccgattggtgcctgtctaacccacgaaaaattggggcatttattgcaatcaggtttacatggttcaacctttggagggaatccattggcatgtcgagttgcttataccgttctggatttactggaaaaacagtatttacagactgttaatgacaggggttataagctactggatttattacagtccaaattaacaggactgaaaaacattcaatcagtgcgtggtgcaggtttaatgattggaattgaactgattcatcctgttgccaatattcctcaattggcaagtgaaaaattcggggtattgctaaatgtgacacaaggcaaagtcattcgcttattaccacctctgattatgagtgatgaccaagttgaatatttagcccaacaaatttcgctgttattaaaagagttaagtcagaattatgtggagccacagccatga

SEQ ID NO: 62832 - DNA, 261 bp, Acinetobacter baumannii
atgagccaaagctatcaactgacaatctatcagcatggcaagttaatgggtaattttcagaccagctccttggagccgttgaaagacatgaagaccttagtggaatatttacaaccccatgatgatttaagttttgaactttatcaggtcattgaagatacacgatttttaatgcaaaaagatggtgcaatgcaattgctgggtagcaagcatctttatcaaccttgttctatggatattttgaaagagctaaccacatga

SEQ ID NO: 62833 - DNA, 741 bp, Acinetobacter baumannii
atgagccaatataatacgccacatagtcttgttgaattaaaagagaatattcaagaaattcagcaacaggttgatgctgtttgccaaagaataggacgtagtccaacagaagttcgcttattgcctgtgaccaagaccttacctgctgagcgagttgaacaagcctatcagttgggtttccactgctttggtgaaaacaaggtattagaggccaaaggtaaatatgaagccttgcagcatttaccaattcattggatcttaattggacatctacagagtaataaagtgaagtatgtagcgaagtttattgatgagttccatgctctagacagtattaaactggcagaaaaactgaaccatcgtttagtagaggttcagcgaatacttcctgtatttattcaagttaatacttccaatgaacagagtaaattcggggtaaaaccagaacaggctttaactcttattgaacaatgccaacaatttccacaattaaaaatcattggcttaatgaccctcgctattcatagccaagaccctactgaagtcagacgttgttttcaaactttacgtttattacgggatgatattcaaaaaacttatcccgacatccagcgtttatcgatgggtatgtcaggggattttgagattgccattgaagaaggcgcaaccgatattcgagttggacaggcgatttttggagcaagggctttacctgataactattactggtcggagcaataa

SEQ ID NO: 62834 - DNA, 456 bp, Acinetobacter baumannii
atgtatattttaactattgcaacacaatgggcgattgtatttagtggtatttttttatgggtggggatgttgactggggtttggaaatattaccagattcgacataccgaacgagcaagagcgcattactatgtcgatattgcccatcgcagtagcttactgtatgcagccgcaagcttaatcctggcagcacttagccattttacggtgttatctcatttggttgccttgctttgtgtactggcaaatttgttcttttttacctttgccattctgtcctatattttgcatggtcttcttcaagacaccaccaatcaatttaaacaacctcatcaacttggacgctggtcacttcccaactggatgatgacctttgcaatggtcggtttaattgttgcagaactcggggcaacaactattttattactgggaacaatttttaaatttctgaattga

SEQ ID NO: 62835 - DNA, 885 bp, Acinetobacter baumannii
atgaaattagaaggcatcattgcttatccgataactccctttaaagctgagaatcaggaagttgattttgacgccctgaccattaccctaaatgcactactggaacatcaatgtgatgcgattgcacctttaggcagtgctggtgaaagtgcttatctgtcttggcaggaatggcaacaggttgccgaaaaaagtattgaagtggtcaatcatcgtgtgcctgtaattttagggatttccgaactcaccaccacaatggcaattcagaaagccaaaaaggcagaagaattgggtgcagatgtgattatggtcatgccgatttcttactggaaactgacagatcaagaaatttatgattattatcagcaaatcgcagcagctactaaactgccaatgatggtctataacaaccctgccaccagtggcgtagatatgtcaccagaattgattgccaagatgttccaagagattgaaaacatttgtatggtcaaggacagtacgggtgatattcagcgtatgcacaaattccatgaacttacgcaaggaaaattaccattttataatggttgcaatcctctggcactggaagcattctgtgctggtgcaagcggttggtgtactgttgctccaaatctgttgggtaaattgccaaatcaactgtatcaggcagcgaaaaatggggatttagctctggcacaaagcctgttttataaacagcttcctttattacgttttatcgtacaaggtggtttaccaaaaaccattaaagcaggtttaaatgaactaggctttagtgtgggtgacccaagaaagccattacagaaagccaatccatctgaggtgaatcaattgaagtcattaatgaaaatggcaatggcaacttaa

SEQ ID NO: 62836 - DNA, 696 bp, Acinetobacter baumannii
atggaaactgcactacttgataagcaacagttgatgcaaaatgcccaacagagtatgcaacagctttttcaggatgaaggctacaccgatcaacaaaaacttgctttaacgtgtcgcatcttatttgagcatggtcatgattctggacttgctgggcaaattactagccgtaccgaaaaaggcaatacctttattacccaacgtttcggtttaggttttgatgagattaccgcagccaatctactggaagttgaccaagaccttaaacctttaaatggtgagggcatggcaaatcctgccaatcgttttcatacatggatttataaagaacatcctgaagtgaactgtattattcatacccacccaacgcatatcgctgccctatcgatgctgcgtgttcccttgattgtgtcacacatggacacttgtgccttatatgaagattgttcttttgtcagtgactggccaggtgtacctgttggtaatgaagaagggatttttatctcggcagcactaggtcaaaaacgtgcagttctactctcgcatcatggtcagttggtggcaggaaaaaccattgaggaagcctgtaatttagccattctgattgaacgtgcagcacgtttacagcttttggcaatggcagcaggacaagttcagcagattccacacgaacttgccaaagaagctcacgactag

SEQ ID NO: 62837 - DNA, 1440 bp, Acinetobacter baumannii
atgcaacaaccgtggaaaatgcgactacatcttgctgaacgtgaagaaaaaaccatttttcttaaactggcaaatcaaattattcaggaaattttgtctggtcgattaaggcaaggtacacgtttacagggttcacgtaccttagcagatgaactggggattaaccgaaaaactgtacaatcggtgtatgaagacttagaagcacaagggtggctagtatcaaaaccgagacaagggacttttgtttctgaacatttgcccgatctcaaacttgattcaccatatatcatgatgacatctgttcaacctcataccgaatcacacacctcacaggaagccattaagaatgatggtgttccagataccagactgattccctacgagctattttcccgtgcctatcgtcatgccctgattaaggtgactcgacagcaaattatgggttatggtgatccacaaggatgtcttgagttacgtcaagccttattgaatatgctgtcaatggaacgctttattcaaaccactctagagcatatctgcgtagttcgtggtagccaaatggggatatttcttgcggctcgtgtacttgccaaatcacaactgcaacgtcaggtcattgtggtggaacaatggtcttatccgccagcagtagaaacgtttttatccaatcattttcaaattattcatgttcgattagaccaacatggtctggacactgaccacctagtcaaaatattggaaaatcatgcggttgcagcagtatataccacgccacatcaccaatatccgaccactgtttccatgtcgatggataggcgattaaaacttctggaactgtctaagacctttgatttctatattattgaagatgattatgaccatgaatttcattatgacagccgtcctattccacctctaatcagcttgccatctgccgataaagttattcatattggttcactgtctaaggtttttgccccaagtttaagagtgggttatgtagtggcagatctaaatattatccacgccatgaaacaggatattttactcattgataaacagggcaatgcgattaccgaacttgcaatcgctgagttaatgcagcaaggtgaaatcaaacgacatacccgaaagatgcggaagatttatcaaagtcgtcgagattttgcagtcatgacctttcaacagatttttaaggataaagttgaaattactacacctgcgggtggaatggcattatgggtaaaatttaagctgtcttatcgcttggagtttgcagaaattcttaaacagctacatattgactctgaatatgaatttggttcagtatttcaagatatatcaaattatttccatatccgctttggttttgctgctttgagtgaagaagaaataacccacattgttcagatgttgtatcaggctcttttggagagatag

SEQ ID NO: 62838 - DNA, 165 bp, Acinetobacter baumannii
atgggcactgttgcaaagttagcgatgaggcagccttttgtcttattcaaaggccttacatttcaaaaactctgcttaccaggcgcatttcgcccaggggatcaccataataaaatgctgaggcctggcctttgcgtagtgcacgcatcacctcaatacctttga

SEQ ID NO: 62839 - DNA, 975 bp, Acinetobacter baumannii
  misc_feature (857)..(866): n is a, c, g, or t
atgctagcactagagcctcaacatattcatatgaatcaacatgctgttgataaaacacatgcattaaagtgtctagtagatatattagaaaaagatgggttagttacgcctgaatatataacgggactcatcaatcgtgaacaacaaagcgcgacttatttaggccaaggcattgccattccccacggtactcctcaatcacgtgaatatattttaaaaacaggtatccgcttagcccattttcccgaaggtgtgatctgggatggagaaaataaaatttatttagctgtagtgattgcagcaaaatctgatgaacatttgcaagttttgcaaattcttactcgtgcattaatgcatgacgtcagcgaacaagtaaagaatgcttctaaacctgagcagattatcgaattactacaagctcagccattatctttagcgcttcatgaaaatcttattcaaaccgaaatcgacgcacaagatatcgaagatttattttgggcagcttctcaaacactcaaaaaacataattttgtaaaatgtggttttctaagctcacttgatccagaacaggccattcaactgcaagatcaaatctggtccatttctagcaatcactttgttcagcaaccagctattagcattactaaaccatcacaggctttagagctaaatggtaaaaagctgaacaccctcgtttgtatagcagccaatgaccaactcgataatgaaagatttaatcgtttaattgatattttatttaaccctgagcaagttgccgagctagataaaactcaaactccaaacgaaattgcaaaaattattggagctgacgttgttcctgactggcctcaacgttnnnnnnnnnncagtagtgctggcaaatgcacacggcttacatgcccgaccagctacacaccttgtcaatcttacaaaaacctttcaaggcgacatccaagttgcagtagacgatggtag

SEQ ID NO: 62840 - DNA, 198 bp, Acinetobacter baumannii; identical to SEQ ID NO: 50572

SEQ ID NO: 62841 - DNA, 486 bp, Acinetobacter baumannii
atggcggtaaaaaatcctaaaggtaatactggaaaacctagtaaccaactattttccccaggcggtgataataaaacacttcataaagtttcccttagcagttttaatatgagtgcttataagactaccttagaagactttaatatttttacaaaagcaactggacaaattgagagtacatataataaacgatatagtgcaagcattgctcataaaatagcaactggtatggcgtggcaacaagccaaagattattgccaatggcttggacaacaagtggatacacccatggatttacccattgaatcgcaatgggaatatgtagcccgaaataaaggacaatatgataactacaggcattcacatgacttacaaactgtcgcgaatattccggttataggtcaaacaccaccaaatcctttaggtttttacgatcttgttaccaataattatgaatggatgaatgattggtacgataaagagtaa

SEQ ID NO: 62842 - DNA, 531 bp, Acinetobacter baumannii
atgcttttcgatcaagttttacctgctcaagatgatccaattttgtcgttaatggaacgatataaaacggataaaaaccctaaaaaagtaaatttaggtattggctactattatgatcaacacggtatagttcctgaattgatgtgtatagaggaagcaaaatatagagtcaaactaatgcatcgtggtgttcaattatatttacctatggaagggctcaaattattcaatgaagcatccaaaaaattaattactggtattgatgacttagcagtattaaataatattgcgacgatccaaagtctgggcggttctggcgcattaaaaataggggcagattttctcaaaacatattatccagaatcttcagtgttcgtcagtaatccaacatgggaaaatcatatttctatttttaaaggtgctgggtttgatgttcaactttatccatactgggatagcgaaaactcaaaaattgatttttctaatatgaaaaattatttaaatcaatggctttgttgcacaaagatttga

SEQ ID NO: 62843 - DNA, 1470 bp, Acinetobacter baumannii
atgagtctaggtctaacagcattggagttagccagaatacaatttgctttcactgtctcttttcatattattttccctgcaacatcaattggtttagcctgtttccttgctttattagaatggaaatggctgaaaacacaagatccggtttataaagatttatttaaatactggattaaaatttttgccgttgctttcggtatgggggtagtttctggtgttgtgatgagctatcagtttggcactaactggagcgagttctcacgtgtcgcaggttcagtcactggtccattgctgacctatgaagtcttaagtgcttttttccttgaagcgggcttcctcggtattatgctatttggctggggacgagtcagtcccaaagcacacttttttgcaacattaatggtggcgattggcacctgcatttccatgttttggattttatcgtccaatagctggatgcaaacccctcaaggctttgcgattgaaaatggcatcattatcccaacagactggtgggcgatcgttttcaatccgtctttcccctaccgctttgcccatatggcaacagcagctttcttggtgtcttcactcttggtagtcgggactgcggcatggcatttgctcaaaggccgccgtgatgcattggttaaaaaatcattctctatggggctttggatggtccttgtcacttcatgtctgcaagtggtgattggtgataatcatggtttaaacaccctaaaataccaaccggccaaattggctgcaatcgaaggtcattgggaaactaatcgtgatcatggcatgcctttactcctgttcgcattgccggatatggaaaatgaacgcaatacggctgaaattggcattcccaacttaggtagcttgatcttaacccactcaatggaaggagaagtcgctggcttaaaagactttgccaaagaagaccgccctaatgtgccaattgtgttttggagcttccgcgtcatggtcggtctaggaaccttgatggttttactgtcattggctgcattgtggctgcgtaaaactggacatctctatgaaacatcatggtttcataagtttgccatcatcatgggacctacaggttatatcgcactacttgcaggttgggttactacagaagttggacgtcagccatgggtggtctatggtgtgatgcgcacgcaagatggtttatcacatgcagtaacagccgatcaagtcggtttgagtctgatcatttttgttctggtctatacgatcgtttttggcagcggtatctattacatgctcaagctcatcaaaacagggcctgcatttatagaaagcttggcacctgaaaatggaggacctggacatttcaaaacaccattgcgtccactcagcacagtcgatgatgcctttgatcacggaacggaacagcaaaaatccgaaactgaccataataaggagaaacaccatgattga

SEQ ID NO: 62844 - DNA, 1005 bp, Acinetobacter baumannii
atgattgatctagctttagtatgggtcggtatcattggtttaggggtattgatctatgtgattatggatggttttgatttaggtattgggattttgtttccattcattcaagaccatcaagaacgcgatgtaatgatgaataccgttgcaccggtttgggatggcaatgaaacatggatggtactcggtggtgcgggtttatttgcagcctttcccttggtatatgcaacggtactgtccgcactgtacttacccatcacctttatggtcgtagcactgattttccgtggtgtggcatttgaatttcgctttaaagcaacccgaaccaagcatttatgggatcaagcctttatttggggatcaattttatcgagctttttccaaggcgtgattttgggtgcttatattcaaggaattgaaaccaccaatggcatttatagtggcggtgcatgggattggttaacgcccttctctattttcactggcctaggcgtagttgtcatgtatgcaactttaggttgtggttggttaatttggaaaacagaagctaaattgcaagcgcatatgtatcaatttatgcctaaacttctgattgcactactacttatttttgcaggtgtgagtttatatactccactgactcactcagaaattgccaatcgctggtttactctgccaaatgtattttattttagccctgtaccaatcttggtcttctattttgtgggctctattttaaatgcatgcaaagataaaaatgaaattaagcctttcatctacaccttagcattagtattcctagcctttacgggtttcgtgatcagcttatggcctaatatcattccgccatctgtcagcatttggcaggctgctgcacctgaatcaagcctgaaattcaccttagtcggtgctgtgattctaattccgatcattattgcctataccttcttatcgtattgggtattccgcgacaaagttcgcgttggtgatgatggttatcattaa

SEQ ID NO: 62845 - DNA, 126 bp, Acinetobacter baumannii
atgcctaaatttttcaacaaaatgaattccacacaatggtttattggcttgtggctcattggttttttaggactagcggtgatagcaggtttgtttcgcctactcttgtattttgcatatttttaa

SEQ ID NO: 62846 - DNA, 1410 bp, Acinetobacter baumannii
atgtataaatctgaacaattagcgctcagcctgagatatctgattgaaagtggtgtatggaaaccgaatgaaaagctcccttcattacgccaacaagctgaaacatctggttttagcttaatgaccgtcatgaatgcctatcaggaacttgaagcgcaaggtcttatttattctaaagagaaactgggctattttattacagaaacatcaaagtcaaataaagataatcaagcgattattttaaatgaaaaaattgaaattaactccaccgtcttccgttatctaaaatcaatacagtctgaagagatcgttccttttgggattgcattcccgaacagccaacttttatattcacccaaacttatgcagactttaggacaacgtgctaaacatcgtctaagttatgaacaaatgcctagccttcctccaggaaatttagatcttcgaaaactcattgcgcaacgttattgtatgcagggaattcagactgatccatctgacattgtcattacatctgggggcttagatgccttaaatttatcactacaagccttaaccaaatccggtgattatattcttttgcaagaaactattttctatggtgcttggcaagcgactgaacatttagggttaaaagttattacgattcccgaacatcctgagttaggtcttgatctagaagcatttgaaaatgccattttaaaatatccaatcaaagtctgtttactcatgctcaatagtcataatccaattggatttaccgtgagtgatgaaactaaactccagttagcaaaactgctgcataaacaccaaatctacttgatcgaagatgatgtttatgaagaattatatttcaataataaaaaacccttatcgatgaaatactttgatcaggaaaatctaattttacattgctcttctttttctaaaactttaggggctggttttagagttggatgggttcatgctggtaaattctctgaaaatatccagcatttacaattaatgagcacgctgtcagtgaattctttcattcaaaatgccttggcagaatatttgtcccaccgtcattatgaaaagcatttaaaatcactgcgtgcgacattaaaaagattgaaaaatcaatattatcaatacttaattaaaaatttacccaaaacttgtcaggtccattattacccttctggatactttttatggatatcactccctgaacatgtcgatgctaatttactttatcatcagttattagagcataaaattggtattgcgccgggctccttgttttatcaaatgaacgccattccccatcacattcgaataaattgttcatttgaattaaacgaacatacacaagccgctttagatcaactgattcaacaaatcactgagtttaagactatggtttaa

SEQ ID NO: 62847 - DNA, 234 bp, Acinetobacter baumannii
atgaaaaacttcagcataattgagcacctcaaagcagccgaccgaaaggattgggcaacagctcagtcgattgctacatttggcatgagtctcccccaaaaaaaatcacatgaaaaaagatcctgggaacgctttgagcggatcaagtctggagaaactacactggaagatgaagaggctgttctgttgatgcaatggcgtgccttaaacaatctgtctaaaaatcgagaataa

SEQ ID NO: 62848 - DNA, 300 bp, Acinetobacter baumannii
atgagcaagaaacacaagacttacaccacagaatttaaagctgaagccatcaaattaattgaagccaatcaaggcaatgtctcagaaacagccagacaacttagcatttcaatgcaaactctttcaaattggaataccaaagcaaaggctggaactttagcaggtacaaaacagtattcacctgatctaaacgctctactcgaagaaaataaaaaactcaaacaacagctcaaaatagctgaaatggaacgtgaatttttaaaaaaggcagcagcgtactttgccaaagaaagtcagtaa

SEQ ID NO: 62849 - DNA, 1254 bp, Acinetobacter baumannii
atgcacggaaaaactaatggggctctgcatacaatgttaggcgttgctgcatctagaattaaagccgttcagaactttcaggcttgtccaaaatgtattgaaattcagctaataaaatatggtgaagctttttggaaaagagactggttcatacccaatctaccgatatgtatagaacatggttcatccttatctatttataaagaaaaaccatcagattccagacatcattttcagccattcatagaatcacatttttcaatagaatcagttggctcagtcttttctcaagacctcatcatatcagcaccaatacagcaattactgaatcttttctcatatccatcaatatcttttgaccaatggactcacttctattatggattggcacaagactctgggtatgcacgtgggcaacatataaaacacgatcaaattttagaactgttcttacaatattggggtcaagaatatcttcaagctaaaaatctactttgtcatcaaaatgaggaaaattcttggttaaaaaatatattccgtaagcaccgaaaaagctttagtttctttgaacatttacttgtttggcaaacttttctttcacgagagaaattagaaaatatttttcatcatgctcaacatattcagccagttttcatagtaaaaacaacaactattgaaaatgacttagatattgtaaagtgtgcagaataccgtaaaaagtggcagcagcttgttagaaagaatggtattaaggtgagtcgctccataagcaatggaggtgccatctatgcgtggttatatcgccatgattataaatggcttcaacaatataattccaaacatcaagtagtacgttcgcctcttaacactcgtgtagactggcataatcgtgatcgagaatatgcaaaagtactattgcgacttgctcaccaattcaaagatgatctgagtcctacacctagacgttctagaaactggtatcttatgcaattaccacaacattcaagcatagagcataacctctctaagctcccattggttagatgctttttggtaaagtatgttgaaagtattactgaataccagctacgcagagtctgtgtagctgttaaaatcttatcttcagattttcaaccgttgcacttatggcgagttttccgcttggcaggacttagcaaagaaagaatcacccctgatgcagcaagaattctaaaactatctggatttttcaatactcatgacggtaaaaattaa

SEQ ID NO: 62850 - DNA, 1596 bp, Acinetobacter baumannii
atgacggtaaaaattaatcattttgatcataatgtaacagttacacatattggcggcctattcaaaggttcaaaatcaaaaatctggagtattaacctacaatgctcaccaaaacaagaaaagaaatttactaactttagcaatgcagccatgttaattcgtggcaaaaaactaaactgtagcgaaagacaattatctaaaccgaatctagtgattactttgtctgatcagaattttctaaccccctctcttttaaaagattttgatgaattatcaacggattcaaatcttacatattttgagggaatacaaactagtttcattatagaaggacccaatcaggtcactattcatctaccacagtttgagcttgcaagaacactttttctcattaactcttatttttgtcgggcaagcctcagtacaacgaccattcaaaatgaatttgcaatatgccaagataatgaggaaacagtaattgtctttttagaaaatacaatgcctttaaaacttgtaaatcaaaagggaacccaatgtctattagcctggttactacttgatcctaatgccaaacagtcatttgaaagcatttgtcgttattttaatactcaactgattgataaggatggatggaagaaatggatttttcaatttgatccaccctcaatggacggttggacactccattttcgaggaagatataataggtcacaagatgcttttcttgttgaagaaattgttggcatagaaatcgatactgatattcctactgacattagttttgatcacccatctttcactcaaatcaagacggaaggacaacaatcggaacaaggctacaaacccgaatatagtagtacgcttgaccctacaattgaagatggtacgacagcgtccatagagcacggaattcgtattttggatggtaatgagtcatgggtgagtttcaaaaaaccattgaccatcaacaagaaagggaaaaccaaaataacaggacagaaaagcacggatgctgaaaatgatgaatcggcttctggtcatttagcgagtacagacgaggcaaatagtgcaggcgatttacctgcggcagatgtaggagggaaaaaggactacacaaattatgatcagaaatatgcccaacgctatcatgatttcaactcgatgatacaagtgcttcaatctacacatcaatgtgtgctatatgaatcacttacccatgagcttacgaaagttgggcgttccgagtgtcatagaatcagtaaagataaactacgaaccattaagtttgttcacctttgctatagaagtgatgactttcttctcattgaattagatacatcagatggggtaaaaagtatatcaactaagttaatctacctgacaaccgatgattggaagatttatttagataaaattaagactcatctagtcgcaaaatcactgtcatggccaaatgatttgtttgatgatgtatttggtgcaaatgcccatactcatattgtccatccacggttttcatcacaaggaaatgactcttcagaagctgttaataattgggctgtaagaattatgaatgtgttaaaggatctattttaa

SEQ ID NO: 62851 - DNA, 474 bp, Acinetobacter baumannii
atgctacctagttttcaaacactatgtggggcaccatggcggattttacctcctggtgaacatcttgctacattacaagaggttaaacaaaccttagcctttaatccgcatagacttaatctatttaatggacttgtaaacgcagctaatttactcgctcggtcaggatgtaagtatttataccttgatggaagctatgtcactgaaaaagatatgcctggtgattttgatgcttgttggagcattgaacaggttgactttaatattgttgatccaatttttctagatttaagtaatgggactactgcccgaaaagcacgatttggaggagagctcttccccaactgtacagaaagagcatcaggcaaattgtttaaagacttttttaagaatgaaaaacatacaaatcaggaaaaagggattattgtaatagatcttcaagccgaattttctttaatgaatcagggagtgtaa

SEQ ID NO: 62852 - DNA, 357 bp, Acinetobacter baumannii
atgattttaaactcttttgaattaagtctaacagagcaaaaaattaagcagatacaagctacaattattgaagtagagaaagatacttctgtcgctccctttatatcaaaattagaattagattctttaaatgtatttttaaatgaattagttgaagagcgtgatgagttcttagaaattagccaaaaatttaaacacaaaattcctgtaaaaaaggaaatacttaaatacccagaaaatctagtttatatcagaatagctaatgatatttctcaagaagatatagctgcacttttaaatgttagtattgaggaaataatgaaccgtaccgggtttgtcggagactcagtattctga

SEQ ID NO: 62853 - DNA, 963 bp, Acinetobacter baumannii
atgaataatataattacagcttcagaagcttttgatgctcttctaaatggcttcaaggttctatgtagaccagtgggtgacatgctggaattttcggaattagaccaattccctgcaaccatctttgctaaatctggctatgaattctgcatcaaacttgaaactattgaattggcaggcattaccttcactagaccattgacaattgatgagtataaagagggtcaagatgtttttgtaattaatacatatttaccttccatttatattgttggatttaaaacctctgcactcattgaggctattaatagtggttttgtgcagcgtgatgcagaaaatgccaagcttcaattaaaagctatttcaaaagcactcggttatgaaataaataatgatcttagtgttattcgtcttggtgatgagcctaaaaaacaaagaggcaaaaaaacaaaagctgaaaagactagtgaagttattcctgcagaaactcagcctgcaattgttattactgaacaaactaatgtcaccacttctaaggacaagttagttccagatactaatgacccgacattagatcctgaatatcaaaaaaatcttgatacccttctgcaacgcgttagtgagtcaaaaacacctgatgaagttaatgcagtttatcgatacacccgcacttggtctgataaacaaatggacccattgctcaaagctactcataagcgtttaacagaactagcgaatgaaaaacctgtagagagcgaaccgccttctctaatggttcagatccaaaacgcaccagatcttactaccctggatgcacttgaaattgatgtggctgcacgagatccacagattcaaccgaagcttatggggtatgtgagaaaacgccgctacgagttagaaaatcctacatctaattcaacccaagagcctgaccctgattatctattaggagacaacttctaa

SEQ ID NO: 62854 - DNA, 354 bp, Acinetobacter baumannii
atgaaaaatgatcacaattatcatgaaagtaaaaggtttctaattattcctaatccagaggataatgagtttattttaagttatttatttagattaaaaaaactaaatgcctattactcattgcaatctgtattaaaagtaatatttggtaaaaatataaatttaacactattagcaaaaggtgattttgattactcattaatttcaaaaagtacaaatctatcaataggtttaattgaaagtatgtgcttaagaaataaaggatttcatctaggtcatcgtgctattctatgccctctttgtatacaactgaaaaaatatatttcaaaagattcttacaagattaataactag

SEQ ID NO: 62855 - DNA, 954 bp, Acinetobacter baumannii
atgaatagtgagaaaaaaaatattgaaaaaattgaacatatcatgcgatgcataattgtttctgaagaattcgatgttgcatataatggaatacttttatgtaatgaaaaaaatgcgatatataccaaaccatttggatgcttattactttcaaaaggcgggcttggtaagaccactttgtgtaaagctatagttaaaaagcatcctacacatatcaaaactgaaaataatataaataaaacaattatccctgtattttatatagaaataccctcacctgctacagtaaagtcggttgcaagtagcatgttaaaggcattaaatgatccagcaccattttcaggaacaacagctcagttaaatcatcgacttgtaacattacttaaagcttgtgaaacaaagcttatattcatggatgaatttcatcatttatttgatcttcaaacctcaacaaagaggatgaacacagttgtgtgtaattggattaaaaccttaatcaacgaaactactgatatttgtttctgtttggtaggtttaccagaatttgaatcacttcttaaaatggatacacaattagcacgaagattcccctactcttttactttgaatccattacagataaagaaatatgatgaattcggcacgttacacgcttttcttcttcagattgaaaaaaatgttgaaacgaaacttgatataagatttgaaccagcattatctaataaacttttagctatgcaaatatacattgctacaagcggaaatcatgcctatttaatgttgcttattgaaaattgtcttttacaagcaatgaataacaataaaaagattattacgactgaatttttttcaaaagcttgggaaacaggagtcactgcttttgtttgtaaaattagtacgaatccatttatcttagatttagcagaaatttcttcaagaattagaggtaattaa

SEQ ID NO: 62856 - DNA, 1926 bp, Acinetobacter baumannii
atgaataatcaaataatacgtccgccgatgggtttgagattttcacttgctggatctaattatgaagttgtatttgtacatggtgcagtagtgcgttattcagcaaaagtaggtggcaaaatatataaaatggctttagaaaagtttaatgaaaaattcagcttgggtgaaattcaatttgatattaatgccactgagtgtttattgagtgaaataaaaactcaaatattaatgagaaagcaagcatatattaaaaacacaattgtcgatgtcaaacatctttactctaaatcagaagtccgaactgtaatacgaaaaactgctaaacaaattaatgatttaaatcctcccgttccgcgcacagttatgcgatgggtagaggtttatttagatgctggtaaggatctatatgctttaaataaatttagagtgggcaataaatttttacgttttcctatcgaagttgaagaattaatacaaaaatcaattcaggaactatttctagctaagcaagaaatagtgacatgtgaggatgtatatgatgatgtaaaaaatactatggcaaataaaggaatagatctaaatttatgcccaacacttagaactatccagagaagaattgcaatacttgatccctatgttgttttgcgtgctaaacaagggactagagcagcaaataatgctttaaaagctgctggtgaaaaaattattagcccatttttcatgtcattggtcgaaatagatacacatactttagacatcttcatcatcgaaagtgaatcaaaacaagtcttaggtcgtccatttttgacttgtgcgattgatgtacatactcgttgtatagtgggttactacttatgtatgttgccagcaaacgcaacaaaaactttagccgtgttaaagcaaatgcttttacgagcacatcagggtcttcctggtggactaccttcattaataattccagataatggagtcgagtttaagaacacaactttcagtcgagtttgcaaagatttaggaatcactattcagccagctcaaaatcgtaatccaaataataagccgtatattgaaagattctttggaacgctcgcaggaagcttaattcataaaattaaaggtacaacattttctaatccacaaactcgtggtgactatgattcacaaaaaaatgcatcaataactttagaaaatttaaggtcatacatagatgattggattcacgacgtttatcataaaagcatgaattccgattttgggtcaataccacaaactgcatggtctaatgcgataaagttggcacctccgcgtttaatttcattatttcatattgaaataatcgtacgtaaagctatgacaaaaacgattaatcatggccaggtgggttttttagatttgaaatataaagcacattctttagcaacattaaaagctaaaggtatttcgaaagttaacgtaatggttgatgaaactaatttagagcatgtatttattgaagatccttttaacgctgggaattacatacaagctgattcaacaactccagattacaccaaaaatctaactttgtatgagcaccaaatgattaggctagagcgtaaagagtttttaaatgatgagcggaaaaaattaggagaacacgagcttagttttgctcgttggaggttatatcaacgaattcaatctgacataaaattgaacaataaaaaggctaaacaacttaaaaatgatttaccgcaacgttttaaagatttacttggtgaaccgatagatttaagtgttgatttcaaagaattaaaaactatcgatgatttaccagttatttcgtcatcttctgacgagaatattgataatggcatcatagaaatagacaaaaataataaaacacttctaatattcaataatttggagttcgataatgaatag

SEQ ID NO: 62857 - DNA, 705 bp, Acinetobacter baumannii
atgaataaatatacaaaagcgcaatatttaagtattgcagaacaagtcacagaagcatttaatacaaaacctacagcagatggggtcatccatgggctaaggaaaatcattttaggtactgttggaaaacgtccaacactatttccaagcaaaaaaaatggtggaatgattgctttagaaagccgattagaatttgcttatgcactacaacttgaacgagatccagaagtaaaagcatatagaactcaggcactaaaaatagcaattagcaaggctcaatttgtatatcctgattttttgattaaatatcaagatggaacgattaaagttcatgaagtaaaacctgacagcctaagtattaatcaagtagattttgttcgttataatcttttgaaactaattctaaaaaattcaaatattgatttcaggtttgtagatcgttcggaattacctacagaatatgaatctttgatcttaaattttttatatcaaaacgctcatactaatgattggtcagaacatcaaatactatcaggaactcgatcgataccgccgcttaatgatttactctttatagaagttcaagactacttaactgttagtggtttacctaaagaactagccaattatttaattttttacggtcatatctcacttccctctttgtttgctacaaatttaagcaatttcagggggggaatatga

SEQ ID NO: 62858 - DNA, 180 bp, Acinetobacter baumannii
atgacaaaaagtattgagcaagtccgagctgaatttaatcgcacaggcatttcaattgctgggtgggcgagaaaaaataattttccaccaacattagtttatcaaatattaagtaatacacggattccagcacgagggaaaagccatttaattgctgtgaagctaggtatcaaacagtaa

SEQ ID NO: 62859 - DNA, 1440 bp, Acinetobacter baumannii
atgttaacgaatcttcgagaacaatggttctctaatgtccgtgcagatattctttctgggcttgttgttggtctggctttaattccagaggcgattgccttttcaattattgcaggtgtagatccccaaatcggtttatatgcgtctttttgtattgcggttattatttcttttgtaggtggccgtcctgccatgatttcggcagcaacgggtgctatggccttagtcatgacgaccctagtgaaagaacatggtcttcagtatttattcgcagctactattttgacgggtgtcatacaaattatagtaggatatcttaagcttgctaagctcatgcgctttgtctctaaatcggttgtgattggttttgtaaatgctctcgccatactcatttttatggcccagcttccagaactagtcaatgtaagttggtacgtctatctattagtcgctattggtttagcaattatttatctattcccttatgtaccaaagcttggaaaaatttttccatctccccttatatgtattgttatagtcacattacttgctctctttttggaccttgatgtgcgaacagttggcgatatgggagcactcccaaatactctacctatttttttaattccggatattcctcttaatttagatacaattcttatcattcttccttattcattggcgttagctgcagttggcttacttgagtcgatgatgacagccacaattgttgatgaaatgacggacagcccgagtaataaatttaaggaatgtaaaggtcaaggtattgccaatattgcctcgggttttatgggtgggatggctggatgtgccatgattgggcaatcaatgattaatgttaaatcaggtggtcgcacacgcttatctactttatgcgcaggcatatttttgctgattttagtagtatttttaagtgattggttgaaagttattcctatggctgcgcttgttgctgtcatgattatggtatcaataagtacttttgagtggcgttcacttacccaatttaaaactaatcctaaaagtagcaataccgttatgattgcaacggttgttgtagttgtagctactcacaatctagcattaggcgtattgacaggtgtgctactctccgcgcttttcttagccaataaacttgaaaatgatatacaggtaataagttcattagaaggcaacgctcgtttatatgatttaagaggacaaatcttttttagttcttcagataaattcatgcacggctttaactttaaagaagaagtaaaagaagtcattattgatctgactcattcacatatttgggatgtcacttcggttgcaatgcttgattcagcagtagaaaagttccaaaagaatggcatacaagttactgtacgtggtttaaatggtaagcgtccgctgaatcccatacctattttttaa

SEQ ID NO: 62860 - DNA, 1227 bp, Acinetobacter baumannii
atggaacgagttgtcatcacaggtatgggaattaattcttgtattggaaatacattagagaaagtaaccgagtccttaaaagcaggccgctctggcattcgctataacgaagtctatgcaaaactaaactttcgaagtcatgtgagcgccactgccgaaatgaattttgaaaatattgatccagaattaaaaaaacatatgggcgtttgcgcgatgtatgcctataactcggcactcgatgcgctacaacatgccaagcttgatgtaactgacattgccaacaactcaaaatatggagtgattgggggaacagggggcacctcaacagcatctatcatcgacatgctgcataccctaaaagaaaaaggcacaagtgaggtatcacccgatttagcaccacgctacctcaccagcaccattagctctaacttatcacgcgctttcaatctaaaaggcgtatcccaatcgatcgcaagtgcctgcgcgacttcagccgacgcaattggctatgcatatcaccttattgccgctggcaaacaggatctcatgctggcaggtggcggcgaagaagaccattggtcccaaaccgcaatattcgatgcgatgggtgcattatgttctaaatataatgacgcaccagaaacggcttcacgcccatattctgtcgataacgatggctttgtgatcgctggcggcggtggcatggtggttttggagtctttaagccatgcccaaaagcgcggagcaaaaattttggccgaagtggttgggtacgctgccaatagtgatggtgtcgatatggtagccccgagcggtgaaggtgcgacccggtgcattaaactggcactcgcagaagccaagcaaaacggttcagacaccatcgactatatcaacacgcatggcacttcaacgccagcaggggacattcccgaactattggccatagagcgagcttttggtggcgaaaaagtaccgccgctcagttcgaccaagtctatgactgggcattgtttgggggccgcaggggtacacgaagctatttattctattttaatgctgcaaaataactttattgcgccgagtattaatattaccgaactgcgcgaagaagctaaaaagttcgatattgttcaaacgagccgagaaaccgaactaaaaacagtcatgagtaatagctttggttttggtggggtaaatacttgtctggtttttagaaagtgggaatga

SEQ ID NO: 62861 - DNA, 918 bp, Acinetobacter baumannii
ttgaattcgccaactgttgtagagtttgggccttataaagttaatgttccaaaaggcggctattacgatcgttttcgtatgaacccgaatctagacgaagttgcaaaagatcctgcagctggaaatattgattatttccgtaccatcccaaaaaaacttgtagatactagagtgggtaaagtatggtctccgaatttttattaccgtactagcaatatccaactcttgatgcttgctccgatttctaaagtaaaagcaaaactccctgctccacttgaaccattacaacctatcccaggctatggtttggtttcattaacattcttctcttatgcagtcggtgatgtcgacccatatgatgaagtttcggttgctgtggttgtacgccaacctggtgctcatcatttcaataccacagaattattgagctcaatgcgtaaccataaatattatggtcatgtactcgcattaccagtaaatacagaaattgctcgtgttcgcggtgtgtatggttaccaattaccaaaatggttaacacctattgatatgaaaattggcgataaatcagttcaagctcatatttataatactgatggtaaacctgatttaagtgtagctgcgccattgccagaaattaaaactgtgaaaccacaatctcgtattgaaacaaaaaccatgtatcaattggtagatgggaaatggcacagcacttctgtagagtctaatactttggcatttggacaaaagctttttccaaagaacgttcaagttgtaaaaagtggtggaccgctgagtaaattacttgatgaactaggagctaataaagttctacgttttgatgtagtgaaagatgcacaattggcattaaatatgcctgttccatatccatcacttgataaatcgacagctaaaaaataa

SEQ ID NO: 62862 - DNA, 324 bp, Acinetobacter baumannii
atggacagtaaatggattgaagcgcaacgccgtgaattagcaaaacgtattaatcctgagcttcattgtccagttgggtttcacaatctaagaagcctttatgaattggaaactgctgcacgggataagacaaccataggttatctaaatctacagcaaaatcattataagccagatccaataattaagctaaaggaagatctagctaagttagtagaaaaatataaacaagatgcccatgcattaactctcttgggtgatctggataaatcgcgtgtttataacggcattgccaatcaattggaccagttacttaagggttaa

SEQ ID NO: 62863 - DNA, 789 bp, Acinetobacter baumannii
atgtctagatcacgtgaagagccatttatagaaaacttaattaactggttagaaaatgagggtgaatggaaagacaagtttaataactattttcatgcttaccttttcagtataagaaaaggtaaatcaggaataagaaaatattatacaggttgggacacttttatattgttagccaataataatattcgttatcttattgaacttgtaaataaatccatacaaatatacttagataaccagagtatagcccaaattcaatatattgattttgattctcagactaaggcaacacaaataattgcaaagaaaaattttactgaattagagggtattagtattaatggagcaacattaactaaacttttattaggcttaggacgtctatttgaagttctagcttccaattcagaaggccatgcaccagaagtaaatcaattttatttaaataaaacaagcgaagaaaatcaaaatgtagaagctatacttactcatgctgttatgcatttagctcttatacgtatcccaggtacaaaaataggtgatataacaagtacgagagactttgattatatgatccaccctatttttgctcccttttttgtattttctcacagaaaaaagagaaaactagcgcttgaagctacagatataattacactcattgatgatcccaaaaaagctttaaaacatcttattcaaaaaaataagcgaccagctgaggtattacaatcttcattacccgatcaattggacttatttggggagtacttaaatgtatctaattga

SEQ ID NO: 62864 - DNA, 675 bp, Acinetobacter baumannii
  misc_feature (13)..(22): n is a, c, g, or t
  misc_feature (653)..(662): n is a, c, g, or t
ttgccattcttcnnnnnnnnnnagcttgttaatagtcgaccgtgtattattgtaggtggccgaggcactggtaaaactaccgttttaaaaagtctatcatatgaaggacaaagtagattaaataaggaatcctcaccatctgaatggaatttttatggtttatactggaaagtaaatctaaatcgtataactagttttgtgaagagaggcctttcagataacgaatggcagccgtactttatacactatttaaatttaattttatgtcataaattatgtcaatttgcagtttggtatgaaaaaacgcaagatcaaaaattaaatcttgatgaaagactattacgtaaagctgtaacgactctaaatataccaatagaatacgtacaaaatatcgaagacttagaggatgaaattgatattttaattgcagagctagaatctaagttaaatacaatttcaagcgatgataaaattttcttgactatgttaggggccccaatagatagagtatctgaacttctactacagactacagagttaaatggaaaacaatttgtatttttaatcgatgagtttgaaaactttgaagattatcaacaatgtattgttaatacattaatgaagcaaattaatcatttatatacttttaaaannnnnnnnnnaagcacaaattag

SEQ ID NO: 62865 - DNA, 189 bp, Acinetobacter baumannii
  misc_feature (147)..(156): n is a, c, g, or t
atgaatttaacatatcaagaacttaaagatggaaatgaaaaattaggtctttataaagcagaatggttaagtgataaaatttttgattactttagcgaaccaggttattttcatcagccaatcctaatcaatggttgccattcttcnnnnnnnnnnagcttgttaatagtcgaccgtgtattattgtag

SEQ ID NO: 62866 - DNA, 255 bp, Acinetobacter baumannii; identical to SEQ ID NO: 44740

SEQ ID NO: 62867 - DNA, 1413 bp, Acinetobacter baumannii; identical to SEQ ID NO: 50505

SEQ ID NO: 62868 - DNA, 1401 bp, Acinetobacter baumannii
atggctaaagataaaaagtctgatacaggcggtaaaattaaaacgcttgtggcagatgcagtaaaacaggcaatgaatgccattggtgatgctggtgcatataccaacttggtatcaaacattggcaccgagcgcgataaagccagtgctggaaagttcgtacgtaaagatattgacgatgaacagcttgaagcggtgtaccaaaactggctcgcacgccgtattgtgaatcgtcctgcatcagatatgcttcgtgctggatggttctatgaaggcattcaaggtgatgatctaaaacgccttgaggaagcgtgtaaggcgtttcacttagagcatgtgcttttatcgggcttaatcctttctcgcctctacggggttgtgtatatccttctaggtacagcagatggtactgccttagataaacctttagacatttccaaacttggtcaaggtcgccttgagttcttcacggtcgtgaaaaagaaatacatcacggcggataaaaacagttatttaccgccgtcggcatgctgtggactattgaagcaacctgaattttacgacatgaaaatggggaatgaggctaagaagcgcattcaccatactcgcttaattcgtattgcccatgctgatgtggtcaatgaagaacctcaaagtatcttgcaggaagtctatgaggatctgcttgaccatgccagtgtaaagcgtggatctgccagcttgattcatgaatcgaagattgacgtcattcaaacgcctaacttggtcgataagatcaaagaggatatgaaaggagtaatggagcgtttcatgtctgtgggcttgatgaagagcttaaacggcatgttggtccttgatgctgaggaaaagtacgaatccaaaacgtatagttttggcggtttgcctgacatgatgcgtgagttctcgattcagacggccggagctgcagatatcccttacacgattctgtttggtcaatcacctgcagggatgaatgccactggtgagcatgacacgcgtaactattacgactcgattgccactaagcaggaatgggatcttaagccgatcttaatgaagttcctcgccgtgatctgtcagtctacgtttggacgtcaatttcctgagcttgatgtggtgtttaatcctctttggcaattggatgcgaaagtccgttcagaggtggaaaaagccaacgctgagcgtgatgaaaagtatctcaatatgggcatcattactgagccacagatcgcacgtcagcttaatattgatggcgtttactcagtgatcagcgaagaccacatcaaattactggaaactatggtggtagctaatgacgacgatcatacatattctcaagcctcagcttcagcagatcaagaaacgcaagaaaggtcgtaa

SEQ ID NO: 62869 - DNA, 621 bp, Acinetobacter baumannii
gtgtctcgttatacgttcagcagtcagtaccaacaagagcctaaaaagctcggtggtgaccttgttaaggctgaatggtttggtcgttatctcgaattgcctccactcaaatggcgtgcgatctgggcagatacggcgcaaaagaccaaagagcataacgactattcagtgttcttgtgtgcaggtcttgggcatgacaatcgcctatatattatcgacgtgcgccgtggcaaatgggaagcacctgagctgattaaggaagctaaggctttcatccataagcataaggaaagtaataccaagatcggcaaacttcggtacatggcgattgaggataaggcatcaggcacgatgttgatccaaaacatctctcgtgaaacgacactaccaatcaaggcgattcagcgtgatacagacaagctgactcgtaccatggacgtggtgttctacgttgaagatggtcgtgtcatgttgcctgtaagtgcgccgtggctattgaactatgtggaagagatcgagggacttactgccagcatgtcgcatgagcatgatgaccagtgggatccaacaattgatgcgattaatgattcacttgcgaaaaagccgactgtatttgattag

SEQ ID NO: 62870 - DNA, 351 bp, Acinetobacter baumannii
atgaacaacatgaaatacacgtataaaccgaattattttttctttgctcataaattagtcttgtttttaaaagactatttactcaaacatcctactgaacagaacacgacgtttaatttacaaacaatttatgatgtctttagccacgatctagcctctagcacaacaaatctagaaggtattctaaacattgcggatgagtatgttttagaaacagaagaggggcttttaccattgattagtagccactcaatcaatttaaagaatcatgtactttctttagagttttcacctaaagcgttaacaagcttattgtcggggcgttcattagtgaatccgaaggctgcttag

SEQ ID NO: 62871 - DNA, 537 bp, Acinetobacter baumannii; identical to SEQ ID NO: 50961

SEQ ID NO: 62872 - DNA, 687 bp, Acinetobacter baumannii
gtgtctatagtttaccaagttaaaacctcctgttttctcagcacacatcagagttattgggaagaagagtggatatcttctatatatacagcaatttttgtttgccaaaactcaaattgtgaggagcatgtagtaagctctggtactggctttgttagccaagaaccagtttttacccaagatgatcgttatacatatactacgacagaatatgtatgtttttataatcctaaattctttcaaccaacgttacactttttcaaaattccagataattgcccagaagaaatcagaaatccattgcttgaagctttttctataactctactttctcctagttcggcagctaataaagttcgtgtatccatagaaaacttacttactaaatttagtattcctaagaccactactaataagcataaaaagagagttcgcttaaatttagatacaagaattgaaaaagcaaaaacaaaaaatacggttttaggtcaacttgaagatattctttatgctattaaatggttaggaaatgcaggaagccatagttctgctgaaattactctagatgatgtatttgatgcttatgaattaatgcaacatattttgattgagttatatcaacctaagaatgagttaggcaaattagccaaagctattaggaaaagaaaaggtcctatcaaaaaatag

SEQ ID NO: 62873 - DNA, 807 bp, Acinetobacter baumannii
atgtgtcgggttcttaagattgctcgtgctggctattacgcctggctacatgaacccgaatcaggcagaacaattgaagacaaacggttattacaactgatccgctcttcttatgatgccagttatggcatctatggttatcgtcgcatcacgctggatcttaaagagctaggtgaaagctgtggccccaatcgtgtgctgaagatcatgaagaacaatggcattgccgctgttcgaggatataaaaagcataaaagttatggttgtggccgtcctccgattgtgccaccaaatcacttaaatcgagagttcgctgtgagcacccctgatacttcctgggtgactgatattacctacatccgtacttggcaaggctggttatatctggctgtggttctcgatttatattcaaggaaagtcatcggttggtcaatgaaacctacgcttgccaaggatatcgttttggatgcacttttaatggcggtatggcgacgcagacccaatgaacctgtgatcatacactcagaccaaggttcacaatacagtagcggagactggcagaaattctgtcaaaagcataatttagttccgagtatgagtcgtcgtggaaactgttgggacaatgctgttgctgaatccttttttagtagtttaaagaaggaaagaattaaaaagaggatctataaaacacgagaaatggcccgtgcggatgtgtttgattatatcgagatgttttacaatcgaatcaggcgtcattcgcatctcgatgggatgagcccagaagcatttgagacagcttcaaaatga

SEQ ID NO: 62874 - DNA, 936 bp, Acinetobacter baumannii
atgattctgagtaaccattatgttcctttcttaaagtggcgacaaagtgaataccaagcattgtttaaactcaaaaaagagattaaggatcttatcaccccttatataataatgcctccaatcgaatatgattttgaagaaaagcgattaaagaaaaccattcaagaacatattgagccgatgccaaaacggctcaaagacaaatggggttctagacttgctcttctagactttcatgacagtattgaacaaggaatcatggacaatggagaaaatgttataaaatatgtatataccaagagtcttgctatgggatgtaaactaattcccgttatttctttcgaaaagtctaaatggtatttaacagaaattaaatcaattattagtacacaaaattgcggccttgctttaagactttttcttgaagatttagataagccaaatataaatggtgaaattgatcaagtattggagatgtttgatttaaatataaataatatagatttgattattgatttaaaaacacctgataaatttgagccatatgctttgttttccaacttaatctttatgaaagttaataagataaacaacatcaaaagttatcgttcttttgttatagcagcacattcactgaatctaagagagattaaacagcctggtgggttgtttactcgccatgaatggatgctatatccttatcttataaagaagttcaaagataaattaccaacttttggagattacacaactgatgatatagagtttctccctcctatggatatgcggaaggtcaacccatcagcaaaattaatttatacactgcctcagcattggcacgtcttaaaagctaaagcatttagagggaatgagatccaaatggtttctctttgtgcaaatgttattggactaccaggttacaaaggagttccgtaa

SEQ ID NO: 62875 - DNA, 957 bp, Acinetobacter baumannii
atgtctccgacaaacccggtacggttcataaaaagacaggaagactacctttatagacatttagattctatttctttattaagaataaatgactttttagaagaaaaaatatcgaatagtttaactgtacatacgtctccaattgattggaataaatttccaattaaagaaatgttaaaacgtaaatggttattatcaggcaatattgatccaataagtgcaatcaaagcacgatttacagatctttttggtaacgagcaatatgaattagcattacatagaaagtttcactttaatggaaactcccccaatgaatactcattgcttgcatggcagattcaggttctcagtaaagcaaaagagataacaaagcaaattaaggtgccaaaatttaataaagattcatcttggctaaatcatttagttagaatttctactaattcaaatggacctttagaagctcaagaatttcttttatcaaaaggaattatactaattgtagagccacatttaccatctacatatcttgatggtgctgcaatgcttttgccaaatacttcaatccctgtaatagggctcacattaagacaagatcgcctagataatttttggtttgttcttttccatgaattaggtcatatttttcttcatctgaatgcggaacgcacctctatagttgatgaagacgtaggtataactaaagatgaggttgagattgaagctgacaactttgcactgaacaacctaattccttcagaacaatgggatatgtgcatgtgtaggttctatatcaatgaagatgccttaaatgaagatgcccgaaatctaaatattcacccaagtattattgctggtagattaagaagagaaaacaataattatcaaatttttaatgaaaaagttggattaaagcaagtaagaaaattattctggggtgatgaatatgattctgagtaa

SEQ ID NO: 62876 - DNA, 864 bp, Acinetobacter baumannii
atgcctaaaaaatttgaggactttaataatcctaggaaaaaagcacttgcaggaatgaaacaaagcatttcagctgaactttgggacaaaaatcttaattttttaaatcaattaagagccaagatcgcgaaacatccagtatctcatcatcctgcaatagaaactttaaataacggtgaaattaataaagaaaacttaaagcgtattcatttagagtatcgccatgcaatcgtacaaacttttacagatgctttattaatggctcaataccagacaaagcagttagaacctaggttgcatgcaggtgcaaagatgtttccgcgctgtcttttgagtcttaacatatttgatgagtttgggtttcggcctgggaccgacaaagacggttattatcaaggtaacccagaatatgcacattatcctttatttgaagatgtgcttgatgattttggagtaacggagaacgagcgcctgagttatcaaccaacagaaattgcacatcaggtgagagagtttctagaaaattcctataaagactataaagccgtttctgctttattagctgtagctgaagaagaagttattttgtacagtccacctttacgaaaagcaaccagtactgtaggtatagcggtggagggtggtggctattaccatgtgcatggagtatctgaagatgaaactgctgaggcagcagatgacgatcatgaagaagatctatggtttattttaatgcaagcttgtacagaagaagactacacttatttagaaaacctatgcctcgaatactgtgatttatgggaaaagttttgggatattcaaatagaaagctcaaaatcaatcctgaaacaaaatttagcttaa

SEQ ID NO: 62877 - DNA, 246 bp, Acinetobacter baumannii
ttgcttgaacatgagctttatcacatcggtgtagaacgagactcggacggtgaaattatttacagtgatcatactggcttaccaaagcactatttagccggtcacgatgtggaagagtttatcggtgttgtaaaacgctggggagcaaatgacagtgttaagaggcttattgaagttgctaaaaacccgccgtttgtttctgatttagatatttcgaaatgttgtggaaactgcgtaatcaattga

SEQ ID NO: 62878 - DNA, 483 bp, Acinetobacter baumannii
atggcatctttaaataaaaagcaaaaactctttattgtacggtcacttgctgtatttaatacacctcaagaaacagtatcgctcgtcaaggaagaatttaacattgatgtgacacgtcaacaggtcgagacgtatgaccctactaaaagagctggtaaagatcttagtgctgaactaagagcagagtttgatctggcgagaaaggatttcttagataagcctgagcatatcccaacagcaaatttatctgtacgcctaaaaatattgaatgatttagtctacaaaaattctcgaaatgttagggctgttagaggactgttagaacaaattgccaaagaagtaggtggtcaatttactaatacaagtaaaacccaattaacgggcgcagatgggcaaccattgcaacctcaacatgttactcaagttgtcgcaacgcctgaacagataaagcaggtgttagatgaactccaaggtaaatactaa

SEQ ID NO: 62879 - DNA, 855 bp, Acinetobacter baumannii
atgaaacagcaaagacatttattcccgattagctttatggctagattacttcacgtttcagtgtcacgattttatgattggctaaaacgaggcatgaataaaagattggttcagcgaaatcaacagacaattttggtcaaaatagctcatgaggaaactaaacaaagctatggctatattcgattaactaagcatttacaagcgcaaggtatcaaaatcagtacgtatgctgtacgtcaaataaaaaagctcaaccagctgtattgtaagcgtcataagcgtttcaaaagaactacgaagagtgatcataatcgagcgatctacgcaaatttactagagcaacagttttcaatgactaagcccaatcttgcatggtcaagcgatattacatacatttggactgctgaaggttggttatacttggcagcagtaaaagacctgtacacgaaacaagtggttggctatagcttaaatgagcgtatgaccgcacaacttgtttgcaatgcactgactatggcgattcgtaatcaaaaaccaacgaaaggcttaattgttcattcggacagaggcagccaatattgcagccatgaatatcgaaagatactggaaaaatgtgattttcaaggttcaatgagcaaacgtggggactgttacgataatgcaccgattgaaagtttctggggcatactcaagaatgaattagtgcatcattgcaactataaaaccagagatgaagctaaagcagatattacaaaatacattgtgttattttataatcagcgaagaattcaaaagagtttggattttaaaacgccaaatcaaatagcagagaacttttatcggttagctgcctag

SEQ ID NO: 62880 - DNA, 495 bp, Acinetobacter baumannii
atgccaacagttattgtagaaaatgatatttcccaatgggatgatttaaccggtgaggtttatcattttcctaaaagatataaggacttgctcttaactggtgaaaaagttatttattacaaaggcaggatgaaagataaaaattttgaatctcgtcgactaagtaagtttcctcattactttgggatcgctgagataggagatgttatttccatcaataacgacaaagaacttttagcggaaattattaattttaggccttttattcaagcagttgattttcaaataaataatgaatatctagaaaaaattcctaaaaataaggaaaagaattattggagagatggtgtacgaaagattgatgatgatacttacaatgcaattataaacctggcgaatttaggacctatttcaaaaacaaaaacactattatctaatgaggatagccaaagttttgaatctggagtagaaggtaaaccatctctacaaatgtaa

SEQ ID NO: 62881 - DNA, 270 bp, Acinetobacter baumannii; identical to SEQ ID NO: 46597

SEQ ID NO: 62882 - DNA, 159 bp, Acinetobacter baumannii
atgcgaaaagttagccaagtatttaaaaaacataaaataatgcccgatctgattcgggcatttttagggaaggcaaatgaggtatttacacttgtttcatttctgagatctgaatgccgattcctccttattttttttgaagctcagcgcggtgcttaa

SEQ ID NO: 62883 - DNA, 444 bp, Acinetobacter baumannii
atgtggataattgtaacactaataattataggcttattgatatattttttctcaaagccaaggcaagaaaataagatcactatggagttccagagttcagttagtatgaatccacggaactatacatttgatattgttggtgagcaggcatatcaaaaaaaccttaagaagattgctggccctaagaacgaagaatcaaaatttgttgaggtaatggcaaaggttacctcagaaccatttaatcaatatgataaaaatgctgtgaaggtagaaatagatggcttaaccgtgggttatttaagtaaacagcatgcaaaaatgcttgctggcaaggtaataaataagatagttccagctgtaattgtaggcggttgggttgatgaagagtcagaaggtagttatggtgtaaagcttgagataagaaacttaaatgacttgttgtga

SEQ ID NO: 62884 - DNA, 849 bp, Acinetobacter baumannii
atgacttttcaatatcaggttcttgccaatcaattagcacatcgtatttatcaagatgaacttaaacctcatcaaaagctcatttccttacgagattttgcccgtcaacaaggtattagtttaagtacagcaaaaagttgctatgaattgcttgaggcgaggggactcatttatgtaaagccgaagtcaggttattttgtggttgctcgtaccccatccagccctattccggatagtccggatttcttatctttgcctcgacatgtctcaaatctggagttgcataaccaaattcaggaagctgccttacaaagtcatcttgtacctttgggatcgattcagttaacgccgcactttattcctgtagaaggtttacgtcgttctattcaacgtgctttaaaaaattgtcagcctcaagattttctttattgtaataaacaaggtcatgaacaattaagaaaagcgctatccgatcattggcgtgaagatggtatttatatcgctccagaagatatttttattaccaatggctgtatgccggctttgtctttggtgattcagaagctcactgaagtgggcgatagtattcttattcctacacccacctataatggtcatttacagttattagcaagtttaaaacgacagattgttgagattccggcagatcatcgtggcattgatcttgagcgcttagaatctttaatgcagcaaggtttggcgaaggtttgcttaatgacagccaattatcaaaatcctttgggatattgctttagcaatgcagagaaacagaagattgctgaattagctgcaaaatatcagtgttttctctgtacacgacaaaaatag

SEQ ID NO: 62885 - DNA, 336 bp, Acinetobacter baumannii; identical to SEQ ID NO: 61824

SEQ ID NO: 62886 - DNA, 645 bp, Acinetobacter baumannii; identical to SEQ ID NO: 49275

SEQ ID NO: 62887 - DNA, 732 bp, Acinetobacter baumannii; identical to SEQ ID NO: 46632

SEQ ID NO: 62888 - DNA, 1941 bp, Acinetobacter baumannii
gtgtctcttaagcttctacatcaatctcccaagatgcagagcaaggtgaaaggcggtgcgagtaagggcagtgataaggcagctggtgacattcagtctcaactagaacgtcaactagatgctcagcgttcactagaaaatgaagtagccactgaagttcagcgcatccagaataatttacaagttagattggaagatgttgataaggctgggttctcaccagaacgaacagctgaaattaaggcagaattacagcgccgtgctgataatgatgtggctattgccaaacaagcaattagaagcaaactggaagactataaggagtttcgtaaaactgaggaacagttactagaagagtcctttaaccgtaaaaagttcaatgcagctcatgacattgaattaagtaagtctgagcagaagcaagctgttgaattgctggaacagcaaaaacagcaagagttagggttattaaaactagctcaggaacagcgtttatttcaggcacgtttatcattgctttctgaaacccaagccatgcaggagaggtacagactcgaacgggaggaaattcttaagaataccaagctttctatagaagagcggcaaaagctaatcgcattatctaaagccaatcaggataaagagacacgcgataaagtgaataatgctgctcaaaactggggtaatatccaagccgatatgaatggtaccggagaatttttcagacaggatcaggaacgatttagccgtttaaatgctgcaaatgatttagcagatagtcaatttgctgctaccgacctgaatgagcaaaactctttagatggtttgaatgctcaattcgaagctggactaattaagcagcaggattacgaaaaccagaaaacagctatcattcaagctgctcaagatcaacgtaatcagattgctgctgaatatgcaaagaatgctcaggatattgaagataagtatcaacaagatcgcttgaacactcaaattgcatttggtggccaaatgatgggttcactcacatcgatgtttggttcaatgtttggcgagcaatcaaaagcatacaagatcatgtttgctgctgataaagcttatgccattgcagctgcaggtatttctattcagcaaagtattgcaaaggcggctagtgttggttttccagcaaatatcccattaattgcaagtgctattgcacaaggtgcaagcatcattgcaaacatccgggcaatcaaagatcaaggctttgctgaaggtggctacactggtcgaggtgggaaatatgaagttgctggagctgtgcacaaaggcgagattgtatggtcccaagaagacattaaacgttggggtggtgttggtttagttgagagaatgcgtaagagtgcaaaccctgaagcttttctcaataacaatgcttcagctgatagtgtcatgcgccgtgcaatgatgagctctaatgcctttatagaaagccaaaagcaatctgatatctttaatcaaccggttcaagatactcagattatttataagggtaatagagacacacctaagttagcttcttcggcaaattctgacctgttccatgacggtaaagtctatttctcatccaatggtttagttctggatcgctcaaatctggatgatgttcaggactttacttcaggacgtgcttcacgccctcaagctgagattaagccttcaattgagccagcttcatcgataatcaatttcaaaattgaagtgattaatcaggtgagtggggcgacagttgaagccgaacaactggatgagcaaacagtccggatcattgttaaagatgaaatggataagcagcttccaagaacggtaccgaagcttgtaagtgatcaaattggtaatccaaactcaactattagtcgatctttgactgagaataccactgtaaggcgtaaccgttaa

SEQ ID NO: 62889 - DNA, 264 bp, Acinetobacter baumannii
atggacaataaagaacaaactccaaacactaaccaagaaactaaaaaggtgctcactgctgctaaacgtgcagcgatgaccgcgggtgtagtaattgctacaactgcaactgcctttgctgctgagggggatgcaactattgacttaactactggtttggctggtgttgcgattgttgcgggtcttctttcagcgggtagcttgaaagctgtaccgacatacgttggttggggaatccgcaaagcattgtcaatgcttcgttaa

SEQ ID NO: 62890 - DNA, 636 bp, Acinetobacter baumannii
atggataactacaaagaatatttagatccaacagatggatatgccttagtaaaacagtcagtaaatatgccagtgcgtccacattggattgatattccagaaggtgccgattgtttaatgcagtggcctacaggtcataaagttttctatagagataattttgctaaatcttggaatagtgcttatagggaatggcaatttgtcagtggtgatgatgggattgatcaatcaagtacgctttggaaacgcgccacccaagaccctgccttgattagcggtgctgaggcaaagcttgcgtgggctaatggagttgatattcaaatcaagaatgtaaattgtgtcaactggtatgacttagatgagagcaaatacaatcttgatatttttgataatgttcgtgttgatttccgcctcaaaccacaaactatcaaggttgagcttgagctgccgaagccttttgagccgaaggatggggaaacatactggcatatctatccatcagccgagaaaggttatcacttcgttcgttcgtttgaagatgatgatgtttggtgtcaattcggggcttggcgcaccgaggcagaagtaaaacaagtcgtagagcaactcagaaagatacgaggtactaactcatga

SEQ ID NO: 62891 - DNA, 276 bp, Acinetobacter baumannii
atgaacacaaacaatttatcagaacaaccaatcgaactcaactcaccagattttttaataggtgacgttgtagtgcttactaaagagtgccgtactttcaaatcaaatgatttgtttgaagttaaaaataaaactttgactagtttatggaccatcaaatcagagaatcatttgattctggtttcttcaaaagaaatccgcacagcaacagttgctgaacttaacgccaaacgccggctaacaagcgctgagcaagcattagcggaggtgtcatga

SEQ ID NO: 62892 - DNA, 156 bp, Acinetobacter baumannii
atgatcaatataaatcattttaaatcagttgtttgcgctgactgtggcgttaagtttaaaccagcatcacgatatttagagttgggtgctcacaaaccacattgcacgcaaatgggtgctgaaatggtaaaaaagccaacacaaacaaaggcataa

SEQ ID NO: 62893 - DNA, 198 bp, Acinetobacter baumannii; identical to SEQ ID NO: 61826

SEQ ID NO: 62894 - DNA, 1359 bp, Acinetobacter baumannii
atggacacaagcaaggttaatattaatgagttaattgataaagcccgttttacatcttttcattggaaagttttaatctggtgcttacttattattatttttgatggatatgatttagttatttatggggttgctcttcctctgttaatgcagcaatggtcgttaactgctgttgaagctggtttactcgccagtgccgctctattcggcatgatgtttggtgccatgattttcggcacactttcagacaaacttggacgtaaaaaaaccatcctgatttgtgtcaccttatttagcggatttacctttataggtgcctttgccaaaggaccaactgagtttgctattttgcgctttattgcaggtcttgggattggtggcgttatgccaaacgttgtggcacttatgaccgaatatgcacctaaaaaaatccgcagtacattggtcgcaattatgtttagtggctatgcaattggtggcatgacatctgcgctactcggtgcatggctcgtaaaagatatgggctggcaaatcatgtttttaattgctggtattcccttgttactgctcccgctcatttggaaatttttaccagagtctctcgcctttttagtgaaatctaatcatagcgaacaggcaaaaaatatagtgagtaaaattgcgcctcaaactcaagtcaatgccaatactcaactggtgttaaatgaaagtacaacaacagatgcacctgtccgtgcgcttttccaacaaggccgtaccttcagcacgtttatgttctggattgctttctttatgtgcttactcatggtgtatgccttaggaagctggttgcctaaactcatgctgcaagcgggctattcgttaggtgcgagcatgttgttcctctttgcactcaatattggcggtatggtcggtgcaattggtggtggtgctttagcagacagattccatttaaaacctgtcattaccattatgtttattgtgggatcggcagctttaattctgcttggcattaatagtccacaatttattttatatagcctgattgcgattgccggcgctgccacaattggctcacaaatcttactctacacgtttgttgcgcagttctatccgacggcacttcgttcaactggcatgggctgggcatcgggtattggccgtataggcgcgattatcggaccagttttaacaggtgctttgctttcatttgagcttcctcaccaaatgaatttcttggcgattgcaattccgggtgtagttgctgcacttgcaatatttatggtcaatctaaaagcctctgttgctgcacaaacgccatcaacttttaaccctcaaaacacgcttacccagcagtaa

SEQ ID NO: 62895 - DNA, 192 bp, Acinetobacter baumannii
atgattgataatcctgatatggaggttaccgtaaatcgtttggatgataacggtaatgaagaaaccatctcaatgactgctcgagattggcttgactacattcgtgagcaagaagaaattgctaaagatgaaattcaagctgtacgggccttagcaagttgcgcattaaaatttgggagtgaagcagcatga

SEQ ID NO: 62896 - DNA, 351 bp, Acinetobacter baumannii
ttgagcaatcttcagagtaaagcggcacaagccattgagcgcgaattttggaaaccaagtaaagaaaaaattatagggatgccaaaacttgaggttgaaggcaaaactgagtttggagcatttactgaaacacctgacggacgtgaagctgtaaaggccatgattgataatcctgatatggaggttaccgtaaatcgtttggatgataacggtaatgaagaaaccatctcaatgactgctcgagattggcttgactacattcgtgagcaagaagaaattgctaaagatgaaattcaagctgtacgggccttagcaagttgcgcattaaaatttgggagtgaagcagcatga

SEQ ID NO: 62897 - DNA, 192 bp, Acinetobacter baumannii; identical to SEQ ID NO: 62895

SEQ ID NO: 62898 - DNA, 951 bp, Acinetobacter baumannii; identical to SEQ ID NO: 46780

SEQ ID NO: 62899 - DNA, 669 bp, Acinetobacter baumannii
atgaagtattttgttttaagtgcgacgcaaagtagtctttgtccaatttcacttgtggatgatgctgttctatatatgaataaagagcaagctagccaaaatatcgaatgtggatctttaccgtggtatagttataaaactagcaaaaactgtgatttacctatcgaaggtgtacttatcttaaaaagtaaaaaaatagaaataagtattagaaatataaatgaaaatatatatgttgttgatgagatttttaaaaatatttttggaaaatatattaattctgattttataagggttgaagtgttgagtgagagtttggaaaaaataaataacaaaaattattatatttttagatttaatcaaatttttgattttaaaaatgtcttagatttaaataagtcaacttatagattggataatgattttttagttttagaaaaggcagagtttttaagtgatttagatattgatatattgaaaattgataatatggattctgctcaagatactttttttatcagtgagttcgttaaaaaagaaattgaaaaaaataaatatcaaggtataaatatttttgaacttactttggctcaatggagagattctgatgatttcagttttatgtttttgagcgaagatgaggtgaataaatttgtatggccaatttag

SEQ ID NO: 62900 - DNA, 402 bp, Acinetobacter baumannii; identical to SEQ ID NO: 46581

SEQ ID NO: 62901 - DNA, 672 bp, Acinetobacter baumannii; identical to SEQ ID NO: 53182

SEQ ID NO: 62902 - DNA, 600 bp, Acinetobacter baumannii
ttgttaactaattattattctatagttttgttatttgctgctgaaagacttaaatttggtgtaatatttgtactcttatatttacttgctacttcaaaatataaggttttatattattttttagctatggttggtcacatacaatctttcttcttttcattttatgtatttttaattgaagtaagaaaattaaaaaaattatggttgaaaattgctattattatttcgatgctcggtgtaggtggaatttttctcttttttcttagtgagcatatttctcataaagttgaagcatatagtggagaaggggggtctttagggagtattataaaaacaattttctttattattttaagttatttatatagtaaaaattttaaagttctattatgtggtattcctttaatagctgcttcatttgtattggatgtagaacgagtggctatctttgcttttttcgtttttatcggtgcgtttgtttattataaaaaaccacttgatcctttattgattttaatcctattatatttttctatgaaatctattgaatttttaattaatattattaattttggttcagggtatatttcgatttcctga

SEQ ID NO: 62903 - DNA, 324 bp, Acinetobacter baumannii; identical to SEQ ID NO: 46670

SEQ ID NO: 62904 - DNA, 765 bp, Acinetobacter baumannii; identical to SEQ ID NO: 46359

SEQ ID NO: 62905 - DNA, 750 bp, Acinetobacter baumannii; identical to SEQ ID NO: 46785

SEQ ID NO: 62906 - DNA, 918 bp, Acinetobacter baumannii; identical to SEQ ID NO: 46807

SEQ ID NO: 62907 - DNA, 747 bp, Acinetobacter baumannii
gtgattgaaacagctcgtcatcaccgtgaatttattcaagatccagttttaaaacagcgtgttacttcattgattggacaagaggcgattcattctaagttacacaatgaatataacgatgcgcttaaagatgttgaataccctgtcgatttataccgtttcttgggtgaaaacttctttaaatatgtgtttttgaaattcccgcagccattaaagctttcactcatggcgggtattgaacattttactgcggtacttgccgaatacatgatgaagcatgaaaagaatttctactattcagatgatgcaaaaagccgtgctttatggatgtggcatatgcttgaagaatctgagcataaagatattgcctatgatgtatatcaattactcaatggtagctacccactacgagcttctggcttcttcttagctttctttactattttaggtttgatcccagcaactaccttgtttattccggttttaagaaaaccacaggaaatgttgactagaaaattctggaaagacgcgcgccgtggcgtcaacttaatttttagtccaaaagatggcgtatttggtagcaccattggtcagatttttgattacttacgtccagacttccatccaaatgatcatgacacgaccgaatatctggagtactacaaaaagaaattacttaacgagggcggtgcaattgcgccttactttgtgaaggaatttacaccaccagttcgtgcagtttcataa

SEQ ID NO: 62908 - DNA, 795 bp, Acinetobacter baumannii
atgataaaaaatatgttaagtaaggaagttagaaagaaaataaatgcagatttagatgagctatggttggattataagtttgaatttaaaaatttaaatagaagattgaagctgggaaagttgtttgataataatcatttttatatatttgatgaggatattaagtatttttttgatttagaagaagacttggttggtcaaaatgtatatgtggtttataatcgtggagggaatatttttagaaaacttttttcattagatttttcaatttttaaaaattataaaatatatagtcttatatcatttgataatgatgatgaaatatttataacgggatttttcctgtcaaaaaatggagaaaaaccattagatgaagttgatggttttagtctggtgtggcaagaggtttcgttgcatgattatgattttgatataaataatataaatcaaaatttattgtctactattgattttttaaataagaaaattgaagtaaattattcaatttttaattgtggggtttttgttataagtgatagcgattttattaaaggatatgagccattattttcttgtgatgattattttagctatgtaattagtccttatcagattgagaagaataaaataaaattgactgatattgtagtgttatctaaatttgtttgggaggaaagaggtttaagttttaaggaatatacagaaaatgaatatctggaattatatagaagttttctagataaattagatactattattgatgatttaaagttaagaaatttttataatagataa

SEQ ID NO: 62909 - DNA, 519 bp, Acinetobacter baumannii
ttggatcatattataccaaaggagagttttcctgaatttgttgtccatcctaaaaatttaattcctgtttgctcccaatgtaatagttttaagtcagataagtggataaaacatggtggttttgaattcttaaatttatatttacatatattgccaattcaacaattcttatttgttgatattaaatataataactttacttttgatgtaaaattttatttgaaaaataaaaatggaatagattctatattatttaatataattgaaaatcattatactaaccttaaattgatagaaagatttaataataaatcaaacgaaataatttctgagtttgaaaactcaattattggtagtttaactaaattgtctcttaatgatgcattagagtgttctaaaacaactatagatcttgaaagaatacgattaggttttaatcattatgagaatgtgctgaagttagagttatgtgaagggatagcttttaaacagtactgttactctaaaggatataagtaa

SEQ ID NO: 62910 - DNA, 1977 bp, Acinetobacter baumannii
atggttattttacctaagcataaagctggaaaattaagcttatacatgttaaccgctgttgttagtatgatctcacttaatactcatgcacaatcagtaaaagtggagaaagcaactactaattataataataattttgcggctagttatgagttaaataaaaagagcgatattgaaaatgcggtaaaaggattcatcgcgaaaccaagtggaaaaattcttaatgataaaaatgaagttgtttgggattttgatagttttaactttctcgaaggtgacgcacctgaaagtgttaatccaagtctttggagacaggctaaactaaataataatattgggctttttaaggtatcagagggtatttggcaaatccgtggatttgatcttgcaaatatgacgttgatagaagggaaaactgggtggatcattgtcgatacgctaacttcaaaagaaacagcggctgctgcaattaattttgcgcgtaaatatttaggcgataagcctgtgtcagctattatctttactcatagccatgtagatcacttcggcggagctttgggtgttttaacacctgaacaaattaaagcagggaatgttcctgttattgcaccatcgggttttatggaggaagcaaccagtgaaaacttgatggttggtccagcaatgggccgtcgtgcaggttatatgtatggtcgcgctttacctagaaatattacgggtttagttgataatggtttaggtaaagccgtttcatttggaaaaattggtattttagaaccaacggtactaattgatgaacccgttaaaaagttgactgtagatggattggacttagtattttataatgtaccacaagccgaagcaccagctgagttaactttcgcgataccatcaatgaaagcatattgtggttcagaaattgttgcgcacactttacataacctttataccctccggggcgctaaagtccgtgatactttaaagtgggtgggctatcttgatcaagcattagatcacacgcaagatactgaaattttctttgcacaacatcattggcctgtgtggggcaataaaaacatccaaaaatttataacagtgcaacgggatagttataaatttatacatgatcagactgttcgtatgatcaatgcaggaatgaatggtgctgaaattgcagaagccattaaatttccagaaacgttggatcaagaacttagcatccacggttactatggtactttaaaacataatgctagggctgtgtatcaatattacatggggtggtttgatgcgaaccctgcaaatttagatagtttgccaccaactcaagtagctaaagagtatgtggaattagctggtggtgaaaatgctatgattaaattagcgcaaaaggcatatactcaggcgaattatcgttgggctgcagaactattgaagcatgtactaaactataatccaaataataaacaagctaaagatttacagataaagacattcagccaacttggatatatggcggaagcatccacttggcggaatttttatttaactggtgctatggaacttgaaacaggtgctcctagaaaaggtgtatcaactgaaatgttattagaaatgtttgaacatacacctattgagcgttttcttgaatcaatggcagcaagtcttaatgcagatcgtgctaaagatgtggatatggtcattaatttagttttttcagatttaaatgaaagctatcaaatttcggttaaaaattctgttatgcactttaaagctgtgccaaaagccgaaaatgtccatacaacattgacactgactaaaccatttttccttaaaatggtgacagggcaaagtggagcattagatttgatgttctctaaagaaacaaaaatagatgggagtcgattagatttgcgtcgtttcttttcgttgattgataaagctcctggaactttccctatagtcactagaaaatga

SEQ ID NO: 62911 - DNA, 303 bp, Acinetobacter baumannii
ttggcccctttgcctgtacttagttccgattttagtgaggtgattgcacttgcattgcttgcaacctttccgtcgatgcttgttacttttgagtcaaggctatttaaagcgctagaatcggccttagtcgagatggcattattggctgcgaccaaatcatttttgagcgatacgattgccgagccttgtgatgagatttggccctctgcggtagtaactcggttagataacgaatttaaagccgtagcatcagctttcttcgtaagttcgccattgattgatgtaacgctgttattcaattga

SEQ ID NO: 62912 - DNA, 1866 bp, Acinetobacter baumannii; identical to SEQ ID NO: 45646

SEQ ID NO: 62913 - DNA, 2895 bp, Acinetobacter baumannii; identical to SEQ ID NO: 45648

SEQ ID NO: 62914 - DNA, 1941 bp, Acinetobacter baumannii
atgaaattttcaaaaatactggttgccaatcgtggtgaaattgcagttcgagttatgcaaacagccaaggcaatgggttaccaaaccttcgcagtttattccgatgcagaccgtaatgctcgccatgtgcaagaggctgatgaagctgtttatattggtgcttcaaaagtatcggagtcttatctctccatcgctaaaattattgaagcttgcaaaaaaacaggggcggatgcagttcaccccggctatggttttttgtcagaaaatactgattttgctcaggcatgtatcgacaaccagattacatttattgggcctaccgcttctgcaattgagttaatgggcagtaaacgcctttcaaaaatcgccatgattgaggcaggcgtcccttgtgtgccggggtatgaaggtgaccgacaagatctcgaatatttagcaactcaagctgagcagattggttttccaattatggtcaaagcttctgcaggtggcggcggtcgtggcatgcgtttggtacagcaagcatccgagttgtttgaggcattacaaaccgcacgttcagaagctgaaaatgcttttggttctggtgagctcattttagaaaaagcagttattgctccacgccatgtcgaaattcaggtttttggtgatacacatggtaattatgtgtatttgtttgagcgcgattgttcaatccagcgccgtcatcagaaggttgttgaagaagctccctgtccggtgatgacgcctgaactgcgtcagaaaatgggtgaggcagccgtagcagcggcaaaagcatgtgcttatgtcggggcaggtacagttgagtttttgctagatgcatcgggtgcattttactttttggagatgaatacccgtttgcaggtagaacatccggtcactgagcttattacagggttagatttagttgaatggcagttacgtgtggcgaatggtgagcagttacctttaaagcaacaggaattgaccttaaatggtcatgcgatcgaagtgcgtttgtatgcagaagaccctcgtcaggactttttgccacaaacaggacaaattttacgttggaagcctgcagctttgccaaatgtgcgaatcgatcatggcatgttagcaactgatgaagttagtccattttacgatccgatggtagcaaaggtgattgcctatgggaaaacccgtgaggatgcgattcgcttactggctcgtgcagtcgatgatagtgttttacttggagtgaatagtaataaacagttcttggtcaatttactgcgccatccagttgttgttacaggggataccaatactgcattcatccaacagcatttccaaaatgatcccagcttacaccatcaggttttatctttagaaaccttagcaattgctgcggcattatttagccaaagtaaaggtactgcagtgtggcaaactgggcttggtgtgccattaccgttaaaattacaaactgccgatcagcaaattcaattgcagctttcatctgtaaataacatattcacggtacagttctgtgatcaaacagttgttattgatgtgcttgagaaaacgccagagcaactagtttacttaattgatggtgtacgtcgccgtgttcaatatgtattggatgatgatcagctttatctagatcgagataatggcaatgttttgatacgcaatatgacttacgctgcaccagaagctaccgatgtagcgggagatggcaaaattcgagcaccgatggatggggctgtagtgaatatcctggtcaatgaaggcgatcaagtagtgaagggccaaacattattgattcttgaagccatgaaaattcagcaacagattaaatctgatgtggatggtgtagtcgctgaaattttaggtcagcaaggtcaacaagtgaaaaaacggcaaatgctgtttagtatccaaatttaa

SEQ ID NO: 62915 - DNA, 960 bp, Acinetobacter baumannii
  misc_feature (145)..(154): n is a, c, g, or t
atggggtcacgtttaccaaatcactttgaaattcaaaattctattgtggaggaggagttaaaaaaactagaaatcttggctcaaaaaccaataacacaagatgagatggagtggtttgaaaactataaaaagagtattgtagatnnnnnnnnnnatggattggataatgttgcaatttctagaatagtgaaacttaataagtttttaaaagcattacgcttacttactattggttttaaatataaacattattacgattatcagtttggtaatccatttatggtccctattaaagcaatccgagtaaatattaaaagatatttaaatacaaaaaaatctcaaaaattttatataaataatgacgagttagaaatttgctcatctaaagaaagattttatatatatccaatccactttcatcctgagtcttcaacttctgtattggcgccggaatatacaaatgaatactcgaatattataaatattgccaataatcttccttttggtacttatttatatgtaaaagaccacaaaagtgcaaaaggtgtgcagagttatgaattctataaaaaagtaagttcattacctaatgttcgtttagttaattttgatgtgaatattaagagattaattctaaagtcattaggtgttattactgttaatagcacggctgggtatgaagctttacttcttggaaaaccagtttatcttttgggtagagtgttttatgaaaactttaataacgtatataacctcaaatcctttagagatattagagatattagagatattctggattttcaatttttagatgtaaaaaaagattttatcgcatataaaaaatatgtttataaaggtgtaatttttattgattatggtaatagagtcaatgataaaaaaagatactttagtgaattggtcgattcgatattcttaaatattaatacggatattgagtga

SEQ ID NO: 62916 - DNA, 1041 bp, Acinetobacter baumannii
ttgagtgatttgaaaacgcatatttatagcaatatcgaaaataatcattctactttagaagttcctagatggattcgaggattaccagctatttttaaagatacaagggtttcacactttggtttaagtacttctactaaaatttttgatagtttgatgtttagtcaggtcaaagatgcaattatttgctttgatgatttcgaacggatgtctaataaattggatattaaagatgttatgggattggcaaattatctaaaattagaaaaaaactgtcaggttattttgattttagatgaaaataaaacagcaagcgaaaataagaaaaattatgctgaatacaaggaaaagttgattgatacaacaattcctattgactcagtgaaatcattaattcaagaaaatacagaagactttgaaggagatgaaatacttgttgagttgatgtttgagtttgcagaaaccttagaaatccataatttcagattttttcaaaaagtaatcaagttatatcgagattttaggaagtcattacctgaggcagtcgctgactcaacaaaagaaactattctaataagaattcttcaaggctacttaattcaggatatacctgaattagaatatggatggaatgactgtaaatattttcccttagatcagcaaaaagattggtctgatagaagaaaaaaaacttataagagcctaattgatctttcaaatgtgtgtataaaaggtgatggtgacctttggtttattgaatttaagaaatggtttgatcaaaaagagaatttttctattgaatcaataaaagagttagctcaatctgaacttataagtgataaaaataataagttaaaagataaactctcggctcttttcgatgagcgagataattatcaggcgagtgatgattttatagataggttattttacctagcttgtcagtgtattggggtctcttctttattagaccttagagcgtgtatctccacttggctttgttgcacaaacctatctgtaaaggctttttcagcgatataa

SEQ ID NO: 62917 - DNA, 231 bp, Acinetobacter baumannii
atgccagatgcaagccatgaaggattaacattcaaaaattttgaggcacgtaataaattttcaccttccattgttttggattttccagacagccaatcactcacagaaggaggtttaactcctactgcacgagcaagctcaacacctttaatctttttaggtggcaaaacttccatggcatacctaagtcgttcagcaagagtattcatacaactatcctcacaatgttag

SEQ ID NO: 62918 - DNA, 666 bp, Acinetobacter baumannii
atgaagctaatctatacacgtattgcggcagcagctgcattagaagtagggactattgcaaaccctgaatattatgaatatccaaatcgaagtgctgaagaggtaatcatttacggtgattacccgaaaattcaaaatgattatgaagctttgaatattccagttgaagttcgcaaattggaagaacctgcaaaaacaactttggccacagtaaatgtcgcggttggaattactccagagctgcaaaaagtcattgatcaagcaaaagctgactgtgaaaaggttattgaagaaaacgggcaacttaaacagaaaatcgaaatcttggaacaagctagtggtgatagttcggagttaatttctgaaaactcacgtttaaaagatgctgtactccaagctgacaatgctactaaagcggctgaagaaaaggtagtaagcattcaagcagagtttgatgcttttaaaaatgatgttgctgctatgcaagcgcgtattgctgaattggaagctggaaaagcggcagaaaattcagcaacagaaacggcagctaatgattttgaaaactggtcaaatgatcaattaaaagagtatttggctagtaaaaacattggttacaaaccgtctgcaacaaaagcagaactccttaaattaatcccgaaggaataa

SEQ ID NO: 62919 - DNA, 162 bp, Acinetobacter baumannii; identical to SEQ ID NO: 46251

SEQ ID NO: 62920 - DNA, 666 bp, Acinetobacter baumannii
atgaagctaatttatacacgtattgctgctgcagctgcgttagaggttggaactattgccaatcctgattattacgaacatccgaatcgaagtgctgaagaagtaattatttacggtgattacccgaaaatccaaaatgattaccaagctctggatattcctgttgaagttcgcaaattggaagagcctgcaaaaacgacattggccactgtaaatgtagcggttggaattactccagagctgcaagaagttattgataaaactaaagctgagtgtgaaaaggttgttgaggaaaacgggcaacttaaacagaaaatcgaaatcttggaacaagctagtggtgatagttcggagttaatttctgaaaactcacgtttaaaagatgctgtactccaagctgacaatgctactaaagcggctgaagaaaaggtagtaagcattcaagcagagtttgatgcttttaaaaatgatgttgctgctatgcaagcgcgtattgctgaattggaagctggaaaagcggcagaaaattcagcaacagaaacggcagctaatgattttgaaaactggtcaaatgatcaattaaaagagtatttggctagtaaaaacattggttacaaaccgtctgcaacaaaagcagaactccttaaattaatcccgaaggaataa

SEQ ID NO: 62921 - DNA, 342 bp, Acinetobacter baumannii
ttggaacaagctaatggtgatagttcagagttaatttctgaaaacacacgtttaaaagatgcagtactccaagctgacaatgctactaaagcggctgaaggaaaagtggtaagcattcaagcagaatttgatgcttttaaaaatgatgttgctgctatgcaagcgcgtatagctgaattggatgctggaaaggcagcagaaaatccagcaacggatacggcgacaaatgattttgaaaattggtcaaatgatcaattaaaagagtttttggccagtaaagatattggctacaaaccatctgcaaccaaagcagaactccttaaattaatcccgaaggaataa

SEQ ID NO: 62922 - DNA, 342 bp, Acinetobacter baumannii
ttggaacaagctagtggtgatagttcggagttaatttctgaaaactcacgtttaaaagatgctgtactccaagctgacaatgctactaaagcggctgaagaaaaggtagtaagcattcaagcagagtttgatgcttttaaaaatgatgttgctgctatgcaagcgcgtattgctgaattggaagctggaaaagcggcagaaaattcagcaacagaaacggcagctaatgattttgaaaactggtcaaatgatcaattaaaagagtatttggctagtaaaaacattggttacaaaccgtctgcaacaaaagcagaactccttaaattaatcccgaaggaataa

SEQ ID NO: 62923 - DNA, 2013 bp, Acinetobacter baumannii
atgaaaaataatacactgaaaatgactacattatgtatgttgaccataggtataagtcaatttgcatcggctgaagtgacgcgtgcgacattaccattactcaaagcagagcaactccccgcatggtgcgattctaatttaaaaaaaattcagcaagagatttctagttttgaaaaaacgcctgttaaaaacgatgctgccgctgctccgatattagccaagtgggataaaatttttgctcatcttgaagatttttcgggacccataggtctatatagtaatgtagacccagatgcgaaattacgtaaggcagcagaagactgtgaaatcaaaattaatcagtttcatactgatatatttcaaaattcaaaattatataacgtcattaagaataccaaagcgactgatccgattgaccagaaataccgtcaagatattctggatcaatttgaagacacaggggttcagttagaaccaacaaaacgcgcaagaatgaaggctattctggatgagttgactaaacttgaacaagaatataaccgtaatattcgtgataacccagaaaaacttgaatttactcctgaagagatgaaaggcttaccggaaagttatatttcggggttaaagaaaaatacgaaaggaaattatctattaggttttgagtatccggagtatcgccccttcatggagctagcggataatgatgatgccagaaaaaaataccagattgcctttacacgacgtgggactgaacaaaatttaaaactactcaaacaggcaatagatttacgttatgaacttgcacagttatttggaaaagcaagttatgcagattgggctttaaaagaccgaatggcaaaaacaccagaggctgtaaacaagttcttggcagaagtacaaaaaacggtagcaccacttgaacgtaaagaagtagaagaacttcgcgcctttaaagcacaaaccttaaaaacgccgttagacaaaaccgagataacgcgttggagtgaagcttactggagcgaaaaacttcgtaagagtaaatatcaaattgatcaggaaaagcttcgtgattattttccaactttagccgcacaaaaatggttatttgctatttcatctgatctttacggtattgattttaaacctgtcaaagttaaagcatggcaggatgaagttgaatattacgatgtagttgataaaaagacaggaaaactccttggtggcttatatatggataaattcccccgtgaagggaaatacggccatgcagcagtttggggagtatatggtggcagcactttaaccaaccgattaccgatttcagtattggtgaccaactttaaccgtaaaggtttaaatagtgatgagcttgaaacttttgtacatgagttcggtcatgctttacatggcatcttatcaaatacccgctataccagtcagtccggaacttctgtagagcgtgattttgtagaagcaccttctcaaatgtatgaagagtgggcacgccgtaaagaaaccttatctaaagtggccgattattgtgatccagcttgtccacgtgttgacgatgaattaattgcccgtttaaaagcagtacataattatggccgaggcttgcgttatgcccgtcagacgctttatgcacaatatgacatggcacttcatacggcagatgccttaaaagtaaaacctttagaaacttggcaaaaaatggaagctgctacagccttaggatatgtgccaacaactgaattccccgggcaattcgggcatttaatgggtggttatcaggcaggttattacggttatatgtggtctgaggttttagcgctagacatgctttctgcttatggtgacaacctgaacaacccacaagtgggacaacgttatcgtcagacgattttatcgcagggtagccaaaaaccggcagctgaattggttaaagatttccttggtcgtgatcctgacaataaagcattctttaacgaaattaccggacaacgggttaaataa

SEQ ID NO: 62924 - DNA, 720 bp, Acinetobacter baumannii
  misc_feature (702)..(711): n is a, c, g, or t
atggatgagaataaaagcaaagcattacaagccgctttgagccaaattgagaagcaatttggtaaaaatacggttatgcgtcttggtgataacactgttcaagcagttgaagccgtatctacaggttctttaactttagacatcgcattggggattggtggtttaccaaaaggccgtattatcgaaatttatggtcctgaatcttctggtaaaaccacaatgacattacaagcaattgctcaatgtcaaaaatctggtggtacatgtgccttcattgatgctgagcacgccctagaccctcaatatgcacgcaaacttggtgtagatattgataacctacttgtttcacaacccgacaatggtgagcaagcacttgaaattgctgacatgcttgtccgttcaggcgcaattgatttaatcgttgtggactcggtagctgcacttacccctaaagcagaaatcgaaggtgagatgggtgactctcatatgggtctacaagcacgtcttatgagccaggcacttcgtaaaattacgggtaatgctaaacgttcaaactgtatggttatcttcattaaccagattcgtatgaaaattggtgttatgtttggtagcccagaaactaccactggtggtaacgctcttaaattctacgcttcagttcgtttagatattcgtcgtatcggtcaagtaaaagaaggcgcnnnnnnnnnngtcaagtaa

SEQ ID NO: 62925 - DNA, 219 bp, Acinetobacter baumannii
atgttgcctgtattgtttacactcgcttttctgatctggattgctgaaaatattagtaccttttataaaatttggctttatccaagtcagttagaggcttggcatatggtagggtggggtaaacttggatcatggtatttattattgcttttgagtttagtgttagtacttaaaatattaggtcatcgagataatcaaggtaattggaatttaagataa

SEQ ID NO: 62926 - DNA, 174 bp, Acinetobacter baumannii
atgatgtgtgtgacacatgaaatgggctttgcaaaacgcgtatctaaccgtttaatttttatggatgaaggtaaaattcttgaagattgcccaacccatgaattctttgataatttagaggcacgtcatgagcgcgctaaaattttcttggaaaaaattcaggcaatgcactaa

SEQ ID NO: 62927 - DNA, 2154 bp, Acinetobacter baumannii
atgatccacgctggcaatgccattaccgtccaaatgcttgcggacggaattgcagaattccgctttgacttacaaggtgagtcggtcaataaattcaaccgtgcaacaattgaagatttcaaagctgctatcgcggctgtaaaagctaataacgatattaaaggcttagttgttacctcgggcaaatctacattcattgttggtgcagatattaccgaatttggtcaaaactttgcacaaggcgaaaaagcgattgttgactggcttatgcctgttcacgaaatcttcaatagctttgaagatttagaccttccaaaagttgctgctattaacggcatggctttgggtggtggttttgaaatgtgtttagtttgtgactatcgcgtgatgtcagaagctgcacaagtcggtttaccagaaatcaaactcggtatttaccctggtttcggtggtagtgttcgtttaagccgtctcattggtattgataatgcagttgaatggatggcaatggctactccaaagaaaccggctgctgcacttaaagatggcgctgtagatgctgtggttgctgcggacaaattacttgacgctgctactgacctggtcaaacaagcgatttctggtcgtttaaactggaaagcaaaacgccaagaaaaacttgaagctgtaaaattgaacccacttgaacaaatgatggcgttcaacacagcaaaaggtgcggtacttgctaaagcaaatcctgctcaataccctgctccaaaattattacttgattcattacaagctggtgcaagccttgcacgtgatgaagcgttaaaagctgaggctgaaggctttgccaaagcagccgtaactcctcaagctgaagcattaattggtttattcattaatgaccaagttgttaaaaaagcatctaagcaacatgaaaagggtgctcaccctgtaaaccaagctgctgtacttggcgcgggtatcatgggtggtggtattgcttaccaagcggcaagcaaaggcactccaatcatcatgaaagatattggtaacccacaacttgcattaggtatgaaagaagcaaacaacttgttaaccaagcaagttgaacgcaagaaaatgaaacctgcgcaaatgggtgaaacacttgctcgcatccgtcctactttaagctacgaagagtttaaagaagttgacatcgtgatcgaagcggtaactgaaaatccaaaagtaaaagaaatcgtacttgctgaaactgagaaaaatgttcgtgaaaacacgatcattgcttctaacacctctactatttcaattacacgtttagcaaaagcattacaacgtcctgaaaacttcgttggtatgcacttcttcaacccagttcacatgatgccacttgttgaagttattcgtggtgagaaaacttctgaagaagcaattgcaactacggtcgttcttgctcaaaaaatgggtaaaacaccaatcgttgtaaatgactgcccaggattcttggttaaccgtgtattgttcccttatttcggagcatttgaccttcttgtaaaagacggcgcagatttccagcaaattgacaatgtaatgtctaagttcggttggccaatgggtcctgcttatctgatcgatgttgtaggtatcgatacaggtgtacatggtgctgaagtgatggctgaaggtttccctgaccgtatgaagccagactacaaaggcgcgatcgaagcaatgtacgaagcgaagcgtcttggtcaaaagaatgatgtaggtttctacaaatacgaactcgacaagaaaggcaagaaagcaaaaactgttgatccaacagcgtatgaagtgattgctccattcgtaactggcgaaaaacacgaatttgataaccaagaaattattgaccgtatgatgcttgctctttgcaatgaaactgttcgttgcttagaagacaacattgtagcgactgcgtctgaggcagacatggcaatgattatgggtattggtttccctccattccgtggtggtccatgccgttacatcgaccaaacaggtgttgctgaatacgttgcactttgcgacaaatatgcgcacttaggtaaggcttatgaagcgccacaaatgttgcgcgacatggctgctaacaacaaaaaattctacggttaa

SEQ ID NO: 62928 - DNA, 612 bp, Acinetobacter baumannii
ttgaaagtcattgcgaaatttttaggtgtgagtgacgattggttgctttatggtggaccggttgaacaggaatcgaacaatttacctcaattaaatgttattgacattgaagcctttaagcagaagtacaatattccagatagtgaagatgctgttaagtttgttcaaacatcagataaaccattccctattcaaaaaagatacgttcccgtcaaagcttattcaaagatgggaatggatgggtacttcactgatatggggtatgacggaaatgcgggtgatggctatgttccaactcatacagcgggtccaagagcttatggcattaaaggcactggcgactccatgtttccagcaattcgtaatggctggtatgtagtatgcgaccctgatgcggaacttgtgccaacagaatttgttcaggtgtgtttgaaggacggaagatgcacaattaaggaatttgtaggaataaatggtggtgttttaagtttattggctgttaacggtagcgaacgcctatcttttgacatggatgaagttgaaagtattaccgctattacagatatcgtgccgccaagtcagcacagacaagaacatcccaaagctaattaa

SEQ ID NO: 62929 - DNA, 1011 bp, Acinetobacter baumannii; identical to SEQ ID NO: 46805

SEQ ID NO: 62930 - DNA, 705 bp, Acinetobacter baumannii
atggaacagacgaacaaaaaaatagaattagctattaatttaattttttggttatcaactgtttcttttataatactttttatagtaaatgcacatgatctttacaaaaaagaaataggtatatgctttactaatatctgtctaggaaatttttttcaaaactatggagagattataaaaatacctactgcaggtgtggctctattaaccttattatttttatggcacgcgtctaatatttatgtacatacttataaaataactcatcaaaataacaaaaatagtcaagaagtcaaccaaaaaacaacctatctaaatcattataaaaatttcaccgaattattggaacaatatattgataaaatagattatataaatacaaacagtatagataaatatgaattttatcatttcatacataatgatcccttatctggagatttcactatatcgcaaaattatatagattttattaatgatattaacttaaatattgttaatttaaaaaataatgctattagagataaagaatataaagatcacataaataatatgattaataaatttctaattataggctttgaaataccaaattgccaacgtaaagaatttatgaaaattgaagtaagttgttacgatttactgaacttaattaataaaagtatcaaagttaaacatattgagtctccatcacattgcttttaa

SEQ ID NO: 62931 - DNA, 387 bp, Acinetobacter baumannii
ttggtagtagagatcaagccagaatcaaaagacagatccaaagcgcaaaaccgcctctactggaaatggcttcacgaaatacataagaaaactggcaatgatgaagatcaattgcacttcgagtttaagaagaagttcttgatcaatattttgaagcgtgacgacgatagttacgctgagatgtgcttagccatatcccaactcaaacaaagcgaatctgagcaatacagagcgattgcagacggtgttattcgtgagacttctacgacaagaatgaatacatcgcaatttactaattatctaaatctaatcgaagcatttgcacttaaagaatttggcatggctttacctgtgcctgatgaccttaaatatgcgttggagaagtga

SEQ ID NO: 62932 - DNA, 150 bp, Acinetobacter baumannii
atgaatcaatataattgggttgagctaggcactaccaaaccactcttcactgtatttgccaaaaccgaaaaacaagcaatggcaaagttaaggaagtatttagctaaaattggtaaagaaaatattgagttggttagggttttagattaa

SEQ ID NO: 62933 - DNA, 207 bp, Acinetobacter baumannii
atgttcgtaagacatgataagaaagtaattaataccgataacattcgagttatttctatccatgaaaatgaaagatttatgggtacgggtgagccaaaaaactatgtgacaatctattttacggatgagaatcatgaaaaagtctacttcgattctcccgatgaaattaatagatttctaaatttatttaatacaataaacttttga

SEQ ID NO: 62934 - DNA, 195 bp, Acinetobacter baumannii
atgggtgttgttatggcctgtaaaggatgtgaggaacgtcgtgagtggattaaagaacaataccaactgttcaagcaaagggtgcgggtgctcaagcaaagaagtgttggaactactcagcaagatagtggaacaaaacacaacactgattcagcaggtagcgcagaaggatcagataatcctagccgcaattga

SEQ ID NO: 62935 - DNA, 231 bp, Acinetobacter baumannii
atgaaacgattaagtgttgcgaatattgaatattcaggtgggaaggctggaataggtacaaaggtaaagctaagtgatggaagttacttagcgggtgttaccttttgcgaaacaacagtaggtgttgatcaggtagcagaggttcttatccgattaactccagactttgagaatctaaatgaaactacaaacgctcaagccgagactacagatagaacgtgcctcaagtaa

SEQ ID NO: 62936 - DNA, 612 bp, Acinetobacter baumannii
atgaaaaacaaggcttattcagtcttgcaggtgaaagcatttgatgaagagaagcgtgtttttactggcatagcttcgactccaacacctgacaaggcaaaggatgtcctgattagcacaggagcaaagttcactttgccgatgccacttcttttccatcacgaccacgagaagcctattggcaaagtaatttctgcagatgtcactaagaaaggcattgaggtgaaaattgaactgccagaaatcgaagaggaaggcgctctaaaagaccgtgtggatgaggcatatcaaagcctgaaatatggacttgtaaatgggttgtctgttggttttacagctgactggaaagctgtagagcagttagagggtggtggtttccaattcaatgaatggaactggcatgagctaagcctagttgctgttccttgcaacaacgaatcctacataaaccaaattaaatcaatttctaaatctttcgagcagccagatgaagccgcgttgggtggacaggtgcaacaaccggaagaaaagaaaacaactgtcagcgatgtggcagaaaacaaaccaatcgaattatcagatccaaataaaggaagtatccaactatgttaa

SEQ ID NO: 62937 - DNA, 1344 bp, Acinetobacter baumannii
atgttaaaagcacagttagaaaaagtgaaagctaccatcgctgaaaaagaaaaagctatggaagcattaatgaaagccgctcatgagaaaggcttaacgctgaatgatgagcaaaatacacaatatgcagcacttgaaaaagatgttgagcgcttggaacttgaagaaaagcgcctagaaaaactgattcaagcagcagaaaaagcagcaaccactgccacaccagttgcaggtgggaatcctgttgaggctgcaaagtcagcaggaggcgatccagagccggcaggtaaaatcatcgttaagtctaatttgcctaaaggtattggctttgctcagtatgcccaagcaaaaatcgtttctcaacttaacgctaaagaaggacgttttgagtctccattagaagttgctaaacgtatgggcttcggtgatgaagtacaagacttaattactaaagcgacattaggtacaacaactgatgcaggttttgcagctacccttgtacatgaaaaccagttagttggtgaatttgttgaattgctacgtcaagcaactgtattcgataagcttcaaggcttccgtgcagttccgttccgttcaaaaatcccttctcaagttactggtggtacagcttcttgggttggtgagggtgcagctaagccattaacgaatcctacttttggtgaagttgaaattggcgagcataaacttgctgcaatcactgtctatacacaagagttgatgcgtcggtctgatccgtcagtaagcgtgttggtccgtgatgatttaatcgcagcaagcgcagctttagtagatgcaacattccttgattcagtagctgcgtctgccgtccgtccagctggtgtgttgaatggtgttactgctacgccaaatactggtgaaactgctgctgcgtacgaaaaagacttattagcattgatcaatacttttgttaccaacaacttaagtttggatggcgcttacttcttaatgtcagaaacacgtgctgctcaaatcgcgttgttgcgtgatgctctaggcaactcttactttaacggtatggctttacgtggttcgcgtaccttacttggtattcctgttatcacctcacagtctttaggcaacaagatcatccttgtgaaaacaagtgaaatcttgcttgcacaagatggtggtgtggacgtttcttacagtgaccaagcgactcttgttgatggctcaactactcaccacttatggcaagaaaacaaatttgctgtacgtgtagagaagttcatcacttgggctaagcgtcgcccagtggccgcagcttatctggactacacaactactccaactcctccataa

SEQ ID NO: 62938 - DNA, 1848 bp, Acinetobacter baumannii
atggctgatgaaatcattactcgtgagcagcttatagatgcttcaaaagatgcggaaagcttgcaaaagtttattagtggcacagatatagaagatgttttaacgcgtttggggcagatctatccaacacttgcaaaacttgttcgaattcttatggagacgggtggctggaaggcttacgagacggaggctattctattagccactactccattagtaaacccttcggtcggttatgcctttgatacaaagaaattgtatttatgggatgggactgtatggaaagatgagggaacgagcccgctagatcttgcgaaagcatatgcagatagtttaagtacagcagacagagagcttattaataatggtttgagtcttcaacaagatgctttaaaagaattactacaaattagcctctacgataaagacaacccgaaaatcattccgattgcggcagatctaggaggcaagattcagttaggttttaatactgaaacagggaagatagtagccgtcgggctagatgaaaaaacgaatatacaggcctttagcgatacagcatcactaaaggccttttttaatgacagcagctctttaaccccaattgttacagatgataattacaatattattcttgctttcaattcaactactggaaagcttgttgggttgtttgatgagtcgggtgaatcaattagctcatacgacattggccagattgttttttatggtcagtcattaagtcgtggtggtgctaacgagccgggttggatttcaataactcagccgtactcaaacctaaccttcgaaggtacagcaattcctacaggatttgcttctttaaatccattagttgaagggtataacgaaaccccatgctctggatgtgctaatgaagcggtatatcttgcctataaagaaaatggtattgagccacaagacaatgtgcttctggcaagtgcggctggtgttggtggtgcacaccttcgacaactaatcaaaggtacaaccgcatatacgaatatgcttcagcatgtatcagctgggcatagcttaagtcttgcagataacaaaacacatggtgtgactgcaatcggatgggcgcagggcgaagaaaacttgcgattaagcattgatctagatgtttaccctcaaatgcttgagcagttatttaatgacatgaagtcagatttccgagcgattacaaatcagcttggagaaatgcatgttatttcttatcaattaagtacgcggattggcttgtcagaagttgtttgtaagacgcagtttaatcttgctaaacaagggaagatttctattgcaacgccaacgtatctttttgattacgacgatcgtgatagcgttcatttccatccaccatcttataaatggatgggcgcatattatgggcgagcgtacaaacagcgtgtaatcgataatcgaccacctgactggcttgagccgatgggagcgacaattgttggtaagacaattacagtaaatttcgatgtcccaactgcaccactagtcttcgatacagttcttttagcacctacccaagatcagggctttgctatctctgatggtactaatctcttagctatccagagcatcacagcaaataacacatccgtaactattgagcttgtaaatacaccagcaacaattaatgggctatctgtgcgctatggccttgattatcttggcacaggtaaaccaattgcagacggcaagtcaggaaatttacgcgactcaacgccagataccgttttagtgcaaaacatcgttaaacccctttatcacatttgcccacactttgaattagaaattattaatggagcaatctaa

SEQ ID NO: 62939 - DNA, 765 bp, Acinetobacter baumannii
atgaacatctttattaaactacctgtcaacgctccaaatgcagttggtactcttgaccccgcagatgtacgagaagtttctgacttcttccccggtgttgaggaaggtgcttgggggcactggacattaaataaagacttggtagatagtgcaaacaatcgcacaatgaccgccacagctggtaccgatccaacattctcaaatagtcagcttcaccttgctaacatgaacaccacaacacgcaaaggctttaacacgggtctacgtgatgttggtacaacaggttttacaatttgtaccgttgtcaaacaaacaggcattacagcaagttttgctgctgtggcaggtaatcagcaagcaaatagcggaaccgcttcattattactctatcctaaccaagtttcaggttatgcaactggcttgggttttggtacggcacctaacgctcaagttgatacaactaagtgggtatttgccgcagcatcatacacaagtgatgcgaatgtagtacgtagaatggttgttgaaagcggggactaccaatttacaaatgaatttgttggaacaggtaaattagttgacccaccacttgctaacatttttaactcaatttgtttgggtacaacgcagattaactcaactcagacttttgcattagattttggtgagttcattgtatttaaccgcgccctaacaattgctgaattgaaagatgtcgcattcagatctaaacagcgtatgaagcaaaaaggcattattgtttaa

SEQ ID NO: 62940 - DNA, 579 bp, Acinetobacter baumannii
  misc_feature (517)..(526): n is a, c, g, or t
atgcatcctgcatgggtcgatccaaatagcgaatataaagatgcggaaacaccagtagttgaagtacaccgtttaaatcgactgaatttgcatatttttcttccagaagatttattacatgtttggaatgatgagcaaagtaatgatctgattttagagttttttactaagattggcattatttcgcaaaaagttcatatcgaatatcactttttgggtgagcgtgtagcttatcaagaatttattcatttattaaaacgcattcaaaagaaagaacatgaggtatttctcatgctggctgttgattcagagattgatcaagatcttattgatgaaaaatcatggatggtcaaagattatattccggctgaatttgctgcaagctgtctccttgcggacccatcattaaaaatcgaagaactcgaaccggctaaaaacttaaaaattgtggtgggccaagaaaaagcagccaaagttcttcatacgctgaacttaaatgaattaccgcagtatgagnnnnnnnnnngtatgagggagatgagccatacgtacttattctttcagaccagacagatataa

SEQ ID NO: 62941 - DNA, 933 bp, Acinetobacter baumannii
  misc_feature (889)..(897): n is a, c, g, or t
atgctaaacgcaaaacaacatgctattcaaaaaactaaaatcgcaattattggtgctggattcggtggccttgccatggctattcgtctgttacaaagccaacaatcagatttttttattttagaaaaatctaatgatgtcggtggaacttggcgtgaaaaccgctatccaggagctgcgtgtgatgttcaatcacatatgtactctttgtcttttgcacctaaaactgactggtcaaaacgttatgcagaagctcctgaaattttcgattatatccaagatataaccgatcaatatcaaattaaaaactactgtaagtttaaccatgaggttactcatgtacagtatgatgaaatgcgccatgtatggtcactagattttgcaaaccaaccttctctcgaagcacaatttgtagtttttgcatcaggtccgctacatattccacaaatccctcatattcaaggtattgaaaagttcaagggtaaagtttttcactcttcccaatgggaacatgactacagtctagaaggtaaatcagttgcttccatcggtactggtggtagtgcaattcaatatattccagaaatcgcaaaagacgttaagcaattatatgtattccaacgtacagcagcttgggttatcccacgagatgagcgtaaatactctaatttgagcaaagctctatttaaaaaatcaaacttctatcgacaaattcatcgcagccgcctttattggagtaatgaatctcgcgttgttcctatagttcagccgcaaatcatgaaatatgggcaaaaattagctgaggcatttatacgtttccaagttaaagataaagatttagccaagaaacttacaccagactttgtgatgggctgtaaacgcattcttnnnnnnnnnacactgcatatcgtcggcagcgtcagatgtgtataa

SEQ ID NO: 62942 - DNA, 387 bp, Acinetobacter baumannii
ttggtagtagagatcaagccagaatcaaaagacagatccaaagcacaaaaccgactctattggaaatggcttcacgaaatacataagaaaactggcaatgatgaagaccagttgcacttcgagtttaagaaaaagtttctgatcaatattttgaagcgtgacgacgatagttacgccgagatgtgcttagccatatctcaactcaaacaaagcgaatctgagcaatttagagcgattgcagatggtgttattcgtgagacttctacaacaagaatgaatacatcgcaattcacaaattatttaaacctaatcgaagcatttgcacttaaagaatttgggatggttttacctgtgcctgatgacttgaagtatgcattagaaaaatga

SEQ ID NO: 62943 - DNA, 846 bp, Acinetobacter baumannii
atggatccgaattctgatactcaagacgtcgttgaaaccactgcaacggaaaatacaagtgtagaaagtcaagagacaaattctccagaaacagaaactcaggagcctgagacaggtgagcaacaacaagatggcgagcctaaaacagaacctgaaaagccaaagaaaagccgtgcacaagagcgtgtcaagcaagccttacaacgtgctttcgaagctgagcgaaaactcaaagagtatgaagctcagaaggaagcaccacagggtgatactaaaccagttaaaccacgaatcgaagactttgaaacatatgaagagtacttgaaagagcacgacgcatatgaagaaaagctagatgaatggcgaattagtgaagctgagcgtcgcattctggaaaagcaaagtaaggcgcaatcagaaaagtcgcagactgaaaaacaagttgaaatggaaggcgcaattgctgcttttgcagaacaaacgcctgattttgatgatgtggttcaaaagggcattgctcgtcaactgcctatgccaatttcgctggatgaacttgcagatgaatttggttatgacgctgctacacaaacacgacttctctatgagctggctaaagatgaagagttgcaccaactggtttcggattcatcaaaactcaaggctgcacgaatcttaagtgagcgtgtggattcttggggaagcaaaccagccactccacctgtttcgaaagctccaccaccaataaaacctgtccaagctaatgcgcctgctgttcgtgacccatccaagatgagcgatgacgaatggtataggactgaaacacagaaccggaataaaggaaaataa

SEQ ID NO: 62944 - DNA, 585 bp, Acinetobacter baumannii
atgtcaaatgaatatccgaaaatgctctacaaaggcgatttagttaattttgaatacacaactgccaattcagatgagcacgaagaagaattaaaaacagatggctgggttgaacatcatgagttggaagagccagtaagtattggcgagactgatgattcagcagaagaaataaaagaaattgatttggatgcttatgttcctgttgagcagtttgatgtagtggcgcaaaaactccttgaggcagaaggggaagttggtgaaaaaagcattgaacttgaaaaagcaaaacagcaaatcaccaatacagaagaacagcatgcaattgtagtcagcaaccttgagggcgaaattaatcgcttaaaagaagagctaacacaagccccggcagcaaatggtgttccacaagaagtttatgatgcagtctaccaagagcgcgaacagcttcttaaagaaaatgcacagtataaatactcagctatgagtgcagcggaattaaaaacggtgcttgatggcaaaggtattaaatacggttcgcgcgatgaaaagcccgccctcgtaaagcttgtgcttgataaccaataa

SEQ ID NO: 62945 - DNA, 876 bp, Acinetobacter baumannii
atgtatccattaatgaccaacgtcacagcgcaatttgttgatgacaacggtaaacctctaacgggcgggcaagtgtggacctacgaatctggaacaacaacgcctaaagcgacttatgttgatccagatgggggagccaagaacaccaacccaattattctggatgaagctgggcgcgccaatatctatctagatgatggggcatatcgggtaagggttttatcggcggatggagttcttattgctgatacaaacaagctttcccgatatgttacaagcactgaactagatgaatttattcagcaagttcaagacggactggatgaattaaatcaagtcaaagaatcgcttaataccattgttgagcaaggcattgaagcccaaaagggtgttgctggtggcttagccccattggatgaaaacgacaagatagatccgctttatctcaaaacgagtgacgctctagatgtcgatgattcaaagacattagcgacttctaaggctgttaaaaccctgcaagacaagaagctcgagaagaaagatttagcttctggtggtgcacctatatttgctgcccgtgcacgaggatcattcaaaggcaccgatgggacaaaagtaggagatggggggaattttaagtctgtaacacgcttagggttaggctcatatgagattgagttaacaacagctatgccagacacaaattatcaagtgatcccaaaagcttccaacagtggaggctcagcggctcaggatgcaaatcttgattacagcttcgcaaagaccacaacaaagtttcgaatcgtttgcacctatgggggtgacaacacacaaggccggttcgacccagatttagtggatttcatagttttctaa

SEQ ID NO: 62946 - DNA, 2409 bp, Acinetobacter baumannii
atggcacaactcgctccgatgatgcaactacgtgctcgctttgaagacaaatgtggacatcctctagctgggggcaatgtatttgcatttgaagcaggtacttctacaccaaaagatacatttgctgatgcagatggaacaataccaaacacccatcccatcaaactagactctcgcggtgaggcagatatatttcttctaactggtcgatatcgctttgttgtttattcatgttttggtgtgaaaatttatgacgtggatgacgtaggtgattggtttggtactattagtgcagataatgtcattgatggagataagtcacaacacgatcttaataaacttattgattacaaaagcacacctgaatattaccgattgatcagtgatgtagatgacatccccatgtttcagcggttggttgcaacaaatccatcaaagatcattcttcaaccgggtaagacttacgatctaaagaattacacagcagtgctgcaaaagtcctgtgttattgaaggtaataatgcaattgttaaagtgtctggttcaaatgtaggttttacccctaaaccaatggtgcgctcaaagatcactgctttggcagctaaaggggactttgatgtttatgttacagatgcttcattatttagtgttggggataagctgcacatctacattggagcagacacaattcttgcgcctgatccttattatgagtctatccagtatgatgagtcagatgttgggtatacagggcagctaaatgctgttgctgcgattgatttagcaatcaataaaataacattaaaaaatcgcttgctttataaaacttctgataagggttatctgcaaaaggtctatgatgatgtgtttaagtttaaagatttttcacttcagcatgatggcttaacaagttctaaccttttttacaattatgtctgtaacttgttctctaatattaaagttattaatcctgacggaggtttaaaaggtttatcaccaaatcaatctttcaactcaataaagctaattcaccaaagctcatttaattgtcattatgttggggcatactttggtaaggcaacttgtgttcactttaaccacgggacaataaatttttcagtttggaagtctcattttgatgcacagtttagaactgatggtgctctagtcatgtatgcgggtcctgtaaatggcctatcatataaaaacactttcttatggcatagttttaagtttaatgatgttaaggtaacagatgcagcgggggtttatttcggtgctaaatgccgtgattgcacaagtaattttgataatttaaatggattttacaatgcatttcgtgggtactttggatcttataatgccaaaatcctaaaccctgttcttgaaaactcaaaaggttcaacgatgcaaatggttggtggttttgatcttcttgttcagggtgggtggtttgattatccagcttatactcgtttttgtcctcgttcaaaaattctagataatgatttcctatcatcatgggttgatggctcaactgacatgattaacgcgtttcaggttttcccaaaagctacaaacgtgctagacaatatggaatccataacaatcattggtaatagatttagaggcaatttatcaatcagtgtaggcttaaataaaggtgacattgtagataatgatgcagctttaatttctctttattctacttccgcttcagttaataaaacgaagatttccgataatagagtaggggggattaatatacgtcgatcttttgatgtggatattttcaacaacacgattgatgatacacctttaaggaacctaacaactaagcgtcttggcggtattcaaacttctggcgaagtagttggtagagcatataataatacgattattgctgaaagcgtaggcatctacaatgagacagcaaatcgtagtttagacaatgctcttcaggactttaacaataatatcaatgctccaacaaaagtgagaatgaacttaaatttaacaacaaatacgcctgtattaaacgctgcaaataaggcattagtgggctcaggtgctttgttttcaattgatagttcagagtataagtggaaattaaagtcatttgattctgcagctgagttcgttaaagcagatagaaatggcaatgagacatattcatactctttgtcattcacaccagtagcaaatggtatttattctgcgggaccaagaactgtaaaaggcgtattggttggagatcaagtacttattacttgtcctacactttcgccatcagatggagaatttattgcaaaagtaactaatacagatgttgtgcaaatctattatagaaatttcacagcaagtacggcagcaatttcacatactgtttatgtaactgtagttaagtag

SEQ ID NO: 62947 - DNA, 195 bp, Acinetobacter baumannii
atgagcaatttactaacggagcttttggattctttgcttattgcaaataataaaggtgaacacataactgcttggaacttgtcgcaagatgaatatgagattctcatgtctcaaattgttgagtatggtttgtatgataaaggagtgaatgacgaacattatttagcaggaattgaaattttcttgactagctag

SEQ ID NO: 62948 - DNA, 1932 bp, Acinetobacter baumannii
atgatgaatcagaaatttagatacgatattaatggattaagagcttatgccgttgcttttgttgtgctttttcacttcggaatactgggcttcaatggtggctttgtcggagttgatgttttctttgtaatatctggattcttaatgactaaaatcattgtatctggaatagaaaaagattcattcagcttccttaagttttacttatctcgggccaatcgaattattcctgcattagttgctttatgtttaacaattgcacttgtaggctggtttaccttaacaccacaagaatacaaagactttggaaagcatgcagcaacgagcctaagtttcatatctaatattcaatactttagagaatcaggttactttgatgctgtttcgcatgaaaagctccttttacacacgtggtcactgtcagtagagtggcaattctatatcttacttccaatctttctttacttaattaataaagcgtttaaatcaaagaaagccttaacaatatctttttgtcttttattggtaatttcatttgtcttgtcaattgtagtttccaagatcaatccttctgccgcattttatctactcccaacacgtgcttgggaaatgatggcaggcggattaatttacctattcttcaacaaaacaaccttttctaaaaaaacaagctttactattgagctagtaggttttgcactgatttttgcatctgttgctttcttctctacaacaacattatggccttcttataatgctgtagttccagtaattggtacgttcctagtattactggcagccaataacagttctttcttcacaaacaataagattgcacagttcctagggaatacctcctattctatttacttgtggcactggccgttagtattttacttaaactaccttgaggtttcccatcaaagtgtatttatagtttctgcaattttcctttctgtacttttcggttggttatcatataagttcattgaaacacctacacgtaaatggctttcaaataggtctacaaaagctgcttatggagctactgcgctttatgtcagcatcccgactgtaatgttagcctcaattttcgcatttaatggctataaagatcgtttacccgaaaacatacagctaatcacaaacgagactgaagaccggaatccacgcatgaaggaatgccatttagaatctggcgataaactccctgagtgtaaatatggtgaaggcaaagtaagtctaattgttcttggtgatagtcatggtgcagcgatgattcgctcaattgaaaaggctgctcctaaaggcacatctgttcttgactggacctattcaggatgcccaacagtagaaggtattaagaaaataaacagcccagactacaaatgtggtgaagttatttctaacttaatcactaaagccaaaaatgagtacccaaatacccctattgtaatcatcaatcgcctgaatgttcttttccatggtgcgcctgaagaaacaaacacaccgatcagatacatcaccaaaccttataaagcgtattcaaaagaatatgcccaagaaatgcataccaaatatgtagacacagtatgcaaattcagaggcgagagaaagctattcattatctcatctgttcctgagtacacaatagaaattccaaaagtattagcccatcgatcaattttgaaaaacgatgcaccaatcaaccaatcttttgcagattttcaagaaagaagtaagctttcaaatgaagctcaagtagaagcagctaaaagatgtggtgcagaaataattgatattacttcagctttttgtgatgctgataagtgtgttactactaaagatggtaaaccactatactttgatgatgatcatttaagcgtatttggagctgaccagctcatacccaaatttaagacaatgttctaa

SEQ ID NO: 62949 - DNA, 495 bp, Acinetobacter baumannii
  misc_feature (481)..(490): n is a, c, g, or t
gtgcaagcagcgccaactttgtacggcaaactaaacgtttccattaaccaagttgacaacaaaaatttcgatggtaaaagtgacgttaccgaagttaactcaaactcttctcgtattggggtaaaaggtgaagagaagttgactgataagctatctgctgtttatttagctgaatgggcaatttctactgacggttctggttcagatactgaccttagcgcccgtaaccgttttattggtttaaaaactgaaggcgtcggtacgttaaaagtaggtaaatatgactcttacttcaaaacctctgctggtagcaaccaagacatctttaacgatgacacacgtttagatattacaaatattatgtacggtgaaaaccgtttagataacgtggttggttttgaattagaccctaaattattagctggtttaacattcaatatcatggctcaaactggtgaaagcacttctgatagcaaaaaannnnnnnnnnggtaa

SEQ ID NO: 62950 - DNA, 264 bp, Acinetobacter baumannii
atggttgaaattgaatttccgcctcattctcgaattacttatgaaactaatgaaagctctagagtggtacagcagcagctttgggtcgttgaagggaaaattgaaattcaattaggtgaaacttcttatgcattaggtcaaggggattgcttggcaatgcaattagatcaacctgtcatatacagtaatcattcagctcaagttgctcgttatattttagtcgtttctaatcaactggtgcccgctcttaaggaatctttatga

SEQ ID NO: 62951 - DNA, 894 bp, Acinetobacter baumannii
atgaaacgttctgcaacctctctcattgtttcaacagttatgctttgtacggttggtgctacttctcaaattcaggcagcagatacattagctaaaattaaaagtactgggaaaatcgttattggccaccgagaatcgtctgacccgatttcatatgttgttgcaggtaaaccagtaggttatgcagtcgacatttgtaaccagtttgcaaatgatattaaaaaagaattgaaaatgcctggtttaaaagttgaatacaaggcagtaacctcatcaacacgtattcctgagcttttagcgggcaatattgatatggaatgtggtaccaccacaaattctaaacagcgtcagcaacaagtgggtttctcaactaactactatgcaacagaagtacgcatggctgttaaagcaaactctggtattaaaagtttggcagacttaaatggtaaagcagttgttactactcaaggtactacatctgacaagtacattaagatgaatgaaaaaggccaagcaattaatgtacaaaatatttatggtaaagaccatgctgactcttttgccatgatggcatctggacgcgctgctgcatttgtaatggatgataatattttagcaggcttaattgctaagtcttctacacctaaagcatttgcaattgttggtccagtactttcatcagaaccttatggcattatgattgcaaaagatgatccaaaatttaaagcaattgctgaccgtactgtaaataacttatggaaaactggtcaaatggacgctttatataaaaaatggttcttatcgccaattccaccgaaaaatactaatttgaacatgcaacaaagttcatcttataaaaaactcaaagctcacccaacagatgcaggaatctaa

SEQ ID NO: 62952 - DNA, 429 bp, Acinetobacter baumannii
  misc_feature (405)..(414): n is a, c, g, or t
atgattactcgtgaacagtgtttgtattgggatcaggaagatgaactcaaaaaatttaaagatgaatttgcattgccagaaggtgttatttatttagatggcaactctttaggtgctagaccaaagaaatctttggctgtcgctcagcatattatttcccaagaatggggggaagatctgatcaatagctggaataaggctgattggtggggattaccaacaagactgggtgacaaagtcgctaaactgattggtgcggaacaaggcgaagttgttatttcagattcaactacactgaacttatttaaagttttatcagcagcggtaaaaattcaggccgaaaaaaatcctgaacgtaaagtcatcgttgcggagaaagatgcttttccaacagatatttatatnnnnnnnnnntatttatattattga

SEQ ID NO: 62953 - DNA, 198 bp, Acinetobacter baumannii
atgccaaatcaatttgaaacacatacttcagatgtgggaactacgattcatttaaaaatgaatggtgagaatttagaaaatttaataatttgggaccgtgtaatagtaactacatatgacattttttttgtatgtattgcttttgaagcatatacagaaaatgaagggattcaaatatttattgtactagcactatga

SEQ ID NO: 62954 - DNA, 375 bp, Acinetobacter baumannii
atggctgaaaaacttcttgcaaatgcatcatcgaaattaactttagaagaaaaagcaaagatggaatggattgccaaactagaaggcaagaattccttatctaatctcatccgttctatgtgtaagaaaaagatttcagaagtagaaggtgagatggcaggtaaaagctctctcgaggtaattaaaaacatttgcactagaaaagtctcagaagctgaatccgaataccagtttctcagaaatgttttttgtgggtcaaaagataacgggtataccagagataccttcgaattagtgcctttacgggccgaaaaatcgcggcatacaaatgctagtgataaatcagtccagcttgatctacttagctggaaataa

SEQ ID NO: 62955 - DNA, 468 bp, Acinetobacter baumannii
atggaagttgatgactacacttatttaactaataaaaagctttataagaaaaaagcacgcaataaagctttacctaaggctactgaaaagtatctaaaagctgaagaagaatttactgaagctttagataagctggaaattaaatacgaaaagaaatttcagtttaaatctacaaagcattggcgttttgattttcatttaattgaacatcacatattagttgaaattgctggtggcccttggtcgggtggtcgaaagggtaagctaaaaaacaaagcttggagtcttgatcgttacgatgtggctgaagagatgggttacacagtaattcgcatagaggcagcaccaagatttaagattaatgaatctggtccattacagatccaagctcatttcgctagccaatggcttaaaaatttaaagaggcaaatatttaatggatcagatcagaccatttccacccactga

SEQ ID NO: 62956 - DNA, 375 bp, Acinetobacter baumannii
atgatgcgtggtggtcaccttgatatcgctgtacttggtgcatttcaggtggcagccaatggtgacttggcgaactggcacacgggtgcacctgatgcgattcctgccgtaggtggtgcgatggatttggcggttggtgccaagaaagtatttatcactacagaccatgtgaccaaacaaggtgagccgaagattgtggctgagctgacctatccggtaacgggtaaacattgtgttgaccgtatttacaccgacctgtgtgtgattgatgtgaccaaagatggtttaaaggtgattgagaaagttgaaggtcttagctttgatgagttacaggctttaacaggtgcaactttgattgatgcgactcaagggtaa

SEQ ID NO: 62957 - DNA, 402 bp, Acinetobacter baumannii; identical to SEQ ID NO: 56231

SEQ ID NO: 62958 - DNA, 147 bp, Acinetobacter baumannii
atgtctttatatctagctcctgaaaaaatcagtaaattaagtaaattaagtaaattaagtaaattaagtaaagaatatcaaaagtatttttataaatgtgatgatgcaatcaataacaaattatctgcagattcattaatttattaa

SEQ ID NO: 62959 - DNA, 330 bp, Acinetobacter baumannii
atggtgactttagcagtcggtttggttgcagcagttgtattgatgacacgtatgccacgctcaccacaagagtgggccgtaggcttgatctgtacggttgtatcaagtctagcgggcggttcattcattattgtgaagtgggggcttcatgaatgggttactgatgtatgggggatgatcgcacttggtggattcttctttgtttgtggattacccggttgggctttagtccgttggatctttaatttcattgacaaacaggaaggtaaaacgatcgttgaagtgatcaaagagtttaagaaagccagaaaagacattgaaaacagctaa

SEQ ID NO: 62960 - DNA, 267 bp, Acinetobacter baumannii
gtgccatccacattgacaactacagtggctgttgggtcacttactgtacctgttaatgccggtgtgctgtcgctagtgagtacatcatcaagtgctactgtcggcgcaactgcatcaaccactgctgttgctgggcctgatgtattgcctgcagggtcagtcgctgttgcagtcactgtatcgccatccaccaggttacccgggtttggtactgaccagctaccatctgtgcctgctaccactgttgcagtggtgccatctggataa

SEQ ID NO: 62961 - DNA, 201 bp, Acinetobacter baumannii
atgtggttattcccatggctgacttggtttgtgattatcattattttaagtgtattggcttatatgttcttctcaccagcctatagttatgaaacgactctatctttaggtgtaaccttaggtgtggtggtttgcggtttgtttgtgacccgaaagcgtaaagcaacccgttcggttgcgatcaatcagagtaatttataa

SEQ ID NO: 62962 - DNA, 375 bp, Acinetobacter baumannii; identical to SEQ ID NO: 62956

SEQ ID NO: 62963 - DNA, 375 bp, Acinetobacter baumannii; identical to SEQ ID NO: 62956

SEQ ID NO: 62964 - DNA, 486 bp, Acinetobacter baumannii
gtggtatcgattgtatatgtttgtgtatcgttaacactgctgctgttacctgctgcatctgtaaacgttactttggcatcaatcgtcttatctgcatccgcagtcaactcactgcccggtacgcttactgtccatgtgcctgctgtgctatctacagttgcagtatacgtctggccattgatcacaacagtaaccactgtatttgctgcatctgccggaacatttttcaatacacctgtaacagtaacgttgcctgatgcttctgatgcattaatcacattgtcagctgttactgagtcaatcgaaaaatttactgttcctgtatttggtgcagctgtatcaaccgtcacaacacctgtatcagtacctttattgcctgcagcatctgttgcagtcacggtaacggtgtgtggaccgtctgcgagtgttggaagtgtattgtctgcaagcgtccatgtaccgtcaccattatttactgctggatag

SEQ ID NO: 62965 - DNA, 252 bp, Acinetobacter baumannii
  misc_feature (192)..(201): n is a, c, g, or t
atgaatatttttattcgcgatgagcgagaagaagatattaaagaaattgaagaattgactaaagcggcatttctaaatgctgaacatacgagccatactgaacactttattgttaatagtttaagaaagcacaaacaacttacagtctctttagttgcggttgaagataatactattgttgggcatgtggcnnnnnnnnnncaatttcaccagtgcaaatttcatcaggtgaaaagaattggtatggcttag

SEQ ID NO: 62966 - DNA, 1458 bp, Acinetobacter baumannii
atgaaagtttcacacccgatcgttttcggtcactgtgtgaaaatctactataaagaagctttcgaaaaacacggtaagttgtttgacgaattaggtattaacgtaaataacggtatggctgggttatacgagaaaatcgaaactcttccaacctcattacgtgaagaaatcattgaagatttacatgcttgccaagaacaccgtcctgcacttgcgatggttgactcagcaaaaggtatcactaacttccattcacctaacgacatcatcgtagatgcttctatgcctgcaatgatccgtgctggtggtaaaatgtggggtgctgatggtaagcaatacgatgctaaggcagtaatgccagaatcaacatttgcccgtatttaccaagaaatgatcaatttctgtaaatggcatggtaactttgatccaaaaacaatgggtacagtaccaaacgttggtttgatggctcaaaaagctgaagaatacggttctcacgacaagacttttgaaattcctgaagcaggtattgcaaacattactgatcttgacactggtgaagtgttattgactcaaaatgttgaagaaggcgatatctggcgtatgtgtcaggtgaaagacgctccgattcgtgactgggtaaaacttgcagtaactcgtgcacgtaactcaggcatgcctgcgatcttctggcttgacccatatcgtccacacgaaaatgaattgatcaagaaagtacagaagtacttaaaagatcacgatacgactggtcttgatatccagatcatgtctcaagtacgtgcaatgcgttacacacttgagcgtgtagttcgtggcctcgatacaatttctgtaaccggtaacatcttacgcgactacttaactgacttgttcccaattatggaacttggtacttctgcgaaaatgttgtctatcgttccgcttatggcgggtggtggcatgtacgaaactggtgcgggtggttcagcacctaaacacgtacaacaacttgttgaagaaaaccacttacgttgggattcgcttggtgagttccttgcgcttgcagtttctctagaagaaatgggtattaaagaaaataatgctcgtgcgaagttacttgcgaagacacttgatgaagcgactggtaaattgcttgacaatgacaagtctccatcacgtcgtacaggcgaacttgacaaccgtggcagtcacttctacttgtcactttactgggcagaagcacttgctgcacagaacgaagatgctgagttgaaagctaaatttgctccacttgcaaaagcattagctgaaaacgaacagaagatcgttgctgagcttgctcaagtacaaggtaaaccagctgatatcggtggttactatgcagttgacccagcgaaagtaagcgctgtaatgcgtccaagtgctacatttaatgcagcgctttcaactgttcaggcttaa

SEQ ID NO: 62967 - DNA, 147 bp, Acinetobacter baumannii
atgggtcttgaagaagagctgttgccgcataagaactcaattgcttcatctaaacaggcacgtaaatctaaacctgctgaccctgctgttgcatatgaaggtaaaggccactctttacctaaacgcggatcgagcaatttaacttga

SEQ ID NO: 62968 - DNA, 639 bp, Acinetobacter baumannii
atgtggcagatgtatgggcatgagtttttaacgctagctcttattcactttatggcggtgattttaccgggaccagattttgtgattacggtaaggcaaagcgtacgttatggctatttgattggatgtctgactgcaattggtattggtgtcgggatttcagtacatgttttttatacccttgttgggattggctttttgattcaacaaagcgaatggctcatgtcactgatcagaacagcgggggcagcttacttagtgtatttaggatggcagtgtttacgtagccagccgaataccaatattgaaattaatggccaagcaggtagtgacacgccaagtttatttaaagcgtttaccatgggttttcttaccaatgcgttaaaccccaaagccactatcttttttctggcaatttttacgacgattgtaagtacgaccacaccgatgaaagttcaggttttttatgggatatggatgtgtatggtcaatgctatctggtttatggtggtgagtgtactgtttgcacagcctatcgtacgtaaaagatttttggagtttggggtttattttgagagggtgatgggagtgttgttgattgggattgcattgagattgatttggagtttgtttgtttaa

SEQ ID NO: 62969 - DNA, 936 bp, Acinetobacter baumannii
atgagcacaaatcaaagtccggttctgttaaatgaaatggcgaccttcgttaaggttgtcgagtcggaaagcttttctgaaactgcacgccagctaggtacaacaccttctgctgtgagccgcgcgattgcccgtttagaacgtgctttaggtacccgcttactctatcggactacacggaaacttcgtttaagtgaaagtggtcaacaggtctatcaacgttgtttagatatggtaaatgcggcacaagcagtcatggaaagttcaggtcaatttcatgtcgagccagaaggtattattcgtatgagtgttcccaaagctgtgggacattttatgattcatccgcatttacccgagtttttagaacgctacccgaaaattgatatacaaatgcttttagaagatcgttatgtagatctcattgatgatggagtcgatttagcacttcgaattacagagcaaccatcaggtggccttatgggtcgaaaactcattgatattgatcatttggtttgtgctacacctgaatatttagcaaagcatggcactccgaaccatcctcatgatttaaagcagcatgaatgtatctacttgggtgaacaagccagtgactcaaaatggaaatttcaacaaggaaataaatcgataagtgttgccgtgcgtggtcgttatgcagcaaaccatacgggtgtgcgtttgagtgctgcattacagcatttaggtattgcgagcttgccatacttcgttgcacgccatgctctacaacaaggtactttagttcaggttttaccagattggtattttaagacctattatagcggtgggctgtggttactctacccaccgacacggcatgtcccgcctaaattgagtgtgttgattcaatatttggcagataaattagcagcagagccgactttatttaagttaaagtaa

SEQ ID NO: 62970 - DNA, 867 bp, Acinetobacter baumannii; identical to SEQ ID NO: 62720

SEQ ID NO: 62971 - DNA, 252 bp, Acinetobacter baumannii
gtgaatattcaacaaaaagatgatacaaaacacggcagctttagcttacttgatggtgaaaccgttgcaggtgaaatgacttatacatgggcaggcgaaagcatgctaattattgatgccacagatgtaaacgaaaattatcgtggacaaggcgtaggtcgccaattacttgatgctttggttgcctttgttcgtgaaaaagacgtaaaagtaattccactttgcccatatgcaaaatcggagacagattaa

SEQ ID NO: 62972 - DNA, 960 bp, Acinetobacter baumannii
atgagtacgcaacatgtttcttttcagcaagcttcaccaaacgagcaggctgttattctgattgtggatgatgtgccggaaaatttaggcttgttacatgaaagtctggatcaggcaggttatcgcgtgcttgttacaaccgatgggttaagtgcaattgaaattgcacaccgatgcttaccagatatgattttacttgatggcaatatgccacatatggacggttttgaaagttgtatacagcttaaagcgagtccaattacgcagtttattcccgttatttttatgacaggtttgtctgagacagagcatattgtgcgtggttttcaggtcggcggggtggactacgtaactaagccactgaatattgaagaagtattagcaagggtaaaaacacatttggcacatgccaaactattgcagcaacagaaacaggtgattgatgcaacggaaacagccattcttgcgctagatgttcacggtaaaattgtgtggaaaacccaaaaagccagtgatctactaaatcaatatttacctgaattagaaggttttgaagcaggcttaaaagcttggttttcagacttagagcatgaaaaagaccctaaaaaattaaccagctgttcttattcaacaccatctcagcaattacagcttttattgcttacaccgtgggaaactgaaccaagtgtggcaaaaaattatcttatccagataaaaacttctacgccagctttggaaatggctgatattttaaaatattgcccgcagttgactcaacgtgaagcagaagtcatgcactggttgttgttaggaaaaaccaataaagacattgcagaaattttggagcttagtccacggacagtgaataaacatttagagcatgtttttgaaaaactttgcgttgaaaaccgaactgctgcggtggcgcatattaatagtttggtgcaagagtttcactaa

SEQ ID NO: 62973 - DNA, 3465 bp, Acinetobacter baumannii
atgagtgttatgccagatacttcacgtccccaacaagcgccacaacgtgtgatcaaaacacgccgtgaatataatatttgggtggcagatgaaagtatcgaagattatgcactccgctatgcacctacctcagtacgaaaatggtcgccttggacggtaaccaatactgcaatttctacagttagctttttggctatggaagccattggggcaaccatgctttggcagtatggctttagcaatgcattatgggcagcaattgtcgtatgtaccattatatttttaaccagttggccgattagttactacgccgcaaaatataatgtagatgttgatttgcttactcgtggtgcaggtttcggttatatcggttcggtcctgaccagtatcattttcgccagtttcacctttattttctttgcccttgaaggttcaatcatggcgcaaggattattgctcggtttaggcattccgcaagttattggttacttaatttctgccttagtgattttgcctttagtggtcaaaggcattggttttattaacaaagttcaggcagtcactcagccaatctggctcttattgctgttattaccgtggttttttgtactttggaaacaaccacaaattttaagtagtagtctgcattttgttggggcagtttcaaactcgaccgattttaatctgtattactttggtgcggcgtgcactcttattttttcatttgtgatccaaattggtgagcaagccgactatttacgtttcttaccgcaaaaagaaaagaatagaactgcatggcgttttgccgtttttttaggtggtccatcttggattatttttggatttttaaaagttttgatgggcatgctgctgatggtgttggcttttcagctgtttattcctgtctctgaactagacaatccgacttatttatattgggttgcttatcagcagtttattccaaatcctcagctagcgttaatattgactctagcactggtttgcttggcacaaattaaaattaatatgaccaatgcctacgctggctctttagcttggtcaaacttttttgctcgtttaactcatagccatccgggacgaattgtctggcttctttttaacgtgtttattgccattgttttaatggaaatgggcattagccatgcagttgaacgcattttgggactatatagcaatatcgctttggcatggattggcgccgttgttgccgatttaattatctgtaagcctttaggtctaagcccgaagggaattgaatttcgccgtgcttatttatatgacattaaccccgtaggtgtgggcgcattactcatcgcttcagtgttatcgatgctgagctatttgggctttttcggtctcatggcgaaaggtttagcaagttttattgctttggggagtgcggttttatgcgttcctgttattgcttacctaaccacaggcaaatattacattgcacgtcagcctgaaaaaattcaggcgactttggttgctaactgtgtcgtgtgtgaacgggactatgagcttgctgatatggcgggttgcccagcctataacggtacgatttgctctctatgctgttcactagaagcacgctgccacgatttatgtaaacccgatgcacgttggtcagtacaactcaaaaaagccatttggcattatttaccagaacgttgggcgagccgtttaaatagcagggtcagtttatatttattactgactctagggctgtctattgttttggcagtgagcttgagtctggtttatatccaagaaaaaacctatttagaaaccattaatgccgcagccgttccgcagttatttacactgtttgtaaaaatttacaccattttatttttattgatgagtgttgcagcatggtggttagtgttaaacgatgaaagccgacgtaatgccgaaatcgaaacgcatcagcaaacagcattattgattgatgaaattgctgcccatgaagtcacttcaaaagacttacaagacgccagaatagcagcagaacgggccaatgatgcaaaaagccgttatgtcattggcattagccatgaattacgaacgcctctaaatagtattttgggctatagccaattacttcaaaaacaagaacaactctctgaacaaggcaaaatggcgctcggggtgattagccgtagtgggcagcatttgacttcactcattgacggtttactagatttagcacgcattgaaacaggcaagatttctttaaatgtagtggatgtgcatttccccaattttattgaacagattattcaaatgtttcagccacagtttgaacagaagaatttacagtttgtttatgaaattggagaaaacctaccgcactacgttcgtaccgacaaaaaacgcttagagcaagtgctcatcaatttactgggcaatgctttaaagtttacgacaagcggcacaattactttaaaagtcgaataccgttttcaaacggcttattttgaaattagagatacgggctgtggtattgcagaggcagatttagagcgaatctttaacccgtttgaacggggcagcaatgtagtacaaggcggatttaccggaataggactcggactacccattgtaaaattgttggtcgatttactcggtggccagctatctgtgaccagtcagctcaatcagggttcacaatttaagattaagttttatttaccttcaaaagaagtagttcatccaatttctaatgtctactccaaccaaattacgggttatcaaggcgaacgaaaacgaattttggttgtcgataatgaagctgtggaccgaggcctagtcgctaattttctcaaacctttgggatttatgattgaagaagccgagtcgggcattgattgtttaagacgtgtacctatttttcagccgaacctgattttgatggatttaaatatgcctttgatgggcgggtgggaaacagcacgattattgcgtcagaataatattaccaatgtgccgatcttaattatttcagcgaatgcaggagagcgtgaagtcaatccacaagatgcggtcttaagtgaagactttatgttaaaaccaatcgatctcaatttgttgctgagtaaaattggagataagttgggcttggtgtggattgattccaaatcagagacactccttgaaaataatgaagttcaagcactcgatttaaatatatataagcaagagcaagttgctgttcatacgctaatccaacaaccggaaaataatgagctgctcgattttccgcaaagcttacaacagttaaatgacttgattggacaggggtacattcgtggaattcaacagactttaacgcaatgtcgtcaaaattttccaaagcataacgagttatgggaacagcttgaacaggcgattcaaaaatttgatttaaaacacgcccaacggttaattcaggataagcaatga

SEQ ID NO: 62974 - DNA, 1617 bp, Acinetobacter baumannii; identical to SEQ ID NO: 62717

SEQ ID NO: 62975 - DNA, 456 bp, Acinetobacter baumannii
atggatcgcacagataaaaagattcttgctgaattgcaattaaatggccgattatctatcactgagttggcagaaaaagttggtttgagcatttcaccttgtcacagacgagtgaaggctttagaagagtcgggagctatcaaaggctatcgggcagaactcgacccaaacttagtcggttttgagttttcagcgattgtttttattacgcttaaagaaggcgataaacaggcggttgagaagtttgaaaatgccgtgattgagattccgcaaattattcaggcgcagcgtttgtttggtgaacctgactatttactccatgttgttgctagagatttaccagcttttcagcgtttatatgacgaaaaattatctgctattccaagtgtgcaacggctcatctcaaccattgtgatgaaagatgtggtacctgagcgcttatttccgattggctaa

SEQ ID NO: 62976 - DNA, 612 bp, Acinetobacter baumannii
atggcttttaacatttttattgcattttggagtgtctccattctttttattattacgccaggggcagactgggcctacgccatttccgcaggtattaagggtaaagtcgtcgtccccgctgtcgcaggtatgctatttgggcactttattacgattttattggtagcggctggtgttggtctgcttgtagcaaataacccaactgctctgatgatccttactgttgcgggttctgcttatttattatggatgggaataaatttattactcacccctcctactccgaacgagtctggttctgaaaaggctcagtcatggttgagatgggctaccaaaggcgtttatgtgagtggattaaacccgaaagtttttttactttttttagctctgcttcctcagtttattgatactactgcttcatggtcagtgacaacgcaaattcttgcctttggtgttgtccacataattagctgcgcgataatttacttaatggtgggttatggttcagaagccattttgaaaaccagaccacaggcagcccaattagttggccgtttttcgggtggcttgatggttgttatcgcaacgtgcttattgattgggcaaatttaa

SEQ ID NO: 62977 - DNA, 285 bp, Acinetobacter baumannii
atggcaggatggtacgaaattattttaaatagtgagctatataaagcgaaagcatcagcagtcaatggtattgagtcagttcaaaaaaatagtagtgacgatgcgcgatatgatcgtttaactgcaaaaaatgggaaaccttacttcaatttaaaagctgcaaatcatcaaattattggttcgagccagttttatgccagtgaagcttcacgcgataaaggtatcgaatcggttaaaaacaatggatcttccacaaccattaaagacttaacagttcaggtgtaa

SEQ ID NO: 62978 - DNA, 612 bp, Acinetobacter baumannii
atgcagccgatcgattttgtaatgatttgggtggactcaaccgatacgaaatggcagcagcaatatatatattataaatccaaagaaacaaaaaccaagattgatgagctcgttgatcaatgtcgttatcgtgactggaataatcttcattactggtttagatctgttgagaaattctgtccttgggtaaggaaaattcatcttgtaacctgtggtcattttcccgaatttttagtcaaaaatcatcccaaattaaatttagttactcatgatcaaattatagaacctcattgtttgcctacgtttaattcacatgcgattgaaatcaatattcataaaatagaaggcttggcagaacactttgtttattttaatgatgacacctttattaatagccctttagaaccagagttcttttttaaaaatggtttaccttgtgatggtattcaattacaacctttgatggtggtgggggaagagaactttttaggcgcagttgctttgacggatgtcgcaattattaataaatattttgataagagaaaactctttcggagtaatccttctgcactttttaatcatcgatattcgataagtaataattttttatag

SEQ ID NO: 62979 - DNA, 1023 bp, Acinetobacter baumannii
atgaataaaaaagtgattgccggcattttagttgttatagctgtagttgccatcggcttttgggtatggggatataatcataaaaaacaattagataataatgtattaactttatatggaaatgtggatatccgccaagtttcacttgcatttgaacagtctggccgtattcagaaacttttagttcaagagggcgataaagttcaagcaggtcaagtactggcgacccttaataccaatgcattacaaattcaggcaaagcaagctcaagcacaacttaaagctcaacaagaggcaattgttaaacaagaggttggagctcgccctgaagaaatcacccaagcaaaagctcaacttgcgtctgcccaagctgagcttgataaaaccaataaaaacttgcaacgcttacaaattttggtaagtagtaccgatggtcgagcaattagccaacaagaactcgactatgccaaaagtaatcaacatagtgctgaggcagcggtccgtgaaagacaagccaatttagaattattaattaaaggtgcacgaaaagaagatcgtgaagcaaccagagcacagtatgaagtgactaaggctaatttagatttaattaactataaccttactcaagcagaactaaggtctcctgtaaatgcagtggtacgagctcggttgcaagaagttggcgacatgacaactgctcaaaaggccgtttatacattagccttgaccaatccaaaatggattcgtgtttatgtaaatgaacaagatttaagttcaattaaaatgggagacacggctcaagtcattcgtgatgcttatccgaatcagcctatgaatggaaaaattggctatatatcttcagtggctgagttcacacctaaaacagtacagacagaagagattagaacaacacttgtttacgaagttcgggtgtatgtacatgatccgaatgatcaattaaaaatgggtcaacctgtgacagtaaatgtcccacttgctttaagtgagaaagcctatgattga

SEQ ID NO: 62980 - DNA, 417 bp, Acinetobacter baumannii; identical to SEQ ID NO: 48610

SEQ ID NO: 62981 - DNA, 603 bp, Acinetobacter baumannii
atgaaggttgaacgacttgaacataagttaggtatcaaagcttctgatacagccgttattagttttactgactgtcgtgttccggctgaaaacttgctcggtaaccctgaaattgatgttgcaaaaggttttgccggtgtaatggaaacctttgataatacacgtccattagtcgcagcaatggcaattggctgtgccaaggcttctttagagcgtattaaagaaatttttaaagaccagttagaccctaattactcgactccatatttgcaaacttccaaccttgctgcacaaatttaccgaatggaagccgaatgggaagctgcacggttacttatgctgaaagccacctggatggcagacaacaaaaaaccaaactcaaaagaagcttccatcgctaaagcaaaagcaggtcgtgtaggcaatgaaatcactttgaagtgtgtcgagttagcagcaagtgttggctataacgaagatgaactacttgagaagtgggcacgtgattcaaaaattcttgatatttttgaaggtactcaacaaatccagcaacttattattgctcgacgtgagcttggaaaatcttcaagtgaactaaaatag

SEQ ID NO: 62982 - DNA, 153 bp, Acinetobacter baumannii
atgcattctgcagtgattcgccatggttttaatttcccagttttaactgctttgctatctggtgcagcatgcgtaggcttgggccaaactatagggaagttgtcacggcgagcaactagaaaaaaccgtcttcttagagttggagatccgtaa

SEQ ID NO: 62983 - DNA, 624 bp, Acinetobacter baumannii; identical to SEQ ID NO: 49471

SEQ ID NO: 62984 - DNA, 186 bp, Acinetobacter baumannii
  misc_feature (129)..(138): n is a, c, g, or t
atgcaacaacaatcgaatatgcaaaataaattcttgatagatgctgagatcggggatgacgatgtcacattgcctaatttacctgctatcgatgttcctatcgttgagtcacctgttaagcaagaagtnnnnnnnnnncttctacagaacctgagcaaccaaaatctggtttctttggacgaatga

SEQ ID NO: 62985 - DNA, 900 bp, Acinetobacter baumannii; identical to SEQ ID NO: 41587

SEQ ID NO: 62986 - DNA, 573 bp, Acinetobacter baumannii; identical to SEQ ID NO: 51401

SEQ ID NO: 62987 - DNA, 1371 bp, Acinetobacter baumannii
gtgcaaagaggtgaggattggaatgactatcgacctgcacgacctcaagactttgttgggagaacgaaagatataaaagaaatatttgatttttttaaaaaaataagagaaaaagaaatcggtacacgaattttcgcaattactggtaattcaggtttaggtaaaagctcgttaattattaccctttctgaaaaagcaaaaaatcttcatcagaaaaaaaagttgttcttatatgctattgatgtaagggcagcaaagtctcctgactatatatattccgcattattaaaaacactaaaagaagcacaaaagaagggattcggtaattcaaagattgatttacaaattacaaatgttaatcatccactagaatcagaatctatagcagaatatttaaatagtcttaatacctcgaaacaactcatagtattagtttttgatcaattcgaagaattatttagtaaacctgatttattggaattatttaataatgcaagtaatattttattagatgcagctagcttaaaagctaatttatgtattgggtttgcgtggaaaactgatagtacaatgccttcagaacataatgcatatttcttttggcatagattatcagattatcggattgttagaaaattaaatcctttttcagatagggagtcgcatgcagtaattaataagtttgaggaagtaattggtgaaaaaatccatagtgatttaaggcataatttaattgttagtagtcagggatatccatggttattaaaaaaattatgtatccatttacatgagaagattttatctggccaaaaacaagaagatctattagataataaactggatatatctagtttatttgcaagtgatttagaagagctaaattctaatgaaataaaagctctaaaatttattgcccagaaagcaccagttgatttagttgacactattgatacgtgtggtgaagatatagttacaagtttactgcataaacgtttaattataaaaagtggtattagattaaatatttattgggatatatttagagagtatattttaacagagactgttcctattatctcattaagatatttgccttctaatgatttttcaacaatatggaatgttgtaaagtatttgtctaagaaaccaatttctattcaacagttgcaggaaaaaactgatttttcagagggtacaattcaaaatataggaactgatgttttattatttggtttagcaactagagaaaactcacaatatgtattatcggaagatttgttggaagaagaaaatacacaagagaatattctgaatataattagagaaaaatttaagaaacatattatgacctttcaagtggaacattattaa

SEQ ID NO: 62988 - DNA, 1695 bp, Acinetobacter baumannii
atgacaaatgacttggtagggattagctgggattcttatgatacgaaagatcataaacttttagcatatgaaaccaaatatagttatgcaggggtagtttgggattttgatattgaattatcggcttctatgcccgtacttaataatccaagtttaacgccaactttaacggtgtactatcatgacaatggcgtagataaaattgcatatatcgtcttatttaattatgcaaataatccttcgtcgcgaacggcgcacattcatattaactgggatacagttaaagctggtttttctgctacagatagctttccggtaaccaatattcaacgtatctcattttcaggctttactagccattataacggtcagtcagctacgccgttaagccagccggaagatggttatattcgtattaccaattcagtcgtgactggaacaaatgcaaagctaaatctgagtcgtgttgttgtacctcagcacaattatgggatctgtaccagctatgatgaccattatgacttgaacccgcagcgcctagtcaacaatatggtcgctttgggatatcaggggttggtaaaccactattgtggaatgtcgcattatcccgaaatgacatggaaaagcgatattaataaatggcaaataccagatacgttggtaacaggtgaggcagtcgtcaacccatgtgcccgaaaatggcatgagaaatatgcccaagctctacataatgcaaacatgcaacccatttttggggtaagttttgagatgtattcacttgcagcaaatgagttttgggcacagcgtgactggaatagcaatttaggtaaaacaggttaccaaccaccgagttatttctttagcttaagtgatcaaaatgctttggcttatttgcacaaagtttttattgagttcgcagatacaatggttgctggcggctgtaatgttaacatgcaaattggtgaaccttggtggtggtataacacggacacgaacctaccttgtgtgtatgactatccaacaaaattagcctttaatgccgatacaggactatatgcgccagacctaggcacaatctatgaggctatgaataaaacaggtacgccgtatgatgagtttaaaacttggttaagaaataagttaggacagacctgtcaaaatattcgagcagccattaaagctaaatatgcaaatgctcaagtgtgtcctttaatatttttcccatccattcgttctccaatacaaaccctagcaacctatatcaactatccaagccagcactactcatatccaaattttgattacatcatgactgaagcttatgactggcttttagaagctaaattagatttagctcatcaagctgtttctcagataccaactcaagatttaggttatccggcaaataaagttgcttatttatctggatttgtaccagatgcatctattgcttatatctatggattcgacaaaaacaaaccttatcggacgccaatttggcagaggatttttggcgatatgaaaaataacgtatctcttggcctcatgaagcagtttatctgggcctatccgcaagtcatgttcgattcaattacaattgatacgacccaagccccaaatggcttctttgttgaaaatacactttactcaccaattagtgataacacaccgtatccaccagatatttacctttaa

SEQ ID NO: 62989 - DNA, 621 bp, Acinetobacter baumannii; identical to SEQ ID NO: 51631

SEQ ID NO: 62990 - DNA, 321 bp, Acinetobacter baumannii
atgggagattatcagttttttgataattactttaaagacaaaaaaatgacggataacacaaatgaatatcaacgcctaggtgtttatattaatcaggatacgaaccaagtcggatttatttctaatggtgttgatgaaggatatcaatttaaactaccgggtgcactacagaaaatagcttttacagttgagggaattgcatatattgaatctacaaatttatttggatatgaattttctaatgaactgattacagaccgtaatgcgctaaagtttaactatcctcagggcacaacagatatgtgtggtaatgctatttaa

SEQ ID NO: 62991 - DNA, 1056 bp, Acinetobacter baumannii
atgagttatgcagagggagtaaaacggttttctgtctcggcaggttggttacatgtaatgcctcaaggtaaagctaatccatttaatatcaatacaagtgttaaaaatggaacagttgctaaagttggaagcatttcgccgaccagtttcttaaactccgttgatcctaatgctacagaggtagatgtaggcggtgaaccttttaatcaaaaagagtttcttgaactcgctttaaatgatgactttttaaaagggctcttacttgatgaagaaggcaatataaaacctgaggtagcaggtgaggcaacgattcaagggttagagcagtggcatcaaaatgatgctggccttgaagtagatgacacagacacattagggcttatgtttaactattacctcaatgacaatgtgtctttacaatttattggaggcattccccctaaagtcgatattaaaggccaaggtgaaatcttggcaccattaagcggtgtcgcgttgtcaccacatgaattagttaaaattctttttccgaacggcattaccttaggtcaagcagtcccgattaccaatttaggcaataaacctaaagcagctagtgttcgtgcctggacccctgcaattgaagcacaatatcaatttgggaagagtggggtgaacaagtttagaccttatttaggtgtgggtttaatgtatgctcattttaatgatattaagctaaatgacgaaattcgttctgacctgatctctgcaggtcatatgattcaaaatgtgttagatggtaaggctggggctgccttggatcgtaaagagtcgagtggaaatatggtggttaaagtagatgcagatgatgcgattgcacctatatttactgccggctttacttatgattttaatgattcttggtatacagttgcctcagtatcttatgcaaaactaaataatcgaacaaaaattgatgtcattaaccaaaatacgggcgctcgcttaattcatgggtcaactaaagttgatattgatccgatcattacatatttaggggtgggctacagattttaa

SEQ ID NO: 62992 - DNA, 300 bp, Acinetobacter baumannii
atgaagtctagcaatatttctaataccgtagacttgttatcttctgatcgattaaagagttataaattatattttaatttaaaaaataatgaggagtgcataggtgtatacctttggaatgatgcgctctcaactgctttttttaagttgttaagtatttttgaagttgcatttcgtaatatggtacataaagaattatcgtatctttatttttcgcataaaaatcaaggacacatacatgataatgattggtacatgtaccttatggaccaaaatatactacattccaactccaggtaa

SEQ ID NO: 62993 - DNA, 618 bp, Acinetobacter baumannii
atgataatgattggtacatgtaccttatggaccaaaatatactacattccaactccaggtaaagttatagcaaatcagacatttggtttttggattaaacttattgaattacatccttctattgattggcctgaagttttctttaagggttttaaagatcattttgctgtaaataaaagttattgggatacaaatgctatagacgatttgattattcggttaagacaggttctatctttaagaaatcgtattgctcaccacgagccattatggaaatttactgagattcttcatgaaaaatcaaaagtagtgatctatgaatctgctactaccccaagtgaaagcatttcaagaatgttgaccttgaatcatcgtttatgccggttaataggttggatatcaaaagatagaagggatgactatttatcatcaagttataaaagacattttgattggttctgccaagaatcaactatcgaaatatataaaaattattcctatatgagagaactgccattatcaagggctaagagagagttccgtcgtcttttgaaaatttcatgcttaatagaaattaagcaccaacatggtggaatagttatttctagaggtttttag

SEQ ID NO: 62994 - DNA, 504 bp, Acinetobacter baumannii
atggaagcacagtataaggtgttatgtgtctgtttaggaaatatttgccgttctcccacggctgaagtggtttttagacattattgtgatcagcatcaactcaatatcattgtcgattcagctggaacaagtaactatcatccaaataaagcacctgatcagcgtagccaattgcatgcaaaaaaaagaggctatgacttatcttctttgcgggcaagacaactttcaactcaagactttttagattttgatttgattttggcaatggatcatcaaaactttgatgatatccacgacttgctacaaagagctatcttccaatttggcagtcatcaaattcgagcaaaagtggcattaatgagtgaacatgatcctcaatatccacaacaagctctgcctgacccttactatggtggagatgagggctttgaacgtgtactcgaccaatgtgaatcaagtgcgttggcgtggattaatatcctaaaaaaacaattgaatgtttaa

SEQ ID NO: 62995 - DNA, 819 bp, Acinetobacter baumannii
atgcttggtatcgtcaatcttgaaatgcatgtcttggatggtacaactttttcaaatgtacagcagcgtgggacttatgattccgctaaacaagcctgtatgacattaaaagagcttgaatactatatcgtgtattggattactaaagtttatcaccagaagaaacattccgctttaggaacatccccaatcgttaaatgggaagaaggtgtttgggggacgaagacgacagcaggtacaggtttgaaagaacgtgtatcagatgaagataccttgtttattgattttctacctgaatttgaagcgactattcagcgtacaggggtgcaaaaagataacttattctattttgccgactgtttaagacaatgggttaattctattgatccagaggacaataatcgaaagcgcaaaagaaaattcttgtttaaacgtgatccgagggatatttcacagatttggttttatgagccatattctaatacctattttaaagtacctaccgcaaagcgagagataccaccgattagcttatttgaatataagcaggttcagaactatctcaaaagtgaacgtcaggatgttcagaatcaggatgagatttacaaggcgattttgcatctacgtgatcaacttaatcaggctagaagcttgactcgaaagcaacgtcgctcaaaccaaagaaaaaaggaaaatgcaaaagccattactcagctttccgaacagaatcagtctaaaaaggctgtagtttctgaaagtcttcagacaagtgatgatttgtggagtactcctttaactgcatttgacgatttaaggtga

SEQ ID NO: 62996 - DNA, 297 bp, Acinetobacter baumannii
  misc_feature (260)..(269): n is a, c, g, or t
ttgcctgctggtacgcctgtaaatctcgaacttcttgcgcagttaatgatacaaattagcgataatacagcgaccgatagcttgatagaggtattaaagaaacctcgtatagaaacgttgtcacctagaaattctcctctgctgacgacacgagagctatttcaactgattgacccaagtaatgaaaagctcagaaataagtttaaaacaggaacaaagtcggctcgtctagaagcactcgctgaactagacaaactgcnnnnnnnnnnacaaactgccgctaccaagtgtgagtag

SEQ ID NO: 62997 - DNA, 399 bp, Acinetobacter baumannii
atgaaagcgcactgtgaaaatgctcaaaaacttgccgagtggttgtctacccatgaaaaagtagaaaaggtctattatggcgggcttccaactcatgaaggtcatgaacttgcagcaaaacagcaaaatggctttggcgggattgtttcttttgtagttaaaggtgagcgtgaaggcgcgtggaaggttattgataatactaagtttatctcgattactggtaatctaggtgatgtgaaatcgacgattacccatccagcaaccacaactcatggcaaactttctgttgaagcaaaagaagctgctggtattcaagaaggcttaatccgcgtttcggttggcttagaagatattaacgatattattggtgatatctcacgtggattagatttgatctaa

SEQ ID NO: 62998 - DNA, 135 bp, Acinetobacter baumannii
atgaaccaaatcacagatattagtcaacaagtcggcgctaattcgcatctccgttctactaataaaaacaagcctgctgaaaaactactttctcagcttgatgcatggatggcagatgaaagaacggacggttaa

SEQ ID NO: 62999 - DNA, 1119 bp, Acinetobacter baumannii
atgacgactgcattaaatggacttaaagttctcgatttctcgacgctcttacctggacctttcgccacaatgtatttagccgatatgggggcagaagtcatccatattgaatctccatcacgtccagacctcattcggattatgccgccctatgcaaatggacaggcgactgcacatagttatctaaatcgaaataagcagtcgattgttctcgacttaaaagatgctgcaagtattgatctgattaaagccaagatttctgagtttgatattgtgattgagcagtttcggccagatgtcatgcgccgtttagggctggactatgccacccttgcagaaattaacccgcgtttaatttattgttcaattacaggttatggccaaactggaagttataaagatcgggctgggcacgacattaattatttagctttagctggtattgctgggtatagcggccgacaagatagcggtccgccaccgcttggtattcaggttgccgatattgctggtggttcattacatgcagtcattgcgatcttggctgctgtagttgaacgcagccgtagcggtataggtcaatatattgatatttccatgacggactgtgttgcaagtctaaatagtatggcagcttcagccacgcttgccgcacaagttgaacaggctcccgagcaggggatgctcaatggggggattttctatgactattatatgacgcaagatggccgttatctttctatcggtagccttgaaccacaatttatggcaggtttgtctgcagcactagatttacctgtgttattacaaaaaggtgcgtcattagatgagcaagatcgacaggaagttaagcaagccattcaagaaaaaattaaagccaaaacattcaaagaatggcatgaaatttttgcaaatctcgatgtttgtgtagaaccggttttgagtttaagtgaggctttaaattcaccgttagcacaacaacgtggatggattgtgaatgttcctttgcaaaataatacgccagatacagaaccgcaaattgcatgcccaattaagttttcacgttcgcaaatgagatattcctttgtaggtcaaaaacttggcgaagggcagtggtga

SEQ ID NO: 63000 - DNA, 798 bp, Acinetobacter baumannii; identical to SEQ ID NO: 51580

SEQ ID NO: 63001 - DNA, 513 bp, Acinetobacter baumannii; identical to SEQ ID NO: 50974

SEQ ID NO: 63002 - DNA, 780 bp, Acinetobacter baumannii; identical to SEQ ID NO: 16904

SEQ ID NO: 63003 - DNA, 1308 bp, Acinetobacter baumannii
atgaagcaaaagaaattgctcaagtatattgtggttgctattttactaggagtattgacgggttggatctgtcatcacttctttaatgaaggcgagcaactgaagcaaatcgcttcttatttcaacatcgtcacagatatctttttacgtctcatcaaaatgattattgccccattggtatttgctacaattgtgtgcggcattgtttcaatgggcaaatcaacttcaattggtagcatcacactcaagtcaatgacttggtttattaccgcttcgtttgtctcacttgccatcggtatgggtttagcaaactttttccaacctggcgcggcgctagacctagcattaccaacagctcaacaacttagtagttcttctctcccaacaactactggttttaccttgcaatcattcttgagtcacgtgttcccacgcagcattgcagaagcaatggcgaacaatgatattttacaagtccttgttttctctattttctttggttcagctcttgcttttgtaaatcagggcaaagaaaaagactcagttatcattcgcttaactgatgaactcagtaaaatcatgtttcgcattactgactacgtaatgatgttcgcaccttttgcagtatttgctgcaatcgcttcagcaattacagtacaaggcttaggcttaattgttgattatggcattttaatcgcagaattctacttcggtctgctattactttgggtcattttgttctctgttggcgcaatcgtacttaaaaaagatatcttccgtttaggtaaattgatccgtgaacctgtaacacttgcttttgctacagcttcaagtgaatcagcctatcctaaagttatggatgctttaaataagttcggcgtgcctaaaaaagtgactagcttcgttttaccattaggttattcatttaaccttgatggttcgatgatgtacaccacatttgcggtactctttatcgctcaagcttacaatattgatctgagcttcactcaacaaatcttgattttgttaacgcttatggtgacaagtaaaggtattgcgggtgtttcaagagcttctattgtggttatctcggcaacactcacaatgttccatttgcctgaagccggtattctattattacttggtattgatcagttccttgatatgggccgtactgcaacaaacgtagtaggtaatagtattgcgactgcagttgttgccaaacttgaaggcgataaagtggctgatactgaagaattaccagagcctgtattaattaaatcaactcaagaacaaacaatcgcttaa

SEQ ID NO: 63004 - DNA, 273 bp, Acinetobacter baumannii; identical to SEQ ID NO: 49501

SEQ ID NO: 63005 - DNA, 741 bp, Acinetobacter baumannii
atgaaaaatattttaactgctcaagaagcatttgcagcacttcaaaaaggtaaaactgttctatgtcgtcctattggagacatgttggacttttctgacttagatcaattccccgcttctgtttttggtaaaccgggttttgaattctgcatcaaaatcgaaactattgagctggctggcattacattcacaaagccattaactattgatgaatatgaggaaggacaggatgtttttgtaattactacatattcgccttctatttacgtcgtgaattttagaaccaccgcattaattgaatctattaatagcggctttgttcaacgtgatgcagaaaacgccaagcttcaattaaaagcactatctaaagcgttaggttttgaagttagtgacgattttagtgttattcgcctaggtgacgaaccaaagaaacagcgtgctaagaaatcaaaaggtgcacagacagtagttgtagaaaagacttctgaaattgttgatgaagttaaacaacctacaattgttattactgagcaaacaaatgtaactacttctaaagactcattggtgcaatccgaagatatttcagaaaatataggatcagctttagatagtgcgattgttattacagaacaaccttatgtgtcttcacctgaagattttttaactcagcctacacctgagcaagaaaaaaacaatgagtatcagcaaaccctagatactcttctacagcgtgtaaaatag

SEQ ID NO: 63006 - DNA, 834 bp, Acinetobacter baumannii; identical to SEQ ID NO: 46183

SEQ ID NO: 63007 - DNA, 798 bp, Acinetobacter baumannii; identical to SEQ ID NO: 49362

SEQ ID NO: 63008 - DNA, 927 bp, Acinetobacter baumannii; identical to SEQ ID NO: 46217

SEQ ID NO: 63009 - DNA, 288 bp, Acinetobacter baumannii
  misc_feature (246)..(255): n is a, c, g, or t
atggtttttctacgtcaacaactgttatttatctttattgcctttttatccacctgcgtaggtgtatacgttgcatgggatatgaacctgacatgggttaagttttatagctatttaatttcagaaaaagctattttttcaattctctttaactatgctgtcattcaactattttttattgtagttggtcgtaagtataccgctctttttttaagtcaattattcgttatttttttaaattttatnnnnnnnnnnaaaagaagcaacaatatttatttagtaatttaa

SEQ ID NO: 63010 - DNA, 216 bp, Acinetobacter baumannii
gtgttaatagggagtttccctaatactcctctttgggtcagagattatgaagggaaacctgagctgaaagacaagcgaaaatggctcttttggcagcatagtaatcaaggtaaaattgaaggcatgaccaagccagtagacttaaatgtttatgagggttcagtcaaagaatggcatcaatttttacagcagcaaggcatcgtgaaagcacaataa

SEQ ID NO: 63011 - DNA, 276 bp, Acinetobacter baumannii; identical to SEQ ID NO: 50126

SEQ ID NO: 63012 - DNA, 246 bp, Acinetobacter baumannii
gtgactgatggatatattcaagtttctttcgatgatttaaagaaagctatgaatatgattgaagacgtgattatttctgaaccagtaaaagcattaatcaaaagtcgcttatatttcgagaaaaatgaatcgagaaatcaggctcaagaattaattaaccaccacattcaagtgttagataactttaaaatggcaggccaaattctagatttttccattcaacagattctgcttcactacgtctaa

SEQ ID NO: 63013 - DNA, 240 bp, Acinetobacter baumannii
atgccacctcttccaaactctcacatgtttaaaatgtctcatttaaagaaaaaaatctctttagaaagctattactccgctgctgatattttaaaaaaattagaagagttaactggacttgtatatcttcaagatgataacaatcctgttattggttttttgccaaaaaattatttaatcactcaaaataaccaaaactttttattcactaaaactgatttaaataaatataagttttaa

SEQ ID NO: 63014 - DNA, 231 bp, Acinetobacter baumannii; identical to SEQ ID NO: 51560

SEQ ID NO: 63015 - DNA, 510 bp, Acinetobacter baumannii; identical to SEQ ID NO: 50811

SEQ ID NO: 63016 - DNA, 822 bp, Acinetobacter baumannii; identical to SEQ ID NO: 59049

SEQ ID NO: 63017 - DNA, 2034 bp, Acinetobacter baumannii; identical to SEQ ID NO: 50166

SEQ ID NO: 63018 - DNA, 798 bp, Acinetobacter baumannii; identical to SEQ ID NO: 60359

SEQ ID NO: 63019 - DNA, 834 bp, Acinetobacter baumannii; identical to SEQ ID NO: 46183

SEQ ID NO: 63020 - DNA, 192 bp, Acinetobacter baumannii; identical to SEQ ID NO: 45978

SEQ ID NO: 63021 - DNA, 1056 bp, Acinetobacter baumannii; identical to SEQ ID NO: 50851

SEQ ID NO: 63022 - DNA, 672 bp, Acinetobacter baumannii
atgtcagaatggttcatatccagtatatgctttaaaaagcgcactacatattatttagtattgagtctcgcaattaatattcccttaactgtatatgcatcagacaatatgaatagggaaaatattttaaaagctgactttgatactaattttttagtgggaaatgcacagaaaattgatattggtcgatttaagtacggcaatcctattttaccgggtgaatatagtcttgacgtctatattaatgggcagtggttaggaaaacgaaagtttgtttttaaaagtactcgttcgaatgagaatgcaaagacctgttttaccccagatatgcttttagaatatggagttaaaccagaaattcttcatcatgaagtaagtagtacctttacctgtaatgacttggacaagtgggttaacgatgctttttatcaatttgatacttctcgtctgagacttgatatttcaataccacaagttgctttacaaaagaatgctcaagggtatgtcgacccacgtttatgggaccgcggtataaatgcagctttttttgcatacaatgcttctgcctatcgtattgtaaataataaccatgaaacaaatcatgcgtttatgggtacaaatgttggtctaaatctctatgattggcaattacgccatactgggcagtggtaa

SEQ ID NO: 63023 - DNA, 591 bp, Acinetobacter baumannii
atgaaaccaacctcacaaccaagcaaaaagaaaatccttatcattgatgatgaaattgagggtatttctctcaaaaaagctcttacaactgctaaaacattctttgaagctttaagagatcctgatagtgaaattcgggaggaaatggataactttctgaataagcatcaaaaccaatttcaaaataaattggaaactgatggtactgttcatgaggctttttttaaagaagtaattctttctgatagctttaaaaatagcctatccacagtttcattaacttataaatctctttcaagcttatatcaggaaaatgaatggcttcttcgtatcaaagggctaattacaaaagcatttcctactgacgtctatgacgttaaatatttagaaaatgtggacaatattaatattgatgaattagatcagtttgatttattaatagttgattggtttcttgaaaatggttacagccaatctagtgatctacttcttaagctttcagaaaaagataaccttcccgcaattattttattaactagtcatgaaaatatattagagtcaaataccaaatctgacttttatataaagtaa

SEQ ID NO: 63024 - DNA, 1140 bp, Acinetobacter baumannii
atgaaaacatttcacatcattacatatcggcagctttttgcccttttgaccttaggatttggttcagtatgtatggctcatgcagaagtaaattcttcctcaacccaacaagtaaacggtttgtcatctggagcacaaactgaagaaaataaagatgaaaatcttttagaccaaattccaagatggattgatgcaaccccaacgattttccccgagcagtccaacgaaccgattgttccaccaaccgagcaaacagaagatcagacttggtttgaccgtaaacaaaagaaaatccgtaattgggccgatcgtacatctggaaaaattgataattggtttggtgaagttgacccacaaaaacccgcgtcagccaccattcgagtcatgatcgataactattggaatgaatatgataattatgaaatcaagcccagaattcgcggtaagattaaattacctactctagagaagcgtttaagtgtggtatttggtgatgactctttagatgacgaatttaataatagcccagccaatatcaatcaaaacccaaatcaagatccaaataaaaagttagatggtaaacgaactcgagatgacaacagctcaatcgcattacgttggtcaaatttctcgaaaaagctaccttttgaaacagacgctgacttaggtatccgttctggcgatgatatttatgtccgtttaaaagcatcgagagactggcaactccgtaatgattttaaattttatgcagaacaaatttatcgttatggcatagatagtgaaaactacttacgaactaatcttgaacttacccatgctcgtccaaatcagccgatcttatcaaaccagttcagcttaacttatgccgatgatcaagatgacgatttgacatgggaaaaccgtcttttccgagaacatagcttctttgcaaataaccgttttaactatggcatttatacaggtggctactacaatgacaacgatttacgtttaaacagttggggaccatttgtatcatggcgtcagcctgttttacgtgaatggttctttgtacaaggcgacctcaattactttaatgaccatcgtgaagatcgcaaccattatgtgagcacattcttacgattagaagcccttttctaa

SEQ ID NO: 63025 - DNA, 741 bp, Acinetobacter baumannii; identical to SEQ ID NO: 63005

SEQ ID NO: 63026 - DNA, 828 bp, Acinetobacter baumannii
atggaaaattttgaagttataaaagcactgtttctaggctttgttgaaggcttaactgaatttttacctatttcgagtactggtcatttaattttatttggtcatattatcgatttccattcagatggtggtcgtgtctttgaagtagtgatccagttaggtgctattctggcagtgtgttggttatatcgtcagaaaatcattaacttaatcaaaggtttttttagtggtgatgtcgagtcacgccattttgccattagtgtcttaattgcttttttcccggcagtgattattggcgttttagctgtagattttattaaaagtgttttatttagcccaattgtagttgcgattgctctgattgtcggcgcgcttattattttctgggttgaatctaaacaatttgaacataaaacggatgatgcgaccaagatcacgtttaaacaggcgcttttagttggtctggctcaatgtgttgcgatgattcctggaacctctcgttctggtgcgacaattgtaggcgggatgtttgcaggcttgtctcgtaaagctgcaacagagttttcgtttttccttgcaatgccgaccatgctaggtgcagcaacatttgacctaattaaaaatgctgatgtgttgacttcagacaatatggttaatattggagtgggttttgttgcggcatttattgctgctttattggttgtaaaagcactcgtactcttcgttgagcgtcatacattacgtgtatttgcatggtatcgaattgtattaggtgtaattatcctaattgctgctatgttctttaacctgtctcttatacacatctga

SEQ ID NO: 63027 - DNA, 666 bp, Acinetobacter baumannii; identical to SEQ ID NO: 62920

SEQ ID NO: 63028 - DNA, 465 bp, Acinetobacter baumannii
atgaatttatgtcaaatttattctcccaacccacgacaacttatacgaattattaataaattttcattattaaaagaaaatttagacaatcgaaagaaattatttctttttttatttttaatttattctgaaatgagattaattgaaacatataaagagataaattttattgaacacttctatgaattacaccttaatttccatcaaataagatttcgtcaatacgctctaaataggagcggagagcgaagtgaagctgctaagctttgtgactatcttgattatcatgtttactcttttaatggaaattcatctttatttgatttatttttttactatatagagcacattaaatcgtcaagaaatgattataaagaatgtaagaatgcttattaccctactaataaatgctccgaagatttaattgatgagtggcataaatatgtacatatgattgagggataa

SEQ ID NO: 63029 - DNA, 471 bp, Acinetobacter baumannii; identical to SEQ ID NO: 51257

SEQ ID NO: 63030 - DNA, 171 bp, Acinetobacter baumannii
atgggagattatcagttttttgataattactttaaagacaaaaaaatgacggataacacaaatgaatatcaacgcctaggtgtttatattaatcaggatacgaaccaagtcggatttatttctaatggtgttgatgaaggatatcaatttaaactaatctcggctgaataa

SEQ ID NO: 63031 - DNA, 468 bp, Acinetobacter baumannii
atgtatgaggtatcttctgataataccaatacagtaacgcataatgaggctagccaaaaagtcacatttaaaaacttttcatcaactgcaaagaatgaaaaattagcgcctcaaatacttttggctcaaacgaactctcttaattctgccccagtttgccaatacaattttgacgcgactcaagaagattatgatctatttaatacccaatatcctgatcgaccacctacaatgagatttcctctaattaatgggcaaaaatttggctttaaagtagagcctgtcactgaagacaagtatggttatttagtttatacagcaaaaagtaaagtaaaaatgaattcaaccagttatgagggggatttcttattacccaataaaggcattattgcttttgaaatgcaacttaaagtacccacactttcttcaagcacttcttcttattcagccgagattagtttaaattga

SEQ ID NO: 63032 - DNA, 366 bp, Acinetobacter baumannii
gtgataatcaaaaaaattctcgaaaaatgggacatcattttggatatcgcaattattggcagtggaatggcaggacttgcagcagcaagaattctgaaagatgcaggacatacaatcacgatatttgaagcacttcctggccggggaatggacagtcatagcattgagttcgatggtgggattattgatgcaccattgcgtgttatgaacccgcatctatggaaaaatacactcagccttgctgcacatttaggcattaaaacttttccggttcgtacctatatgtcttgtagctggttatttgaagatcgtactgaaacatggttaaccagtaagcatccgctgaacgccatcgccaagttttaa

SEQ ID NO: 63033 - DNA, 129 bp, Acinetobacter baumannii
gtgcttgaaaaaatgattcagcgcattaaagttcaacaaactttggttaatactcaaggtgttgctcagcttagacttgaggatgaagttaagcctataaatatcgatgaagaacaagatcaggtataa

SEQ ID NO: 63034 - DNA, 342 bp, Acinetobacter baumannii
  misc_feature (328)..(337): n is a, c, g, or t
atgcaacaacctctagtaaaagatttttttgatgaaaataccaatacttttagctatgttgttgcagatttagcgactcgtcaatgcgcaattattgatagtgtgcttgactatgatgctgcttcggccactacaaaaacaactaatgctgatctgatcgtcgattatgtcttggcgcaaaacttcaaagtacaatggattttagaaacccatgtacatgcggaccatatgactgcggctcaatatttaaaatctaaattgggcggtacaattgcgattagtcaaaaaatctcggtagtacaagaaacattttcggctatttataatnnnnnnnnnntataa

SEQ ID NO: 63035 - DNA, 1548 bp, Acinetobacter baumannii
atgtccagccagagtccagccgaaggtctacaatttccgattcacgcctcgataaaaaagcaaagcacgtctcttacaggccaagagattttgtcagaagctttatctattgtagataataaaactgctcaacagattttggctgaaaaaaattggcgaaaaaattatcctatttactttaaggcacttgttaagcacggaattactaacagcaataatccaattaccattgcaaaacagggattgcataaggctcatcatctttttgattattaccgcgatggtaaacactatcttttaaaagatgctctacacatccccacttctacacctttaaatacagtaaaatttaaaggcgaaagtgaagctgcaccagaatggtatgttccatataaaggtcaaaaactgagcgggcaaagcttacttgaccaaattcaaaaatgggaaaatgcaggtattattgaaccaagccatgctaaggctttacgcgaagctgctgctcatcctgaatggtttgatttatctgaccgtacgatggtgttatttggtgcagcctcagaagcaggaccattaccttggctagcaagatggaaagcgaatattgttgcaatagatttaccaaacccacgagtttgggggaaaattctaaatacaatccagcaaggaaacgcaacgcttattgcaccaagtattgaaaaaattgactcttcggcaaaagcttcagcattgagagataaattgggtgctaatttattaacgcaaataccagaaattgcccaatggttagttcaatttcctcaaaaattagacttggctgctattgcttatttagacggagaaaaacatgtccgtgtttctatggcaatggacagtattatgcaatatgtgagtgaacataaacctgataccagcttaatgtttatgtgcacaccaaccgatgtttatgcagtaccaaaagaagttgcagaagctgctcaagagaaatttaaatctcgttcacaactacaaaaaatggctgtgaaaggtgtttctacactctcactcaaacgtttttttcaagcaccttatcaagatttgattactagcgaaaatggcaaaacttatggtattgcagactgtttggtagttgaacaagggccaaactacgctttggcaaaacgtattcaacaatggcgtgcgacacttgcccgtcatcaaggtcaacgtgtaagtattaatattgcaccatctaccacaactcattcggtcacaaagaatccactccttaaagctgcttttaatggcgcagaactttttgatgtagaagcatttagtccagaaaccacgaatgccattatggcagcgttatggattcatgacttaagaaatgattcttctgttgcaaaccctgaaaccgtactcgaccaccctctagagttgatgatggaaggtgccaatcatggtggtctatggcgtgtggcttatttggcccgtacagctcttccttttgctgccatctatggctttgcagccgagaaacttccatttaggaaattttctaaaaaataa

SEQ ID NO: 63036 - DNA, 819 bp, Acinetobacter baumannii
atgtttatcacttctcaactgaacattattcataaaattattaaaaatcagtctatttccaccttggtaatagatcagttggaacagacttatgtgaaccttgaagcaaccttacttagagcgaaagtactcagggatttttctaaaactcaaaccgtttatttaattcagtctcacattgagccacagcaaagcagtttggcttatctattctcgccatttatttttgcgaacttaaacaaagcagccatttatacaacaccggcgactccacttgtgctaactatccttaataaatactatcaagctgacaagaaggccgtatttaaggtagacgaagttttagaaagcctaaaaatatatctagatttagaattaatagagatgggagaagctgaatttatttatttaaatttaattaaagcattatgtcgaagtgatatctctacagtttttttaatcacccatttagagcttgatttagagacgttaaagcaacttgaacagttcttaaaaataaaaattcattgggtaaaagtcgtaaaagatgagggtctaaaagacttggatcagttggatatgcgtaaattattatttaaaaataaagatgaaacgcatgttcaattatgcgttctgtttgctcaaatgaatgcagcactagtctgcctatgcgatacctttactgccagtcaaatgacacacttaattgatgacatgttttactcagagcatattttcgaaaaactttctgtctattcagaatatatgcaaaccttattgcaaagtcagcatagtcttcacaaaaaacaaattgcttag

SEQ ID NO: 63037 - DNA, 2559 bp, Acinetobacter baumannii; identical to SEQ ID NO: 56453

SEQ ID NO: 63038 - DNA, 156 bp, Acinetobacter baumannii
atgagaaaaattttaggtatagcttctctcattatgtctacaggtgttgtacatgctgaacaattaaatgaacaagaacaaatttctccgtatagtgcgaatgtgacttttgcaagtcaatatatttcgcgtggttttcaacaaacttgggggtaa

SEQ ID NO: 63039 - DNA, 180 bp, Acinetobacter baumannii
ttgtattttaagttggaaatgaaagaaagtacagaatataataatttgggtacacctaatttagctgccaagaaaagccattacttttcttggcaattaaatgaaaatggacttcagatggaaagattttatgaaagtaaagatttagatgaagaggtttttaaggatttctttgtttag

SEQ ID NO: 63040 - DNA, 264 bp, Acinetobacter baumannii; identical to SEQ ID NO: 50200

SEQ ID NO: 63041 - DNA, 492 bp, Acinetobacter baumannii; identical to SEQ ID NO: 50201

SEQ ID NO: 63042 - DNA, 477 bp, Acinetobacter baumannii; identical to SEQ ID NO: 50202

SEQ ID NO: 63043 - DNA, 168 bp, Acinetobacter baumannii
atgacaacaggccatactgaaaccgatttaaaccgtttatcgagctgtttagggttgatgactcaatcagataatgcacctgttgaaattacaccgccgcaaggtgatttagatacggctaaatggtttggtgaatatattgctgggcttttatatagattaaattag

SEQ ID NO: 63044 - DNA, 255 bp, Acinetobacter baumannii
atggcggaaaccgcttttgctttgaaaatgcctgaaaggacattaaggcatcaattgcagcagcttaatacgagttataaacaaattcgtgaacagattattaagaataaggcgcttaaacttatggaatataaagagtattcaatagaagttattgcagaagcacttggttattctgaacctgccgcttttaatcatgcatttaaaagatggtttggacagagtcctcggcaatatggaaaagagttttactga

SEQ ID NO: 63045 - DNA, 627 bp, Acinetobacter baumannii
gtgaatctgacgattaaaggtgctgtagttggacgtggtggagatggcgggttgccacatttggcatttggtgcatggtctaccgatccggattacaactttacaaaaacccgtcgtgatggttttcagggagcacccggtctattaaaccggcacagtaaactaaacctgattattgatggtggaactctggctcgaggcggatctggtggcggcgcaacaccaagtggtatttatactggattatcgtatggagttcagggtattcccggtggagctggagcaccttttggtcgggttatgaccggacaacctattactaacgattcacaagactggcgttggtactttaatggtgactttatggttgtcaaagtaaccgatgctgaagctactgtgcctggtaaaggttatcgaacccaaaatgaccgttatggatcgccattgtccggtgatggtggaagctggggtcaactaggtaccgagtccaccaatgatggaacatggaactggcaataccatggcacaactgaaggccagccggggccgggtggacctgcaattgttggggtggcaccacttacaactcaattgatcaatggagggaaaattctacaaacactttaa

SEQ ID NO: 63046 - DNA, 630 bp, Acinetobacter baumannii; identical to SEQ ID NO: 53598

SEQ ID NO: 63047 - DNA, 198 bp, Acinetobacter baumannii
atggaaagattaaaaatcaatggtcgtaaacctgcaccagttcaaaaacttgaggcaaaagaaaaagagcctgagcttataaaagagttgggccctgatcctttcgataatccacacgaatacgcagagatgtgccgccgtgaaggtatgccaatccctagaaatattcagcagttaattgatggagcgaatgtatga

SEQ ID NO: 63048 - DNA, 174 bp, Acinetobacter baumannii; identical to SEQ ID NO: 51116

SEQ ID NO: 63049 - DNA, 1317 bp, Acinetobacter baumannii
atgctgaaaaacaatatattatttttatctactatagtttatctcgttatagctctattggggtatcaaattggatgggcgtattttcaatatgatgagctgcgtctattgcactttcctttggcactcagtgctttgcttttattaattttttcaaagcgtattaatttttcaatattcagccagtgctgtttttttctgattggtcttatggtgctcaaccaatttatcaattatggaatttttcagttactagaactattttcagcaatttcactgttgttgatattgattgctttaactaacagttttaaagaatcagagtatgctgtgattggtctcgggctgattgtattggcagctatggttccatgcttatttatctttgtttcaattttaaattttatttcagtccaacaatggtttgattggcagtttaattcaggctcaattcgaatttatgacagtgtaattgtaccgctattttttcttctcattttccttaaaaataagaaagttccatatattcaatatctttatccattaggtatttttctttttgctttggcttggttgtttgatggtgcaaggtctgctttgcttgctgttctgattggcctgacaagcttatttattttttcaaaagacaatcgtagattggtgctgcaaacgattgtttatatgtttgtggcgtttgctgtttataaaagcacggtttattttgcagataaaaataccatgacagtgttgcgtacagggacatctctacgtgctgagatgtggaagtttgtatttgagcaatggaagcagcatccctttacaggggtaggtggtggctatttatctaaaatccagtatgcgtatgggcatcatatacataatttatacttgagattaatttttgaatggggtgtcattggatttatatttctaatttggatgttatatcaactgattggcttatttaaagatagagccgtttcacttgttcttaaagcgggtgttattgctgttttagttgatgcgatgttctcaggcaatatggtttatcctgcttcacagattgcatgtatcttatttattgcattggctttttcacaacggcaccatattggtgatttcacttcagcattctcaatttggtcaactaaagtacttgttggtatgtggggtatcctattcttatatatagcgatcgttcattttggacaagatttatcttgttggaattgcggtagttatggagggaggatggcgccaaacttttgggaatatgggggagcagagcatcttatttcttctgaccagattccgtaa

SEQ ID NO: 63050 - DNA, 411 bp, Acinetobacter baumannii
atgatcgtggttgccatcattggtattttggcggcaattgcgattcctgcttatcaagactacatggttcgctcaaaagtgacagaaggtcttaatttagcttcatcatataaaacaactatcgctgaaaacgctggtaatggtgcagctagtttgaccgttggagtgcctaatttcgcggcgactgaaaatgttgcatctattacaccagacgcaaaaactggtaaaattgatattaaatatacagctaaagcaaaatctttaactttaactttaactccatatgatggtaaagagggtggtacgcctcttagcgcgggtactgttccaacaaatcaaatcacttgggtttgtaaagttgattcagctgacaatgctaaatatgttcctgcaaactgccgtggttcataa

SEQ ID NO: 63051 - DNA, 1179 bp, Acinetobacter baumannii
atgtctcataaaacgattagcagcctcgtcgctgtatttggtctagtggtttcaccatggactctcgcggcaattaaggaatatcaccttaatattaatgaacaacaagtcaatgttacgggcaaaccccttaaacgaattaccgtaaatggaaaatttacagcaccactccttgagtttgaagagggggatgaggctgttattcacgtccataaccaattaaagaatcaagatacctctttacactggcatgggttgttactgccggggttaatggatggtgtgccgggttttaataattttaaagggattgctccaaatggagattttgtttaccgctttaaggtgaaacaaaatggcacatattggtatcacgcccatagtaaaggccaagaacaagacggtttatatgggccgcttgtgatttacccaaaaggcaaaataccagttgcggcgcatgaaaaaactgatcgtgattatgtagtgatgctttcagatttccatgattcttctagcgatagcattatgaagaatttgaagaaatctgctgagtattatcaaaaccgccgtgaaaccgtatctgatgttttgaagcaagttaaaacacaaggcttaaaagcaacttggcaagatcgttcaatgtggaatcagatgcggatgttaaaaaccgatatgtctgatgtgacgggttataccttcttagttaacggcaagacacctcagcaaaactggacaggtaactttaaagctggcgataaggttcgattgcgatttattaatgcatcagcaatgtcattttttgatgtcagaattccaaatttgaaaatgacagttgtaggtgcagacgggcagccagtcaaacctgttgcaattgacgagtttcgtattggtacagctgaaacctacgatgtcattgtggaacctaaacagccaaattatcagattgaagcagagtctattgaccgtagtggttttgctatcggtactttgcacaatgaaaatacgcaggctgtgggaccagtccaaatgccaacaccacgtccacgtgctttattgaccatggatgatatgggcatgagtcatggtggtggaagtaatgaacatgctggccatcaaatgaacatgcaacatgacatgtcggccatgcctgaaatgaaaaaaagagacgactcaggctaa

SEQ ID NO: 63052 - DNA, 309 bp, Acinetobacter baumannii
atgaataagtctttacttcagcaaatcaaaaaaagacgaacccaattgggcttaaagcaagttgatatgcaatcccgtacaggcatttcaagacagcagtaccaaaaactggaaagtcagggcaaccctcgattagagaccttagaaattatagcggcaggattaaatgcccaactgatgctcatccctgatgataaggttcatttgatcagacaattattaaatgatgaaattaaagtcactattgaagatcaggatgacttaatgactaacccatggaagggtcttctcggaggagagcaaccatga

SEQ ID NO: 63053 - DNA, 384 bp, Acinetobacter baumannii
atgagccatttagttattccaagccactggaaaataagacgttctactcatttttttaccaaagataatgtgccagccgcgttgttgagtcatcataatacggcggaaggtgtatttggccaaatttgtgtgatgcagggcactgtgacgttttatggctttgctaatgaggcggcaactgagccagaaaaagtggtgataattaaagcgggacaatttgcaaccagcccaccgcaatactggcaccgtgtcgaattaagcgatgatgcacaatttaatattaacttttgggcagacggtgatacgggtagtcaatcaatgtttaaggcatctaccatccatagcaagccgattgagaagttattcgatcagccaactgagtaa

SEQ ID NO: 63054 - DNA, 660 bp, Acinetobacter baumannii
atgagtactaaagtatatacagaaacctctccagcccgactgctattggtcgatgatcatccactacttcgccgtgctgtggcagaattattaagccttgaaagtgacttaagcgtggttgggcaagcaagcaacgggcaggaagccttagattttttagcaaaaaatgacgtcgatttagtcatactcgaccataaaatgcccatacttactggcatggaaaccttaaaagaaatcaaagcgagaaattttaataccaaaactatcttatttaccgtttctgatagcggtgaagatatccaagaggccttaaaactcggggtagatggctatttattaaaagacatcgaaccagaattaattattactgacatcagaataattttgcgtggtgaactggttattagcccaagccttgcacccattttggcacaaatattacgcactcccagtattgaagatatctcaagtaacttaaccagtagagagttgcaggtcattcaaatgatctcggaaggactcagcaataaaatgattgcgcataaactgtcgattaccgaatcaacagttaaagtccatgtaaagcatattcttaataaaactggattgcgtacgcgggtcgaagcagcggtttggactgttaatcatttatctaaataa

SEQ ID NO: 63055 - DNA, 2025 bp, Acinetobacter baumannii
atgataaataaaatacgaccacattctttgccgctttatgcttgggctgccgcattaaccatctctattttatgctgtttatctgcgttaggcggtggcatgctggcttgggtgtcagaagcaaatgcacaagccattaacacagctggctcaatacgcatggctgcttaccagatcaattttcagctcgccaccaattttgcagttaatcttccttttgacttaaacactgatgctaccaatcatcaaaataaagcgatcagtgaatcaaactctattaatcaaccaacgtctcaaaaagtaactattcttattgaagacatggaaaatagactggcaaaactagatgcttaccaactaactaacgctaatgacagtcaggcaattgatagtcagctaacacaaatacaccgtcaatggtttgatagtttaaaacctgctttaatgtcgcaagataaacaaaaattttacatcgattcaattgattatattaaaaaagtagatcgtttcgtcagtgagcttcagcatcgaaatgaaaaacgtcagatttggcagcaagtacttcaaattggctcactcattataattattactattttgctgataggcatgtataagctgcgtgaaaatgtacttctacctgtgcaagacctgattaaagccaacagtaaatttaaacaaggtgaccgccaagccagagcagctgtcacgggctatcccgaatttagtgcacttgctcgttctttcaatgacatggccagtatcattgccacttaccagcactccctagagagcgaagttgatattaaaacgcagcacttggtaaaagctaaccaagtgttatcattgttttataacttttctaaatatctatctagcagtcaagtcagcttatataaaattgatgagctcatcactgattttggtaaaattctgcctcatcttgaattcactttatgtattcataataattttattaccagtaaaaactcgatcattttgcatggcgacaaaatgaaagaattgtgtaaaaagctaaattgcgacaactgcatcagcaacgacccaacctatagcaagtcttatccaatcgcccacttaaaagaacaatttggagatttacgcgtcaggccaaaatctgtgttggcgatgaataccacaacatctccagaaaatgagattgagagtatccagctcagcgagataccaccacctgcctcgactaacgacgctggttttacagctatagctgtcaatcccacttccaacaatgatcctaatttggacaatgaaaacaatgaattgattgttgcactgaccagcctcatttgtactgcgttatcgctacgcaaacaaaaacaacaagaacagcagcttattttatttgaagaacgcgccacaatcgccagagaactacacgattcattggcacaatcgttgtcctaccttaaaattcaaatcagcgtattagaacgaaatcttaaaaatggctgtaacgaccacattgaaatcattgttcgtcagcatatcgctcaaataaaacaagggcttaattctgcctatcagcaacttagagatttattaattacctttaggctgacgattgataacgataactttgagcaagccttgcatgaagctgccaaggagtttgccgacaaaggaagatttgatattgaactaaacaatcgaatcatgacgctcaatttgagtgccaccgaacaaattaatttgatccagattgcacgggaagcgctgtcaaatattactcggcatgctcaggctaaaaatgtagaaattaatttggcctttgatgatgaagataaacacattgtgatgtccattagcgacgatggcgtaggaatgccagacacagtcgatcagacacagcatcatggattaatgattatgaaagagcgcgctcacaacttaaacggtgagttgagccttgctcactatgagccacatggcactatcgtcactattaaatttgtgcctaatttctttgaggaagataaagattaa

SEQ ID NO: 63056 - DNA, 1380 bp, Acinetobacter baumannii
atggacacgaatagcgattttaaaggcggcaagctcatcactgactggcgccctgaagtaccagagttttgggaggaagtcggtaaaaaagttgcgcgtcgaaacttatggatttctatccctgctttgttacttgcctttgcggtatggatggtgtggagcgcggtgattgtacgtcttccagaaattggttttaagtttgatggcgggcaacttttttggttagctgcattgccaggtttatcaggtgccacattacgaattttttattcgtttatggtgcctattttcggtggtcgtcgctggactgccatttcaacggcatcgctccttattcctgccttatggatgggttttgcggttcaaaatcctgatacaccgtttatgattttcgccattattgccttgctgtgcggctttggtggtggcaattttgcttcttccatgtcaaatatctcttttttctaccctaaatcggagcaaggcacagcacttggtttaaatgcgggtctgggtaatttaggtgtatcagtcatgcagttcttggtgcccgtaattattttattcgcagtctttggtagcttgggcggcgatgcgcagattgcagagtcgggcaagcacttttacctacaaaatgctggctttatttgggtgccgtttatcattttattctctgtacttgcatggtttggaatgaatgatatcgcgactgccaaagcctcgtttaaagatcaatctattatttttaagcgtaaacacaattggatcatgtgtattttgtacatggcaacctttggttcatttattggtttttctgctgcttttccaatgttgattaaaaattcatttccaatgatcgatgcgttaacgtttgcctttttagggccattggtaggtgcgctttttcgtcccgttggtggttgggtgtctgataagttgggcggtgcaacagtgaccttttggaactatatcgtgatggttctggcggtactcggggtaatgtattttttacccagtgaaaccagtgcaggtagttttgcaggatactttctgtgctttatggtgttatttatcaccactggcattggtaatgggtctacgttcaccatgattcctgtcatttttagaacttttcatgagcgcatggagccaactaaaataggcaccgaaccgttgtttatcgaaattcgtaaagagtccgcagcagtggttggttttacctcagccattgccgcttacggtgccttctttgtgcccaaaatgtttggttcagggcttggaattgatggcacgtttatggcgttaattggcttttatatcatttgcattgtgctgacgtggtggtattacaagcgtaaacatgccgagtgcccttgctag

SEQ ID NO: 63057 - DNA, 3759 bp, Acinetobacter baumannii
atgagccatttactcgaccaattccgtttttttaaacgtaaaaagggagaattcgctgatggacacggcgagattcgtgatgagtctcgggattgggaaaatgtgtatcgtagccgttggcaatatgacaaaatcgtgcgctccacccatggtgttaactgcacaggctcatgctcatggaagatttatgttaaaaatggtctgatcacgtgggaaacccagctaactgattatccagaaactcgtcctgacttaccaaatcatgagccacgcggctgtcctcggggtgccagctatagctggtatatgtactccgccaaccgcgtgaaatatccgaaagtacgtagccctttattaaaattatggcgtgaagcaagagctcagcatgccgatccagtcgatgcgtggggaagtattgttgaagacccattaaaagctgagcagtataaatctaaacgtggtttaggtggcttcatccgttccacatgggcggaagtgaacgagattattgcggcaagtaatgtgtataccgccaaagtatatggtcctgaccgtattattggtttttcgccaattccagcgatgtcgatggttagttacgcggcaggtactcgttatttgtcactcattggcggcgtttgcctgtcattttatgattggtattgcgatcttccacctccctcacccatggtgtggggtgagcaaactgacgtgcctgagtctgctgattggtataactcggattatattattgcgtggggttcaaacgtcccacaaacacgtacccctgatgcgcatttttttacagaggtgcgttataagggcaccaaaactgtttctattacccctgactatgccgaaatatccaagctgaccgatctgtggttgaatccaaagcaaggtactgatgctgcattggcgcaggcgttttgtcacgttattatcaaagatttttatttaaaacagccgagtgattattttatagattacgccaagcgttataccgacttgccgattctagtgatgttggaaggcgaagaaggttcacgtcgccctggccgttatttgcgtgcgtctgatttggttgataatttaggccaagaaaataaccccgaatggaaaaccattggcttaaacaatgatggtgagctggtgtcaccgcaaggttccattggctatcgctggggtgaaaagggcaaatggaatattgaacaaaagaacggaacaacaggcgaagacattgacctgactttaaccttaaaagacagtcatgaaacctgtgtcgttgcttttgattatttcggtcatgttgagcacccacactttaactctgtgccaggtgatgcactacaacaaaaaaccgtgccatgtaaaaccattacgcttgctgatggcacaactgccattgttgccactgtatttgatttaactgttgcaaaccttggtgtggataatggtgttggtggtaaccatgtgactgatgactataacgacgcatctgtgcctggtacgcccgcatggcaagaagtaatcacgggtttaagccgcgaaaaagtgattcaagtggcgcgtgaatttgctgaaaatgcgcataaaacgcatggcaagtcgatgattattattggcgcaggtatgaaccactggtatcacctcgatatgaactatcgcggtgtaattaacatgctgatgctgtgtggttgtattggtaaatcaggcggtggctgggcgcactatgtgggtcaggaaaaactgcgccctcaaactggttggttaccattggcatttgcgcttgattggcatcgtccaccacgtcaaatggcaagtaccagtttcttttatgaacacagttcgcagtggcgccatgaaaccatttctgcccatgaaattctgtctcccaatgccaataaggcagatttccctgagcacatgcttgactacaatattcgggcagagcgcgcaggctggttgccatccgcaccgcagctcaaccgcaatcctttactgattgctgaacaggcaaaagcaagcggcaaaggcattgaagaatatgtggtggattcgcttgaagatggcagcttacgtttttcttgtgaagcacccgataatccagtgaattttccgcgcaatatgtttatctggcgctcaaacctcttgggttcatcaggtaaaggccatgaatacatgctcaagtacttcttgggtaccaaaaacggcctgatgaatgcagaaaaccctgctggccatttacaaccgaaagaagtcgattgggtagaaaaaggtccaactggcaaattagatttggtggtgacgctcgatttccgcatgtcttccacgtgcttgtattctgacatcgtgttgccaacggccacatggtatgaaaaagatgacatgaatacttctgacatgcatccgtttattcatccactcacggcggcaacagatcctgcatgggaatccaaaaccgattgggaaatttataaaggaatttctaaagcattttctatcatttcaaaaggtcatttaggcgttgaaactgacgtggtgacctatccaatgcaacatgataccccaggagaattggcgcagccatttggtggtaccgattggaaaaccgcaggcgaaaaacccgttccgggtaaaaactgcccgatgattaaaatcgttgagcgcgattatccaaacacttatgccaaatttacggcggtaggaccattgttagagcaattgggcaacggttcaaaaggcttaaactgggatatgaaaaccgaagtgaagcagctgggtgatttaaaccaccgtgtcactgagctaaacattgcgcaaggtcaaccacgcctgaacacggcggtgaatgcgtcagaaatgattttgatgcttgcgccagaaaccaatggtcatgtggcggttaagggctggaatgcactgtctgaattcacaggccgcgatcatgcccaccttgccaaatcaagcgagcatgaaaaaattcgctttaaagatattgttgcccaaccgcgcaaaattatctcaagccccacttggtcaggtattgagtccgatacggtgagttataacgcaggctataccaacgttcatgagctgattccttggcgcacgattactggccgtcagcagttttatcaagatcatccgtggatgcaggcttttggtgagcaaatgcagcaataccgaccaccaatcgatactaaaaccacagcgatggtaaaagatgccaaaccaaacggtaataaagaaattgtactgaactttttaacaccgcaccaaaagtggggtattcacagtacttattctgaaaacttactgatgctgaccttgagccgcggtggtccgtgtgtatggctatccgaagtcgatgctgcaaaagcgggcattgtcgataatgactggattgaattattcaatgccaacggtgcactgactgcgcgtgccattgtcagccaacgtgtgaaagaaggcatgaccatgatgtatcacgcgcaagaaaaactagtcaatattcctggttctgaacaaactggtacgcgtggtggtattcataactcaatgacgcgaaccattctaaaaccaacgcatatgattggtagttatgcccagcaatcttatggatttaactattatggaacggtgggttgtaaccgtgatgagtttgttgttatccgtaaaatgtcaaaaattgactggctagaagacaagccagatgattcgttaccgcgcccattgccaactcgcattgaaggttaa

SEQ ID NO: 63058 - DNA, 1539 bp, Acinetobacter baumannii
atgaaaattcgctcgcaagtcggcatggtgcttaaccttgacaagtgtatcggttgtcacacctgctcagtgacctgtaaaaacgtgtggaccagccgtgaaggcatggaatacgcgtggtttaacaacgttgagtcaaaaccaggtattggctatcccaaagaatgggaaaaccagaccaaatggaatggcggctggattcgtaacgccaacggtacgattaatccgcgcatcggcggtaaattcagagtattggccaatatttttgccaaccctgacttaccagaaatagatgattattacgaaccgtatgattttgattatcagcatcttcataccgcaccaataagcaaccatcagccgattgctcgtccgcgttctgccattactggcaagcgcatgcaaaaaattgaatggggtcctaactgggaagaaattttaagtacggagtttgaaaaacgccgcaaagacaaaaactttgacaatatccaagccgatatttatggacagtatgaaaataccttcatgatgtatttgccgcgtctttgtgagcattgcttaaatccaacttgtgtgtcggcatgcccaagtggtgcgatctacaagcgcgaagaagatggcattgtgttgattgatcaagaaaaatgtcgcggctggcgcatgtgtatttctggctgcccctataaaaagatttactacaactggaaatcgggtaaatctgaaaaatgtattttctgctatccacgaattgaagcaggcatgccaacggtttgttcagagacctgtgtcggtcgtatccgttatttgggtgtcctactttatgatgcggacaaaattgctgaagccgctagtacaccaaatgagaaagacatttatccagcccagctcaatttatttttagaccccaatgatccagccgtgattgcacaagccttaaaagatggtgtgccgcagtccgtgattgattccgcacagcgttcacccgtgtataagttggcagtcgattggaagctggcgttgccattgcatccagaatatagaaccttgccaatggtgtggtacgtaccaccgttatctccaatccaaaatgcagctgaagcaggcaaagtgggtatggatggtctgattccagatgtggatagcttacgtattccgctacgttatttagctaatttgttgactgctggtgatgaagcgcctgttcgtcttgcattgaaacgtctactggcaatgcgcagttataaacggatgcaactggttgaaaaacaggaagtgcaaagcatcttggatgatgtaggcctaaccaaactgcaagttgaagaaatgtatcgctatttggcaattgccaattttgaggaccgttttgtgattccaactgcgcatcgcgaagaagccttgagtgatgcgtttgctgagcgtggcggctgtgggtttacttttggtgaaggttgctcaggctcttctgataccagtatgttcggtcaacgtaaagccaatcgtcgcgattttatcgacactgtgcaaaagtgggagtcataa

SEQ ID NO: 63059 - DNA, 855 bp, Acinetobacter baumannii
atgcaactttctgaagtctatagcgctgacgcaagcactacttttgacgcgcttcccgtgattgcaaactctgagcttaaattactcaaagtattaagtttactgatcgattatccaagcactgagttgtttgaaggcgaagcatttgctcaatgtaagcagctcgttgtcacgtcaacgctgattagcccacaagtacgtggccaaatcattggcttaattgatgaattacttgaattgggctctcttgaagcgcaatcccgttatgatggtttgtttgaacgtggccgctcattatccctttggttgtttgagcatgtgcatggagagtcgcgtgatcgtggacaagccatggttgatctgatggcgcagtatgaaacggctggctttgaaattggcgtgaaagagttgccagattatttacctatgtatttggagttcttggcttatcaagccactgttattgacgatgatatccagatacgcatggatattgccgacgtcagtcatattattgcgttgctggctgccagactggtagagcgcaatagtctttattctggttgttttaatgcgttattacaaattgcaggcaaaccgcttgatgtagtagacgaatacctagaaaaaatcagtaacgaaaagcgcgatgacagccttgaggcgattgacaaagactgggaagaagaagtggtcgactttttgggtgcgcagcaagaagagcggtgttcttcacaaacaagtaccaaaaatttggctgctcaagctggcgttagacctgcaaaggcggccaacaccatcggtgcgcctgtacactgggtggattttaagcaaaatccctcggtcaaacaataa

SEQ ID NO: 63060 - DNA, 726 bp, Acinetobacter baumannii
atgaatattgcagatcctagtgtgaactctctagccaatctcaattggttgcagatattcctttttggcgtttatccttatattgcgttgaccattgcaattgttggtacgtgggtacggtttgacttgtcacaatactcgtggaaaacaggttcatcgcaaatgttgcgcaaaaagaatatgcgcttggccagcaatttgttccatgtgggaattattgtggtgctacttgggcattttgtaggcatgttaacgccacattttatttatgagccattcatcagcgcaggcaataagcaaattctggcagttgttgtcggcggtatggcaggtgttttttgctggattggcatggtgatgttgatctggcgtcgctttgctgatgaccgaatttctcacacctcatctttttcggacaaattagtactcatcctactattcattcagcttaaccttggtttaatttctatctttacttcaattaagcatttagatggattaaccatgatgaacctagctggctgggcacaagatattaccattttaagaccttggcaggcagcagcgcgaattgagcaagctgatttaatttaccagcttcatatggcactcggtattaccttaattgcaatattcccgtttactcggcttattcatattattagtgcgccgatttggtatttgggccgtcgctatcaaattgtgagacaaaaacgatcgcaataa

SEQ ID NO: 63061 - DNA, 1086 bp, Acinetobacter baumannii
atgactgtcagtatttataatccaatttctaaagtgaatagtgatcgcgtcaatggtcttgagagtaagaacgacgcccgcaatgcattaaccaacgctacgccaacactcgcgaatgctgcgccagcaacaagtaatccagcaaacactaatccagcaagcaataatgaagacatcgtgcatttgatgccttcattaaccgacttaaaaaagccacacgctgaccaagaatttattgacagagcactagcagaagagcgtagtaatcataaaaatttaattgcttctagtcgtgatgagctaccttctgtattggtcaacggtgtcatgatcgacagaactgctattgcgcaagaggtgcaataccatcctgctaaaaataaagaagatgcggtatttttagccacgcaggccttggtggtgcgtgagttattaagactagccattgtgagcgataacgagttaggtgagtctgcatgggcagaggacgaagaaaaagcaatctctgcattaattgataaaaatgtaaaagcgacaatacctgatgctgcaacctgcgagcgttattatgagcaaaatatagaagattttatcactgatcctgtgatgtcagttcgtcatattttattggcctgcctgcctgaagatggtgaagagaggcttaaacttaaaaagacagcttatgattacattgagcaaattcagagtgatagtaatcctgctgctgcatttatcgaattagcgcgtcagcactctgcttgcccttcaaaagaacaaggcggtgatttgggtgtcattagtaaagggcagactgtacctgagtttgagaaggttttatttaagttagaaacaggtctagcaccgagcccaattgaaagcagatatggtttccatgtagttgacgtgctaaataaacagcaaggtattcaaatgacatatgagcaggtaagcgctgccatctctaataagttgagccaaaaagcgtttcatcagtcgctttgcgattacttattcaccttagcggatgatgccgaaatcgaaggaattgacatggtgctgtcccaagaaaacatatttcgtggctag

SEQ ID NO: 63062 - DNA, 1296 bp, Acinetobacter baumannii
atgataacgcccgcgcaattacgaactgccattgagcaacgtatcgaagtctataacaacaatgattttccactgaataaaagaaacgtaattacctgtgcactgttagatagccttaaccatgtgcttgctcagcgcattacatcaccgtttgccatacccagacaaaatatttccgccatggatggttatgccattgcacatcatagtgatgtttcaaaagatagctgcattacgataattggcgagtcacaagcaggtcgtgcttaccttggtgaaataaaagcagggcaaggcgtacggatttttacgggggcagtggtaccaagtgcttgcgatacagtgatcatgcaagagaataccaattttgcagagattaaaaacagcatagataaatcaaaaccgtattctattgtgttatccaaaaccgcaaacatcgatgccaatatccgtaagcaaggggaagaaatacaacaagcggaagaggtgttatctctgggtaaacggattaatcctgctgatattagtttattggccaatttaggcattagccatgtacaggtttttaaaccattgacggttggcttactggccacaggcgatgaattggtgccagtgggtgctgagctgacccatttggcgcaaatctataattccaacacgccaacccttaaaagtttgcttagtgcattgcctatcacaatcaatgactatggcattattcctgatgatttagcgcaaactaccgcgtgtgttgcaaaagccatgggcgagtgtgatgtggtggtttctactgctggggtttctgtgggtgattatgattttttaaccaccgtgattgagcgcttagggcaaatcaatcactataaagtcgccatgaaaccaggcaaaccgtttgtgtttggggagctgtgccaagctggtagtaagcccgtattattctttggtttaccgggtaatccattggcaacagtagtcggtgcactacaatttataattcctgtcttatggcaactctcaggagtatctgtgtcacaacagcccatgcaactgacactgaaggcaacagccaaaaatgatattagaaagtcaccaggtcgtactgattttcaaagaggtctgttgtcacaaaatgagtgtggtgtgtatcaggtagagtgcttttctcagcaagactcgcacagaataaaacaattaagccttgccaactgctttattgttttagaccaagatagtgctcatgttaactctggcgatacggtcactgtgcaaccttttccgtggttacactgttaa

SEQ ID NO: 63063 - DNA, 1119 bp, Acinetobacter baumannii
atgacttatcacagccctgtaaaagggggtgcacaatggtattctcctgttttaacatccgctgccatggtcggtggtagggtattgtcttctgccacaataaatccaaaaacaatagttaatcatactgagattgtcccaccgcaaccgctcacggatagcttctcacgtcgattaacgtatttacgtttatctattaccgacttttgcaactttcgctgtgaatactgcttgccaaatggctatcagggcaagcgtcctgataatgaattaagcgtgtccgaaattgccaccttaattcgcggctttgcgcaagtgggtactcgaaaagtaagaattaccggtggcgagccgtctattcgtcgtgatgtggtcgagattattcaaacgattaagcaaacacccggtattgaaaccgtggcaatgaccagtaatggctataagctcggtaagcatttggccaattggcaattggcagggcttaatcaaattaatatcagtatggacagcttcgatgcggcaacatttcatcagatgacgggttttaatatcttgccgcaattaatggctgatatggataggttattggaatccactgatattaaactcaaaataaatagtattttgatgtcggaaactgcttttgataatttaataaatgccatgaattatattaagcatcgcccagtaacgtaccgctttattgaatttatgcaaaccagtgacaacagtgatttattttttgcgcagcatgcgcaagccagcagtattagtgattatttgttgaaaaacggctggcgcaccaatcaacgtggcagcgcagatgggccagccattgagtatagtcatcccaattatttagggcgtattggtattattgctccatatgctgctcatttttgtgatagctgtaaccgcttacgtgttaatagcgtgggtaaagttcacttgtgtttatttgaccaagctaaccacgacattcgccagcatctaaggcaacacgatgtccgtgggttggttaacaccttacggtcttttatgccgattaagccagagcatcatcatttgcatgattctaatagtggcatgatgaataacttatccatgatcggtggttag

SEQ ID NO: 63064 - DNA, 531 bp, Acinetobacter baumannii
atgtccaaacctgctgcacaatttatcccaatcaatattgctgttttaacggtttctgattcgcgtactttagcagaagatacatcgggtcaatatttagcagatcaagttgttgctgccggccatcaactggctgatcgtcaactgattaccgatgatatttatcgtattcgtgccgtaattagtggctggattgctgatccaaatattcatgccattattaccacaggcggcactggattttatattcgagacagcatgccagaagcagtcagcgttctatttgacaaatcgattgatggttttggtgagatgtttcgtttgatctctaaagatgagattggcatgtcaaccatacagtcgcgtgcggtggcaggcatggcaaatggcacaggtattttttgcttgcctggctcttcaggcgcttgtcgcacgggttgggaaggcattttaaaagaccaatttgataaccgcacccgtccttgcaattttataccgcactttatgcgtaccaatccgactcatgactaa

SEQ ID NO: 63065 - DNA, 693 bp, Acinetobacter baumannii
atgattaatcctatcggcaacagaccttatttagcaggtattgtcattttggcgggcggtgcgtctagtcgaatgggcacacccaaagcccagctccttttgccaacaggtgaaagcttgctggactatcatgttcggcaggcggctgagttaaatgtcccgattatggtcgcagataatgagcgtggttttcaggtgtcagcggatttgctgttaaagcatgaaaatttgccgatcttgtatattcctgactacggttctaagttaaacgctgaaaatagtgataaacaaaaagccacgggcggtgccttagttgccattgcttccgcattacagacaatgtctacgctgaatgccaataaacaggatacttggttaatggtaatgagttgcgatagcttggttcctgctatgcaactctggcaaaagctacaatcttccatgacccagtccattcatagctcagtggtttgcttaaccgatgacacgcatttatatccacttttaggactttatcgtttaagtcttgagcttgatttagtggattatcttgatcgtggcgagcggcaagtgatgaagtttattcagcatcaagttcaacccattgccttaccaaaaaactggcagcatttaaccaactttaatacgcctgagcagtttaaacaggcatgtgccgctttaaatgatttataa

SEQ ID NO: 63066 - DNA, 543 bp, Acinetobacter baumannii
atgccgacacattccaatcctcctagtgaccagcatccaacaacagatctaaacgtatctggtttatcccatttaaacagtaatggcgatatcaatatggtcgatgtgagtggtaaaacggcaacgaccagagtagcgcatgctgcaggacaagtatgctttcctacagatatttatgcgcaaattaaagcggctgatggcatgaccaaaaagggtagcattactcaaaccgcgcatattgccggtattatggcggcaaaacgcacgcatgatctgattccgctatgtcatccccttcctttagacaaaattggtctgacgtttgcttatgatgaccgtgccaacgcaataacagtcgcggcaacggtcaaagtgacacacaaaacgggcgtggaaatggaagcattaactgcggtgagtgtggcttgtttaaccatctatgatatgactaaagccttatcgcatgacattatgattgagggtattcatctgattcataagagcggtggtaaatcggactatcaatattcttcaatagaataa

SEQ ID NO: 63067 - DNA, 261 bp, Acinetobacter baumannii
atgactaagacagacagcatgactattagtattttgtactttgccagtttggcagatgaagccaagtgtcacgaagaaaaagtcacggtgcaaaaatcaatatcactacatgcgctctatgccaatttgaaccaaaagcattgctttagtaaaccgcaatcgcaattgcgtgtggccgtaaatgactattttgttgactgggatcaagaggtttgtgatggagataatgtggtctttatgacccccgtcgcaggcggttaa

SEQ ID NO: 63068 - DNA, 540 bp, Acinetobacter baumannii
atggtggacggtgcaaacaataacacggcaaatacattgctagcaggggatgaaaacgaggtgcaccagcgttcaatgcgtattaaccgtagcgttgatgaggcctatctgcttgcgcagcgtgacggcttttctttattagatgtggctattgatgaaagcagacttcgaaacatgctcgataacgacagttgcggagcctttgtcagttttgaaggacgcgtgcgtaatcataacaatgccaccagcgttgatcgactgacttattatggttatgaagcattggccattaatcaaggccgccaaattattgcagcggcaaagaatcaatttgaaattacacaggccattgcaatccaccgtattggcgctttagagattggcgatattgcggtgtggattggggtggtgtctgcgcaccgttatccagcctttgatgcatgtcgttggatacttgatgccattaaggcggacattcctgtttggaagcaagaatattatcaagatgagtcatctaaatggctgagcaacaatggttaa

SEQ ID NO: 63069 - DNA, 597 bp, Acinetobacter baumannii
atggctgagcaacaatggttaatgataagtgctcaaaaacaggagctaatgatttatagagtgatgattaatattttattgcatcacgctcacttataccaatttggagttttatttatgaaacgcgcccatcaattacagccattatcacgccagcatcaccttggcttaaatttaggttatcacgccaaagaatgtgcagataacccacaagacattgcaaaacactggcaggcattatctgattatatgcataatatgcgccatcattttagtattgaagacaacttaatcgttaagagcttagcgccgcatcaaacgactgatccgcaagttgctgctgtattaacaacaatggcgcagcaacaccaagcattgaatcaattgatggcacaaattcaagcggtgcaagatgctaacagtagcgccattactgtgagccaaattaaagaatttgcgaacctgatatacgatcatgttcgctttgaagagcgcgaactatttccgatggttgaacaatatctcactgaagatgaacttaatgccatctatgaggccagtcccgataacattaagcacttagatgagcagcgctaa

SEQ ID NO: 63070 - DNA, 768 bp, Acinetobacter baumannii
atgaaaaataaaattattttagtattatgcttaagtatgtgtatggtgactgcacatgcgcaaccaataaaaatttatgctgctgccagtttaaccaatgcgattggtgacattgctaaacgctacgaagccaaatatcccactgtcaaaattacgccagtattcggttcctcatctatgcttgccaagcaaatcgaacgaggtgctgaaggagatatctttttttcagccgatcaagactggatgaattatttaatccaaaagaatttagccgaccaaagcagtgttgaacccttgctcgccaatcaacttgttttaatcagcccgaaaaatagtcaagttaaatttaaaccacaggcaagttttaatttttccaaatcatttaaaggctatttatgcacaggccaaatggagtcagtgcctgttggaaagtatgccaagcaaagtttagcagcgctcaattggcttgatagtttaaaaggtcgaattgtgggcacggatgatgtgcgttcagcattggcttttgttgagcgtggtgagtgccaagtcggtattgtttataaaaccgatgcgcttattagtcaaaaagtgaaaattgtgggaacctttccagagaactcacataaacccattgtttacccgattgcagtaaccactaaaggccagaacaatcctgatgcgattcaatttgaaaaatttgtgaaagaagacccgcaagccaaagcgatatttgagcattatggattttctgtaaaaccacataactaa

SEQ ID NO: 63071 - DNA, 684 bp, Acinetobacter baumannii
atgctaagccaagaagaatacgatgtcttgtatttgtctgccaaagtcgcagtgtttgctacgctgttttgcttaccactggcagtgacgttggcttggtatctagcacgctatgattttaagctaaaatttctggtcgaagcggttttacaattacccattgttctgccgccagtggtattgggctatttgctgcttatttcatttggtagccaaggctttattgggcagtatcttgctaaattaggtattcatttggcgtttaattggaaaggtgcagtgttagcctcgatggtggttgcgtttccactcattgtgcagccgatccgattatcatttcagttgattaatcggcaacttgaacaagtggcaggatcgcttggtgcaagcccattcagagttttttatagcattagtctacctttggccttacctggcattattatcggcagcattttgggatttagtcgtagtttgggggagtttggcgccaccattacctttgttggcaatattcctgatgaaactaggaccattccgattgccatttactcactattacaacaacccgatggtgattcagcagccatgcgattagttgcattgtcgatttgcttggccttttttgccctgatggccaattattttattatgaagaaatttcaaaacaagttggaagcttaa

SEQ ID NO: 63072 - DNA, 636 bp, Acinetobacter baumannii
atgctgcgctgcgattttgaatataaagctgctaactttcaactcgcgattcaattagacatgcaacatcaacttattggtattgtcggtgcatcaggctcagggaaaaccacgctactcaaaaatattgttggcttgcttcaaccgacacaaggccatattcattttaatgacagcattatggtagatacgcagcagcatattgtgatccccatgcatcagcgcaaaattgcattaatatttcaacaggcactgctatttccccatatgagcgtagcgcaaaatctgagatatgcagaaaaatttataccattttatgatagaaagtttcaatttacgcaggtcattgagctgttggaattaaagccactcatccaacgtaaatctcatcaactttctggcggtgaggcgcaacgagtgtcaattgcacgcgcgttattatcatcacctaatttattgttattggatgaaccattaactggattggatcagcgcttaaaacagcagattttaccttttttaaaaatgctaaaacaagaaactacgttgccgatgatttatgtgactcatcatattgaggagcttgagtatttggatgcgcatgtgctgacattagagcagggaagtctgatttag

SEQ ID NO: 63073 - DNA, 411 bp, Acinetobacter baumannii
atgggattgaattttagaaaaagtataaaaattgctccgggagttcgtgtaaatataagtaaaaaaggagtatctagtgtttctgttggtgggaaaggggcacgtgtaaatgtgggtaagaagggaactcgaacaacagtagggttacctggtacaggtctttcctacacaacgcagagtccttacaaaaaatcaaaaaagtttgataaagagccaaattacctattaagtcaggaacagacttctaaaggacaaagaagtattttaatgtctattcttttatggattggaatccttgcttttccatttcttttcgcttggttcactctacaaaaaaaatatacaaacatagagagggtattagcatttggatggttgttgttagttgtattcggtatgatttctaaataa

SEQ ID NO: 63074 - DNA, 714 bp, Acinetobacter baumannii
atgaaaaagttagttttaataagttcattattgttgttaggtgggtgtaaagaatctaacactggactagataaaaatgtttttaatacatcgtatgacaagtgtgttgagtacttaactaactccttaaaaagcccatccagcttaaagattagagaggctaatatttctactataattccaccagctgaagatattaatagtgtatttggggacattattgctaaggatgggttgattaaaagtagtattaaagatgaaaaggctcggtttagagagctaacagttgatattgattatgaggcacataattcatatggcgcctctatacgtggatattatcagtgtggttatatttatagtttaaagaataacgaaacaatccctaaaccactgaatacttatttatacaaattaaaaagtgatggagaagttctggacttaggagtacatgttccttttgctgaattttctggatctaatttttacttgaataaggttattaaaagaattgttggcgcaaaagatagtcaatttaatgaaattgataaaaaccgttatgaagaaatcgaagcaatctatagaaacaaaaaacaagatatagaggcagagaaacttcgagaaagttgggataaggctatgccgagtgtagaggtggcagccgcggccgcagcagccgacatagctgcagcagcatctgaatctgaaagataa

SEQ ID NO: 63075 - DNA, 249 bp, Acinetobacter baumannii
atgttattcaaaaaattcgctgttgctgctgctgttgctgctactttagctttcgttggttgttctaagaaagaagaagctgctgctgcatctgaagctgtagctgctgcttctgaagctactgaagctgcttctgaagctgctgtagctgttgacgctgctgcttctgaaactgctgctgctgcttctgaagctactgctgctgcttctgaagctactgctgctgctgacgcttctgctgcacactaa

SEQ ID NO: 63076 - DNA, 372 bp, Acinetobacter baumannii; identical to SEQ ID NO: 58557

SEQ ID NO: 63077 - DNA, 264 bp, Acinetobacter baumannii
atggaaattaaacaactgaaacaggtagaagtcattacagatgttatatgtgatgtatgcaaccaatcaacgaaactggagtttggcactttatcggcgcattggggctatggttccaagcatgacggggaaagatatgaattgcagttatgtgaaaaatgtttcttttatgccctgacgacattaaaaaaagagcgagcagatgagtttatgtttgatgaaaactttgacccttcaaccctagatgggtttgggttgaagtga

SEQ ID NO: 63078 - DNA, 1215 bp, Acinetobacter baumannii
atggctacgccaaagttaagatttaaagagtttgatggggattggtctgaatcaaaattaaaagattgtatagattcaattgattcaggttggagtcctcaatgcgaaagttatcctgctgatgagaatgagtgggctgttttaaaaaccacatcagtagattgggatggctttaaggctaattttaataaaaaacttccatctaatttagaagctagatttgagattgaggtaaagcctaacgatattttggttactcgagctggcccaactgaacgtgtaggtgtagtggcagtcgttccacataatgtacgctcgaaattaatgatttccgataagttaattagattgaaagcaaataatgagaataatcctgaatttttaggaattagcctgtcatctgtaaaatgtcaaaatcagcttcaatctaaaacttcaggattagcaaaatcgcagacaaatatttctcagaaaattttatgtgatgtaagtttgatgactcctgcaaaagcagaacaaaccaaaatcgcttcttttctatcgaacgtggatgaaaagattagccaactcacgcaaaaacatcagctactgagccaatacaaacaaggcatgatgcaaaagttgtttagccagcagattcgttttaaagcgggtgatggcagtgagtttggggagtgggaggaaaaggaactcaaagaggtagctgaaattaatcctaaagctaaaaaattacctgcgaactttatttatattgatttagaaagtgttgaaaaaggacaactattacttcaaaaaaatattgagcttcaggatgcaccaagtagagcacaaagattattagctaaaggagatgtactctttcagatggttcgtccttatcagcagaataactattacttcaacttaagtggtgagtatgttgcctcaacaggctatgctcaaatccgtacaaaattggattctaaatttatctactatgctttacatgaaaagacattcttagatgaagttatgaaccgttgtacgggcacaagctaccctgcgattaatagttcagatttatcttcaatagaaatatttgttccctgcctagaagaacaaaccaaaatcgctaatttcttatctgccatcgaccaaaaaattgaagtggtggcacagcaaattgaacaagcgaaaacttggaaaaaaggcttgttgcagcagatgtttgtgtag

SEQ ID NO: 63079 - DNA, 735 bp, Acinetobacter baumannii
atgaaaaattatagaatttactgtgatgaaagttgccaccttgaacatgataatcaccaagtcatggttattggttgcattaaacttgctgatgatcataaccatgagcttcggcaaaagtttaaagagattcaacttaaacataagtcccctactgagctaaaatggaatacagtttctagctcacgttttgcgatgtataaagagctgatagatgctttctttgaaacaggtcttatctcttttcgttgtgtggtagtaaaaaataaaaatgatctaaatcatgatgaatttaataatggctctcacgacaatttctactataaattggtttatcagttactcaataacaaatgggtgatggggcaagagcatcagtatcatgtttttttagatattaaagatacacgtggacgtgagcgacttgcaaaaattaatcaggtttttggaaatcaatattacaacaactcaccatttatgagctttcaacatctgcattcacaggatgccttttggattcagtgggctgattttctgattggtgctattggttataaatcacgaggagagcatttaaaggagcgtgcatcacctgttaaaaaagaaattattaattatctcgagcaaaggtcaggttatctgttggatgaaggtactccaccatttgaatctaaatttaatattttcaattttagagtgaagtcgagaaaattaggtggtgttggtaatgcctga

SEQ ID NO: 63080 - DNA, 552 bp, Acinetobacter baumannii
atgcctgaactaacacatttagctgatttaattgcaaatttggatgatcaaggtttaattcaagatcaacttgatcaaatttattctgtttttcgtcagcactttgaaatagatggtgttttggtggatggttctcgcttaaaaatttatttgaagaaatctaacatttcacagtttagaaacaaaccagaaacctttgttcatattgttactcgggatgctaagggcagtggatacagatcttttgataaagcgagagcaaataaaattcactggattaaacctatactagtaaattgtatagattcacgtattcatgtttttgaccgttcacacgataaaactggtaaaccacaacgatatttttggtttaaaaataaagactttgttgttattttgaggaattatcatcaagataattttttagtgacggcattttgtgtagatccaatgacagcgcgtaagtatcagaaatggcatcagcaaggggcatgtaataaaaaaccccacatcatgtgtggggcacgcagcttaggcactgcgactgaatag

SEQ ID NO: 63081 - DNA, 252 bp, Acinetobacter baumannii
gtgtgttcagcggacgcttacgtttctgatgatgaaatcgtgacaacaatgattaggtatgttgcatatgatctgcaaaaaagatatgaaaatccttatgctagaaaggctggccctatatctttagaacgatggaataatcagattgttcaaaatcttattcaatattgtgactatatgattggtgaaaagaagcctgaatggcaaattttggcagaacgtcatggttggatgccaccaaataagctataa

SEQ ID NO: 63082 - DNA, 1500 bp, Acinetobacter baumannii
atgctaaactttcccatgccgtaccaacacgagctgatttacagtactgtggctcgggcagggactcgtttggctttggatagtcctaaacaattactagatgaagtctttaaaaatcgtaaggtgattgcaacggtagatttgccttgtcacctaaacgctattattcatcagctttcgaatcatcagtttaccgttgaggatatcgcctatcagcatacgctgtttccaatctatgcaccttttgtccctgaaaaaagacggcaacaatgtttaaaatggatggctgatatttctcaaggttcgattcatctggctttaggcattaatgcctcacgtatcccacctattcataaattacgttattgcccacaatgtttagcagaacaattagagaaatatggcgaatattattggttccgcttatggcaaatacaaggagcttgctgtctccaacatggtcaactcattgactcagaactggatttaagatcattacatcggcatgattttttagttccatctcatcaatcatgtcctaaaacagaacaaaccataaccaatcctgacgatatttttattacgtccaaattgttagagttattgaccttgcctccctttgagtcacccagctatgaacaatggacgatgttttattatgaactggctcggcagaatgactgtattcgggggcaaaaccaaatcttgcatgagcgtattctagaaagaataacgatccgttggtcaaagaaatttttagagcagtattgtttagccgatttaacttccgagacctcttggttaaacaacatttttagaaaacatcgaaaaagctttagttatctggaacatatcattgccattgaggctttaatcaacagagaatggccttttgctgaaattctcaaccaagtccgctctttccgtaaaataaatcaaaataatcatatggatgttcataacaaccatattactggtctcaccataaaaaaccgagaaaattggctgagcttgatcaaaaaaaatggtgtaaagcctgctcggcttttaaatgctgctttatatgcttggttataccgtaacgacaaacattggttattagagaccaatcagggttttcaccaaaaatatatccctcaaggtactaaagtggattggcatagccgtgatttgtcctttgtaaaacagttgattaagctcaacaatgatttactctgggatttggataatcctagacgttcagcaaaatggtggatgaaacaaacctcccatgtatcaaccattgagaaaaatctagatatgctacctttaaccaagttatttttagagaaatatagtgaagatattgggacataccagattagacgtttaactaaaactttcattgagatgaaaacaaaggcagaagttctacctcgttggagaattttacgtaaggcaggtctaagtgatgaacgtatggtttcggaagctgctcgatttctgctcaaagtattttaa

SEQ ID NO: 63083 - DNA, 1683 bp, Acinetobacter baumannii
atgacaaatcaaaatgattatgcagtatatacacctagcccagtttcagattatcagggaaatccttttatcgaggctttgccacccatttttgaggcacaggacacgattcaagcgataaaaggttcaatcgaatttaaacaatctgatcggcagttaccgaataatactcgtgcccatattatttcacagttatttaataacttttttcatcctatccgcagacacttagaattagagcagaaaatctccatcatgctgagaaaaggctatgtggggaggaatattgtgactggcgactttaatcgaattctaaaccgtagtcatcaaatcgctttatccaataattttgaaccaacaccctctaatgatgtacgttctaccgcacagagccttacttttattggtttttctggcagcggaaaaaccacaacactaaaccgaatcttaaaaaactataaacaaaagatttaccaccctgagcataacttcacccaacttgtctatttaaaaatcgactgcccttataatggttcacttaagtctttatatttaaatttctttagtgccgtagatcgtgcattgggaacaacttacgaaaaacaatacacgcagaaacgccataatgaacaaaagctattacagcttatggggcatattgcccatcttcatgccattggcttattagtcattgatgaaattcaacacttgttggcaaatcgatccaaaaattcggatgagatgctcaatttctttgttaccttagtcaatatttatagtctccccatcgtcatggtcgggacacctaaagcaattcaaatatttgagcgggatctccgttcatcacgtagagcggtaggtttgggttcaattcattgggaaccaatgaaaaatgagcctgcaatcactacaccagatggaaaagtcagaaaatccgaatggatgacatttactgattcgctctggaagtatcaatggttgagaaaatcagaccctgcattgtctgaagaattacgccaatgctggtttgatctgagtcagggtattctggacattgtagttaaactatttgttctggcacagatacgagcaattgaatcgggtttggaacgcattacggttaaactacttaaaaccacatttcaggaagattttaaaccgattcataaaattatagatgttttacgctctggtgatgcaagacgaattgcagaatattccgacttgattacgcctgaagtagatcgacaattattaaaactgatctcccgaattgaagaaagtagcctagatcaaaatgaccaactggcagaatatcggggtcatactgaatccatacgtttgcataatttattgcttgagcttggttatgattcccagcttttaattccccttgttaaaaaagtatttaaagaacacccaaatcgaaaattaactgagctactccctattattatgcgttggttaaatcaggatgttacgcaagactccagttcatcgtcatcaaaaccgaaattatcacaagctaaaagtaccaaacctgatcaatggcaaaccttggatacggtagacttacgtttccaattctcacaaaaagaaagtgaacatagcttttatgagcatttaaaggctcaaaccaatatcgtttttgatattgatcactggctcaaacaggtcagttag

SEQ ID NO: 63084 - DNA, 2142 bp, Acinetobacter baumannii
atgtttcgaatcaatgatgtttataaactgcacgatacatcttttcgtatccttaaaatgacactttatcacatcgtatggattgatattgatagtcagagtgctaacccctttcttatcgaaaaaaatgagttaactaaatctatagaagcaaacgaagctgaatggattgaagacccctttgcagatatcgcattgctaaaagttgttgagggtagtatccagcagcaaaagcgtgatgctggaatggcgttaatcagaccgctcattacacatgatcaattttttgatccatctattcgctttgatcttgttaaacgtatattggagcagcagaaatctactcaccagacgatttacaggcttgcccgcaggtattggcaacgagggcaaatacctaatgcacttattccaagttatcaaaattctggtgccaaaggtagtaaacgaattgccaaagataaaaagctgggacgccccagaaaatctatgccaggtacaggggcacttattgatgtaaatattgagcgattatttagaattaatatcaataagtatatgttaaccaagaataaacattctttaggttatgcctatcgtaagttctatacgatgtatcattcattatttcctgatgtgccagatactgaaattccatcaatatggcagtttaaacatttttatgaacgtgaatttcctaaagttacccagcttactgcccgtagcaatcctattctctataacaaggacattcgggcacttcactcaacagtgaatacccaagtcttagggccaggatcacgttatgagattgatgcaacgattgcagatatttatcttgtttcagattctgatcgtgcctgtattgtgggaagaccaacgatttactttgttgttgacgtatttagcagaatagtagtcggtttttatattggttttgagaatgcttcatatgtaaccgcaatgcaggctctacaagtcgctatgaccgataaagttgagttatgcaaacaatatggttatgaaattaccagtgaagagtggccttgtattggattgcctgatgcgattttagcggatcgtggagaattattaggtcatcagattgaggccctcgaacatagtttttcaattcggattgaaaatactgcgccatatcgtggggatttaaagcctattgtagaacgttatttcagaactgctcaggcaaaatttaaaccttttgctcagggtgtggtacaaccctttaaagaaaaaaaacgaggtggctcagattatcgtctagatgctactttaacaattcatgattttaagcagattattattggttcaatcctcacctacaacctgacccaccaattaaaaaagtatgatcgtgatcttgatatgccaacggatttacctttagttccgattcatctctggaactggggtatacaaaaccgagtgggcagattaaaacaggtttccgaaaaggcattacgtgttgcactgcttcctaaaaccaaagcaaccttatctgatcttgggctcaaagtttttggtgtattctattattgtgctgagattaatcagcaaggttggatgcaccgtaaaaaatcaatctcaagaccagatactttacaagttgcgtatgacccgagtaatgccgaaataatttatgttttttatcaagatgatagtcttcactattgggaagccgcacttgcaccaagatcaagagaatttgttggttgtagtttctgggaagtttggcaggttcaacaggaacagaagcaaacccaagctattcaagaactggaaaccaataaatctaaagctgctctggaagaacatatagagtctattattgctcaggccaatgctcaaaaaccaaagacagcatcaagcagaaaacaacgtgttacaggcattagggaaaaccgtcagcgggaaaagaatcatgaacgtttggcggggaaagcagatcatctgaaaaatccacttcctgaacaaccaactgaaaaagtctctgaatcaacaaataacattattcagatgcctaagcccaaacagaagctggaacatgatgaggattaccaacttacttttggtatttatcaggacttgctggaagatattgatcactcagatgatgattaa

SEQ ID NO: 63085 - DNA, 804 bp, Acinetobacter baumannii
atggcgactgaaaaacaacaagacaattggataaaagaaggtcgtggtcaaggctacctaaagaactataaaccttgggtaactgtgcgtgattttggctcaaaaggtcgctcacatcgtgtatatggacatacaaccaaacgtacacatcatttattgtctgatttagaacttgcaacctttctacttttagactggaatccatcagttactgatattcgggaacagtttcctttaccgcttcaagccacaactcaaattgcagaacaagctcaaattactcatcctagagttcgtaatgccctacaaattatgagttcagatttttatgtagatcgtaaagatttcaggcaacccaattttgctctgcaaacaaaatacgtagcagatttagaagatattagaaccattgaaaaacttgagttggaacgaagatattgggaaagtacaaagacaccttggtacatcctgacagaaaaagatattcctgcgactgtacttcacaatatcaaatggctctatcctgctatgagggaatcttctcttcctgtttatgaaaagctcgatgactatatgcagaaatttgctcaatatcctcatctcacattaattgagttaagtaaaaaagtagatcaggcatatgatttagaactgggttcatctttatcagaaattcgggagcttcttgctcaacgttattttatttttgatataaccaaagactataaaaagcttaaattatctgaaattacattaggtgatattgaagtgtgggaggacattcgccatgtttcgaatcaatga

SEQ ID NO: 63086 - DNA, 261 bp, Acinetobacter baumannii
atggataaaatgctagaaaagttggcagaacaatcaacagagttatcaatggaagcttgggctagtaacagacttttaattggctcattggtgatgtatctagttgataagggcgtaattgatcatgctgactatgttcaacatacgaataaagttagagatcatctattacttaaccgagaattttcaagtgatagagaacaaaatctagttactggaacttttgatgctcatttaagtgatattactgaaccagaataa

SEQ ID NO: 63087 - DNA, 270 bp, Acinetobacter baumannii
atgttattaactactgatgaaattgaattagtaaaaacatgtgatgaaagccctgaacaatacattgcagtctttcaaggtcaacagattggatatctccgcttaagacatggtgaatttagagttgattatcctgattgtggtgatgagacaatttactattcacaagaaatgcttggtgatgggaagtttgaagatagtgaacgtgagcacttcttattgaaagctaaagaggcaatcgttaagaagttcaatggtgcggaggtgtga

SEQ ID NO: 63088 - DNA, 321 bp, Acinetobacter baumannii
atgagaaaaattatcttaattattggaggtattatttccttagtagcatgtagtcatgatcctattaatgaagtattagataataaaaaagatataccaaaggaagaaaatagaacagttggctggtataagtcacagcctcagcttagtgaggaaataaaaaaagcttgtgatatcgatacctcagaatattttcaaagaaatgattgtattaatgcaaagagtgctttgaacctgatcttgattgaatctcgttcagatttgagtaataacttgcgtttgaatgaagatcgaaaatatttaaatagaaaagttcaataa

SEQ ID NO: 63089 - DNA, 339 bp, Acinetobacter baumannii
atgaagcatatttttatttatgggattttcttctcagggacggcacttgcctgctgtttagctcacagtgaagcagatgttaattttcaaaatacactcacactaaaaacattcaacttcgacagacaatatgaaaatggcgccagccccgatactcatagcttgagccaaggtctgatttatcgtggtgactggtcaaccaagcttaatgatgtacagctccacctcaatccaagcattcaatatgcttatcgcctaagtagcgaccaacacaccaatgatatggtcataccctttgaccctaacactaaaaaacaagcacaagatcaagttaaatag

SEQ ID NO: 63090 - DNA, 528 bp, Acinetobacter baumannii
atggcaaaactcactgaacctatgaaaatctttatagttcaaagtcttgcttgttttgaaacacctcaacaagtcgctgattctgtaaagaataatttcaaggttgagatcgaaagaatgcagtgtgcaaattacgatccaactaagccaactggcgagaagatgagtcaaaaattaaaagacttgttttacagaacccgtgaagattttaaaaaaaatatcgaagatattccgattgcaaataaagcatttcattttaaagaactgcaaaagatgtatgacgattggggcaaaaataaagtcatgcggcaaaacgtgcttaaacaagcacaaggattgttagcgtcaggtaaaagtgctggttcaagtggattgtctgagaaggaacaaatagaacttgaaattaagaagcttgagcttgaagaaattaaacgccgagtcaatccacctaaagagaagccaccagaagaagattaccgccttgatctaaaaccagacgaggaattgccacatgaacctatcctttag

SEQ ID NO: 63091 - DNA, 654 bp, Acinetobacter baumannii
atgaaaagaccttatccgcctgaacaagatagtccttatgcagatgatgaagacctaattgatagtggtggtctacttcattttgagcctgctaataatgatttatggccttggatagaagagaccttcttgtgtgagtggggcaaacttcacaatccagaccatgagcaccttttaagctttcaacctcctgaaatttcattcttatgggcatatgctaaatgtgaggcaaaagataaacgagtatttggtcaaactgagaaagtgatgattaatgtaggagggtggcgtaaacagcgtcaggaactgcaattgattaattggtttggtgatattccaaaatacataattactctggatgctcgtgtatgtcaggtcatgagtgatgcagacttttgtgctttagttgaacatgagctttatcacatcggacataagaagaataaagattctggagagtttgaatatacatctgtaggtgaacctaggttgtatttacgtgggtatgatgtcgaagagttccatggtgtagttcagcgttatggcgcatcagaagaagttcagaaaatggttaatcttgcgaatgaaggtccaactatatctagagccaacattgctcatgcatgtggtacatgtttattaaaacttgcgtag

SEQ ID NO: 63092 - DNA, 489 bp, Acinetobacter baumannii
atgaaaacagcagtgttcacaatcaaagaccactcagacataactaaaacaatgtcttatctgcatacaaactacaccaaagctaattttgagaataagccgcttgttgttgagattaggccatttgatggtgatagatcaaaggcgcaaaataggctttattggaagttcttatctcagtggtcgaaacaccaaggcacagataaagactcggaacatttattctttaagaagaagtttcttgcgcgaatatatgatcgtgatgatgtaggtcaatacaaagcaacttttgcagcagttagaaaactcaaagaagagcagcactcaatgtatcagcaagtcgctgatggattgaatgaactgattagcacaacagatgcatcgattgctcaattcactgaatacttaaacgacatacatgcattttgcttgaagcaagggtgttatttggaaacccctgatgatttgatgtatgcgatagataattaa

SEQ ID NO: 63093 - DNA, 162 bp, Acinetobacter baumannii
atgaaacagtggctaaaagacttcacgcacaattgcattgtgcatccacttatgatgtttattccgaaaaagtgggcaaacgagttgcatgaccgaaatgcagattggtgttggggaaaagaaaatcattttgatgaactaacattggaaaataaaaagtga

SEQ ID NO: 63094 - DNA, 276 bp, Acinetobacter baumannii
atgcgcgacagtaaacgtttagcagcgattagaaagttgccatgcgttatgtgtggtagaacaccagtggatgctgctcacagtaatcaatcagcacataacaaagggttgggcataaaggcgagtgatgagttcacaatccctttgtgcagaaatcatcatgtggaatacgaccaatttcaaaagatgaatagatcagagtcggtcgaatggttcggcaagatgctagaaaagacggaaaggatgttgagtcttaaagatgaagaaacattttaa

SEQ ID NO: 63095 - DNA, 666 bp, Acinetobacter baumannii
gtgcatctttttaaaggtattcatcttgggcaatcagaccatcatccatatttagaaccattacgcatagcgcattattttattgatgactataacgcacagtatcaacggcaaatagatcgacaagaaatgagttttccgtttcagcttgatcaaatgatcataaacggtcgtcgattttttgaaatggttgagcactatgaaaaacagatcagtaaagtggtggatcatcaagatcagtctgagaagatttctatatttggtgcgacactacaggatcgagcgaatagaattatcaaaatattgaattcatatgatgcaagaaatagggatggggatcgttatgtgcgaaccttgtttgattctgcattgattttttatatcgataaatttgctacagatcggttatcagaagcgattgaaaagatttttatttgggcatatcgctgtcgtattagtcaatattcggtgcaattggcaacgatagataattatgtcctagaaaagaacatattcagtttactgaaatatgctcaatcacccagtgagttaatgggatggtcgcttccgatagtcgataaacaagaaggcactaaagttgagcctttgatcactttatttaaagaactaaattatctcaaacaggaagatcagaatgacaaatga

SEQ ID NO: 63096 - DNA, 1596 bp, Acinetobacter baumannii
atgataaagattagaaactttccagaaaatgcccgaattacctttctcggctctatttttaaggatcataaaaatagtgaatggaatattcatattggtttagaaaatcactatacccatttaccagattatgaaaaatatatggtaaaacatgctcgtttttccaacatgccactattagcaaaaaatagaagatttaatcaaaccaaagaaatcccctcctacaatgaatcgatcatcaccattcaaattgatgattttaacaattggaaaataacaacaaataaatcaggacagtacatatttagctacattgtgagcgacttaaaaggtacatataaggatattcaaatccatttaccacacatagaactggcacgagttttgtttttccataatgcttatttatctaaggcagctttagatcaaagaaagctaacaacagaatattatattgtcccagaagaacatcaaaccattattcacgttcatgaattttgccgctttccccccaatcaatatgatagtgttggtatgcgtcgcctactgtcatggatattacttgatactgaggcacgagcgtcctatgaaagtatctccaaacatttttcgattgagcaagttaaaactaaaacacaaaccttttggaatttcaattttgcaccgccctcactaataggggctgaaattacaatgaaagtttacttcagtgaaaaaagccaacaatattatgtgaatgaaatcattgggattgctaatttaccgactgatatttctaatgaagtgattttttgtagtccaaaatttaccgtaaaaaatagttatgaaaaaacaggtggaaactctggaggacgtaatacctccaacgatgatccaaccattgatgatgaaaaagaagcggatagtgatcggaaaattacccaaattgaatctccaaaaatcactatgtcccttgccagtccttatgaaacaaaaaaggcaacacttaaacgttcaggtaagaaaggtataccgaatcataatgatgttgaaattctacctgatcatagtgtgagtacaggtgaagccacgatctttggtgaaattggccgtggagaatttgagaatgtccatgatgatagtgatgaccttgcatttttcatgaaaagatttgaagcattcaaagtcatggttgaacaatttgcatcacaacatcgtattcagcccatcattcatgtacataagctgcctgcggtcaatcgttccaagctacatagaacccatgatggtaatccgaggtgtattattgaagtccaacttagttttcaaggcaaaaaatttgtcattctggaaatagataccagcgataatctaaagcctctttctacactgattgtcaaaatctcagatacagacacatggaactcatattttccaacttttcggaagcaaatcgttaaacgctctttacgttggccaaccgctaaatctctacaagatatagggataaggaaaacctttaatcatccacgaaatctagttgaaatggctgagtctgatgaagagtttaaaaattgggggagacgactagaagatgctttactgtccttatcctaa

SEQ ID NO: 63097 - DNA, 189 bp, Acinetobacter baumannii
atgcatactctagtcatacctaaacaatatgaggtctttttcgataatcataataaggtgataggtctaaaaaatattaaatcaaaagagctttatagattaggtgagtctttacaattttcaggaatagcttttgatgatgaaaaaatgaagttaggtgaaaagctacctgatggctttgttgcataa

SEQ ID NO: 63098 - DNA, 177 bp, Acinetobacter baumannii
atgctttgtccaagttgtaaagaacatattgttcttgaggattatgaggatacctctccatttcagtgtgagtattgtgatgcttggttggaacttgatattgatgaaagtacttatttaggtgctaaacacaccgttttacgcatcattgatgatgaagatttgggtgaggtgtaa

SEQ ID NO: 63099 - DNA, 1332 bp, Acinetobacter baumannii
atgcaatttaaacaatacccaagttacaaaaagagtggtgtggaatggttgggggatgtgcctgagcattggcaaattgttagaactaaagatatttttaatcatcgaaaagaagaagcacttgaagatgatgaaattgtgactgcatttagggatggtcaggtaacactacgaaaaaatagacgtaccgatggtttcacaaactctattaaagaacatggttatcaacacatcaataacggtgatttagtcattcacgaaatggatgcttttgcaggtgctattggtgtttctgattcaagcggtaaatcaacacctgtttatacagtttgctatgcaaaaaatgaaaatattaatcatcatttttattctcatttttttagaacaatggcaaaaacaggctttattaatagtttggccaaagggattcgtgttcgatctactgaatttagatggaatgaatcaagaaatgtttatttagttgagccacctaagtcagaccaacaaaaaatcgttgcattcctcgacacggaaaccacccgaattgacaacctcattagcaagcaagaaaagttaattgagcttttggaagaacagcgtaagtcgattatttctcatgctgtgactaaaggtttaaatcccaatgcaccgatgaaagacagtggtgtggaatggttgggggaagtgcctaagcattggagctattcatctcttaaatatgttcttaaacaaaaaaaaggagccattaaatcaggcccatttggaagtcatttgaaaagttctgatatggtttattctgatgtgaaagttataaatcaaaggaatgtaatagataaagattttattggtggggataattttatttcatttgaaaagtatgaggagctgaagtcatttactatttatcctaaagatgtattggtaacaactagaggaactattggtaaagttgctcaagtagcagaagatttgccaataagtattttgcatccttgtttgattagaattcaagtggatgaaaacaaagtgctatttgattatattaactatttttttgaatgtgaaaaattatctcttgagcaattaagatatgcgagtaatgctgcaactattgacgttatttactgtgagaatttagcaagtatatatctaccaattccttcaatatctgaacaaaatgagattattaagtatcttaaagatgaagatattaagattaacaaactaatatctaaacaaaaaacattgattgaaaaactgaaagaatatcgctcatccattatctcccatgcggttacaggcaagattgatgtacgggagtttgtggcatga

SEQ ID NO: 63100 - DNA, 783 bp, Acinetobacter baumannii; identical to SEQ ID NO: 47349

SEQ ID NO: 63101 - DNA, 606 bp, Acinetobacter baumannii
atgaatcaccttctagttcttttacctgaagagtttaactgttataccaaattagaaagaaagttagatcggatcagtagtagtctaatgaactttaagattactactaatagttcgaatgagttgctaaagttttatcaagagcataatagagattgcattgaagtctcttatcttccagattggaaaaatgtagagtttacacatgctgtaatttttaaagacgatgagatttttaatgatgatgaggaatatattaaattattaaatattcctctaagagttatccaaataaaaattactagagttattaatatagataccgagatgcagtataaatctattaaaaaaaatgatgtatatgaatatatcggtcgtggatctccttggggaaatccatactctatgactactcatgatgaggaagataggaaaaatgttatccattcttttaaatatgactttgatagagatattttattgaaagcaaaaaaaagtgatgtatacaaattagctgggaaaagattagggtgcttttgtaagccatttgattgtcatggtgatgttttggctaattttttaaatagttgggatgatggggaataa

SEQ ID NO: 63102 - DNA, 441 bp, Acinetobacter baumannii
atggctatatatactattggttttaccaaaaagaatgctgaaaatttttttactttgcttaaaaataatcaagtgaaaaaagtcattgatgtcagattaaataatgtttctcaacttgcaggttttgctaaaagagacgatttaatattttttttacgtgaaatgtgtaattgtgagtatgaacatatacccgatttagcgcccacagaagaaattttaaaaccttataaaaagggtgaaattgtctgggctcagtacgaagaaaaatttatgacattaatggctcaaaggaatattgaaaagcatatcaatcttttgcaatttgaagacggttgcttgctctgtagtgagcatttaccccatcaatgtcatcgtcgattggttattgaatatttaaagaaacacaatagtggacaacatattacagtggatctttattaa

SEQ ID NO: 63103 - DNA, 627 bp, Acinetobacter baumannii
atgattaaagaaatagtagtattcgcaaattctgttaaacatggaaattcatgtgtggcaggaaaatgtactagaacaggagagtggattcgcccagtgagtaataatgagggagctgaaatcccagttgcacaaactaaaaaaattaatcgccgagataatgattcagaatgggggttgaaagttctaaataaaattaaagtagatctatctcaccatgcgccattaaaccatcaaacagagaactatgtaattaataaaactccatggactgatgagtttttcataaaaaaagaagaggttacaaaatatcttgattcaccccaagatctttggggtgaaggtgatagagtatctcatgatgatataaaagataatcaactaatcaaaaattcactctatttagtgcaagttcatcaattagaattatttaaagatcaaaatgataaaagaagagcaaagttttcttatgggggagtagattataatctagctgttactggtcgagaatttgattttcattttaaacagaacagtacatttttgagaaatgctataatttgtgtaagtcttggggaaaactttaatggtcattgctacaaattggttgctgcaattatttcttag

SEQ ID NO: 63104 - DNA, 363 bp, Acinetobacter baumannii
atgtatacaacatcagaaaaaactgcaaaacagaaaatgatattagctaaggcagttttagctgctgctaaacgacttggtcttgcacaggatcaactagccttaacactcaatatagattcggtgaaaactttaacatctcttgaattagatcccacttcaaaacagggagaaatcgccctcactttaatccgtattaccacatcactagatgctctgacaggtggggatacagcctggatgcagcattttatgagatcacccaataaattgatgagtgacattccaatagaacagattcagaaccctcagggattggcctctattttacaattggtggaaggtcttcgggctaaactttaa

SEQ ID NO: 63105 - DNA, 348 bp, Acinetobacter baumannii
atggagttatgcagtcgtgaatttattcaattcatcaaatctacaaaatttgatattcgttcgttaaatccacgaaaaacattgcatttaattaacacacatctttcacgtcaaacactattgacccttaacaaagaatcatctttaaagccacatcatcaaatgagtctggaactgctagcacaactactttcatgttctcgaaatcaactgaatcagcgtactaaaaatatcaaacaacagcgtacacatatttttaatgaattatcactcaacagcagatgtgtaaaagaactcgttgatcactctgatagttgtataagtacagaaaaaatttggagatcatag

SEQ ID NO: 63106 - DNA, 489 bp, Acinetobacter baumannii
atgaatcaattaattaaagcaacttacagaaaagacttatctcaaatgcaaaaaatccttgataagggatatgatattaatacaacagattcagatggtagaactgcattaatacatgctgtattagattctgaccctgatatagaggtaattaaatttctaattcaaaatggaagtcacattaatactcaagatccaattcaaaagtggagtgctctacattttgcagcaagagataataaaaaagatattgtatccacactgttaaactataatccagatgtagatatagtggatatatttggtaatacaccactatggcgtgctgtaatgtcatttaaagatgaccctacaatcatatctgagctacttcaatcaggtgcggatccctcaaaggtaaatacaagtggtgtatctccatggacactagcagaaacaattggaaatccccaattattgagtcttttgaatgacaaacaattaaaatag

SEQ ID NO: 63107 - DNA, 1242 bp, Acinetobacter baumannii
atgaacgtaaaaatcatagataaaaaagggagttatatcctcccgagtgaaagtattatgctaattcagcacatatcagaaaatatgcttatacaaaaattaatattaatgtttaaaagttttagttttactataaaatttttatgtgcaatttttattagtcttttcatactgagtcaagctgcccacgcagccaataatttagaacctatgactagtgcagaatgtttgcaggatatcaattttactgctaattttttattggaaaatgatgcaggaataaaaggaaagaattgggtaacatatcctaaaaatattcaaacaattttagatgctcagaaaaaagaaacaattaaagtaaaaatcattaaaaattgtgaagatataataaaaccttttttaaaagctatccgtaaagggcatattggtttagatagtaaatctatagcaagctattttcagaaaagctcaacatctcaacaagatgatgttgttaccactaagaaattatcagatttaacttcttatatttttatcccctcctttgaaccatcgattaaatttcagttaaataaaatagttgagaacaatcaggataatattttaaatgcaagatatttaatttttgatttacgcaaaaactcaggcggacaagatgattcagcagaaatattatttaaattgcttggtgaggcagaatattggatcgaaatgccaaaaatttatacttctgatgcaaacattcaaacatataaaaatcttgaaaagattatctcagatataaaaacaaaagaatacttagtggaaataataaagagaatggaacataaaaaaaatgattgggtctatgtacaaggtgatacgtcattagtttcagaaaaaatagataaaatagatgtattagcgaaccctataaaagttgtggttctcactgatgaagacagtgctagttccggagagcaatttatcaaatctgtaaaacagaatccaaaagttgtgacaataggtagaaacacctatggagcattagatgcatctaatttaagagaagttcaaactccatctaagaaattatacttatcctatgcaactacttatgttcatcgtcgttctggacaagaaattgacaatattggtattccaccacatattctactaccaaagccagtagaccagcaagcttatgaaaatgaaataaaattttctcaagattacttagaaaaagaaaaatggaagccttaa

SEQ ID NO: 63108 - DNA, 492 bp, Acinetobacter baumannii
atgttacgcacaaaaacaaagtcatttcgtttgactgaattgcaactaaagcaactcgaaatccatcttaaaaaagaaaactcagagttttcagattttcttcattcattaattcaacgtgagatcatgcaagacactgtcaccgttcaacagatccaagacgaaataaacccccttagaacaaaagtaaaaacagtcgttgaagtcgtcaaacgctaccaaaaaactgacccagcgttattgctcgagcttgccaagattggcaacaacattaatcaaattgcacgcgcattaaacatcatcaaaaacgcagatccgcaagagcagcgcaaactcgatattttcagtattcttttagttttaaaagccattcaaacagagctagaacaggtatttccggctcttccaaaaatcagccggcaaagccctgaacagctccaaaaacggctgtcttcgatccaactatcggaggaagacgaaagtgcatattaa

SEQ ID NO: 63109 - DNA, 2532 bp, Acinetobacter baumannii
gtgcatattaaatttcttgatcacggcaaaggcagtgccgccaaagcatccgcatacgtactcgacaagcttgatcacatggggaatgttcgcgcaggcgttgaagttttaaggggggatgcaactacgtttaacgcgatttgtgactcaagtcctcacttatggaagtacaccagtggagtgattgcatgggcaaaagatgatgcccctacggacgaacaaatcaaagaagtactcaacgactttgaacaacatgcctttgcaggtttagatccatcgcaatatcacctttttgctgtgctacatactgacgatgatggatcaaagcatattcacgttttaacgcctcgactcgatatcgagagcggaaaatcactgaatattgcaccgccagggcatgaaaaacatttcgactcgttacgagactacttcaatacgaaatatgagtggtcacgtcctgatgactttcttttgatgcgaaccacccaagagccaaaccacatcgcaaagctgaatgcacaggcaaaaaatattctttcaagccaggagcttgagaacctgccaaaaaaacagttttgccaggcgatggataactacgttcaaacactcttaaagacccaaacggcagaaaacagggccgatatcgtcgcttgtctcaaacaactcgacggcattgattcgataaaacccagcaaagattttttaacagtcactctctccagtggaaaaaaacatcgactcaaaggcgatttctacaatgaaaaattcgaaattggatcttattcagagcatctccgagcagcagcagagaaccgagcaactgcaaacgagcttgcagcagctctcacagacgctgatcaacttcgagcaacttatcgagcaaagcgagaagcctatcatcaacagcaccacgcttttacacaacgtacagcagacgacaacagccctagagctgcatctacgctcgattttgatagcgataaagaatctatcaccccaagcaatacaaacgctcacaacgagctatacggagcaaatacaagtattacaagcacagctatgcaatatcgatatatcgagcatcgaaaccgtcacaaccaacatcaattcgttttcaacatcaatcgaggcgttacaggagcacatcaacagccaagtcaaaagcctcaagatcgatcaaaagagcttacagaacagtatccaagcccaagtccgacaagcaatagcaaaccaaagcgaacaaatccagagcgacatccagaccttaatcacggaaaaattgagtactcagagagcaacctacctcctatacggaattatagtttttggagtgctgattcttttaatgaatttcttactcagctatcaagcaagttcaaacttaaaaacgatcacagcacaacgcgaagtgattcaacagaactcacaaataatttcaaatcaaaacagcaacatgaattaattgcggaagaaaacaatgcaaaccgaaatcgaccattttttgaaagagcaaaacgacttattgagtcaacaaatcaacttgttaacagagcaaaacaacgcattgaatcaacaagtgagttcattaaaaaacatcttgagcaaatacagcgaagtcgagcagagcttacaaaacaaaatcagcaacttgaaaagagagaacgaaacccagcaggccttgatttcagcactgaaactggagctttcaaagctcgaacagggcaacttatcggagcagttacagcaagcatttcaaaacaatgtgctgatgcaattacagacgccattaacgagagcattaaatcaactggatttaaacagcgttgtcagcgatttagtgaagaccgaattgaaccccattcttttgaatatcaacacacagcagaccgatctcaagaacgcactcttgaaaatctcgcaagtgaaggtacccgacaacttttacaaagatctaaagatgcagagcaagcaaatcgacatgctcgtggagacagtggaaaaattagtcgaattaatcaacaacttggtggactagaaactacagtagcggacattcgactaatgcctaagctggctacagattttcacctcagttcattgcgcaatgacaactattacccagattatgtcgtctatcacaaagaactatgtgataaacagcaacaagcctatgacagcaaaaaactatctctattaattgattacacaaagaaaaaggcagaaaacctagaaacctacatgagccgagcaagtcgaaacttgaataaatctgactatgaaaaaattgaacagatcatcaaaaatgatcaacgcatgctgaaatatctgcaatgcgagaagattttagaacggcaagatacccgttttgagcagcacagagctgcataccaaagctgtttaaagcgctttgagaatatcaaacttgatattgagcaaattaaaaactcgtcctctcaacataatgtttctcagaatacctatgaacctgaatacaaaacaaagccaaaaaatgacttagattttaatttttag

SEQ ID NO: 63110 - DNA, 1476 bp, Acinetobacter baumannii
atggctattaatgatgatttatatcggtataaaaatgttttaaaaagaacaatttcaacaacaattcgtttctacttatctctctcaattatcctttcaccaataattctaatgaccgaagccaatgcagccgatcagggtgattggtggttgcaacgagaaatcaaattacaacaaaaccgtgaagattacgccagacgtgtgtatggacgctctgcaaagtctttcactgaaacagatccagtcactgctaaaactaaaactgttactaaaatagcaattgctgaagcttctccttcagcttcaaaagttggtgcttcaatgtttaaacgtgtgtctttttatgcaaagaatccaggcgtacaaatggttggggttttagctgtaacacagctaattgaagcaattggttgggttatggaagatggtgcttatgtaaagaaaaaacctgttgatccaactgatcctgctgatcctcgtttgcaatattactatcagagcagttcttttggagttactaagtatttttcatcaaatcttgctgctgcaacggacttgtgtactagaaatgctcagggttacggctggattttagtttcaactacgcctgccacttttgcaccagataaaacagattatcaatatgctacatgtgttattaaacgtaatagcacttcagagaatgagacttttacgtggccatatagtcagattataaatcctgcatacgatcctaattcaccacctccaccagatgaaaaaatccctttgacacctgagcttttaggcgcagctatgatgggtgaaggctatcatgatcctgttgattcaactgtagatagccgagttaatacgggtttaatggatcaatctgtagctgatacttatagccatgccggaaacggtgttggagacgaattagctaacactatggactatcaaattaaaaatgctcctttgactccagatggtcagcctgcgccttttggcgatcctcgatataaaacccctccatctgctgaaaaaccattttcgaatgatcgtgcttggcaagatgacggtgcaaaagcagatggtacagcagaaccaataaaagatgctgacggtaatcctactggtgggcaatcaataccttttgaatttcctgtcttttgtgagtgggcttttactgtctgtaattggtatgacgattggcaagctacagataaatggatgaaagaagagcctgaagataaggatggtgaagaagctgaagtaaatgatgatgcatcagccggaaaagtaacgctcacaggttccgaagtttgccctcaagattctgttcaattcactgtgatgggtcagctctataccattgaattaccttatcagcctgtttgtgatgcgcttactttttttaagcctgctgtattggctgtgggggcgattacttcagcatttattgttgcgggtatcaatgtgaagggagaagaataa

SEQ ID NO: 63111 - DNA, 219 bp, Acinetobacter baumannii
atgaacgctaaaaaacaagtaatgcttcaacgtttcaaacaagctgctgtagtagctactgctgcgggtgctactgttgcatctaacgctgctgtagatacaacggctattactggggagctttcagatgctgcaactgcgggcgctgctgtagctgctgctgcaattttgattccgttaggtatcaaagtatttaaatacattcgttctgcattttaa

SEQ ID NO: 63112 - DNA, 195 bp, Acinetobacter baumannii
atggatatggtctgtaagcaattatcgtcatccgatgctaatggggtgcagacctgtcttacatggggtcaagctgacctttatttaccaccattaagctacaccgaagcaacaacaattgggggcgctttttggttatgtctcgcagtcgtatgggcgattaaagtcatacgagtgcaaaattttgaaaagtaa

SEQ ID NO: 63113 - DNA, 1236 bp, Acinetobacter baumannii
atgttagataaaatcgttatgcacatacctgtagatgcttcgctagtcgatattgatagtgaaggtcggtattgcgttttcggttttgatttactcgatattggtttgaaatttggttcttatgatgtttttaaagatgaagacggtaatgttaagcaccaagttttaagtcatgcatattcaagattgccgacttcttacacgaagatggcttttaagtttttccacgaaggtaaaacttatccatatgtcgagcttaaagctagtcctgcgaagattcttcaagggcacaacgtttatggatcagattggatagagcagggtgctcttgaaatgcttggatatcttgctgaatcacatccgacgctttacggcatgttagctattggggaaacagaagttaaacaactagatgcgacttattcagcacgtttacgtgatgacaatcaagtagctcaagttattgactttatgagaaatatgtcttctagacatattcgcaaatcggagaagcaagtggtttataagaatactgtttactttggttcggaacgtggtaaacgttttgcccgtaaagtttacggtaaatcttgtgaatttcaggctcagttagatgagcaaattaaacttgccaaggctaatgataaagctgctcaacgtgtagttaaagttatgtctgatcctgatttgctagcctttactaaaggacttttacgttttgaaacaggcattaaagcctacgttatgaaagaactcggtataccgaccaatttatttcaacttattcgttatcaacgctctaaccctaattttttacgtgatctttggatcaaagctaactctgaactttttaaagcccttgagggtactgccatgaaagctactgaccacgatactgtctttaatcatttatgttctgtatatgccaagcgaactgccttaggtcgtgtttcgcttactaaagctcgtaacttgtttacgttttatacaaaccttgaagtacatggctttgaggttttaaagaagcgttattcagatactcgtttttatgcaaatgttgctgatttagtagctgcaggttactcaaaggcattcttacagaatcttcatgtcgattctaaatctaacgttattccatttctcaaacttgttgaaattaactttgaaaatcaagttcctgacaacttcatcgaaccagtttctacttttaatcagcgtgaattaaaaatcgcttaa

SEQ ID NO: 63114 - DNA, 825 bp, Acinetobacter baumannii
atgccaaaatcctacattattcaatcaataagtagccatagattatcttcatacaggaggatatttaaatgcggcacagatgatgactgccttcactactaccactggaatcaagctttatcatcagagctgtatattctgcttagtacgattgaagtgtgcctaagaaataggatacacgtagcattaagcgaagaagtatcagcaaagttcccgaaaaaagttgaaagcaacttcagatggtatgaatattttagctttgtggatgttgaccctaatggtgatcctaaacaggatagaaaaggcagaccaatctataccgaaacaggaaaagcatttagaaagatcacccataaaggagaaacagacctaaagttgctgccacaaatcatcgtatcaaaactcgaatttggaaaatggacctatgtattatcagcaaagaaatacaataatggcgatttgatagattggcataagctattccctatcatcttccaaaactttaccaacatggtgccagacaagcatcaccagatgatcattgatcgtattaaaacggtcaaagactggagaaaccgattggcacatttagaaccagtatggaaattcagtgacgtgaaggaaaagggtaccggtaaaattttaatatatgaaccaactaatcaagtagaagtaatcaagcgtttgaataatgagatccgctatgcgttacagctgctttcgtggttatgtgctgataccttagagcattacaaagcgacaaagtcataccaaaggttattacacctggcatcaaatgatgggattagggaattttcgtgctga

SEQ ID NO: 63115 - DNA, 3546 bp, Acinetobacter baumannii
gtgttcaaaaacaatatacacgaatttttgttaaatcttggctacgaaacgaacaatttaccgtttcaatttgtgctagagaaacactatcgaatcccaagtatcgggaaaagcagaaaaaaccgttctactgacgttattttaaaaagcaatggtctgtatctgatctatgatcattcgactggcgaaagctacacgttcaatcctgaatggaagcaagaacagcagagccatgatgctgagtatctgcaaaaacgccaattagaaatcgaaaaacagcgcaaagctgaagaaaaatcgaagatcattcaatttgcatcaaaagccaatgaagccaaagagatttggaacaaggcacagcattgtgaagatcatccttatatggcagttgcagggattaagccaatcaatgcgcgaacaatgccagtggtgaaaacttcaggcggtcagactttccataatccgttgatcatccctttgtttgatgttcattcacatgaacttgtgaatctgcaattcattacacctgaaggtgaaaaacgcccattatcaggcgcgcaaagccagaatttttactttgtcatcgaaggtgcagaaccgaccatttttgttgaaggttacaaggatgcttgcaatgtgcatcttgcaactggacgccgtgcgattgcgtgtattactgctgacaagatcaaggaagtctatccgatacttgggaaacagcaggacgctatcctttccgacaacgacaacaaagccaagatcaatgatgatggttcaagaaaggtcttacataacagaaagcagatcgctgcttatggaaaggggcataaggttgcaactgaacttggtacaagattttatctagcccctgaacttggttcggatgcgggaagcatgacgcatgatcagatcaatgcactgctgaatcaaaagcccacttcagagctaccgatattcgatgtatggacacagttaaaagatcaatcctgtgatgttgaaaccaaagcactgatcaatgcgctgctgaatgaaaaagatgctcagaaatgcgctggattggcttatcagtacatgatcaggaactcggtgcatgttccctataagaaaagcctgatcgagcttagaaacgaaatagagctgtcttgtattgggaaggttcacccgactacgttggacaatattgttctttatgttcagaacagaattgaatacgtcaaaaatcagggattaacggcggttacgattcaagatcataaaaatcataacgtgattaacctggcttcgcttgatgacttcaaaccgaattatcagggtgcatatctgatcaaagccccaacaggttcgggaaaaacgcaaaaagtcggacgccctttccgcgattggtgcagaaacaacggatattcattcctaacaattgctcacttgcgtagtttgattcgtgaaatggcgtcacgtatggataccgcccactatgatgatgaaaaaaagggcattgctgaagcgcgcaaaatcggtcttgatgctgctttaagtcactcgattgaatctttatccgtgtgcctgccaagtctggcgaatgagctattcaagccatttattaatgactgcaagcatgtgttcattgatgagatcagccaagtgatcgaaacattcaacagtgacaaactattcaaaaagactgacattgaacttgtttacaagctgctaaaaacgatcatcaaaaatgctgaatgtgtcattgttgcggatgcgaatattaaccaacagacgttggattttatcgaatcgtgccgacttggtgaaaaactgcatattgtagaagttgcaccaacggacgaaaacaagaccgttcacctgtataacagcttcgcagaattgcagagatttatccttcaaaaagttatggtcgaagatcaaaacgtatggattacatgcgattcaaaaagccatgttcagacattgcaggccatccttaatgatcttgatattcagaacattgctattgttggaaatgaaaacataaaaaaagaaacagccgaatttttgaagaatccagaagctgaatctttgaattatcagatcgtaatctccacaagtgcaatcgcttcaggcgtatcaatcgaacatgatcactttgatctcgttgcaggattctttactggttcaagtgtgcagccgacagacgcttatcagatgcttggtcgtgttcgccagtgcaaagaatttcacgtattcgcagatcagaaccgccgttatgtaatggacgttttagacgcattgcagggaaagcagcaggccagtgcattagaaggttcaaaagcaaaaatcacagagttttctttatttaaaaccgaacttgaaaaagtgcgtgaaacccgccgttctaacttcgccaataatctgatctggattctggaaagcaaaaaattcaccgttaagcgtgtgcagcagtttgatgcttcagatcatgcggagtttttcaaacataccaaagccaagatcaaagcagatcatcaagaacgtattaaaaacgcttacaagattgatgctgatacggcggtcagacttcaaagaaaagacttcttgtctgaagctgaagcaattgctttgcaagcccatgaaatgcgaatgaagttaggtcttcagcatgatgcagaattgaatgatgaacacttcaacattgatctgggtcaattgatacgttttaatgcgtttctggggcgtttcaaacctagcaatgacaaagcaagggatttgtcagttagacgctaccgcgaagctatggggaaggtttaccgactggcctttgatggtgttgatatgcagcctgatgcaatctttaccgaaacaggcgcaaagctactcattcagcagattgcaaaatatagattgttgcttgctgccattggtgcaatcccaacgcgttttggtgtgcagtcgtggaagccaagtgcatattcagccagagatttaaatgagattctgaagcacataggaatcaattgcagacgttgcagaaatcccttttcaccgaatttgaagaaaaagaaatctgtgcagataccccataatctatatataagaatagagccatctgcacagataagtgatgaatacgcttacaaggttgatgctgaacacttcgtcatgatgcagcagctttgtgattctctattcaatgccagtgaacagcagatcgcgcctgaagatatgcagcagcttgctgatgttgtcgcttcagtcgggaagcctgactttgtttctgatgttgtttctttggatgaggtgcagattgatattgcatccgttgcagtcgtaaccacagcaacagaacagcagcttgctattgagccatgcaatgacgcggtattcattgatgtgatgcaggagcttatgcggtcagacttaacccttgctgatttgtaccgtttgaaagattacgcagagcatttaccgaaacagcacgtttctgctggcagtgctcaacaggtattagagctggatttaatcaattcaatgatcagtagctgggtgtcgattggatag

SEQ ID NO: 63116 - DNA, 915 bp, Acinetobacter baumannii
gtgaaaaatgagctcgtagttaaagataatgcgttaattaatgctagctataatttagacacaacggaacaacgattgattttattggcaattgtccaagcgagagagttaagtaagcatgtggatgctaatagcacgctagaggttcatgctcatcattacatgaagcagttcaacgtcgataaacatgcagcctatgaggggcttaaaaacgcagctagcaacctatttgagcgcaaattcagttacaagggtatccatgaggggactcaacaggaaaagatagtgaaatcacgttgggtttccaaaatagcctatgttgattcagccgggattgtagagctcacttttgcacctgatgtcatacccttgattacacagttagagaagtctttcactgcttatgagctgaaacagattagctctcttacaagcaaatatgcaattcgtctttacgagttactgattcaatggcgtagtgttggtaagacacctatgtttgcgttagatgactttcgctttaagcttggattagcagagagtgactatgtcaaaatggcgaacttcaaagccagggtactcgatacagcattaaaccaaattaatgaattaacagatatcattgcttcttatgagcaacataaaaatggacgtgtgattagtggcttctcatttacgttcacaacaaagcagcaacctaaggaagtcactcacaccaaagccaagaagctaacggataagcagattcaattttttgccaacaagctagctcaccatgacccatttgcaagccaaaaagctgcagtaggggaaagctatgctgatctagaaaaaaggcttctaattgaattagaggatgttcaaaatgttagaaagtattctggtgttctaaaagagttgggattagaagtttaa

SEQ ID NO: 63117 - DNA, 240 bp, Acinetobacter baumannii
gtgattaagaaaagagaaattacgaagccttcatcacccgaaattgacgcattcatcaatggggcaaatgagcagactactcaaaaactagatcccaaagcacctcgaaaatttaagacgcatacgattccaatgaacgaatatgagtatcagctattggctgagttagctgaaaaatatggtcaaacccataatggaattatcagatttgctctgaagaaacttagtgaagaaaattaa

SEQ ID NO: 63118 - DNA, 426 bp, Acinetobacter baumannii
atgaattctgatgctgtttggaatatgactgaaaaatctcgtttgaaacgagaggatgaagttcgtatgcaggaactcagacatctattcgatttgatggatgaaagagaggaagagtggcaggtaactaaaactactacattagaaaaagctctaaagatactttcatggtgtgatcttgacgtagctcctgggttagctgagctagagatgcaacaacctatagatattattgagcaacatcgtaagtggttaaaggcatttcgttcagcgatgccttatcttgcaaagatgctcctcgtcactgattcaaccctacttatcaaattaagatgcacattagagaggtatgctgagattagctacccgaacctacttgtagtgattcaacccaaactgcaaacacttaactttataaaggcctaa

SEQ ID NO: 63119 - DNA, 309 bp, Acinetobacter baumannii
atgtctggtggtaatgatgatccatttttaatctcagctcgtgtccgacagaagctagtcgataagcacaatgtagttcctacagaagttgagcaatgtttttttaattttagcggcactcattttctagaagatgagcgtgaagaccacaaaactaatccacctacattatggtttattagtgaaactgattcagggcgcttattgaaaatctgttttattcttcatgaaaagagtcaaaagtttgcaattaaatctgcttttgatcctaatcaaactgaaatagacatgttctttaacgctaattaa

SEQ ID NO: 63120 - DNA, 393 bp, Acinetobacter baumannii
atgaaaaataaagatcaagttcaagcaataatagagtcacttgagctagatgatgaaaacttatgggaaagtagagagttaggcggagatcctaatttcgtaaaggcttcaccagttcctgctagttttcatgaaattttaaataaatctagcaatatgcaaatgatttctattcgtttaccgaaagatttaattgctgatttgaaagaaattggctcagctcaaaaattaggatatcaagcattaatgcgtgaggttcttaaaaggtttgtagatgctgaaaagaaaatcatgtacagagagctaatgcaagctaatgaagagcttgaaaagaaacttcatgaggctgaattacttttgaaacagcaccgcaagacacgaaagacagcttaa

SEQ ID NO: 63121 - DNA, 333 bp, Acinetobacter baumannii
atggaaaatagtagttcaaatgataaaccaactgtatacggctctattggtttagctgtatttttgattttttttggaatttcttatttaattccaaatatttttcctgaaggatctatgtttgttgtagctggcagcataattcttttagtaaacttaattaagttattgaaaaatattggctgggatggatttgaagtattatttggtatagcctttctagtttcagggttaaataaagttctgaaattagaagtaagttttataccagttatcattattgtattagctttattttacttgtttaaaagtattaaagagctaaaaaaataa

SEQ ID NO: 63122 - DNA, 768 bp, Acinetobacter baumannii
atgagatattggatctttcctttactaatgctaatgatgtcaaattattcaaacgcaactgaggacaatacaattgaaatctcacttattcagaatgattacaatgcatggttagataaaggaaaaacattcattaaatgggatgaaattataaaaaaatctcctgaaaatgctgtaactccagacgaagttcaaaaagattttgaagaaaatcaggtcttattttataaaaaatatagtaataaatggttcagaattaaaggatcagtacaaaatgtacaaatagaaaataatgaagtttttatcaatttaaatagcaaataccatacttttagagcctatacagaacaaaccgactacgcttctgaattaaggaaaaatgatcaagtagacctatattgttttaatggtatacacaataaaaaaatactcgttccttactcagcatcaaagtgtatgagttacggagcttatatattaaaagataaagctactgcaaaagaatattttgataaagttaagttatcagaagaatataaagaaattaaattaataagctccattctatataaaatagtaccaaaagataaattaaatcaatactgtacttctttaaaaaataacgataaatgcgttgatatgttaaataattcttttaatgatcctaagagtctaaaaaccttagaaaaaatttcaaaagactgtaaaaaaagtgaatctaatactgaaaaatgtttagaaatagagaagtttttaaaaggaaaatag

SEQ ID NO: 63123 - DNA, 912 bp, Acinetobacter baumannii
  misc_feature (762)..(771): n is a, c, g, or t
atgtcctcactcaataaacgtactaagcaaactcgaacactatatgccgaagcacgtagaaaacaagaccgactcgatcaggaagaacagcttcgagtagatgtagaacaggagctaattcaatacttccaagaacaagatttggaacaaaaagggcatcttgaatccttatatccagcaatttatgagtttattaaacgcaaagctccaagcttggcctggaaaaaatatgcacatgaattttttcggtcatatatcaagcaaatcaatttaaatcgtcgtgagactttgcccctaccgaatctgacatttgagatgaagcgtgatcagccagtttttacgatggactggatcgagaagggacagcaggttgatgaagttcttgataagctttgggactactggattctagcaaaagatagcaagacattttctgatgatgaaatcattggaaatattgttatttctgccatgctttattccggcttaaatcaaaaagcctctttagaggctttgcttcaacatttaaaagatccggccaaaattagaaagatcgaaaatctgaacattatatttttagaaccgctctccccttcctatggagatctctttattgatgaaaaaaccatccgtaaatcgcgtaattttattcctgatcaaattacccgcttatggttaattcattttaatagcagaaatattcgtacagtaaaccagaatgtagaagattatctacagcttatttttaataagataaatttnnnnnnnnnntaccatttaatcttaaaacttataaattattacgcgactacgctagcttcaactggatgcaactgccgaaagttgacattgatcctgctctgtcacaatgtctcattgaaaatacagcaacctgtggcttatcagaaatag

SEQ ID NO: 63124 - DNA, 324 bp, Acinetobacter baumannii
gtgcatcaagatgaagatgatttattgtcctttgaaggttttcatgaattacattcaagtcattggaaaatagagcaatatcaccgggtgattaaacaggtttgtcatattgaaaagtttcaagtaagacgatttaaactgattttgaatcatattttttcagccttgatggcctacgttgagatacaaaagaaccagtttgagcggatctttgaaaatatatatcgttggcagaagaaattatttagaccaattatcaaaaacttcattgatgactttattctcgataaaaatcatctgctaccacagagaatctataaataa

SEQ ID NO: 63125 - DNA, 612 bp, Acinetobacter baumannii
atgggctttctcatgacagaaccgaactctattagctccacacaacttgccgagacttataatatctcgcatgatagtgtaaatcgctttctagagcgtgaagactacacacctcacgacctatatcaagaatcaattcaacatattgataataataaacttatagtcagtattgatgatactgttttagataaaccatatagtcaacatatggacttggttagctatttttggtcaggcaaacaccaccgatccgtcaagggtattaatctcattaccttgtatgcgacagatcaaaatggtcaaaatattccaattaatttccgaatttatgacaaatctgaaagtaaaaccaagaatgattactttatggatatgttaagtgaagtactcagttggggtgcaaagattcaatttattacaggtgatagttggtattcatcgactggaaatctaaaaaccataagaaaatatggtattcgatttatgtttggtatcgactgtaaccgtaaggtttccccagaaaaaggacaatggtttcaactgcgtttattgccagatttccatcagggtcaagtggtctggctcaaagattttggctttgtacaataa

SEQ ID NO: 63126 - DNA, 894 bp, Acinetobacter baumannii
atggataactacaaaatcaaagttaatgatgaagctgagagcaaagaggctcaggagttgttttttgagttgggttatgtttgggctgatacaaaatgccaaaccccaatgaaatttacaacttcttgtatctactcaggatttgaagatggcgaattatgtcgtgattattatgatgaaaatcctgatcaccaagaactcaccatcccccaactccgcgaccttgttgtgttgaagcgtaatgatgtgaaggatgccaaccacacatacattggcggaggcatggcttataagacctgtgaggacatttgttacctttggtcccgcactggatgggaatataaaggaatagctcacaatcttgttccaattcagaaacaccttgaatctgcaactggacgctttgacgagaatggcgaacatcaccttacttttagcaaaggtgcggaagaaaaagacccagccttgattagcggtgcagatgccgaacttgttgagcaagcgaagaagttcattacatcagaccatttaaatcgctttgaggcagcggaggcgcatttagaaggtcatcctgtgcagtttatgttggctaacggtgatttcatcgatattacatcagataccactttgggaatctttgaaaaggatggcggctattcatttcgcctcaaacctcaaaccatcaagcttgaacttgagctaccgaagccttttgagccgaaggtgggtgatatttactggttcctctcacccttctatagcactggatatgaccactgcacttttgcaaatgactcatcagataaactgcatgtccaatatggcgcatatcgctcagaagacgacgttaaaaaggcagttgagcaactcagaaagatacgaggtgcctcatga

SEQ ID NO: 63127 - DNA, 264 bp, Acinetobacter baumannii
atgagtgaatttaaaaacatgaaaattgctattactgaagatcagcccttaaaacttgtttgtgatttgctggttgaaattggttatagcccaattaataaatattcaattgagaattaccataagtttgtcaccacaaatatcaagggccatataacaggttggaatttaaatttgctttcagatacggattttaaaccaacctcattaagtgatttgatcaagttgcgtaataaagttaaagcggaaagtaaggaggggtga

SEQ ID NO: 63128 - DNA, 273 bp, Acinetobacter baumannii; identical to SEQ ID NO: 47774

SEQ ID NO: 63129 - DNA, 312 bp, Acinetobacter baumannii; identical to SEQ ID NO: 55435

SEQ ID NO: 63130 - DNA, 1107 bp, Acinetobacter baumannii
atggcttcaaaagaagataaatcattgattgaagtacttacccaacatcaggcgtacttatatcgggtgtcttctcaatctgttaatgagctactaaaaatctttaatgatgagtcaatattaatgttggcaaagcttcgggatttgcttgatgaattaaatgattctgaaaagatggctctagcaagtggacagtacacaacgtcaaatctgaaggaagttcgtgatctaatctcccagtggtttactgcaataaacactgcattacctgaagctttcgctgtttctgctactgccttggcagtttatgaagctaattacacggcgaagctatatggcggcaagatcaaaaagccaaatggtgaaaagctatatgccgtagctaaaaaagtaccgttggtgggaggagcactggttgatgagctgctttctaagattgctgaaactgcatgccaaaaagttgagtatgccattcgggatggtatcaactcaggtaaaacaaatcaggaaatagttcagcgcattcgtggtaccaagcggcttaattatgaggatgggtttttaagtagctctaagactgatatcgaccgtacggtgagaacagttcgtagtcatgtggccaatcaagcatatctaaatagtttcaatcagattggctttgaatatgttcgattggtcgcaacgctggacggaaggacatcaaaactttgtgcatctttggatggttcagtttgggaaataaacgatccggcaaagcgggtaccgccgttgcatcctaactgtcgcagtattttggtaccagtcgagaaagacggccaacttgttggcgaacgtccatttgtaatggatgaacgtcgagttaaagacatcccgaaagaagagcgtagccagttaatagggcagctagatgccaatactacgtttagagagttcttcaagaagacagatgatttctttcaaagagaatggttggggccgaaacgttacaagctctataaggaaggaaaatttgattttgataagttcttcgatccagaggggcggttatatacattggaccaacttcgaaagttggatgagcaaacctttaaggagttgggcttatga

SEQ ID NO: 63131 - DNA, 240 bp, Acinetobacter baumannii
atggtccagcttcgttactggctgcataagggagcgaatattgatattggttacatgcctggagctttaccgtggttagtcggtgaaaaccttgaaaaactcggtgtgaagattttgaacactggcattactggtcaatgtcatcgagaccgtaaattgttaacgggcgatagtccgcttgcttctaataatttaggcaaacttgcagctgaaacattgctggctgaagtgaaggattaa

SEQ ID NO: 63132 - DNA, 264 bp, Acinetobacter baumannii; identical to SEQ ID NO: 47503

SEQ ID NO: 63133 - DNA, 474 bp, Acinetobacter baumannii
atgcaacatcaaattaatggtattgctttaccaaatgaacaaggattttttggtgagtatggaggtcagtttattcctccgcatttaaaagaagcaatggatgaaattaatgttgcttatgaagaaattcgccatacaccagaatttcaaaatgaattagcagacctctttgcaaattatgtcggccgtccaagtcctttatttcatgcaaaacgcctttcagaacagttaggtggcgcgcaaatttatttaaaacgtgaagacttaaatcataccggtgcccataaaattaatcactgtttaggtgaggctctacttgctaaatatatgggcaaaaagaaagttatcgccgagactggtgcgggtcaacatggggttgctttagcaactgcttgtgctctagtgggtattccatgtgagatccacatgggtcaagttgatattgaaaaagaacatccaatgtggtcaaaatga

SEQ ID NO: 63134 - DNA, 276 bp, Acinetobacter baumannii
gtgccatcaatttacagtggtacatggacacgtttaagaagtgatgggatagcaaggactattacaactcgatttgatactccatcatcaggtcagtttacccttcctcaacaagatcgatgcttaacagttcgagaggctgctagaatccaatcattccctgatcattttacattttctggtccaaagtctaatcaaatgcttcaagtagggaatgctgttcctcctttacttgcatatgctatagcgcataaattaaaagactatattgcatag

SEQ ID NO: 63135 - DNA, 489 bp, Acinetobacter baumannii
atgcgaacaaaaaataagattttcagattaaccgaactgcaattagagcagttggaagcctatctaaaaaaagaaagcatgacctttacggactttattcattcactcattcagcaggagataatgaaagatgtgatcacggttaaacgactacacgaccaagaagaaccaccaagaatcaaaacaaaaacggttttacaggttatcaatcggtatcagcataccgacccactacttctgcttgagctttccaaaattggtaacaacttgaatcaaatggccagggcattgaacatcattaaaaatgccgacacccaagagcaacgcaagttgaatatttttggttgcttccaagttttaaaagccatgcagacagaactagaaaatctgtcccccactttacctaatctcaaccgacagccacctgaacgcattgaaaaaaaactggactcacttcagtcaatggagatcgatgaaagtgcatattaa

SEQ ID NO: 63136 - DNA, 2469 bp, Acinetobacter baumannii
atgaaagtgcatattaagtttttagagcacggtaagggatcggctgcacacgcttcagcttatctactggatgacttggatcacaaaggacatgtacgagcaggaatcgaagttttacgaggcgatgcgaccacattcaacgccatttgcaatgccaccccccacttgtggaagtacacatcgggcgtgattgcatggtcacctgatgatgccccggctcaagagcaaatccacgaagttttaacagagtttgagaaacattcgtttgcagggttagatccatcacagtaccacctgtttgctgtactgcacactgacgataatggctcaaagcatatccacgttttgattccacgtatcgacctggcaagtgggaaagcaatgaacattgcaccacctggtcatcaagaccacttcgaccctctgcgagattacttcaacaccaagtatcaatggtcacgcccagatgacatacggtgggtcagggaagtacaagaacccaactgggttgccaaaatcaataagagtgcagaaaaaatcattccaaaacaaaatcttgaaaccatgaaaagaaagcagtttgttagatatgtggatgctcacatccgtgaaatgatgaaacttggagagattgtaaatcaggctgacatcgttgcggaaattcaatgttttaaaggagtgaagtcagtaaaggcagggaaagcatttgtatcagtcacactagacaacgaaaaagaaaccacacaccgacttagaggagacctttattgtgaaaacttcgaacttggagcttatgcagagcgtcttagacaggcagcaacaggccaccgacctgatagcgagcttgcagaagctatcggagaagctgaggagcttcttgagcttagtagagcaaagcgagctgcctatcatgcaaagcaccacccttctaaacaaggtagaaaccaagaccacagctatagagtcgactctaagctcaattttgaccgaaatcgggaacttgaatccccaagacctgaaagaagaaaaagcgagctttctagcgcaattagacgcgattcaaaagataatctcgaatacagatttgtcgaaaatccaagaagtttcagtttcagtccaagcgctacaggccaaaatcgaccaagcaatcagcagcatttcaatagatcagaagcaagtccaagctctagtaaaacaagcgatagagaaccaagcggagttcacacagaccgaaatccagtctctattgcagtcgcaagcagccaagcacacgacatggggagttacagtatttggagtgctgatgcttttaatgagcttatatacaacctatctgtccagtacgaacttaaaaacaatcagcgcccaaaaagaaatgatccaacaaaactcgcagtcaatacaaagccaaatcaattacctgaacactttacggagataaacaatgaagacagaaatagatcagtacctagcagaacaaaactacttgctgacgcaacaaaccgaattattgctggagcaagtcagttcattaaaaaccatcttggattcctacaagacgctggaacaagacttgaacaacaaaatcagcgatttagagaaagagaaccaaacaaaaaaggatttgatttcgcagatgaaatcggaaatttcacagctagaacacggaaatttttcagcagaatttcaacagaaattaataaccaatttcacctctcaatatcaaaagttatggatgaaggtctcagaaggtcaggacttagtgaatatgctaaaaaatatagtgcaaacggagttgaaagacgaaaagacacagctcaagaccatactcttgaaggtgtcgcagatgcctgcaccacaggattacagcaaagaaatagaagcattgatctcaacggtaagcggcttacagacacagataaagagtgtcatgagcttggtcgagatattgatcgactaacagcagaaatcagcaaaatacgtcccaaacctaaacctgccaaggaatttaaatacctacgaggtgatgcctactatcctgactatgcgcttgcacatcaagagttttcagcgcagcaagactatgcctatcagcatggtagaaaatttgatgttattcatataattagcaggaagtcaaaaaaacttaacgattacatgaatcgggcaagaaatatgctgaaccaaagtgactatgagctaatagaaaaaatcataaaaaatgacgaaaggatgctcaaaaatttgaaatgtgatgttgttttagagccacaaaattcacgttttaaggacgaaatatccgcatacaaggcctgtttagacaactttgaaagtatgaaatcaacccttgaggcggtcaaatctccaaaacctaacaacatcacgtctcaaccgagcgatagcgagcttagagtagatcaaagcctagaccctgagctggccaatacttttaactttgaaagtccttaa

SEQ ID NO: 63137 - DNA, 357 bp, Acinetobacter baumannii
atgttggtgtctatgtcggataaagaacttaaacgattgtcggtcttgcaagaaatttgtgatcaacgcattagccagtctcaggctgctcagctacttcatatttcagagcgtcaaatcagacgcttattgcaaaaatacaaagctcaaggtccagctgcgttagcccatgcggcacgtggccaaaccagcaactctaagattcctgaagaacttagactgaagtgcctcaatattgtctctaatcaatttcatggtttcggacccaccttagcccatgaaaagctgaccagcattcatggctttgatatttccgtggaaacagattgcagccaatttgtggattcctcgctctaa

SEQ ID NO: 63138 - DNA, 237 bp, Acinetobacter baumannii
atggtgcaagttgctttggcacctaatcaaaataaagcaaatatgattcagtcccaattacaggctaaagggtataaagttgttaccagcgcaactacaaaaggaatacgggtcatggtcgaccctgccaatgactacgcaattgcacaaattattcgagaaaaaataattgcagatgatagcttggatttgagatcggcttgggtatttaaatgggcttctctaacagcacagtaa

SEQ ID NO: 63139 - DNA, 645 bp, Acinetobacter baumannii
atgccgtcgaatactgatatgaatcaattgaaaagattaagttttgtcgtgacattgagttgtttatgctcatcgcttgtttttgcagagtctatcgactgctccaactcaaaagcagagctaaaaatctgttcaaaaacctttagcgaagcacgaaagcagctcaacaataaatatctttctgcatacttggtcacagatgcccccctgcagcttctacaagatactcaaacattgtggcttagacaaacacaacaatgcaaaaccaattcatgtattcaacaacagtttgatgtacgtggtgatgatttaaatttttatgcttcacttaaacaaaccctaactcagcattatcttaaatttgaaaatggacatattgcatctcagcccgttcatttacaaatacatcaacttgctaaagataaaatcaaaattgaaggtttagcttaccgtaatccgaataaccgaaaagaaacccaaacggtttcacttatggcttacagctctcctgaacagaaaagtgaaattttagataatgaacataactgtaaatataaatttgactttcagaaagcactgctcatcgtaaaaacccagcaaaaaggttgtgagcgcttcacaggaatttatcgtctgtacgactag

SEQ ID NO: 63140 - DNA, 1200 bp, Acinetobacter baumannii; identical to SEQ ID NO: 54455

SEQ ID NO: 63141 - DNA, 693 bp, Acinetobacter baumannii
atgtttgatcaaattgttaagctctcgatcaagaatcgatggcttgtactgattgtctttctgtttattggcgcatttggtgtttataactattttaaactgccgattgatgctgtacctgacattaccaatgtacaagtccaaatcaatagtgaagcgcaaggcttatctccaacggagatggagtcacaagtgacctatccaattgaaacggctttggctggtattcctaatcttgaatatacacgttctgtgtcgagatatgggctatcgcaggttacggccattttcaaggaaggcacggacatctattttgctcgtcaacttgtgaatgaaaagttgcaaggggtcacaccaacacttccgagtggtatatcgacttcaatggggcctgtttcaacagggcttggcgaaatctttatgtacaccgttgagaacgcaaaagataatccgaacccattatcacccactgaattaagaaccttgcaagattgggtgattaaaccgcagcttcgaaatgttgaaggtgtgaatgaaatcaatacgattggcggttatttaaaacaattcgtggtacagcctgattatgcgtatttacgcagcattggcttagatcagcaggatatattggatgctatttctaaaaatagcatgatgaaccgtaccgggtttgtcggagagtcaatattctga

SEQ ID NO: 63142 - DNA, 369 bp, Acinetobacter baumannii
atgccatattcagatctctcatttcgcgcgttaagcgtgcttcatacatctcgttatctttttaatgaccatggttttcacaacgttggtgtagaccgcattgtagaagaagcggaagtgaccaaaaccacattttataaatattttcagtctaaagagcggcttattgaaatgagtttaaactttcaaaaagatgctttaaaagaaaaagtcttctcaattatttatacacaaaaagatttagtggtgcgtgaaaagttaaaggaaatattctttttacatgtcaatctggaagggcattattatttgccatttagagctatttttgaaattgaaaaatttaccctacagcggcagagtaaaacttga

SEQ ID NO: 63143 - DNA, 1038 bp, Acinetobacter baumannii
atgcaactgtctgacttttcctttgaactacccgatgaacttattgcccgttacccactcgaaacacgtagtgcttcgcgtttattgcatttagatgctaagggccaatatcacgatcatatgttcacagatattattgatctgttcgaagaaggtgatttattggtactcaacgataccaaagtcatgaaagctcgacttaaagggaaacgtgctacaggtggtgctattgaaattttggttgagcgtatgctaaaccacaccacagcgtattgccatattaaagcgagcaattcacctaaagcaggggctgagctttttgttggtgcggacaatattcccgtgattgtgcgtggccgtcacgaaaacttatttgttgttgagttttcacaaccaattttgccagtacttgagcaatatggtcagttacctatcccgccttacttcaatcgtgaagcagaagaaattgatactgaacgctatcaaacggttttccataatccagaaaaaattgccagtgtggctgccccaacagcaagcttgcattttgacgaagagttgttagcaaagttagaccaaaaaggcgttaagaaaacgtttgtgactcttcacgtcggtgcaggtacttttatgcctgtacgtactgatgacattacaaatcatgttatgcacagtgaatggtgtgatgttcctcaagaaactattgatttaattttggcaactaaagcacgcggtaataaagtgattgctgtcggtacaactgcaacacgtgctttagaaagtgcagctcaagcgcatggcggaaaaatcgcagcatggactggtgatacgcaaatctttatttatccaggttatgagttctgcatcgtagaccgtttaattactaacttccatttacctgagtctaccctgctcatgttagtttcagcattgtcaaatagagaaaatattttggctgcttatgaacatgccgttaaagatcgctatcgcttctttagttatggcgatgcaatgctgattgataaattagaagtttaa

SEQ ID NO: 63144 - DNA, 975 bp, Acinetobacter baumannii
ttgagtattattgattacgatattttctatcgggaatcactaccagtagaaaataatcctattaactcgactcctttcgatatctttatatctgcattcaatgctagtgatagagtaaaagaagtttttgacaaaattaatagcacccaaaaatattggctaatccatccagaataccaattttcagatgaagaactaacagaagttcatgcaacaagcataattaaacctatagaatttggtgaacaagatcaagttagctctttaatatcctcgataaatattacagatatagaaaacactaaaatttgtattgatagtacaggctttatgagaaatgttttagctctattaataattactctagggtatctgggatgtaaaaaaattagtgtactttattctgaaccaatacaatatattgagaacgaaaatactcacttcagtatctcggctcttaaagtcaaagctttagatggaactgctattacaatcacaacaaatgctaaagactcattaataatgtctattggttttgatcatgatttaatgtcacaagttgttaatgattatgaaagtgccactttttatcctttgtatggttttccctctttaagtgctgatatgtttcaacagagtgcttttagatcgagtaatattataccaataaaggagaacgatttaactactcggaaattctttgcaccagcaaatgatccattttcaacagctaagcaaattcaaaggattgtagctataattcatcacagagaacaaaatttaaaacataatatttatctttgtcctctctcgacgaaagcacaggtaattggtcatgcttattattggtggaaagagggacaacatcaaagccagaatggaatgataaatattatcttacccatgtgtatatcatataaaagagaaacaagtgttggattgcggcgagtatggcaatacactttagagatgtag

SEQ ID NO: 63145 - DNA, 642 bp, Acinetobacter baumannii
atgtcatctggaaatccaagaaatgtattaaatatcttaaataagatatatgagttgttgtcttttgaaggaaaaagtttttattctcaagagagtatcgatattgagactcaaacaaaagcaattaatcaagctgctaaatattttgctgaagaggattctaattatggttctttaagtgacaaggcaaaaaaagcaatgtttaaattcgctgcctatttagctacagcaagatatgcattaaatatccctgagagctctcctcttgcagcaagctttaaagatgaagatttaaatagagaagcaaaagaagtctacaatcttgctgtagaattctctttaatccaagaaatgcctgatccaagatcagataggaactcaaaacaattacacaaacttattaaactcaacccgatgctatcacctttatggaatttgcctgtagtatatcgtggagatctaactctaaatgctgatattctaaatgctatttttgatcctgaaaatacaagctttgatgaacatctgaacagagttaaacggaaatggaattctatacatatagatcaattagatacgaaccttaaacaaaatgttggatctactgctaagttaccagaacaagggaagttaccattttga

SEQ ID NO: 63146 - DNA, 213 bp, Acinetobacter baumannii
atgactacaggggacaaagcaactgataccttaatttcagttttacctgagaacactgaaaaacctttaattggaacatcgacaacaacttattttgccgaccgcaatattcatttatatcggttaccgtcatcttctagagcatatccactagcgcttgagaagaaagcagaagcctatcaaaaattctttaatgaaataggtttcttgtaa

SEQ ID NO: 63147 - DNA, 1896 bp, Acinetobacter baumannii
atgaatctatcggacgatgaaatcgccgtgattattggggacactgttacccagactttattcgatcaaagtaaagagaaaattgagtttgttgatgaagatgaaaatcatccagaacctatttttgatgcttggggtgaggactgtgatttacctgagtggttacatccattatttacggttgaaaaaaatggacataaagttttagatcaaaaggaaactacaatccttgcttcgccattattagtttcaaccattgattatctgattgcagcgggtgaaccacatagacaaggacatcatgttaaagcattacttagagtgatgagtagcgacttgattttagatgaagttgatggctatgaacctaaagcattaatcgctgttttacgtttagttcagttagctgcaatgtatggtcgaaatgttatttgttcgtcggcaaccttatcacttacagttgccaaaacaattcatcgggcttttgagtcgggtatgcaaatgcgggcagccctttatggtaccgagaaaaaatcaatcattgcgattattgataatgagcttaaaccacaggtctggttagaaagatcaaatcaaaaatcagaatttaatacaaactaccaaaagcatttagataatttacaagttcacttgctctctaagcctacccatcgactggctcagttgctttcgttacctgaaactacagttttatcgtggaaacagtcggtattggaaggagtaaagcaacttcatcaagagcatgcatggaattttaaaaagaccgaaaagaaaatttctttggggcttatacgggttgccaatattaaacatgcaattcgacttgcccaatttttatcagatcatttacctgaggcaaaaatagcttgttatcatgcgaatgactggcttatttcaagattttataaagagcaacgtttagatcagcttttaacacgtcataaagacggtaaaaaaagaaaaactggtaatgagcagatcgagcaagatgatgaaatcattgacctcattcaaaaatctaattctctaaatattccatttattgtgattgcaacaccagtggaagaagttgggcgagatcatgattttgattgggctattattgatgcatcaagtgtacaatcaattgtacaaacagcaggccgagttaatcgtcatcggttagaaaaagtacaacaacccaatattatgattccccagtggaattatcgttattgtgagcgacgcgatattgaaaaacttaagcagcaaagtaagcagcgtcgacctgtatttgtatatcctggctatgaagggtatggttcatctgtaacatcaacttattcatctcaagatttaaaagagcttttaccatgggatcatcaatctcaattagtcattaatgcccgtttgcgttttgatcaagtaaattgtttatttgcaaaacatgatgatcaacaaataggatatttttgccaaaattattttaatgatcaaggggagcagttattttctcggtcggatgtagatgcaagtatcatgacagagaatatttataatttaacgcctttacgagaacgtaactatcaagaaacctatatgtttgagtggactaatagcttgattgttaaaaaacaagtttatggttttgatgaaaaagcgactaaagctttaaaatatccaaaatatggtttggtatgggaccaagtgaagttcgaagaaattcctgctaagccacaagcatggttagctctcgatccacaacaaatgaaagattactgttatgagtaccaaattgccaatgagcaaggctgccgtatatctttaacaccttacaatagagatgaagtgcctacttggtcttatgattatggctttggcgtgatgcaaaaatag

SEQ ID NO: 63148 - DNA, 1563 bp, Acinetobacter baumannii
gtgactttggaaggtaaggatgcctttggccgtcagatcgatttggcagtggttcctgcaccacgttcattgccacgtgtggtgcgtttgccagatgagttgaccgaaggcaaagagcatcatgtgatgctctcttcaattattcatactcatgtgtctgatttatttccgggaatgacggcaacgggttgctatcaatttagagtaacccgaaatgcagatttaacgttaactgaagatgttgaagacttagcggaagccttaaaagacgaactcagttcacgccgttttggtcgggcagtacgtttggaggtcaataaaaattgtccaacacatatttatgaatacttactcaaagaattcgatttggatacgcatcaattgtatcgtgtcgacgggcctgttaatttggctcgattggtctcggattttaaacgcccatatttacgctatgagccacatactcctgtgattccaaaaatactgaaaaaatctgcaaatattttcagtgcgatgcagaaacaagatattttattgcatcatccttttgaatcattttcccctgtaattcgattattacgtgaagccgcgcaagatccgcatgttttggccattaaacagaccttgtaccgtagcggtgcaaattcagaaattgtgcaaattttggctgaggcggcaagaaatggtaaagaagtcaccgcagtgattgaattacgggcacggtttgatgaagagtccaatatcgctgttgccaatgttttacaggaagcgggtgccgtggtggtatatggcattgtcggctataaaactcatgccaaaatgattttggtggtacgccgagaaaatcaaaaactggtgcgctacgcacatttaggtacaggaaattatcatgctggcaatgccaaaatttacactgattacggtttattaacgaccaatcaagatttgtgtgaagatgtacatcgtatttttcaagaattaaccggtatgggcaaaatggtgaagttaaagaaacttctacatgcaccatttactttgcatagtcagttgatgaattttattgaaaacgagattgtgcttgcgaaagcagggaaaccggcaaaaattatcattaaggtcaatgcactaaccgaagttcaattgattaataaattatacgaagcttctcaagctggtgtgcaaatagaattaatcattcgttctatttgttgtttacgtccaggcctaattggcttatcagaaaatattcgtgttcgctcaattgtagggcgttttcttgagcatactcgtgtctattatttttacaataatggtgatacacgtgtgtattgttctagtgctgactggatggagcgtaatttatttaaacgtgttgaagtgtgctttcctattgaaaatactagactcaaaaaaagaatttatcagcaagggttagaaaattatttaatggataatcaacaagcatggctattacaaagtgatggtagttggaagcgtaactcatgcatagaaaatgaaaagccacataatgcgcagcactttttgttaagcgttataaagtaa

SEQ ID NO: 63149 - DNA, 192 bp, Acinetobacter baumannii
atgcaagtcatgattatggtttcggaagcgggcagaatggaaaatacttgcaatctacccgctgatttagataagaatgggagtgttgttaaaatctatgactactcattaaaagagttgccgattaatttggatggcactgtgacttacaatggtaaaagatggacctttgataagaagcaaaacttttag

SEQ ID NO: 63150 - DNA, 273 bp, Acinetobacter baumannii; identical to SEQ ID NO: 62035

SEQ ID NO: 63151 - DNA, 1827 bp, Acinetobacter baumannii
atgaaaaacagaaccttacattttgcttgtatcagtattttattttggatgtctcattcttctaatgctgcaacccccgaaataaatacaaataccatcgaaaaatcacaatctaaacaaaagagtgatgtctctgttcgggtgaaagctttaaaccagcttttacaagaacagtgggaatatactttgaaaaataaccctgaaactgcaactgctttaggagacttacgttacaacgatcgatggaccgagatttcaaaaaatcagattgagaaagataaaaaaattacgcaaaattttttaaatcgttttgaagcaattgatagcacagggttttcagcaactgatcaattaaataaagatttaatgatttatcagttgaaagaaacacttaaaaattatgatttgaaattgtatgagatgccttttaatcaaatgtgggggctacatttacaatttccgggatttattagtgcaattccatttaataatgctaagcaatatcaagactatattgctcgtttaaaacaaattcctcttattcttgagcaaggtattcagttagcgaaacaaggacaaaaagatggcttgatgccacccaaatatttaattgaaaaggtggcaaagcagatcactagcattgcgacgcccgcagggaaggacagtgtttttgcttctccattaaagcaatttccaaaaaacatttcgaaagcagaacaagaacgtttaagccgtgaagtactacagaccatagatcaatatgttcggcctgcttatcaaaaacttgggacgtttattcagaaagattacttaccccatggacgacaatacgagggtatatggagcttgccaaacggtgacgagctctatcgtttttatgtagaaaataatacgacaacctcggaaagccctgaaaacattcatcagctcgggttaaaagaagttgctcgtatagaagcggaaatgctgaaaattgccaaagcacaaggtttcaatgacttaaaaagtttccaacaatctctaaaaacaaatcctgcggttttcccaaaatctcgtgaagaaattttagagatttatcgcggatatattgcccaaatgcaaccagagttgccaaagctctttggtttattacccaaaaataaagtcgaagttttacctgtagagcaatatcgagaaaaagaagcggcaggtgcggagtatcaccaagggacacctgatggttcacggccgggacaagtatatgtaaatactggtgacttctctgaacgttccaaaatatcaatggaagcgaccgcttaccatgaggcaattcccggccaccatatgcagattgatattgcccaaaatctgccaaatttgccgatgttccgaaagcaacccaaccataccgcttatattgaaggatgggcactttatgccgagcaattgggtaaagatgttggtttctataaagacccgctttcagactatggaagactatcgagtgagttgtttcgtgcttgtcgtctagtggtggacactggcgtgcattataaaaagtggacgcgtcagcaaatgattgatttcatgagagaacactcagctttagatgaacctgatattcaggcagaggcagaccgctatattgctattcctgcccaagcattagcatataagatgggccaactcaaaattttagagctacgagagctcgccaaacaggagcttggagaccgttttgatatcaaagcattccatgacatggttttaaatgcaggaacactgcctttaaatatactagatgcacgtattaaaaattggattaaggaacaaaaagcggcagcttaa

SEQ ID NO: 63152 - DNA, 351 bp, Acinetobacter baumannii
atggaatctcactctatagatatagaaattacccaaaatattgatcgactagaatttcaagcaaattattttgcgggttgcttactactgcctgaaaatcgattaaaagcaactttaaactattatttacgcctttatggaatcagaaatagaggtttctcgccattatatattgattcacaaccctgcaattttgaaaattatagtagaatcattttacctatgactggaatttttaatgtttctcaagaaacaatgaaaattagactcacagaattaggtttagctcaattcgcttttcaacctacttctactcataaggtaacgaggtcatatatagatcggttctaa

SEQ ID NO: 63153 - DNA, 1059 bp, Acinetobacter baumannii
atgatgacaacacttcaaactcaaccattaaacacactttggtatacacgctgccccgtaccaactggtctaggcatttcaattcaaaaagattggctcaaagaaaagtttaatgagcagcaaattgaaataaaatcaattcgagaatcaaactccaaagatattcgtaactctcattttaaccatacccttgccaactcagttcgacatggcgggagtatccctgcaatctgggcatatgcatcgggtcaaaaaaccaaagtaattggcttatcttgggcggatgaagttcaactattgttaacgcgctacgattcaaacatcaaaactgttgcagacttaaaaggcaaacgttttggtattccactgaatcaagatgcaattattgatttctcacgtgcacaggcgattcgtggtttagagaatgccttaaaaatagtggatttgaaggtgagcgatcttgagctggtcgattgtttacgagcagatattttagctgcacagcaacaacagcctgaagaaaatgattctagtttttatggtaatcgtaacaaaattaatgcaagtgcagaaatcgtggcattaattaaaggtgatgtcgatgctattttcctaaaaggtgcacacgctgcgcaaattgctcatgatttcgccctgcatactattattgatattggctcacatccagaccctattctacgctctaataatggaacaccaagaacgctcactgttgatgaagattttctaacgcaatatccagagcaagcccaagcgattgtcgatgctgttttacaagcagaacaatgggctcatgcccatcccgatgaaacccatcgttatttggcaaaagagtgtaatagcagtgaacaatgggttcatgcggcgtatggtgcagatgcgcatctgaaactcaacactaactttgatgagacttctattgttgctttacaagacctgagtgactttctataccgctggaactttattcctgcacagattaatgttcgtgaatggcttggatatttctattcaagttcaagtggcttaatactttaa

SEQ ID NO: 63154 - DNA, 321 bp, Acinetobacter baumannii
atgttatttattgaaaccagtatttttaccaagcaaattaaagagcttgtgagtgatgaagaatatcgtcagcttcagcaagatctcttggtacagcccgataaaggcgacttaatcaagaatggcggtggtattcgtaaagtacgttgtgctcaaggtaacaagggtaaaagtggtggtatccgggtgatctattattgggtcacagaggatgatcagatctttttcctggtggcttatccaaagtctgtcaaagataatctgacagacaaagagacctcgatcctacgtcaattagtgaaggagcaatttcatggataa

SEQ ID NO: 63155 - DNA, 870 bp, Acinetobacter baumannii
atgctaggtggatactattctaataactctggtttaggacagcttacagaaaaagaaatttcacaaaaattttacaaaagtaaaatcacccctattacaaaaattctaaaggaaaataattaccatagctatttccaagcctcgaactcaaaaagatcacaactaagcttaatgttatctacattaaattttaatgaaatatatggtttagaagaaattgattcaaaattaatagataaagaccttaatgaacttacagataagcaatcttttcagctactttcacaaaaaataaataacgtagaaaaaccttttttttatggtgtatatacagtaggaacacatgttggtttagatagtacagatttaaaatatggtaacggtaaaaacccatatttaaataaatttcataatatggattactggtttggagaatttattaaagattttaatgcaaaagaaatttcacaaaacactattattatagtaacttcagaccattcaacataccctgagccggaattcaaaaaaacatttaatattgatgctaattattttgtagacaaaattccattaattatttataaaaaaggaatatcacctaattctattgatgtggatggactcaattcattatctttggctccaaccattcttaatatactgggtattcaaaattctccaaatatttttttaggcagttctatatttgataattcatataaacatcaatataactgtataactgctattggggatgaatactataagacatgtaaaaattctataaatttattacataatgagaaaacaattagaataattagtaaattacaatctctaggagataataaaatatctaaatattga

SEQ ID NO: 63156 - DNA, 1113 bp, Acinetobacter baumannii
atgtcctcatcattttatgtttgggatgtaaaacagcaccatcctgatgttgaaattaacgatttggaacaggccgagtattatgcaactcatccacagaataaaggatacagcgataatctagaacaatgtttacgtgctattattaaaatagtgactgacccagaactttcagaaaactttgatcaggatattatagatttttttgataatgcagagggatatattgtgccaacacaagagaatgtgttggatatagatcgctatttctttgaaaaaagtcaatatttatataaagttgttgttgaagcgattataaaatatgatgtggtaggctttgatgcaggggcttatattttcttcagtaaagataaaatatttccaaaacagaacagtattcaacgctggttaagtacagttcaacccattaccaaagatcagttaagccagtttaaagtattaccagccagtcaggataaattggttcagttctatcatcagtggttaaaggaaaatgaaaatatattgggtttttgggataaagaaaaaaatcagaataatcaagggttcggtttgtatagagattttagtcaaaatatatatgaaaaaattcttatagtaactgcatcaaatttatctaaatatgaactaggttattctcatgtttctttaagcagttatattcaagtttctgaagataaggcttttactattcttagacaacatccgattaaagattttaccctacaatatataccagaactgcatggggttgagggtaaacccttggcgataacacaccctaaacagcttgaaagtatttttaaacaaatttatggttttttaatttatgatgctgaacaacacaaagatttagaaacattaaatcagtggattaatcatggtgatgaaaaaaaatatataataggtaatgcagtagtaaatcggctggctttcgctaaatacttaaatgatcctctatatgatcaactaattcaggaagctttatcttatgttgaaagaggagctaaagctctacctcatcttgctaattggacaatagagaaattgtacgaagaagttgagaaaagatataatagtattatatcctaa

SEQ ID NO: 63157 - DNA, 252 bp, Acinetobacter baumannii
  misc_feature (203)..(212): n is a, c, g, or t
atggaaattaaagccaataaaaagtcagtatgtgaattaaaagatttctatttctcagtacctaattatcaacgtgaatatgtatggaaagcagatgatcaggttgagcaatttcttgtagatattgacaatgaatatgaagaagatagtaaagagcaacaaagctatttcataggttctataatcatagtaaaaaataatgnnnnnnnnnntcgtcggcagcgtcagatgtgtataagagacagaaaataa

SEQ ID NO: 63158 - DNA, 411 bp, Acinetobacter baumannii
atgttaaataagctcggtatttatcaagaagaaatggtcttgattgcatctcaatctttgggagaaatctacaaccaagaagatctgattggtaaagaaatttttatgtggactgaaggctgtccttaccgtgcagctcttgaagaatggcttaaactgaagaatatctctctccctatcaccagtattaccagttacgccaccattattgggtgtgtcagtgcgggttctggcgtggcgttagtgcctaagagtatttatgaacaatataaaaatttagcgcatattcaaagttataaatttgaataccttgcctttatgcaaaatcattttttctggcataaaaatgtgagtaaccataaagcgagagacatgtttatagagttgattaagtctgagttttgtttataa

SEQ ID NO: 63159 - DNA, 1041 bp, Acinetobacter baumannii
atgttccattcggcgaaatggaaccatgactatgaccttactggaaaacgtattgccgtgattggtactggtgcatctgccatccagtttgtgccccaaattcaacctaaagccaaagaactgtttgtattccaacgtacagctccttgggtgctgccaaaaccggatacggatttgggtgagttgagtaaatcaattattgccaaatatccagcgattcaggcaagttggcgccagactgtagcaggcaccttaaatgtcatcaattttggtttacgcaacccaaaagctttaaagcctgtcaattttgctgcgaaacaactattaaagttacaaattaaagatccggttttacgtaaaaacgtcacacctaattttgatattggctgtaaacgtattttatttgccaataattattatccagcattacaagcacccaataccacgcttattccacatggcctggttaaagtcgaaggcaacaccgtggttgcagctaacggtgaacgtcacgaagtagatgtgattatttggggtacaggttttgaagtgtctcatccacccattggtaaacgggtacataacgaaaaaggggaatgtctggcagaactctggaaagactcctcaccggaagcttacctaggaaccaacattgaaaatgtgccgaacgcatttcttatgctagggccaaatgtcttggtttacgactcattcattggtcttgctgaagcccaactgcaatatattgtagatggtttattgcaaatgaaagcgaaaggtattgctaaactttctgtaaaatcagaaataattaaaaagcataatgagcttgtacaaaagcatttacaaaccacagtattcaatagtggtggttgtaagagttattaccttgatgcaaatggtcgtaactttgcagcatggccatggtcattgaaaaatcttaaacagcgtttacatcatttaaatttagaagaatatgaggtcatctatgaagctgatcttgtaaaagtaaaacctaaagttgaagaagttgcaggttaa

SEQ ID NO: 63160 - DNA, 450 bp, Acinetobacter baumannii
atggcaaccaataagttcacacaacttatgctcgtatttgtcctgtttttgtttgctataacaactacggggatttatacgtgggcgcctgtaatagcaaaaaatctagatcattatcatgaattaagtatttctgtagaaacagaagattctagccaatggtcattagttcatcatgatgaagttctgaatacagcagatcaagataaaaaaaatcataactggacaagttatgatgaacccgcatttcatcattcagtaaaaccaattcaagctgatgatcatttctcaattgatccagtctttttccttagttttgctttacctttaatcctcttatttttaggtttatttgaacgcccaattcgttcttttaagcttaggaaaaggattccctttctttgtaatacctacgcatttaccaaaactctcattgttctaaggaattga

SEQ ID NO: 63161 - DNA, 900 bp, Acinetobacter baumannii
atgcgtactttaacacaaattaatgtaccttttcatagtgctgatttagtaattattgaattcaacaatcagccatttacggccatgcgcccaattgttgaagggatgggcctcacatggcaatcacaatatgaaaagttaaaacaaagatttagttcagttatcactgaaatagtgacaactggaaaagatggtaaacagtacaatatggtttgtttacctgttcgtaagctttttggatggttaatgactataagtccaaataaggttaaaccagccctccgtgatacagtaattttgtaccagcaagagtgcgacgatgtgctgtgggaatactggactaaagggcaagcaataaaccaacgcttaaccatttctccagaacaacaaaatgcactgcacgaaatagttgatcgccgtgcaggaagggatcgaagcttaagagcttcaatgtggattcgtcataacagacattttggcatagctaaatatagccaattactttcaatccattttgatgatgcgaagcagtaccttgagacaataccacttcatgagcttgtcccaactgaaacagatacacttaaacgtttagaaaaattcctagataatctcgctgctcggtatccagctcttgagaatccgttggcatatgaaattgctcaactgataggtgagaagctaaagtatcaatctcctaaagggcctaaaaacttttggatatcgattcaagaaagcggcgcagtttctgtacagcaatattcactacaccacacacccgttaatgttgtgcaattgcgtgaacgctttaatcaattgtgggatttcttacataaagatgaggtgcttgaacttggaaaagtgttaaaacgatttccgtatcaacatgtgaatggatag

SEQ ID NO: 63162 - DNA, 489 bp, Acinetobacter baumannii; identical to SEQ ID NO: 47911

SEQ ID NO: 63163 - DNA, 306 bp, Acinetobacter baumannii; identical to SEQ ID NO: 54617

SEQ ID NO: 63164 - DNA, 225 bp, Acinetobacter baumannii
ttgaattcgccagcctatcaagtggttatacagtaccgtcaatggttaattgatgaagtttataaattgcttttaacagcgaagaacgatgctactaaaaaagatgctcatatgtttttatttgtaattgatggtgccattattcaactgctagatgaaacaaaggctgataatagagaactgttattgcaatatattttaaaaagtatttttcttagtgattaa

SEQ ID NO: 63165 - DNA, 495 bp, Acinetobacter baumannii
ttggcttttggcccgccaccagcggcaggtgaagaagaccctgaactgattaatgcaggtaaagagtttgtgaccatgcttgaaggtggtagctttttccaccatggcgactcatttgcgatgatgcgtggtggacaccttgatattgctgtacttggggcctttcaggtggcagccaatggtgacttggccaactggcacacgggtgcaccagatgcgattcctgccgtaggtggtgcgatggatttggcggttggtgccaagaaagtatttatcactacggaccacgtcaccaaacaaggtgagccgaagattgtcgctgagctgacctatccggtaacgggcaaacattgtgttgaccgtatttatactgacctgtgtgtgattgatgtgaccaaagatggtttaaaggtgattgagaaagttgaaggtcttagctttgatgagttacaggctttaaccggtgcaactttgattgatgcgactcaagggtaa

SEQ ID NO: 63166 - DNA, 633 bp, Acinetobacter baumannii
atggaaatgctagatagaacgaaatcattattagatgcatacccaaaaatagattcaggaaacaggattctagatatttatcttgtgcaaagagaaatctgtcaaaacgctttagatggcattttaaaattttggcaatcagaagataataaagtacatgaccatttagtaaatcttttttttcaagagcaactaaatagtatttcaaaaaataatactcttccttctgagctatcagatctttttaagcttagcccttctctcaaagaaagtttagacttcctaatgaaaaaagccccaattgagcttcctgagagattcttctattctctatctcagctatatgtatctgctgatgcaatagcaatagatttaaatgaccttattgagcaagaacatgaggatattgataaaattcttatcgaaagattaaccacggatactccattttttacacaactagctttattaattgggggcctaagaaaagaatttctcacaagattcgaactgttgagtaaggaagagcaagaaaatatacaaaaaaaaggtgaaccgtaccgggtttgtcggagagtcaatattctgagagactatcccgatgacaaaaccaaactatacccccgaaattag

SEQ ID NO: 63167 - DNA, 168 bp, Acinetobacter baumannii
atgactaaagggacagaattatctggcattggtattgaatcattaagattggtaaataatgatcttgcatcaataccaacttgtttagcagtggaacgatttggatatttattatttgtttctattactcgctcaatgttagcatccacaataatattaaattcttga

SEQ ID NO: 63168 - DNA, 519 bp, Acinetobacter baumannii
gtgattatttggggtacaggttttgaagtgtctcatccacccattggtaaacgggtacataacgaaaaaggggaatgtctggcagaactctggaaagactcctcaccggaagcttacctaggaaccaacattgaaaatgtgccgaacgcatttcttatgctagggccaaatgtcttggtttacgactcattcattggtcttgctgaagcccaactgcaatatattgtagatggtttattgcaaatgaaagcgaaaggtattgctaaactttctgtaaaatcagaaataattaaaaagcataatgagcttgtacaaaagcatttacaaaccacagtattcaatagtggtggttgtaagagttattaccttgatgcaaatggtcgtaactttgcagcatggccatggtcattgaaaaatcttaaacagcgtttacatcatttaaatttagaagaatatgaggtcatctatgaagctgatcttgtaaaagtaaaacctaaagttgaagaagttgcaggttaa

SEQ ID NO: 63169 - DNA, 447 bp, Acinetobacter baumannii
atgaaaaatatcaaaacaataaactctataacacattcaatattactgatgggagcagtgatctcttctttgggaatgatcggtataagctcagtttatgcacaagagcaagtcgaccctgcatataagcccggtaaccctatttatgataaatgggatagattttataaaattgaacagtctcaaccgcaagaagcagaaaaaatattagttgagcttagtaaactgacaccaaccgatattaaagtctggaaaagtcttacttatttacagattcggcttgaaaaaaggaaagaagctttacaaagcttaaggcaagcaagaaatttagctcctcaagatgacaccttaaaattacaagaagcttatttgctgaatcagcagaaaaaagatcatgaagcattggttttatttaaagagttggtggtgtttcaaaaagtatgctga

SEQ ID NO: 63170 - DNA, 255 bp, Acinetobacter baumannii
atgaaaaagctaggtatacaaggtgtttggcgaggtaagaacaaacaaaccacccgtagccgagatgaccaaaaacgagcagatgatttagtgaaacgtaattttactgctgatcatcctgacccttgcgaagcagtgcttctcaggtcagtgactttacgtatattcaaactcattcaggctgggtctataccgcctttattattgatgtgttttcacgagcaattgttggatggaaagtatctacacggatga

SEQ ID NO: 63171 - DNA, 192 bp, Acinetobacter baumannii
atgtcagtaggagtaggatctaatggtgcagagcaagataaggcaataaatgcaggtttattcggtagtggtgagcgatcattccctggcttagcatcaattaagcgaatccatttggatacaagatttgtgttcaatccatgttgcaaagcgactgaagcaattgaaacgtccggtgctttacacgcctga

SEQ ID NO: 63172 - DNA, 231 bp, Acinetobacter baumannii
atgagtgagtcaagacatttagtgctaaagcgtcaccctactttgaaaggttatctggttatttgtgatgaagaaactggacaacctctagctggacaaagagcagtacagatgaattctgatgccttaaatggacccgcaacaattactgtaacttttgaagcatatggtgctcatggtgttcgcttagtgagtgatgaaccaaggccgactaaaacaaagcaaatgtag

SEQ ID NO: 63173 - DNA, 144 bp, Acinetobacter baumannii
atgaaagaaggtcaatcaagccgtactgccgaagccgctgctgctttacgtgcgaatcactttaaaaatacgataaatcctgtattttcagatccctatgcttttgaaatgaccacggccatgctgcaaagttgcgaccgttag

SEQ ID NO: 63174 - DNA, 318 bp, Acinetobacter baumannii
atgacaaaaccaaaatatacccctgaaatcagagaaagagcggttcaattattgattgaatccgaaaaagattatccttctacttgggcagcaatcacagctattgctcctaaaatcggttgtactcctgaaacattgcgtgtttggtatttaaagcatctggatcaactaaatcctgccaaagtacaacagatatctgaccaagaaaaaatgaagcaaatggaacgtgaaattaaagaattaaaacgtgccaatgaaattctacgtaaagcagccgcttttttcgcccaggcggagctcgaccgcccacacaaataa

SEQ ID NO: 63175 - DNA, 231 bp, Acinetobacter baumannii
ttggatgtttggggtcttgtaatgcatctaaaatatcaagatatccaaaaattcctccaatatcttcaaatggagcatgattttgaccatctatacaacatggatattttagatgcattacaagaccccaaacatccaagatatgacgattacatgcaaattatcgaggatgaaataggagagatagagtttgatccgacctactttaattcacatgatattaagttttaa

SEQ ID NO: 63176 - DNA, 204 bp, Acinetobacter baumannii
atgcagccttatattagtaaagaagactttaaagtaagtgaaaatttctatattaatcaatcaggcgggattacatttgattttcagctttacgaattggctccatatgctgcaggtcctgtgagtttagaactctatgatacagatcaactgataaaatcagattttttaccgccaatgcctactttaaaaactgaaatgtaa

SEQ ID NO: 63177 - DNA, 177 bp, Acinetobacter baumannii
gtgattgaatatttaaaagcagattggcaaggtttagcagatgtacaacttgcgacactaaactgggtagattggttcaataaaaagcgtgtacacagtgcactgggttatgtatcgccttttgagtttgaagcaatgtactatgataagattaacccgttaggtcaggaggcttaa

SEQ ID NO: 63178 - DNA, 2109 bp, Acinetobacter baumannii
gtgagaaactctttactatctaaaaggttaaaacgtactgaaatacgtttactcattattgatgataaccagttacgttataaccaaattttaaatttattatcggggaatgattatcaagttaatgccttattacttgatgatttaaaaagttttgaaaagcagctcaatacatcttgggatgtcattatttttggtcgcgcctatgatttgaaaattgaacaaactctctcccttgttcaagcctcagaacagccgcagcttccaatattacttttacagccagatgattaccaagcgcagcaatatcaaagctatattcaaaaagggatttatgatgtagtcccattagaaccgctagattatttctatattacgctggttcgggcactgtcatacagccgccttttacagacggaacaacatcttttggccgagcttgataccattcatacgcatacgcaaacgctggtcgacaacagccataaagcggttgctatttttcaagaaggcatccacattaaggcaaataccgaatatttgaatctttttggtttccagaaagaagaagatattattggattgccgattttagatgtcttacaacccaacgatttaaatatttttaaacagcggtttaagaaaatttctttaggccagttcgatcaagcacgctttgaaattcagagtcagcatcagggtatttctggtaataatgcgctaaaactcgagtttattccaagccaagaagaagacgcagtacaactcaccatcgactatcaagttgatttaactgctccagcaaatagtgctccgtccgaaaaaagtgttgggttgagtgcagcttggccgcagattaatcgtcatttatcgacccaccctgcccaagcaaacgccgttgttttatttagacttgcacagtgcccagaacgaatttttcaacagggttggcaaactttagggcaatatttcaatcagctccatggttttttaaaagaccatgcacagatgccgattttccaagtcgacttgggtagttatgtcgggattttacaagccgaaaatagttcagttttaaactcacagctgacgagtttacaaactttgcaaaaagaacacttgttaaaagtgaatgagcaaaacttttcagtgcagttaaagcttggttatgcttttctcaaccaaccattaactgagaactcttttagctcattattgaacgaggcggaaaagcaaggcttacctcaggttacacctcaacttgaagtaatgccaaccgtagacaaaacggtttcaccgagcattgaagctgttcctcttgatttaacaattgaacattttgaccatacgcctcagtcctctttgctccagcaattaagacaaaaactagctcagggcgaaatacatctgaagtaccagcaaatttacgataagcatgaccaagaaactcataactatgaagtgacaagtggttttattgctggtgaacaatggtatgacttaaatgatttaagtgatcttaaagaagatgccgaactttcaattcagttagaccgctggatattggtagaagcgtgtaaacagcttcataatttcattgctcagtatcctaaagcgaaactcattattaaccttaatattgatattttgctaaaagataaaacattccctgagctgatttccaaactactaactattatcggaagtaaaattgaaagcccactgattttgcaattttcagaacaagctcttcagccttatcttccaattgctcaacagcacattgctcgcttacgccaacatggtgcggaaatttcaattcgagattttgcttcttctatgtatagcgattcaatattacagcagcttgatattcatcttgtaaaattacagtccagcaaaactgatctattaagctcagaccaagggcttaataacttgcaagaaaaaatattgaactatttgactgtaaaaccgattggaattttattagctcacttgaatgatatgaacctgtttgccaatgcatggaatgtagaagcgcgctttctacaaggggattatttccagaaaaaacttgaccgcttaacagatgtacaagaccaataa

SEQ ID NO: 63179 - DNA, 249 bp, Acinetobacter baumannii
atgtattcgtttttagttaaatttgatttatttcacttaaaaaataacgttgagcttttgatagaaacttacttaaagctaaatgtattcaatgttttcattcttctaaaatctacaaatataaaatactgtaaattgcatcaaccgcccttaaggacggttgatcgttataaattaaaagtaattgaaggtaatttttataacatcacacgtgattactgtgctgcgttcacaccaacaataaactga

SEQ ID NO: 63180 - DNA, 1152 bp, Acinetobacter baumannii; identical to SEQ ID NO: 50772

SEQ ID NO: 63181 - DNA, 1542 bp, Acinetobacter baumannii
atggatgactacgatggactgatctatgaatacacggatccgaccgacgatagtcgtatcaatatctatttgccagacaaaggagcaaagaacccgaaagaagtgaaatccgttggggtacgaaacaagtggcaagctcattttaatgcgtaccggatctggaacaagcttcggtttcaacgtaaatccatcacctttgatgcggcgcctgagtctgaattgcttgtgctacgtgaccgtattgctgtagcagattatcgcaatggtattcatcaaagcggggaagtggtacagcaagagggtttaatcctcaccttaagccatgatgtagatttcattgcaggcaagagctatgtgatctatctgcaaatgggggatggtaccgtggacctaattcctattacaccgggttcagccaagaacaaagttgttttagggcgtttaccgaacggggccttaaagcttagtcccgatgactttgtgaatactatctacacggtagttaatgacgataccaaaggctcattaccttatctggttgcaaaaagagaaccagctgaccagttctctaatacaattactgcaattaattacgatgaacgttattacctcaatgacaaggacttcattgatgtaccggtagatgattcaccgatttatattcgatatgaccagcttgatattaatctggcacgtttgtatcagatgcaaagaggtgatttaccaacgactggcgaaatcagttttgtagttgaagcaggtgcattggtttcaagttcaagttcttatcgaccggaaaccagatttgtctataaattcgactacaactctagtcctccaaaacgagagtatatcgttccagctgcatcagaattacctgctattgatactggtgagtttccacctgatctggttgtgaatctgacgattaaaggtgctgtagttggacgtggtggagatggcgggttgccacatttggcatttggtgcatggtctaccgatccggattacaactttacaaaaacccgtcgtgatggttttcagggagcacccggtctattaaaccggcacagtaaactaaacctgattattgatggtggaactctggctcgaggcggatctggtggcggcgcaacaccaagtggtatttatactggattatcgtatggagttcagggtattcccggtggagctggagcaccttttggtcgggttatgaccggacaacctattactaacgattcacaagactggcgttggtactttaatggtgactttatggttgtcaaagtaaccgatgctgaagctactgtgcctggtaaaggttatcgaacccaaaatgaccgttatggatcgccattgtccggtgatggtggaagctggggtcaactaggtaccgagtccaccaatgatggaacatggaactggcaataccatggcacaactgaaggccagccggggccgggtggacctgcaattgttggggtggcaccacttacaactcaattgatcaatggagggaaaattctacaaacactttaa

SEQ ID NO: 63182 - DNA, 741 bp, Acinetobacter baumannii; identical to SEQ ID NO: 63005

SEQ ID NO: 63183 - DNA, 273 bp, Acinetobacter baumannii; identical to SEQ ID NO: 49501

SEQ ID NO: 63184 - DNA, 834 bp, Acinetobacter baumannii; identical to SEQ ID NO: 46183

SEQ ID NO: 63185 - DNA, 210 bp, Acinetobacter baumannii
atgagttatctatttttatcgtgtacagagattgaaacaacagaagaaaattttgagaaatggttaattggccatacatgtgaacttcgtaatgccaaaatttcaattccgaaactacgagtagaaaacttacaatatgctcaagcacttgaacatgctgcatttgaagttattcaaaagtttctaaaacgaatcggatatagtggttaa

SEQ ID NO: 63186 - DNA, 426 bp, Acinetobacter baumannii; identical to SEQ ID NO: 61003

SEQ ID NO: 63187 - DNA, 381 bp, Acinetobacter baumannii
atgaaaatgacggctaaaattgcattattcagtgcagcaattgtaactatgggtagtttggctgcttgtcaatcaacaactcaaccacctaagccagaacatggcatgatgcaagatggcccacgtgatggtcaccaccatcgtatgaaacaccgtgaatttacgcctgaacaaaaagcagcatgggaacaacaccgtgcagagcgtaaagctcgttttgagcaaattcaaaaagcatgtgaaggtaaagctgttggacaaactgtcaatgttcaagttggagataaaacacttgaaggtacatgtaacctccgctttgagccaaaacgtcctcaaccaccagtcaatgcacctgctccagtagcatctcaagcaaaataa

SEQ ID NO: 63188 - DNA, 1374 bp, Acinetobacter baumannii
atgtcaaatcagaacgataagcttaagagtttaaaaacttcttccatggatcgacgcttatcaatcgcgaaagcttctttactggcaggaacacgttgggctactgcaagtgcctcttccctcttttctagtgaagaagaaaaagagaagaagcgtaaaaaggcaatgagcgagcaagctaattatcttgtttctgaaattggcaaactaaaaggttctattgtcaagattggccaaatgatggcgctttatggtgaacattttttacctgaagaaattactcaagctttaaataccttaaataaccaaactgttgctttagactggccagcaattaaacctcatttacaagaacaattaggttctaagttaaatgatctaacaattgaccatgagcctatcggtacggcttctctggcacaagttcatcgcgcaacacgtaagtcagacggtttagagttagttttaaaaattcaataccctggtgttgcgaatgcaattgactccgatatgagcctgtttaaaaacatgcttaagcttacacgtatggtccctcaaactcgtgagtttgatcagtggttcgatgaagtacgtgaaatgatgcatcgtgaagtcaattatcacgtagaggcagccacaacacgtcgctttgctgagcgtttaaaagatgatgagcgctatatcgtccctacaattgtagatgaatactgtaccgatcaagtcttatgtatgacctttgaacgtggcgtgccaattaatagtccagtcatgctttcccttcctcaagaacgtcgcaatcaactcggtgaagcttcactagagattgcagttcgtgagatttttgaatggggtgaaatgcaaactgaccctaactttggtaactaccttgttcgtttaggtaatggccaagacattcaggataaaattgtactattagactttggtgcgatccgtcagttcgatgaacatttactctcagttgcacgcaatcttatacaagcgggttatcagcatgataaacatgcgatggttcaagcaatgactggatatgagtttttcgatgcaatgcctgaaagtattaaacccggcatggccgatgtctttttacttgcgacagaagcattcagtacccctgcaaataatccagatatgccagctgggctgatggatgaacatgaacgttatgactggaaaaagagccagttacatagtcgtgttatgcagcaagcaagcaaatcaatggcgtctcgatatttctcggttcctccaaaagaatttatgtttattagccgtaagtttattggcgcatatacatttatgactgttattgatgccaaaacaaatgtacgacgtatgattcgtaactttgcttaa

SEQ ID NO: 63189 - DNA, 390 bp, Acinetobacter baumannii
atgcaacactacctcaactacgttgatggccaatggcgagatgcttctcgccaattggaagttatcaatccagcaactgacaaagcttttgcgacagtggctcgtgcaagtattgaagatgcagatgctgcaatggctgcagcacgtcgatgtgtgaatagcggagctttaacagatgtgcgtcctgcgaagcgcactgcatggatgttaaaagctgcagaagcgattcgtgaaattgctgaagagggtgcattaatcctatgtcgtgaaaatggcaaaaatattgatactgcacgtgaagagttcgatgaagccgctcgctattttgaatactacgcaggtatggcagataaagttgaaggtatctcggtacctttaggtaaagattaa

SEQ ID NO: 63190 - DNA, 453 bp, Acinetobacter baumannii
  misc_feature (309)..(318): n is a, c, g, or t
gtgaaaaagttaaaattaatgacagtggtgggcacacgtccagaaattattcgtttatctcgtgtaatggctgcatgtgatgaatattttgatcatattcttgttcatactggacaaaactatgactatgaattgaatgaaattttctttactgatttgggtatccgtaaacctgaccatttcttaaatgcagctggtgcgacaggcgcagaaacaatcggtaatgtaattattgcagttgataaaattttagaagaagtgcaacccgaggctctacttgttttgggtgacactaacagctgtatggcnnnnnnnnnngtatggcagtgctaccagcaaaacgtcgtaaaattccgactttccatatggaagctggtaatcgttgttttgatatgcgagtccctgaagaaattaaccgtcgaattgtcgatcatacggctgatattaatttaa

SEQ ID NO: 63191 - DNA, 708 bp, Acinetobacter baumannii
  misc_feature (522)..(531): n is a, c, g, or t
atgaaatactttatagcaaatttatatttttatacccgtaaagagcttctagcaattgctgatggaaaagatgagcttgttgattttctagatagaataaaaggttctgagttagaaagcgcgaaacttacaagtgcagaacgtgcatttttgaatgtttatcaatctgctgtgtcaaatactttggagatgatgaacattgatgtttctacatctagctggatgattggcaatggtttttacgtcccttctatggttgaagattataacaaaacaaatatttctattttagaagtagtactgttttgtaatatcacagcattaaaaacattgatcaaaactgatactgcaataatcgaaacaaggtttgttgagtttctaattaagtacgttgaaaaaatagaatcggtacattgctcagatgataaaatttttaaattagaactaggaaataagtatgaatttgagttacatcaggaaggatacattttcgttgaaagaatttcagatgatgaaattttnnnnnnnnnnaatgaacaatttctagattcagaaattttgataagtttgctgtatgcgaaagaaaatgagaatgagattattccagtaggtacttttcacagtgtctcaggggtatatgatgcacttgattttaaaagtgctattaaacctcttttaccagatattgagctgctggcatctttctaa

SEQ ID NO: 63192 - DNA, 351 bp, Acinetobacter baumannii; identical to SEQ ID NO: 49347

SEQ ID NO: 63193 - DNA, 444 bp, Acinetobacter baumannii; identical to SEQ ID NO: 61037

SEQ ID NO: 63194 - DNA, 369 bp, Acinetobacter baumannii
atggggtggaaggggaaaaagccgactagttttagtcttgatgtgtctaaagcagcagaagcacatgtaaagaatattgtcatggatactgtgcaatccttagttaatttaagtcccgtcgatactggagcataccgtgcttcacatattgtttcggttggatctggtgactatgacatacgtgtacctgaaactaacccaattcaagatgctgctattcaagctgtaaagattaaattgggcaatttggtctacatacagaataaccagccttatgctgagcgcttagaaaacggctggtctgatcaagcgccacaaggtatttatggcctcacttttaattttatttctcaaaagtacggtggctaa

SEQ ID NO: 63195 - DNA, 408 bp, Acinetobacter baumannii; identical to SEQ ID NO: 51640

SEQ ID NO: 63196 - DNA, 369 bp, Acinetobacter baumannii; identical to SEQ ID NO: 61034

SEQ ID NO: 63197 - DNA, 207 bp, Acinetobacter baumannii
atgaaatcggcttctagctttccaaccaaatctcccttcgaggtcggcttaacgatatccacccctacacgtgaagtcgcagcagaaacatttaatgatttacttgttgagtttgaattgtctaatggtattgaccctgttttattcgcaattgaacgcgttgaaccttcaaaatcatatgcagcatcaacccgtatatttccataa

SEQ ID NO: 63198 - DNA, 507 bp, Acinetobacter baumannii; identical to SEQ ID NO: 49273

SEQ ID NO: 63199 - DNA, 1101 bp, Acinetobacter baumannii
atgcctaaaacaggtggaagacattcaccagtctgtttaagttttgagcctcctgaagaactttccgggcttggagaggtacaaggacaggcaatacaagaaaatcctgaagatggtactacaaatttaaaattagatttcagtttaactaaaatgccaggtaaagctccgccagccccttctggagcagatagtgactcggtaagaactgatggaaaaaaacttacattacgtggattacttcattatctttttgaagaagctaagttaaattatttcaatccagacattccgaagagaaattggtatacagtaagaaaagcactgcttaatgctagtgattctaaaatcgccaaaagagcttcattaaccgataatctctatattcctgaaacatataatgatcagaagaaaaaagaaataatagcaagaagaaatgaaaaaatggcccatatgaatacgggcaaagcatcacaaaacctcatgattttaataggaatagttaaagaaatttcagaagccagatatgatttcaaaatggttataaagcattgtccagatttccatttttttatgaataaggatctacataaaagaatatttaaacggttccaagaggacttagagctttggggtgctcacgaaaactctcaattaattactatctcaacttttactagaggaatttctggtgtagctaatttagaagaagttagtttaattgttgtaaatgaacagtggattccttatgagaatatgtatgaatatgatcttataaatgaaatgatcagagaaaatagaccttttattaaagggttgcgttacaatctggatagaaaaaaaccgttgtcgagtttagtggctcttgatactttgcctgttcctacggcaatgtatatcattccggcagcacaatctcacacgtataaagaaagtgtagttaatttgattgaagctagtgaatatgaaggttggatatgggaggctgaaatggcgatgcctgatcttccaaaacttggattattaactacagattcagaaattttagaggacaatttaaaaccaaatgagcagttattcgatacaaatcggacaagttaa

SEQ ID NO: 63200 - DNA, 210 bp, Acinetobacter baumannii
atgactcatggtgggccattttcagcatttagaggaaatagacagttatgtgataaatatggaagaaatgataatcatcctgctgatcaagtaatgatagctaatattgcatatgcgaatagaaatggaaatggtgatattcaatctggtgatggttggaaatatagaggtcggggaattatacagataactggtaaagataaatattag

SEQ ID NO: 63201 - DNA, 261 bp, Acinetobacter baumannii
atgtttctatctactaattgctttatttcctttaaaacattactcagtgtaggtgtaggtgtaggtgtaggtgtaggtgtaggtgtaggtgtaggtgtaggtgtagatttacttagtaagttcgcttctacaattgaatttttacattcattaagcttgaagactttcgcagttatatactcaaaattcttttttctatctgatcttgatgctgtatctcgattaataatatcaattaaagaatctacaacttctaattga

SEQ ID NO: 63202 - DNA, 1002 bp, Acinetobacter baumannii
gtgggctcggagatgtgtataagagacagggtgagtgttaccgatctatttagcagagaagaaatacaagagcttacagaaccttcagatgcatatggcgcttgggccgttgctagcacatgggctgttattggaggaacatttgccagcttaattatgatgtgggattacttaccgagttgggggaaattattagcatgtatgcttgctctagctgttttagctggccgtcagttatgcctcgcaattttaatgcacgatgcatcccataaaagtttattcaaaaataagaaaataaatgatttcgttggggagtggctatgtgcccgcccaatctggaacgacctacaaaaatatcgtgtacaccatgttcgacatcacgcaaaaacatctacaccggatgatccagatctttctttagttgcaggctttcctgtcagtaaacaatctcttactcgtaaattcttacgcgacttaaccggtataacaggattaaagtttagcttaggccgtgtgttgatggaccttgatgtcatgaaatggactgtagccaatgatcaaatctggttagaccgcagtgataaaaatttcgttgactatgcaaagagtattgcaaaaaacagtacaggcgctattgcaaccaacctattactttatggtgttttaaaagcatgtggtcaacaacgtttttattggttatggcctttggcttatttgactccatttccattatttttaagaattcgttcaatggcagaacatgcaggtatgcaaaccagcaatactgctttaactaacactcgtaccacacgtgcaggttggattgcgagaagctttgtggcccctattcatgtcaattaccacatggaacaccatttaatggcgtctgttccatattttaaattaccgcgtatgcacaaaatattaagagaacgtgggcatgtgcccactccaccgagctattttgaagtaattcactctgtacacgataaaaatagataa

SEQ ID NO: 63203 - DNA, 444 bp, Acinetobacter baumannii; identical to SEQ ID NO: 51455

SEQ ID NO: 63204 - DNA, 357 bp, Acinetobacter baumannii
atgacaggttggggcgtagatcattcatttgaatgtatcggtaacgtcaatgttatgcgctcggctctagagtgtgcacatcgtggttggggacaatccgttattattggcgttgctggtgcagggcaagaaatttcgactcgtccattccagttagttacaggccgtaaatggttaggcactgcttttggtggagtaaaaggccgttcacaacttcctaaaatggtcgaagatgccatgaaaggcgatattcaacttgaaccttttgtgactcatactatgcctctacaagacattaataccgcttttgatttaatgcatgaaggtaaatcaattcgtactgtcattcatttctaa

SEQ ID NO: 63205 - DNA, 900 bp, Acinetobacter baumannii; identical to SEQ ID NO: 49464

SEQ ID NO: 63206 - DNA, 675 bp, Acinetobacter baumannii
atgacaaaaatcttgatgattgaagatgattttatgattgcagaatcaacgatcacgttgctgcaatatcatcaatttgaggtggaatgggtcaataacggtttagatggtttggctcagttggcgaagactaaatttgatcttattcttttggatttaggattgcctatgatggatggtatgcaagttttaaagcagatccgtcaaagagcagcaacaccagtattaattatttctgctcgagatcaattacaaaaccgtgtcgatggtttaaatttgggtgcagatgattatttaattaaaccttatgagtttgatgagttgcttgcccgtattcatgcattactacgccgtagtggagtagaagctcaacttgcgagtcaagatcaactattagaaagtggtgatctggttttaaatgttgaacagcatattgcgacgtttaaaggccaacgcattgatttatcaaatcgtgaatgggcaatcttaattccacttatgactcacccaaataaaatcttttctaaagccaacttagaagataagttatatgattttgatagtgatgtgaccagtaatactattgaagtatatgttcaccatttaagagcgaagctgggtaaagattttattcgaaccatccgaggactgggctaccgtttggggcaatcataa

SEQ ID NO: 63207 - DNA, 741 bp, Acinetobacter baumannii; identical to SEQ ID NO: 63005

SEQ ID NO: 63208 - DNA, 537 bp, Acinetobacter baumannii; identical to SEQ ID NO: 50961

SEQ ID NO: 63209 - DNA, 417 bp, Acinetobacter baumannii
atgtctggccgttttggatttactgcctctgctgtttgtagtgtgactgacacaccgccgacattattggtctgtatgaaccaagctgcgagttcacatgcacatttcctagataacaaaatcttaaccgtaaatgtgttaggcgcgcatcacgaacatatttcaaaagcattttcatctaagctcacaccagaagaacgctttaaacatggcgaatggattgagttagaaacaggcgcacctgtgttggaagatgctttggtgagcttcgattgtgagattgagcaaattcaacaagtcggcacacacacgatttttatatgcccgattgtggcgattaaacaaagccaacatgaccaaagtttggtttactttaaccgtgcttatcaccaagtggggcagacagagacagtctaa

SEQ ID NO: 63210 - DNA, 378 bp, Acinetobacter baumannii
ttggcagatgaacttggggtgcatgtacgtcgttgggcacttgctcatactttagctcaaggtgatcatgctctagagattatgatgggtgaacaaggctacttacgacagtttgagaaaatatcaaaaccgtttctcaagactctagtcaagaagaactataagcttgaagaagagctcgtaagtcagtcaaaaggacgcatggatgaacttattaatgagttaaaccactatttaattgaaaaccaagcacgttatatggttggtgaccgcttaagcctcgctgatatttcagtatgttctatgcttgcacctttattagaaataaaaggtacaccatgggaaagggaagaagatggggaagtatcatccagataa

SEQ ID NO: 63211 - DNA, 273 bp, Acinetobacter baumannii
atgttagaccataaagaacttgattacgttgcacataatttgattcctggatttcaccgtgcttttgcacaacttaaaacaggtcaaaatttgttgccgattttaaaagatgaccatcgctggattgctgagtcgactaaaattgcgctttatctggatgatacttccccatcttcttccctttcccatggtgtaccttttatttctaataaaggtgcaagcatagaacatactgaaatatcagcgaggcttaagcggtcaccaaccatataa

SEQ ID NO: 63212 - DNA, 1155 bp, Acinetobacter baumannii
atgcagcttaatgaactcgctttatttcgtcagcaagcttttattgctggaaagtggtgcgatgcagaccatcaacaaacatccaaaattttaaatccggcgacattagagattattggtactgtcccaaatatgggcaaggctgaagccgagcgtgccattgaagctgccaaagaagcttggccgttatggaaaaataaaacagcaaaagatcgatcaattattttaaaaaaatggttcgatttaattatttcaaatgcagatgaattggcttttattttaacgagtgagcaaggaaagcccttagctgaagccaagggtgaaattttatatgctgccagttttattgaatggtttgccgaagaagcaaaacgagtgtatggagatattattccaagcccatatccagatgctcgtattgttgtaaataaacagcctattggcgtcgttgcagctattacgccgtggaattttcccgctgccatgattacgcgtaaggttgctccagccttggcggcaggttgtccttgcattgtaaaaccagcacctgaaacaccttttactgctttggctttagtggacttagctgtgcaagcgggtgtgcctgctgaaatctttagtgtgattacaggtgatgcagttcatattggggatgcgatttttgaaagtgatgtcgtacgcaagtttacttttacgggttcaacaccagtcggcaaaatgctgcttgagcgttcagcaaaaaccttaaaaaaagtttccttagaattgggtggcaatgcgccgtttattgtatttgatgatgccgatttagatgcagcaattgagggagcgctcattgctaaatttagaaatgcagggcaaacctgtgtgtgcgtcaatcgatttttagtgcaggctggcatttatgaaaaatttattgctgccctaagccaaaaaatccaaaactttaatattggtaatggattagaagcagggcacgacattgggccattaattaatgccaatgcggtgaaaaaagttgaagctcatattcaagatgcattagataaaaatggtcgtcttgtggttggtggtaaaaagcataaagcgggtgaattgttttttgaaccaacactgattgcagatgttaccgctgatatggatgtggcaacctaa

SEQ ID NO: 63213 - DNA, 1410 bp, Acinetobacter baumannii; identical to SEQ ID NO: 53809

SEQ ID NO: 63214 - DNA, 1233 bp, Acinetobacter baumannii; identical to SEQ ID NO: 53810

SEQ ID NO: 63215 - DNA, 885 bp, Acinetobacter baumannii; identical to SEQ ID NO: 53811

SEQ ID NO: 63216 - DNA, 861 bp, Acinetobacter baumannii; identical to SEQ ID NO: 53812

SEQ ID NO: 63217 - DNA, 444 bp, Acinetobacter baumannii; identical to SEQ ID NO: 53813

SEQ ID NO: 63218 - DNA, 1245 bp, Acinetobacter baumannii
  misc_feature (1228)..(1237): n is a, c, g, or t
atgaagttgcaaggttccaatatattgggacaggaacaaatagatttattaaccacacgcggattaaatttcgtatggtttccaaagcaacttgaaacgatatatcgttttcaatatcaaaatggtgcagcctatgagtttcgctatagagcacctattattttaatattatatttatttttaagctttggtatataccaagttttaccaaccgaacaagttttatcctggttaagctattattcttgggtaggcataattgttttaatcgcctggattttatcatttattaaaaaattaaatcagtggtttgattattatgtcggaattggttcttccgctgccgttgccataacatttatcttaattaacgttttagaaaatggccaagataatgtactttttcatgcagcaatgatgtatgccattgtgattatttatggtgcggtaggcatgcgtttttatactgccattattgcaggatgggtcggcggtcttattggtattttggtaagtacctatttgaacggagacatagactggaccttcttgaaccgtacatatacgtttagtagtttcttaggcatgacccttgcctatgctacggaccgtcagcaccgtgaaaactatttacaaaactgtatgattgagcttaaccgtattgaactcatgcaacaagctcaacaactgtcactgctttctcaacaagatgctttaaccgggcttgctaaccgacgttatcttgatgaaacacttgataatgaatggcgacgcgcattacgccatgagactcctcttactattatgatggttgatatagacttctttaaaccatataacgatagcttaggccatctcaagggtgatcagtgtttaaaagatattgcgactgcaatttcctcaattgctgctcgtagtggcgatttggtagcccgttatggcggtgaagaattcttacttctattcccaatgacaaatgcacaacaagccaaaattcaggccgaaagattaatgaatgcaattaagaaaattgctattgttcatccatgtagtagtgtttcaccatacgtaactattagtgttggcgtggcgaccacaattccacgtttaaatgattcaatttctgcttttgttagtcgtgctgatcatgcgctctatcaggcaaaaacaaatggccgcaatcaatatcaaattgctttgaatgaagaacaaattgtagatctaactnnnnnnnnnntaacttaa

SEQ ID NO: 63219 - DNA, 1566 bp, Acinetobacter baumannii
atgttagatcaaaacattaaaactcaattaaaagcttacctagaacgtttagaaagtccaatcgaattagttgctgctttagatgaatcagataaagctgctcaaattaaagaattagtaactgaaatcgctgagctttctgacaaggtaacagcccgttttgacggtaacaatacacgtcgtccaagctttggtgtggctaaagcaggtgaacaaccacgtgtgttcttcgcaggcttaccaatgggccatgagtttacgtctttgatcttggctttgttacaagtgtctggctatgcacctaaagtgtcggatgaagttttaaatcagattaaaggcttaaacctcaaagctaactttgatgtattcgtatcattaagctgtcataactgtccggacgtggtacaggcgcttaacctgattgccatttataatccgaacaccacggcaaccatgattgatggtgcattcttccaagacgaagtggaacaacgcaaaatcatggctgtaccgatggtattccaggacaatgaacacattggtcaaggtcgtatgacccttgaagagattgtggcaaaacttgataccaactcagctgaaaaagacgcagcagcactcaatgccaaagatgcgtttgatgtattggtgattggtggtggacctgcgggtgcaacagctgcaatctatgcggcacgtaaaggcattaacacaggtatcgtggctgaacgctttggtggtcaggtcatggataccatggacattgaaaacttcacttctgtgcaaaagactcaaggtcctaagtttgctgccgagatggaagcacatgttcgtgaatacgatgtggatatcatgaacctgcaacgtgtcagcaaaatcacgggtgcagaccaaacagcaaatggcttggttgaagttgaacttgaaaacggtgcaaaacttgaatcgaaaactgtgatcctttcaacaggggcacgttggagagaaatgaatgtaccgggtgaagctgaataccgtacccgtggtgtagcgtactgtccacactgtgatggtccattgttcaaaggcaaacgtgttgccgtgattggtggcggtaactcaggtgttgaagcggcgattgaccttgctgggattgttgagcatgtaactctggttgagtttgacactaaacttcgtgctgaccaagtcttgcaaaacaagttaaacagcttgccaaacaccactgtgattatgaatgcattaagcacagaagtattgggtgacggttcacaagtgactggtcttaaatataaagaccgtgcgactgatgaagagcatgtggtcgagcttgcagggatctttgtacagattggtttacttccaaacactgacttcttaaaagacagtgaggttgagttaaccaaccgtggtgagatcattgtcaatgaccgcaacgaaaccaatgtaaaaggtgtatttgctgcgggtgactgtactactgtaccgtacaagcagatcattattgctacaggtgaaggcgctaaagcatcactctctgcgtttgattacatcattcgttctgggcagtaa

SEQ ID NO: 63220 - DNA, 465 bp, Acinetobacter baumannii; identical to SEQ ID NO: 50031

SEQ ID NO: 63221 - DNA, 273 bp, Acinetobacter baumannii
atgctttatgcctgtattttatttttattatttggaactttatttggtaatttaaacgcgattgcaatggaacctatgggacatgtagctggtatggcatcagctattattggtgcagcttcgtccgtattgtcacttattcttgcctctattattgggcaattatataacggcacattaattccaatgacttgcggttttgtcattttatgtggtttagcatttatgatgaccgtatatgagaacagatatttaaagaaatcgaatgcttag

SEQ ID NO: 63222 - DNA, 579 bp, Acinetobacter baumannii
ttgctcagacatggagaaagccagtatagccataccttacgtggccatttagatgatgagttaacagcaaaaggttggcagcaaatgcaggcaaccattgagcaagttacagaccagacatgggatgtcattgtaagctcttcattaaaacgttgtgcttgttttgccgagcaactggccaaaacagcagaactccctttacttgtaaatcatgacttaaaagaaatgtattttggtgaatgggaaggcgtctcaactcagcaaatttatgaaacctcacccgaattattggcaaacttttggcaaaaaccaagtcaatattgtccaccttgcgcagaaacattaaaccagtttcaaacaagggttcttaaaggttttcagaatttgctggagcagatgcaaaagcaaaacttacagcatgctttagttattactcatggaggtgtgattaagctattggcttgtttagccagacaacagcctctagatgacttacttaaaatgccggcagagcttggaaaattatattcactcgaattttctgaaacagatggtcaagtaacttttaagttaagatag

SEQ ID NO: 63223 - DNA, 723 bp, Acinetobacter baumannii
  misc_feature (697)..(706): n is a, c, g, or t
atgaatattttatttaaaacaactgtgcttgcagcatcattattgctcgcggcttgtaataacaatgatgatcaagaagctcaaactgcaccatctacaaacccatcaaaatattatcaaacgaaaacgccttaccaacctcaacaagacttaaaaagctatgaacaagcgccgactgggttccagccagtttttacagagttagtggcacgtcacggttcgagaggtttatcaagtctgaaatatgatttagcactttataatttatggaaacaggcgaaagctgaaaatgccttaacgccactaggtgagcaattaggtgcagatttagaagcaatgatgaaagctaatattttgttaggttatggtgttgaagggatccgtcaatacggttatggaaatgaaaccatgactggtattttagaacaccgcggtattgccgatcgattattacagcgcttaccaactcttttaaatgctcaggcgtctatattggtacaaagttctggagtagaccgtgcggtagatagtgctaaatttttcactgctgaactcattaaacaacaaccccaactgaaagataaaattgttccattgtcttataccaatttatcgagtgaaagcgtgccaagtattgaagatggtggcgttgatcgttttaaactttattttcatagcttgaatgcagacgaagacnnnnnnnnnncaaccactgagtgttag

SEQ ID NO: 63224 - DNA, 174 bp, Acinetobacter baumannii
atgaaagcaattacatcaatattgcaagcttgtgtatataagcttgtaaccgtaccagtaggtattgcttataaaacgactaaaggtgtagtgaagggtacagctgctgttgtaggggctgtaattcctgatggtgatgatgacgataaaaaagaaaaagaatctgaggaatag

SEQ ID NO: 63225 - DNA, 372 bp, Acinetobacter baumannii
atgggcgaaaaagtcaaaacttatgcagtcagactagatccacaagtagcagaattctacgatcaattggctaattcagaaggaatcagaaccagtaaattgttcagtaaaattttgactaatgattttcaatctattgctgttaagcagcaggcagatcgtattgaagatctggtgaatcgattagaaaagcgaatagatgattttgaggaagataataatttttctgaaaaatactatgaagatttttctggactctatttcatgatgttatggacattaatgaaaaatggggcttctaaagatgaggttcgaatgatgcaagctaaaggttattcatatgcagatgataactataagagggtaaagtag

SEQ ID NO: 63226 - DNA, 312 bp, Acinetobacter baumannii
atgcaacaaattgaccgtatgcaaacactcattgagctgaaaagtgttgcacctgccacagcatcaccacaacaagatgctacggcatgcgacactgacatgcaacagcatgcgacaccacaacaagacaatgataataaaaagaatcatgaattaaatattgcagaaaatgtggcagtgccacagcaagaaaatacggcataccacacccaaacgctacagcatgccacgttgcaaaatgtggcagtgccacaacacaaaaaacgtggcttatttggccgtgtgctgaatgctgtttttgataatgactaa

SEQ ID NO: 63227 - DNA, 846 bp, Acinetobacter baumannii
atgagtaacgcagtacccgccgagatttcggtacagctatcactggctctcaacgccatcgagcgtcatctggaatcaacgttgctggccgtgcatttgtacggctctgcactggacggtggcctgaagccatacagtgatattgatttgctggttactgtggctgcacagctcgatgagactgtccgacaagccctggtcgtagatctcttggaaatttctgcctcccctggccaaagtgaggctctccgcgccttggaagttaccatcgtcgtgcatggtgatgttgtcccttggcgttatccggccagacgggaactgcaattcggggagtggcagcgtaaggacattcttgcgggcatcttcgagcccgccacaaccgatgttgatctggctattctgctaactaaagtaaggcagcatagccttgcattggcaggttcggccgcagaggatttctttaacccagttccggaaggcgatctattcaaggcattgagcgacactctgaaactatggaattcgcagccggattgggaaggcgatgagcggaatgtagtgcttaccttgtctcgcatttggtacagcgcagcaaccggcaagatcgcaccgaaggatatcgttgccaactgggcaattgagcgtctgccagatcaacataagcccgtactgcttgaagcccggcaggcttatcttggacaaggagaagattgcttggcctcacgcgcggatcagttggcggcgttcgttcacttcgtgaaacatgaagccactaaattgcttggtgccatgccagtgatgtctaacaattcattcaagccgaacccgcttcgcgggtcggcttaa

SEQ ID NO: 63228 - DNA, 294 bp, Acinetobacter baumannii
atgcagcgtgtcgtcgggccacatagaacacctagaagttcacaagaaaggtcggaaatggaacgaagtagcaatgaagtcagtaatccagttgctggcaattttgtattcccatcgaacgccacgtttggtatgggagatcgcgtgcgcaagaaatccggcgccgcctggcaaggtcagattgtcgggtggtactgcacaaatttgacccccgaaggctacgccgtcgagtctgaggctcacccaggctcagtacagatttatcctgttgcggcgcttgaacgcatcaactga

SEQ ID NO: 63229 - DNA, 1068 bp, Acinetobacter baumannii
atgagcgtatcggaaatccgaccgattgccattgaggacgaactcaagcattcatatttagattacgcaatgagtgtaatcgtatctcgtgcattgccggatgtgagagacggtcttaaacctgttcaccgtcgtgtgctttatgccatgcacgaattgggcaatgactataacaaagcctacaagaaatctgctcgtgtcgttggggacgtaatcggtaaatatcacccgcatggtgacttagctgtttatgaaaccattgttcgtatggctcaagactttagcttacgttatttattggttgatggtcagggtaacttcggttcgatcgatggtgatagcgctgcggcaatgcgttataccgaagtccgtatgactaagctggcacatgagcttcttgcagatttagaaaaagacacagttgactgggaagataactacgacggttcggaacgtatccctgaagtacttccgacacgtgttccaaacttgttaattaacggtgctgctggtattgctgtaggtatggcaactaacatggcaccacacaacatgacagaagttgtgaatgcttgtttggcttatgctgacaatccgaatatctcaattgaaggattgatggaatacattactggtcctgacttccctacaggtggtattatctacggtaaatcaggtattgttgatgcctaccgtaccggtaaaggtcgtttacacattcgtggtaaataccatttcgaagaagatgaaaagacaggtcgtacaaccatcgtctttactgaaattccatatcaagtaaacaaagcaagagttattgaacgtattgccgagttagtaaaagagaaaaagcttgaaggtatttcagaacttcgtgatgagtctgataaagaaggtatgcgtattgcaattgacttgaaacgcggtgaaaacgcagaagtcgttgtaaataacttattcttaaatacccagcttgaaaactcattcagcatcaacatggtttgtctagacgccgtaccatgttcgaattacgtaaagcacgtgaacgtggtcatatcttggaaggcttga

SEQ ID NO: 63230 - DNA, 291 bp, Acinetobacter baumannii
atgcaaacagcaattgtccgacatattttagtcaaagataaagacttagccgaacagctgaaaaagaagctacaaagtggtgctgactttgccaaacttgccaagcaatactccacctgtaattcggcaaaacgtggtggtgaacttggtgaagtcaaaaaagggcaattggtgcctgtcattgacaaagtagtttttacagctgctgaacgtgtgttacaaggtccaatcaaaagccagtttggctatcatctcttagaagttaaattcagaatgactggcttacgttga

SEQ ID NO: 63231 - DNA, 2412 bp, Acinetobacter baumannii
  misc_feature (2391)..(2400): n is a, c, g, or t
ttgcaagctcagctttacgatgcatttaaaacaaatgtaaatgcaatttctattagtagtgccgaggcaagtaccgaaaaaagtaaatataaacaaagtttaattaatactttgcaaacagggcaagtgaaaattcaggttaatggtatatccttgacaactggtaatattagttctgtgttagatgatttagctattaattctaattttactgtgaagacaaataacgtaatacttgacacagtgataagacaagttattgttggatacctctattatcataatataatagtagcaaagtctaatgaagtattgaatggaatttactcaacagtatcacttaatacatcttcatatgttgactcaagacaaagagtgattagtttatatcttccaggccaaaagaatattattttttatcccgttaatgagcgtgtaactggattccctaagtctgctaaatatgtatcccaagataactggtttattagctgtgcggaaagtggtaaagactttgttgtacgatctaataatggtgttacttactatttccctaattctaatcgagaaaatcaaacaggatttacttctttttttgcaaatgagtatattcctggaaaagtaactgtctatgcttcaaaaatagagaatcaatataaagaggcttatattttaaactattttagtaagcaggctaatactttaatttatagtgggtttaatacttctaataagttttttctaaaatctgttcaacatacattagatgataagcttataaattcaacctcaccagaaattagaattgattatgtaaaaagattagatacaacagaaaatacagatgaaagtcaatttgatagtgtaaaaggagatatcctcttaaagaaaatttcccgattcatcaatggtggctataaagattgggtttcttatacctattcatctggtgctaaagcaggtacgacttataagttaaatgattcaattctattaaatggtaatattggtagttttcaggatgaaaacgctgcgctcttttatttagatacagtaagttatatatctggagataaagtatcttatgcatatggagggccatatcgtattgtgggtaatataagtccatccgaaataggtggtataaccgcacaagattttctttggttttatagtgatttgacagcaattaagtattataagaactctaagagtggcttagttaatgctctctctgtggattggacttatgagttggtaaatagctcaagaccaggttttacagaagaaaagtcttttaaagttacaagttctaaatactctatagcgaatgctaattcatatgatgtgacttatagctatagccgagatgactctacacatgagcaaacaacagttgttactagcaaagattctgtaactggactttcaaaggtttatacttatgtaatgcatgcatttttaggtggtggtgctgagaacttcttacatgggcttttgaaaaaaattacgataggtgatcgagaagaaagttatacatggacaaccctatctctaattgggcaaaaacctaagactatagatgataactatactgattatgaggatgttcgtttagtccgtcttgctagtaaagcaattagtcattttggtgagtataaaactacctatagtaactttgaccaatatgggaatgcacaatcagtccagatgactggattgaatggttcaagtactgttcaatttccagcaacaacggctacatattttaatgctaatgctgcaagtgatgatgtaaatacaggaaatttaccttggattatcggattaccaaaaaaaaaaatatcaggtagttttacgttacaaactactgaatatgatgcacaaggagcaatacgtagtaatactcaagctggtcgtgttaccaaatataaatatgaaacggtatcattctcaacatgtcttggaaatttagcgagctttcaatggtcaaagtttgttagttgcttatcaaattatgtattaggtgatcaacatgtgggtttaccaattgaagttgatgttggaaatggtaaagaaattactcaatttgctggttacaaaaggggtattccaactcaagttaaacttgcaaatggggcgacagaaacaaatattgtagatgactttggaaatataactcaacatactgatgcagatggggttatttcaagaaaacaatatgatgatgctggccgattatatatagatacaccaattgttgggttaaattactctacattcacttatgatggtttaactgtttctagggttgtaactggtggcgggcaactgagccgaatagaaaaatataatggtgatggtttactgatttcgagtgaggataagatnnnnnnnnnnatctattattaa

SEQ ID NO: 63232 - DNA, 1191 bp, Acinetobacter baumannii
  misc_feature (1132)..(1141): n is a, c, g, or t
atgagtaaaaatatttatgatgttgctgtaattggagcaggatgtgcaggtgtcgttgcagcacgggatttaagtagtgcaggtcataaggttattttattagaggcacgtgaccgtattggtggccgaacctatacaggtgaagcatttggccgacaagttgaatttggaggtgcttatgcacactggacgcaatcttatatctggagagaattacagcgctatagtattggattaaatcctcctacagaggttgataaagtagtctggtttgctgatggcaaattacacaccggtacacaagttgaatatgcaactcttattgaacccttattaacagctttctttaatgacgctcgtcaatggttccctcttccatatgatatctctgttattgataccagtgatattgaacgacaaacattaagagatcgtcttgatgccttaaatttatcaacttatgaacgtgacgttttagacggcttgttatcaacacttgttcactcttgggatgagcaaggaatcgcacagctcttattctgggcagctacctattttggaaactggggggcgttctttgaagtagcaggctcttggccaattgcaggtggcacacaaaaactagtaagagctattcataatgattcaagtgctgaattacggctttccacaccagttacaaacatagatgatcacggtgagcaagttgttattaccacgcaatctggcgaaaagatcatggcaaaaaaagcactggttgcccttcctttgaatgttatagctgacgtcaaaattacaccagacgtaaaaaaacctgttcaggacatgattgacgcaaagcaccccatgcagacagctaaattatgggtattggcacgtggtaaattcgaaccctttgttgcatttgccccagttgagcaaaacccgattaataccgttcgcgttgaatatgaacatggagatgactcaattttagtctgttttatttcagacgagtcaacaatagataccaatgatattgaagctgttcaaaaagctttacagatgtttaagcccgatattgaagtgcttgacgtcgtatcacataactggacaaaagatccttatgcacaagggacatgggtacactatnnnnnnnnnngtacactatcgtcctgggcatttgacggatgcggctccattcatgcgtaa

SEQ ID NO: 63233 - DNA, 630 bp, Acinetobacter baumannii
gtgaaaaagattcgtactcttgccgaacagcaaggacgctcagcgaacgatattaaagtgtttgtcggcataactgttgttgtggccgaaacacatgatctggctgtacaaaaacttaatgaatatcgtcagtatgcgagccctgaagcaggcttagcgcattatgcgagttcaacaggcattgacttaagtaagtttgctgacgatgaagcgattccttaccaaaaaagtaacagcattgtttcgattaccgaaaagtttaaagaacagcaaatcacaaaaaatgacttaaaagctcagcatgttttaggtggtcgttatccccttattgtgggtagtggcgaagaggttgctgaatacttaattcatcttttagatgagactgatattgatggctttaatttgacacgtaccgttgcccctgagtctcaccatgactttatacgcttggtcattccagagctacaacaacgtggtcgctataaaactgcatataaaacgggttcactacggaacaaaatttttaatcggggtgatcacttaccagaacagcaccctgttcaagcgttccgatgtagtccctataacaacagcaaaaacttaacaaaaattgaagaaataaccgcttaa

SEQ ID NO: 63234 - DNA, 267 bp, Acinetobacter baumannii
atgtctaattctctatctaaaacgacggcatacgtccaagtcattcaaaatgatcaacaagcaattaatgctgcttatcaagtggctgattttgctttagagggtcgtaatacacgtgatcaacaacgcttattaccgcatgagcaaatcgaaagctttagccaaaaaggcttaggcggaattcgtattgcaaaaaaatacggcggtgctttcgtttccaataaaacactggcacaagttttccgtattttagttaaacctgattga

SEQ ID NO: 63235 - DNA, 615 bp, Acinetobacter baumannii
atgacttcagaggcaatgtctcaatttgctcaagaagttttattgggattagctcatgatgctgatcagacagctcaatttccagaaagcctttggcaatatgtagaagatttaggattaaactattacgctcttccagaagcactaggtggtgtcgccgctgaacaaaatattgtaagtaacttattgattgctgaaaaactagctgaaggtgattttagtcttacagcagggctcttaagtacgtttagtgttattaatgccattacacgttggggttctactgaagttcagtcaatgtatttaccttgctttgcagaagactccgatattaccgccactttcgctgtacaagaagctactccagcatttaacccttatgttttaaaaacaaaagcttctcttgaaaatgatcaatattttatagagggcgaaaaaacattggtcattttaggagatttggctgatgtgttcttggtgagtgcagactttaatggcaagccggatgtatttgtagtacaagctggcgataccatttctattaaaagtactcctgctatgggtctcaaagcagcagagacagctacattaaaattcagtcatacaccacattaa

SEQ ID NO: 63236 - DNA, 219 bp, Acinetobacter baumannii
atgcttttagtagagcggttaattgcttttttaaaagctcagggcgtcttaaagttaaacggattcctcttaaacctaagaatgggttttcttcttcagcaattggtaagtaaggtaaaggtttatcaccacctacgtctaatgtacgtaccacaagcgggcgacctgcaagtgcatctaatacaactcggtaatcagcttcttgaacagcctcgttag

SEQ ID NO: 63237 - DNA, 336 bp, Acinetobacter baumannii
ttgaaagcaattattattgctactggttcagaagtttctttggcaatggaagcttatgctcaacttgaaggtgttcgtgttgtttctatgccatgtgcagaagagttcatgaaacaagatgctgcatatcgtgaagcagtattaccagctcatattcgtgcacgtgttgctgtagaagctgctcacgttgactactggtggaagtttgttggtctggatggcaaagtaatcggtatgacaacttatggtgagtcagcaccagcaaaagacttgttccaattcttcggtattacaactgaggctgtagttgctgcggtgaaagagttaactgcttaa

SEQ ID NO: 63238 - DNA, 417 bp, Acinetobacter baumannii
  misc_feature (401)..(410): n is a, c, g, or t
atgacttcaatgtcgaacactacccaaaagcattttattgttgagcagtttcctttaccgacttgggtcagtgatgaaaaaggcttaattttatactgcaatacggagtgtacaaagtactggcgcgatacttctcctccattgtttcaacaatggctagatttcgtgtaccctgccgatttagaagaagttaaaaacaaatggttagatgcgatacgactccgatcaagaattgaatttaaatgtcgtcttttgcataaaacccattattatcgatggtgtaaaatttctattcaattgtcgaaataccatgaatcttctcaagaaaatgaatggtttattagttttctagatattgaccaagatatacaagagcagcaaagcttacgaaaagatatcgnnnnnnnnnncatatga

SEQ ID NO: 63239 - DNA, 405 bp, Acinetobacter baumannii
atgaattttgatactttaatggaaacacttccctataaacaaactggtttggggactgaagattgtcatccgcgttttatagggtgtttacttcgtttaggtgatctatttgatttagatgacaaccgcttttgccctgttatggcaaagcacgtcagcaatatgccctctgtaagtaaacatcatcatgataagcatttatcattgcgtgaatttcaacttgataaacgaacagtaaagcttgtcgcagaatgtcctgatgaaatgtcttatgtcgaaactcaaaattggtttggtaatagttcagttctgggtgatgtaatacctagatctttaaagggatcttcaacaatcttgccaactcgcttgtcatgcctgcgtcgaaaccactcagcaactaattga

SEQ ID NO: 63240 - DNA, 273 bp, Acinetobacter baumannii
  misc_feature (216)..(225): n is a, c, g, or t
ttgtttaatgatgatgtaaaaaatggcgatcgtaatgcttcatctaatattcaattagcgaacggagatactgtttgggttaaagtacgtgactatcatgcggctggtgttaaaccacttgcccaagcaatgaatgaagtaaaagctaaagtaattgatgagaaagcacgtaaagcagctcaagcgaaaatcgctacaaagctgacagaattcaannnnnnnnnngtgcagcatttagtgttcctgcgccaaaaccaggtatgtggtctgtaa

SEQ ID NO: 63241 - DNA, 885 bp, Acinetobacter baumannii
atgcctgttgtagtgaaaaaacgattattagacttattacaagataatcaacaaaattattatgaattgtttgtttttttccttgatcctgatgtttctagctttgagaaagagaaaaaggctagagattttcttgttaaagagatagataaactagagatgaaggaaatagattttccttcggatatcaatttgattaaggcatggtgtgaaaacgataataaaaaaaattgtcaggaatttcaggcatatttaaatcgtagacaatctggtcaagatagagagtattttaagaacgtcgctcaggcatttgagtttttaataaaggtgtctccaaccaaaaaagtagacggtgcatggctatatagctcagtgcattattggaatgatcctatttttcatgaattaattattacttatctcgaagagcttgggttaggtgagccaaaagcaaaccatgtctgtatctatgatgaccttttacgcagtctagggctagacagtttcgatctgcttttagaagacgagtattatcatcaagcagttgtgcagcttgctctgggttatgcacctcctgagtttattcccgagattgtgggttttaatttaggctatgagcagttaccactgcatcttttaatttcgaattatgagcttgctgaattaggtattgattctaaatactttaatcttcatatcactatcgacaatattgacaatggtcatgcctataaagccattaaagttattgaagatatttataataaatatagagataaagaactcttcttgaccaagctaaaacgtggttttgcccttaataatcatggggtatcctcttcaaacattataaaaaatttctctgtacacgataaaaatagataa

SEQ ID NO: 63242 - DNA, 255 bp, Acinetobacter baumannii
  misc_feature (234)..(243): n is a, c, g, or t
atggatttatcgaagaatccccctccaagctattatgatgcatcactgaatgatgaaacattaagcttttttgctaaccatatgctagaagttttttcacaaactactcaagatcttagtagaaaagatgatgataattacactatcagttgtgcaatttttggaagatgccgtaataggtttgctcgtgaaattcgtagtggcaatgccccatctccaacatatttagaagannnnnnnnnnttcttcaaataa

SEQ ID NO: 63243 - DNA, 624 bp, Acinetobacter baumannii
atgaatatacatgtagaaatagacacacattggtgtctagaacaactattacaagaaggccgtatcactgaacgagataagttacttgtacaaaccacaaataggcaaaaagatcagttgaaatggcatccattacagtggattgcgcattttaatttaaaagaccaacatcatgtacaagcacatttaagtttaaaccgtctctgccaatggtttgcagatcgggcgcaattacctttatttgtgattgatcctttaaaggcagatgtgagtgctttaactcaagtcatgtcgcaagagtttgcgatccgtaatcatattttagctgtagaagtccatgcggaccgaattgtgataggaacagaccagccttttcaaacagactggctaaataatttagagaagagtttagcacccaaaaaaattgaacgggtatttctcaaccccgagcaattacaacgttatttacgagaatattatcaagtcagccgagcagtaaactcagctcaaaaagatgcggctcataaccgtgataacaaaggtgtagaggcgcttttacaacttggtgatagccaaaaccctgatgccaatgatcagcatattgtgaaattgcgcgtcctttaa

SEQ ID NO: 63244 - DNA, 921 bp, Acinetobacter baumannii; identical to SEQ ID NO: 45636

SEQ ID NO: 63245 - DNA, 849 bp, Acinetobacter baumannii; identical to SEQ ID NO: 45840

SEQ ID NO: 63246 - DNA, 498 bp, Acinetobacter baumannii
atgatttcagatcaattgcttaaggtggaagaaacagatttaaacttttcaactttgaaaaatgaaaaacctttaattttaaatagggatgttagtgtattaattcttcctagtgttagacagaatgatgcatttcatactggtacaattgatattttttcttatttacaagaagaattaggtgaaaatgaagttgaactttttgcttttgatgaggagtatcaagagttagcattacattcaaaagcacattggttaggtgtttttttagtagctcaagtagctgtaccaatattcacaaatgttatgagtgattatatttcaaatgaattgcaggctaaaagtgatgatgaaatagaggttaatattataattgaaaagaacaacgataagaatatcaaggtagcctatcgtggtaaagctgagcatattaatagtgttctagataaagttaatgagttgagtagagacaatgaagttaatagacatgctaaataa

SEQ ID NO: 63247 - DNA, 384 bp, Acinetobacter baumannii
gtgcaaaaaaatgaaaccacagcggttgatcaattcgcagagctattgggtgtagaagtactgcatcgcagttttgatgaagcgcgttgcaagcttaatgtaaaagacgaacacatgaatgccttgggcggtgtacatggtggagtcatattttctttagccgatatcgcttttgcgatggcgtgtaatgcaggggatgcgccatatactggcctacaagctgatattcgctatatgagcggtgcgaaagatagggtgttatttgcaacggcaaccaaggtcggaagtagtaaaaaatttgcgcattatgaagtgttgataacagacggtttgaataatagagtcgctttgtttacatctacgtgttacaggcttgcgccgtga

SEQ ID NO: 63248 - DNA, 606 bp, Acinetobacter baumannii
atgccttgttatagtattgacggtgttattccagtcgttagcccagacgcttttgtacacccaaccgctgttttaattggtgatgtgattattgaagcgggcgtatatgtaggaccatttgcttcattgcgtgccgattttggtcgtattcatattaagcaaaatgccaatatacaagatagctgcaccgtacatggttttccgcaaagcgtaactttagttgaggaaatggggcacattgggcatggcacaactttgcatggctgccgcattggtaaaaatgttttggttggcatgaacagcgtaattttggactatgccgaaattggtgaaaacactattattggtgcaaatagcttggtcaaaaccaaagatataattccggcaaatgtactggcaatgggtagccctgccaaggttgcacgtgatttatcagaacaagaaaaaaagtggaaaaccagaggcacgcaagaatacattgaacttgcacagcgctgcttaaactcaatgcaagaagttcagcctctaacttcagagttggatgaccgcctgacctataaggactttagttcttcaaactatcagattaaacaagatagcgtttaa

SEQ ID NO: 63249 - DNA, 966 bp, Acinetobacter baumannii
atgagtatgagtgcaaaaatacagcaaataattgattctgttgtaaagaatgaaaccttaagtggaacttcgcttatttcgacaatttttggagattcagtacttcatcggggtggaaatatcagtcttgcaagcctgattcagttattagagctgtttggttttaatgaccgtgctgtaagaacctctgtttttcgtttagttaaaaatgattggttatgttcagataaaatcggcagaaccagtttttatcgaattaccgattcgagccgttcgacttatttgcaggccgagcaacgcatttataacgaccagatgaaagagtgggaccattattgggatcttattctgatgtctagcctcgatactgaaaataaagcgttgttaaagaaagaactcgaatggttaggatttgccaatatttctacaaacctaatggcgtatccgggttgtaaccgtattgagctgcaacgcttgttggttgacttaaatatgagtgagcaagtggtggtgtttaaagccgaaacgttgcagctctttaataactcggtcgataccattggacgtatgctcagaaccaactggcccatcgatgaattacgccaaagatatctacagtttctcgatatttttagagaaattggcgtgttgctgatgcaggaaaacgaacaactcgaacctgttcaggcctttcaaattcgaactttgctgattcattattatcgacggattttattgaaagaccctgcattaccgcttgagttgttgccaactgactggcctgcgattagtgcgcgaacgttatcaatgaatatttataaaaaagtatttgaacctgcggatgaatacttcttgtctgttgccgcaacagcagaaggaccaatgccaaatgccacagcacattattggcgccgtttcggaggtttggtggcgacaaatgagaggttaaatcatgccttgttatag

SEQ ID NO: 63250 - DNA, 1290 bp, Acinetobacter baumannii
atggacagccttacaatggataatgttgagcaattaacacttgcagagcttcgagagctgcaaactaaacggttaaaacaaaccctgacttttgtatatgaaaatagtccggtctataagaaaaagttcgatgaagcgggtgtgcatcctgacgacttcgtaactttagacgatctggcgaagtttccatttaccaccaaacaggatttaagagacaactatccgtttggtatgtttgccgtaccgcaagagcaaattgtgcgtttacatgcatcatctggtacaacgggtaaaccgactgtggtgggttatacccaaaaagatattaatacttggtcggacattgttgcgcgttgcttacgcatggcgggtttaaccgcgaaagatatggttcaggtggcttatggctatggactatttacaggtggtctaggtgcacattatggtgccgagcgcttaggtgcaacggttattccaatgtctggcggacaaactgaaaagcaagttcagcttattcaagactttaaaccgactgcaattatggttacgccatcatattgcgtgagtattattgaaaaactcgaacaacaatttggtactgcacgtaatacgtctttaaaagtcggtatttttggtgccgagccgtggaccaacgaactgcgccgtgaaattgaagaacgtctcaatattaaagcactcgatatttatggtttgtctgaggtgatgggtccgggtgttgcgatgcagtgcttaggtgaaggcgaagggctaaccatttgggaagatcatttctacccagaaattattaaccctgaaacaggtgaagtttgtaaagatggtgaacttggcgagctagtctttaccaccattaccaaagaaggcttgccgattattcgttaccgtactcgtgatttgacccgcttactaccgggtgaaaatctggcaatgcgtaagatggataaaattgtgggccgtagcgacgacatgctgattattcgcggtgtgaacgttttcccgacccaaattgaagagcaaattttgcaagttccacatttagttccaaattatgaaattttggtgactaaaaaaggccatatggatactttgcatattcgtacagagatgtgtcataactgtactatacaggccaatcaacttgctcaggagttgatgaaacgcattaaaaccatgattgggattagcgttactgtagaagttgtgacagaagcgaccttacctcgttcggaaggtaaggcaaagcgggtaatcgatatgcgtcagattgcttaa

SEQ ID NO: 63251 - DNA, 1209 bp, Acinetobacter baumannii
atggaagacgttttaatttgcgattttattcgtaccccaattggacgatatgcaggtgccctaagtgctgtacgtgcagatgatttagctgcattacccatcaaatatttaaaagataaacacccgaacctaccgtggaatacggtagacgaagtatttttgggatgtgctaaccaagcaggtgaagacaaccgtaacgttgcacgtatggcaacactgttagcaggcttacctgatacagtgccagccatgaccgtcaatcgcttatgcgcttcgggtttagatgcagtaggccttgcagcacgctcaattaaagctggtgaagcacaatttgtgttggcaggtggtgttgagtcgatgagccgtgcgccatttgtacaagctaaaccgaccgaagcgtttagccgtacacctgaaatttatgacaccaccattggctggcgctttgtaaataagcaacttaaagcgcaatacggcaccgacagcatgcccgaaacagccgaaaatgtagctgaaaaatatcagattagtcgtgaagaccaagatgcgtttgcattgcgtagccaacaaaaaaccgctgcggcacaacaaaacggtttctttaacgatgagattttgcctgtcgagattacagaccgtaagaaaaacgtgaacgttgttaatcgagacgaacatccgcgtgaaacgacacttgaagcactcgctaaactaaaagcgccgtttaaaaaagaaggtggttcggtgactgccggaaatgcctctggtgtaaatgacggcgctgcatgtgtgttaattaccaaccgtgaatttgcagatacacatggtttaaaaccattagcacgtgtaattggcattgcaagtgcaggggttgaacccaaatatatgggtataggtcctgttccggctgtgcagaaaattttaaagcaaacaggtttaacgctagatcagatggatgtgattgagctgaatgaagcattcgcagcccaatctttggcttgtatgcgtgaacttggtctaaaagatgacgatgaacgcgttaacccaaatggcggtgcgattgcactcggacatccgctcggtatgagtggtacacgtttagtgattaccgcaacacgtgagctaaaaaaacgaggtggacgctatgcactttgcacgatgtgtgtaggtgttggacaaggtgtcgcactgattttggaaaacttaaattaa

SEQ ID NO: 63252 - DNA, 1539 bp, Acinetobacter baumannii
atgacagatttagacttatctcgtgcccgaattgccgtcattggttctggcactatgggcatcggcattgcccagttagccatcgttaatggacacacgaccgttttatatgatctagatgctcaaaaagcgcaacaagccgttcaaggtttagggcagacgtttaaaaagctggttgaaaagagcaagctcacagagcagcaagctgatgaagccttagcgcgtttaacagtggtcaatcaaattgaagcgctgcgtgatgctgacttggtgattgaagcagtcgttgagaaaaaagaagttaaacagtctttatttaagcaacttgctgaaatttgtagtgcgcaaaccatttttgcaagcaatacatcttcaatttcagtgactgcaatttcggcgggcattactcaccctgagcgggtagtgggtttacacttttttaaccctgcaccagtcatgaaactggttgaaattgtacaaggcttaaaaaccccaaacagcttatgtttggctttaaaaaacttgatgctgaattggaagaaaattcctgtactcaccaagtcgactcccggttttattgttaaccgaattgcacggccgttttatgcggaaggctttagagcactgcaagaacaagtcaccagctatgaccagctagattatgccttaaagcaatgtggcggttttgcgatggggccttgtgaacttactgacctgattgggcaagatgttaacttttcggtaacccaaagcgtttaccaagagttcttttacgagccacgctatcgtccaagcctcgttcaaaaagaattggtcgatgcaggtgcttgggggcgtaagtcaaaacaaggcttttatacctataacgaaaaaaatcaataccagacatttcagcctcaagctgtggttgccaaaccagtcgatgcccatattcagctaaaagggacttggtctcagctacctgcttttttaacgcgtttaggtttaaaaagcggatctgcgagtgatgacaatatccttcaaattgatgatatcgacttacgtttaagccaaggtgagtcagccaatattcattacctaagccgtaaagtggttttaatggattggcaccatgattttgagcaggcggaggctttagtactcagtcataacgagctttgtgaaacaaatgatctggctaaagttgaggcttactttgcacagtttggtatgagcgtgatgtggattaaagaccatccggcactgttaaccttacgtaccatcgctttactcattaatgaagcctgcgaagcaagtttacatggagttgcgagtctggaagatattgataatgccatgaaatatggagtgaattatcctaaaggcccttaccagtggttgacacaaatgggtggcgcttatgtgctccaaaccttaaataacttatatgcactgtatggagaggaaaaatatcgcgcgagtatctacctcaagcaatatgtagcgaaaacccaaaacattgctactcaatattcacgtgatatgaccgaatttgcataa

SEQ ID NO: 63253 - DNA, 792 bp, Acinetobacter baumannii
atggactatcaaaatattattgctgaagaaaaaaatggtgttggctacctgacatttaaccgcccaaaagcactgaatagctttaacgttgatatgcaccgtgaagtggccgaggttttaagccagtggactaaaaatccagatgttcgatgtgttgtgattagtggcgaaggccgcggcttctgtgcagggcaagacttaggcgaccgtgtagtagacccaaatgctgaagctccagatttaggatattccattgaaacttactataatccgctcattaaaacgattgtaaatatgccaaagcctgtcatttgcgcggtaaatggcgtggcagcaggtgcaggggcaaatattgcattggcatgtgatttggtgatagcagctaaatcggcaaacttcgtacaagcattttgccgcttaggtttggttccagactcggcgggtacatggtttttaccacgtgctgtaggccatgcgcgtgcgatgggtttgacgttgttaggtgacaagctccccgcagaaactgcaaaagaatggggcatgatttgggatgtggttgaagacgccgagcttaaaacaaaagtgactgaactcgctgaacgtttagcgaaacagcctacatttggtctatctctcattaaaaaagccattcatcaatcaagcaataacacttttgatgagcaaatgctgttagaacgagatttacaacgcattgcaggccgttccgaagattatcgtgaaggtgtacaagcctttatgaataaacgtgaaccaaattttaaagggcgctaa

SEQ ID NO: 63254 - DNA, 774 bp, Acinetobacter baumannii
atgcaagagttgatcaaagccagtacagctgctgacggtgttttgttattaaccctaaaccgtccagaaaaaagaaatgctttaaacaatgcaacattacagtgtttatgcgagttgctcgaagaagctgaacataatgctcaagtcaaagcggtggttttaacgggtaacgctcagtgttttgcggctggagcagatctgagtgagttggctgcaatggacgccgtgtctttgcaactcgatattcgcccgaagctttggcaaaaaattgatgcgtttagtaagccactgattacagcagtgaatggctatgccttaggcgctgggtttgagttggttttgcattcagatatggtgatttgcggtgaaaatgcccgattcgctttacctgaaattggccttgggatgttgccgggtgcaggcggaacacagcgtttagcacgcttggttggacaacaactcaccatgcgctgggctatgacaggtgaaatgatttcggcaaaacaagccgagcaacatggcatttgcagtcaagtggttccgaccgaattaaccgttgaatatgcggttcaacttgcagccaaaattgccaaacaagcgcctttagcgattcgcgtgattaaacaatcaattaaaagtattcatgaaacaacattaagtcagggactcaagtttgaacgtcaaaactttgtctggctggcggctacaaaagatcgaaacgaagggattaatgctttctttgagaaaagaaagccagtgtttagaggtgagtga

SEQ ID NO: 63255 - DNA, 1062 bp, Acinetobacter baumannii
atgagccaatttgtaccattaaaagtaaaaagtattacaccgcaaaccgatcaggcaatttgtattgcatttgacgttgtacctgaacaacaagaacaattccaatttcaaccgggtcaacacttaaccattcgccatttaaccgaagcgggtgaaatccgccgttgttattcaatttgtagctatgcgggcaaagaagacatcagtattgcggttaaaaaaattgatcaagggcaattttcaaactgggcaaatgaccatttaaaagtgggcgatgtgcttgaagtcatgccaccacaaggtgtgttttttcaaaaagcagccaagatgggcggacaaaactatttaggcgttgctgcgggtagtggtatcacgccaattttatcaattattaaacaagttttatttgaacaacctgaagctaactttaccttgctctatggcaatcgctcatggaaacaaaccatgtttgccgagcaaattatggatttgaaagatcagttcaaagaacgctttcaacttatcaatattttttctcgtgagttcaacgatagtgaactaatgaacggtcgtattgatgcagaaaagcttaagcaactttttgattttgaagtgcttgaaacaaattttgaccatgtttttgcctgtggcccggacgaaatgatgaatgccgtagaaaatactttaccgaactttggtattgccaaagagcgcattcacaccgaacgtttccatacagggcaagcgcgtaaacgtagtgttgaagcggatgcaaaccgtaaagaagaaaaagtaaacattattttagatggccgtgaactgattgtttctgtggctcaagatgatgaaagtattcttgatgcggctttgcgtgcgggtgccgacttaccgtatgcatgtaaaggtggggtgtgtgcgacctgtcgttgtaaggtactttctggcgaagtcgacatgttccttaactatagtcttgaagaagatgaagttgaaaagggctatgtgctgagctgtcagaccttaccaaaaggctcaaatgttcgcttgagttttgatgaatag

SEQ ID NO: 63256 - DNA, 501 bp, Acinetobacter baumannii
atgcaaatgattcgtcattgcatcgaccaatgttgggacgttctacaaacggtaagtgaccctgaaattccggttttatcagttgtcgatttgggcatgattcgcggtgtagagattaacgatcaacaagaaattattgttcgtctaactccaacatatagcggttgcccagcaacggatatgctcaaagcacaaattgtggaggcatttaccgcagaagctttgacaccggtcaaagtcatggtcgatttatcagaagcatggaccacggactggatgtctgaagcagggaaaaagaaactgcaagtttatggcattgcaccacctgaagggttggcgcatcaatgtggaactcatgttcacttaacaaatggtgtcgagtgcccacgttgtaaaagccgacatacccgactgttaacagagtttagttctaccgcctgtaaagcactttataaatgtcaggactgtcttgagccttttgattacttcaaatgtatttaa

SEQ ID NO: 63257 - DNA, 756 bp, Acinetobacter baumannii
atgaatcattcagttttatctaaattcttattacatattggcgacagccaactggttttatctcagcgtttggctgaatggtgcgggcatgcacctgagcttgaaattgatattgccttagccaatatcggcttggacttgttaggtcaagcaagaaactttctaacgttggctggtcaatatgatgaagctaagcgtgatgaagaccaacttgcgtatttccgtacagaacgtgagtttttaaacctcttgttgtgcgaacaacccaatggtgactttgcacaaacgattgtacgccaatggttgatggaccattaccatcttcatttatttacggccttagcgcaaagctcacttcctgaattaagtgcgcttgctgtcaaatctttaaaagaagtgaagtatcacattcgcttttcgacaagctggatggaacgtttaagtttaagcacagatgaagcgcatcaacgtgtacaagacggtttagataatttatggcgctttaccgctgaattatttgaactgagtgcagacgaaaaagcactagttgcagaaggcgtgattccagatttttcaaatgaaaaagaacaatggaaccaaaccattgcagatgagcttaagcgttttgaattaaatgttgctgtgaacggtgcttatcgccgtggtgcgaaacaaggattgcataccgagcatttgggttatttattggctgaaatgcaatgtattcaaagaacttatccgggaatgacctggtaa

SEQ ID NO: 63258 - DNA, 291 bp, Acinetobacter baumannii
atggaagataaaaacaactggtcgctctacgaagtatttgtacgtagtaaacaaggcttaagccaccgtcatgtaggcagcttaagagcacctgatgatgaaattgcactgcaacatgctcgtgatgtttacacgcgtcgtaatgaaggaattagcatttgggtggttcgttcagaactgattaagtcatcacagccagatgaaaaagctgaatttttcgatccttctttagacaaggtttatcgtcatccgactttttaccatatcccagatggcattgagcacatgtaa

SEQ ID NO: 63259 - DNA, 939 bp, Acinetobacter baumannii
atggaaaacaattaccagaaatttgaacaaaatattgccaatgaaattacgatcgaggctaaggatcaaatgcctgatgcctaccgcaaaacattgattcgtcaaatcgggcaacatggccattctgaaattgtaggtatgttgcctgaaggaaactggattactcgtgcgccgactttaaaacgtaaagcagttttgctcgcgaaagtacaagatgaagcgggtcatggtttatatctgtatagcgcggcagaaaccttaggtgctgaccgtgatgacatgatggaaaagttgattaatgggaaaatgaaatactcatcaatctttaactatccaactttgacttgggcagatgtcgctgcaattggttggcttgtcgatggggcagccattgtgaaccaagttgcgctttgccgtacttcatatgggccatatgcacgtgcaatggtacgtatttgtaaagaagaaagtttccaccaacgtcaaggttttgaagccatgatggctttggcaaacggtacagcggaacaaaaacagatggcacaagatgcagtgaatcgtttctggtggcctgcactcatgatgtttggtccaagcgatgaacattctccaaacagcgcacaaagcatggcgtggaaaatcaaacgttttagtaacgatgaattacgtcaaaagtttgtcgataacactgtaccgcaagtgttgcaacttggcttggaagtaccggacccagatttaaagttcaatgaagaaacaggccactatgagtttggcgagattgactggcacgaatttaatgaagtgattgccggacgtggaccatgtaatcacgagcgtatcgaagcacgccgtaaagcatgggaaaacggcaaatgggttcgtgatgcagcagtagtctacgcgaaaaaacagcagcttgaagcgaacaaagtggcttaa

SEQ ID NO: 63260 - DNA, 2103 bp, Acinetobacter baumannii
atgcttgaacaagcacacctagaaggaacctcaactgacacagattttcagcagtctgagcatcaactgcctcatcttgcttcttatgtctatggaacatggcattcgtctgacgaagaattacgtaccgtttatcatgccattacaggtgaagcgatttatgccgtaagtagtcatggcgttgatatgaaacgtgttgttcaatatgccaaacaaaatggttcagaactggctaactggacattccaccaacgtgctaatgcgttaaaacaaattgcccaacatttacttgaacgcaaggaagacttctacaaacttgcttatgccacaggcgcaactcgtaaagatgcgtggattgatattgaaggtgggatccagacattatttgcttattcgagtctggttcgccgtgaactcaatgatgaaaaaattattactgaagacagctggattcaattatctaaaaatgggactttcggtgctaagcacattttaagtcctaaagcaggtgttgccgttcatattaatgcttttaactttccaatttggggaatgcttgaaaagattgcaccgacgctacttgcaggcgtgccatgtattgtgaaaccagcaaccgatggtgcccaattaactcaagcagttgtaaaagccattgaagaaacacatgtcttaccaaaaggcgcactacaactcatttgcggtcagacttatgacctgttagaacagttaggtccacaagactgcgtgacttttacaggttctgcctacacaggccaaaaactacgtaaccaccctcacctcaataaatattcgattccatttagtatggaagccgactcggtaaacagtgcaattttaagccctgaggcaaatgaagaaactgtcgatttatttgtgcgtgaagtcttccgcgaaatgaccaccaaagcaggccaaaaatgtactgccattcgtcgtgcatttgttcctgaaaacttgttagcaactgtgcaagaaaagctaactgccaaacttgctaaagttgtggtgggtgaccctcaaaaagaagaaaccaccatgggggctttagcgagcattaaacaaaaacatgacgttgcagaaaaagttgctgaactcagcaaagatgcaaaaattgtttttggtggcaacgatagctttacatttaatgcagatcatcctgaaaaaggcgcttttttcgctccaactttattggtgtgcgaacagcctttacaagcgacgaatgttcataccacggaagctttcggtccggtatgtacactcatgccatatcaaaacattgaagaactagctgaccttgtttcacgtggtgaaggtagcctagtggcttctgtcgttaaaaataacgatgagaatattgagcagattattcaaaaaattgcgccttggcatggccgtgtgcatgtactcgatgcagagtcagcaaaagaaagtacaggtcatggttcaccacttccacatttagtacacggcggccctggccgtgcaggtggcggtgaagagttaggtggtattcgcgcggttaaacattatatgcagcgcactgcaattcaaggctctccaaacagtctgacacaaattactcactcatggactgctggctcaaaagttaatgaagaccgcgtacatccatttaaaaagtcttttgatgagttagtgattggtgagcgtttattaacggcgcgccgtacagtcaccgaagcagatattgtcaattttgcttgtttaagcggtgactacttctatgcacatactgacaaaattgcagctgccgagtctttctttggtgaacgtgtggcacacggttacttcattgtgtctgccgcagcaggtctatttgtagatgcagcacaaggccctgtgattgccaattatggtatggacaacttacgttttgttgaaccagttaaaattggtgactcgattcaggttgaactgacctgtaaacagaaaacccctaaaccacaaaaagacgcttctcagcctgcgcatggcgttgtggtatgggatattaaagtcaaaaaccaacgtggtgaacttgtcgcaacttatgacattttaactttagttgctcgcgaggcttaa

SEQ ID NO: 63261 - DNA, 1380 bp, Acinetobacter baumannii
gtgtttattagtgtatttgatctttttaaaattggcatcggcccatctagctcccatacagttggacccatgcgagcggcatacagttttgtggatgatttattgaagcaagacgatttacaagccacggttagagttcaggtgaagttatacggttcgctgtcggcaaccggtgtcggtcatgcgacagataagtctgttctgttaggtttaatgggttttgaccctgaacatattgatactcaagtaagtacaagcttgattgaagatgttcttgaaaataaagccatccagcttaatcagcaaaagagtatttcttttgactataagcatgatgtgctttttttagatgaatctttgccttatcaccccaacgcaatggaactgattgcgtataacagggctcaagaaattttatatgcagaaacttactattcggttggtggtggctttattgtcagtgaaagacaattaacacacacccaaactgaaaccaacgacgttaaagttccatatccatttcacagtgcggctgagcttttaagcttatgtagaactcatcatttatcagtgagcgagttaatgcttgaaaatgaaaaaagctggcggagtgaagctgagattcgtagcaagattatggaaatctggaaagtgatgcagcaatgtattcacaacggattaattaatgaaggcatattaccgggcggattaaacgtaaaacgtcgggctaaaaaaattcacgataagttattaaataagaaaaactcaaacctgattgtgacgacttttcatgcaatggaatgggtcaatttatttgccttagcggtaaatgaggaaaatgctgctggcggtcgagtagtgacggcacctacaaatggtgcagcaggaattattccggcagttttatattactacgtgactttctctaaagacttttccgaagacaaagtagttcgcttttttctaagtgcggcagccgttggcattttatgtaaactcaatgcttctatttctggtgcagaagtagggtgtcagggcgaagtcggctcagcgtgtgcgatggcttcggcgggtttagccgagattttaggagcgtctcctgaacaggtggaacatgcggctgaaattgggcttgaacataacttgggtttaacgtgtgacccgattggtggtttggttcaggtgccttgcattgaacgaaatgcaattgcagctgtaaaagccattaatgcagcccaaatggcacttcatgatgacgatgaacactttgtcacgctagataaagtgattcaaaccatgaaagaaacaggcagagatatgtctgagaaatataaagagacttcaaaaggtggtctcgctgttaacgccattgagtgttaa

SEQ ID NO: 63262 - DNA, 1572 bp, Acinetobacter baumannii
atgacaagtcagtttaaaaaacagttatctctaatggatcttacattcattggcttaggcgccattttcggttcaggatggttattttcagcaagtcatgtggcctctcaagccggccctgcgggtatattgtcatggattattgggggctttgccgttttaattctgggaattatttattgtgagttaggcgcagccttaccccgagcaggcggtattatccgttatcccgtattttcacatggcccattacaaggatatttattgggttctgtgaccgtcattgccttttcaagtttaattgcaattgaagtcgtcgctgcccgcgaatatgcagcagcatggttcccttctcttaccgccgtacatgatggtgttcgaactccaactaccattggatggttgtttcagtttgcacttttatgcgtattttttgcattgaactattacagcgtaaaaacctttgcaattgccaacaacctgattagtgcattgaaatttgctgttccggttttagtgatggttgctcttctataccattttaaacctgcaaacttttcaatgaccgagtttgctccaatgggcgctcacggcgtacaaggtgccgtatctgctggcggtattatttttgcgtatttgggtttaacgccgattatttcggtagccagtgaagtaaaacgtcctcaatttacgattccttttgcactcatcttatctgtcgttttggcaacgattatttatgtagtgcttcaagttgctttcttaggtgcagtacctaccgatatgttagcaaatggttggtcaggacttagtgacaagttcccattaccttaccgcgacattgccatgttattaggtttgggatggttagcacttttagttgtttcagatgccattatttctccgtctggttgcggcaacatctatatggctgcaactccacgtgtcatttatgcatggtcaaacagtaatacattcttccgtatttttacgcgtgtagatccaaaatctggcattccacgttatgcgttatggttaacgtttgcactttctgtattttggaccatgccgtttccatcttgggataaattaatttccgtagtttcagcagcattagttttaagttatgccctagctcctgtcacagtgggtgctttacgccgtaatgctcctgagcttgaacgtccattctatgtaaaaggatttactgttctcgggcctctcgcttttgtgattgcatcttttattgtgtattggtctggctggaatgtcatttcatggttattaggcgcacaaatcgtcttgtttgcactctacgtcatttttaagcgctacgtgccaacccaagaagtcagccttgcccaacagttaaagtcatcaacatggctccttgtttactacattttaatgattcttgcctcttaccttggcagcttcggtgatggcgcatcacacctattggcagcgcctttcgacaccttattcgtcatggtgatttctcttggttgctactactggggtatacgctcaggtttaccaaaagcactgattaaaaatgacgatgaagcttag

SEQ ID NO: 63263 - DNA, 1581 bp, Acinetobacter baumannii
atgttaaatattactggtcaaaattttattgcaggtcaacgttcaagtgcaggcagtaagtttgtattaagctacgatgctgcaacagatgaagcattaccctatcagtttgctcaagcaactcctgaagaaattgatcaggcagctcaagcagctgcattggcttatccggcttttagacaaactacgccagaacaacgcgccgtttttctagaaacgattgccagtgaaattgatgcgcttgatgaccagtttattgcaacagtctgtcaagaaactgctttgccggaagcgcgtattcgcggtgaacgtgggcggaccacaggtcaattacgcctatttgctcaagtattacgccgtggtgactatttaggcgcccgtattgatttggctttacctgagcgccagccacttccacgtccagatttacgtcaatataaaatcggtgttggaccagttgccgtatttggtgcaagtaacttccctcttgccttttctactgcgggtggcgataccgcttcagcacttgctgctggatgtccagttattgtgaaggctcatagcggtcacatggcaacggccgaatctattgcaaatgccatttgtagtgcgattgagaaatgcgccatgccaaaaggtatctttagcatgatttatggtcaaggtgtcggtgagccactggtaaaacatcctgcaattaaagccgttggatttacaggttcacttaaaggtggtcgagctctatgcgatttagctgccgcacgtcctgaacccattcctgtttttgccgaaatgtcgagcattaacccaatgattttattaaccgcagctctaaaagtgcgtggtgataaaattgcgactgaacttagtggttcggtggttttaggctgcggtcagttctgtactaatcccggtttaattattggaattaaatcaccggaatttagccaattccttgaccagttcaaggctgcaatggctcagcaaccgccacaaaccatgcttaacaaaggtactttaagaagctatgagcatggtcttaaagaattactcgcccatgacaaaattgagcatttagcgggtcaaccccaacaaggccagcaagcctatcctcagctctttaaagcagatgtatctcttttactcgaacgtgatgaattacttcaagaagaagtattcggtccaacgacaattgtgattgaagttgaatcggcagagcagctcgctctcgcattaagcggtctacgtggtcaacttacagcatcattaattgccgagccacaagattttgagaacttcgcgacccttattccattactcgaagaaaaagcaggacgtttacttctaaatggttacccaacaggtgtggaagtctgcgatgccatggtacacggcgggccatatcctgcaacttcagatgcacgcggtacatcggtaggaaccttggcaatcgagcgctatttacgtccagtatgttatcaaaactatccagatcacttattgccactcgcccttcaaaatgccaatccgcttggtattgcgcgcttggtcaatggtgaaatgagtaaagctgctctttaa

SEQ ID NO: 63264 - DNA, 1290 bp, Acinetobacter baumannii
atgacgacaacattaaaaaaggttgtagcggcctccatggttggctccgtagcagaatggtatgaatttttcctttatggaaccgcttctgccctcgtctttggcgaacttttctttcaacaaaccggcaatgctatagatggaattttggcggcctttgccctgtatgccgttggctttttagcaagacctctcggtggcctcgtatttggtcactacggcgataaaattggtcgcaagaaattattgcaaattagcctgattattgtcggtatcactacctttttaatgggctgtattccgacctttcatcaaattggctattgggcacctacactcctagtgatactgcgtttaattcaaggttttgcttttggtggtgaatggggcggcgcagttattttagtttcagagcacagtccagatgatcgcagaggttattgggcaagctggccacaaactggcgtaccgctcggaaatttagtagccacactggttttattattactttcaaaaaacctctcacccgaacaattcctagattggggatggcgctgtgcattctggttctcagcagtcgtggtactgattggtttatggatccgaaaaaatgtagacgatgccgaagtgtttaaagaagcacaggccaaacaacagcttcttgaaaagcaacaactcgggattattgaggttttaaaatatcataagaaatctgttattgcgggtatcggtgccagatttgcagaaaacattttgtactatatggtggttactttttcgatcagttatttaaagttagtcgtccataaagatacttcacagatcttactgctcatgtttggcgctcatctgatccatttctttattattccttttatggggcatttaagcgatatatttggccgcaaacctatttatcttattggagctgtacttactgctttttggggttttgtcggctttcctttaatggatacaggcaatgactggctcattatgttagcaattgtgcttggtttatttattgagtccatgacctactcgccttactctgcgttaatgactgagttatttccaactcacatccgctatacggcgctttcattttgttatcaagtcgcacccattatggcaggttcgcttgctccattaattgccctaacattactcaaagaatttaatagttcgattccgatttctttatatttggttgccgcaagtctaatctctattgtctcgattttgctagttaaagaaaccaaaggccgatctctagcttttaaagattaa

SEQ ID NO: 63265 - DNA, 753 bp, Acinetobacter baumannii
atgactttggttcaaattccgaaactaactaccactttggaagatttcttaaaaaatctggaaagtatagaaccattgtttgatgctttatcttcggtggtttttttcatcaaaaataccgaagcacgctatgtctttgtcaatcaaacattagtaaatcgctgcggtctaaaggataaaactgcaatattgggaaaaacctcttctgaagtttttcctcattcacttgggaaaatatatacatcgcaagacttgcaagtcattcgccgcggtaaaaagttaacagagcaattagaactacatttatatgcaaaaaatcagtcgggttggtgtttaacttataaagaacctttatttgatgcggatggaaacctagtaggaatagcgggtatttctaatgatttaaatgtgcctgaaaatacacatcctgctttttacaaaatggttcaagttgaggaatatattaaaaagaattacgccgaaaccattactttggcgcatttgaccgcaattgctggcgtgtcggtggctcagttagaacgttattgcaaaaaaatataccatttaacgcctcggcaaatgattagcaaaattcgtctccaagtcgctactgaactgcttgcgactgacttaccgattactcaaattggtttgcgctgtggttataccgaccatagtgctttttgtcgtcagtttaaattgcatacaggcatgtcacctactttgtatcgggcctctatcaaaaatatttag

SEQ ID NO: 63266 - DNA, 1263 bp, Acinetobacter baumannii
atggaaaaacaatacgatgtggtggttgtcggtgctgggcctgcagggttgtcagctgctattgcagccgccgaaagtggcgggcgaattttaatattggataataacccacaggcgggcggtcaaatctggcgcgctggaccgattttccctgtacctgaaatggcgcagcagaaatatcaacaaattaaggctcattctaatattgaatttatgtttggtgcgaaaattgtcgccgcaccttttgcaggccaattgcttgttgagcgacctcacgacagcctaaacttgtcttatcgccagcttatattgtgtacgggagcaagagaactgtttttgccttttcccggttggactttacctggcgtaacaggggtaggtggtttgcaagccttaattaaagcaggcacacctgtcaaaaatgaacgcattgtgattgcaggttcagggccattacttttagcaagtgcggatacggcaaaaaaagcagaggctcaagttctctatgttgccgaacaggcggcttcatcttccgttcgtaagtttgcactacaactttggcgttggccttcgaaaataatacaggcgttatctttgccttatcgtttatatcaacctaacagttatgtggttgaggcgattggtcaggagcgtcttgaacgagtaaggctacaaacgccgaaaggaatcattgaaattgagtgtgatcgactcgcgtgcgggtttggtttagtcccgaatactcaattagggcagttaatgggttgtcaaattaaggacaatgcgattacggtcgatgactatcaacgtacatcacagccacaggtgtgggcagcaggtgagtgtacaggttttggcggaagtgagctggcgatggttgaaggtagcatcgcaggttatgcagctataggccaaaatgaaaaagcgagacaattatttgctcaaagacaacggtatcgtttatttgcacatctccttgagaaaagctttaagttacgtgctgagttaaaaacgcttgcacggccagaaactattttttgtcgatgtgaagatgtaacttttgataaagttgccgagcgtaatagttggattgatgcaaaattacatacacgctgtggaatgggagcgtgccaaggaagcacgtgtgcaacagcagcagcttgtttatttgattggcagttgcctaactctcgaccaccattactgcctactcgtgtaaaaagcctcatggcgatgtctacttctcctttaaatcaaaaatga

SEQ ID NO: 63267 - DNA, 231 bp, Acinetobacter baumannii
atgattcagctttttattaacggccaaccggtttctgtgattgaaggtacgagtgttgctgctgctttagcacaagcgaagtcttacagccgtttgtcagtttgtggtgaaaaacgtactccattttgtggaatgggagtttgtcaggaatgccgtgtcaatattaatggactcagagtgcttgcttgtcagacgctgtgccagcaagacatgaaagtggaaacacaataa

SEQ ID NO: 63268 - DNA, 1104 bp, Acinetobacter baumannii
atgagaaccgatgccatcgtcattggggcaggcattgtaggtgctgcatgtgcttatgaattggctcggcaagggttaaatgtgcaagttttggatgctcggatcggtggtgcaacagccgcgggcatggggcatttggtcattatggatgacttggacgccgaattaaaacttagtcattggtcagttcagctatggcatgaattaggacacgaactttcggaagactgtgcctatcgccaaacgccaactttatggctggcaagtagcccagaagaaatgcagattgctgaggaaaaatatcaacgtctcactgcacaaggtgtccgttgccaacttcgaaactcagatgaagttcatcagcttgaacctcacttaaagcagggtctttatggtggtttagaagtttttgatgatggaattttatatgcaccttgtgctgctgaatggttattaaaaaaatttccccacaaggttcaggttcaacaagctaaagttatccatattgaagaaaatcgggttcagttaagtgatggaacatggctagaagctgcgcatatcgttttggctaacggcattcatgcgacagattttttcccagtgttaccgattgaacctaaaaaaggtcatctggcgattactgaccgttaccctgaattaaatgtaaagcatacattggtggctttggcttatgcggccagtactcaagcgacaagtggaatttcggtggcttgtaatattcagcctagaccgacgggccagctttttattgggtcatctcgtcagttcaatacggttgatccaactgtagagccagaagtctttactcgggtgcttaaagaggctgtcgattattttccagctttggctgatcttaatgttattcgggcatggactggctttcgcgctgctactccagatggtattccagtaattggacgacatcctgcacttgaatcggtttatttagcggtaggtcatgaaggattaggtgtaaccacagcaacaggtacagcaaaactgattgtctcacacatatgtggattaacttttgatatagatccagaaccttttttacctcatcgttttataggagctgcatag

SEQ ID NO: 63269 - DNA, 933 bp, Acinetobacter baumannii
atgaaaacagtaaaaattttggactctcatactggtggtgaaccaacacgattagtacttgaaggttttcctgatttaggcacaggagatatggaaagccgccgaaaaatattatcagaacaatatgaccatttccgtagagcaaccatgttagagccgcgcggtaatgatgttctggttggagcgttattgtgtaagccagtgaatcccaaagcgagtgcgggcgttattttctttaataacacaggctaccttggcatgtgtggtcatggcacgattggtttagtggcttcgttagcacacttgggaaaaatacaagtaggcacgcatttaattgaaactccagtaggtgatgttgaagcgacactgcatgaagatcattcagtgagtgtgcgaaatgtaccggcatatcgttataaaaaagcagtcgaagttaatgttgaaaaatatggaaaagttactggtgatattgcatggggcggtaactggttcttcttgattaatgatcatggtcaacgtgttgcaagtgataatttggatcaacttactgaatatgcgtggacggttagacaagcgcttacggcacaaggaataaccggtaaagatgggcaagaaattgaccatattgagttatttgcaagtgacaccgaagcagacagtaaaaatttcgtgctttgtccaggcaaggcctatgaccgttcaccgtgtggaactggaaccagtgcgaaaattgcttgcttggccgcagatggcaaacttgagccaggaaagttatggaaacaagccagcattatcggtagccagtttattgcctcgtatgaacaagcaggggaatatgtgattccaaccattcgtggtgaagcttacatgagtgccgaagcaactttatttatggatgaaaatgacccatttgcttggggtattcagctatga

SEQ ID NO: 63270 - DNA, 684 bp, Acinetobacter baumannii
gtgacgctaccatcttttaatgtatcaaatcttggtgcaatgccttcggtatctgaagttattgtcaaatatattagagaagcaattattgcagggcatattgctgaaggtgagcctatccgtcaggatgaaattgccaagctatttaatgtcagcaaaattccggtacgtgaagccttaaagcaacttgaagccgaaggcttagtagagtttataaaaaatcgcggtgcaattgtgacccgaatctctgaagaagaattagctcagatttttgaagtacgggttatgttagaaacgaagctgattcagctcgccgtgccgaatatgacagaagaaacttataaaaaggcagatgaaatttgtaatgcctttattgataacatggatattggaagttggaccacactaaattggcagttacatgcgtgcctttatgaaccggcacagcgaccttatatgctcggattaattcgttcgatttacgataaaattgagcgctatttaagattgcagatgaatgtttccgaaggcaaatcacgtgcaaatgatgagcacaaagaaattgtgaaagcctgtaaagccaaggatgttgatttggcggttaagttaattgaagagcatattaatggtgtttgccaatcactttatgagcacttacctcaccataaaaatgtgaaaaaataa

SEQ ID NO: 63271 - DNA, 909 bp, Acinetobacter baumannii
atgagtacgccaacagaagcaaaattttccctgacttattatacgggtttcttatctgtactatttgctgcttttctatggggtacggcaggcacagcagcatcttttgcaaagggcatcagtccacttgtaattgctactatttctgtgggcttcggtggtttaattcacacatttttaagtttaaaagccattaaaaaagattaccgaaagctttttgactataagaccaaagttttgattgccgtcattgtttctattctttgtccgtttgctttttattcctcggtttcattagctggtgtttctattggtactgttatttcaattggctgcgcccctttgttctcagttatgcttgagtggctattagataaacgtaagctttctttaaaatggcttatcagttttattcttggttttttaggagtcgttttactctcatatgcaggcgaacacagtcaccaacatcaaggcgtccaatccgaacggctattaggtgtattttttggcttactctcaagtctgagttatgcaacatattcgtggattatgaaaaacttaatccataaaggcatcaactcaagagctgccatgggcgtgatctttgggatttcagcagttctgttattacctactttattaattacagcaactcacctatttaattatccaaataatatttgggtagccctttatatcccaatcgtacctatgttcttaggctatttattttttagctttggtttaaaacgtattccagccagtcaagccatgacgttagctttggtcgaaattcctgttgcagcgttattggcagttgttgtagtaggcgaaagtttaacaatgaatagttatttaggtttagttttaatattcctctgcgttattgtcctcactaaaaaataa

SEQ ID NO: 63272 - DNA, 936 bp, Acinetobacter baumannii
atgagtaatatcttcacaggatgtatcccggcgctaatgactccatgtactcctaaccgtgagccagattttgatgcgcttgtgaaaaaagggcatgagcttattgaagcgggaatgagtgcggtagtgtattgtggttcaatgggcgattggcctttattgaccgaagctcaacgtcaagaaggtgtagcacgacttgtagctgctggtattccgacaattgtgggtactggggcagttaattcaaaagaagcagtttctcatgcagctcatgcagaaaaagtaggtgcacaagggcttatggtaattccacgtgtattatcacgtggtgcatcaccaactgcacaaaaggcacacttttctgcgattttaaaagctgcgcctagcttacctgcggtaatttacaatagcccgtattatggatttgcgactcgtgcagatttgttttttgaattacgccgtgaatttccaaacttaattggttttaaagaatttggtggtgctgctgatatgcgttatgcagctgagttcatcacttctcaagatgactctgtaacattaatggctggtgtagatactcaggttttccatggtttcgttaactgcaatgcaacgggagcaattacgggcattggtaatgctttgcctaaagaagttttacagttggttgaccttagtaagaaagctgcagcaggcgatgcgaaagctcgtcgtttggcacaagaattatcaagcgctttagaagttttatcgtcttttgatgaaggtactgatttagtcctttattacaagtacttaatggtacttaatggcgataaagaatataccttacattttaacgagacggatgcattgagtgaatcacaacgtaaatacgttgaaactcagtatgaattattccgtacttggtaccgtaactggtcagctgaaatctaa

SEQ ID NO: 63273 - DNA, 312 bp, Acinetobacter baumannii
atggcggcacataaagtacgttatgataaaggtgaagtggttgaaggaacgattggctcggcagatgtgtggaataatgaacttgaccgaattcaatttttccatgagcgttatggtacctcagttgaagaaatggaagcggcttctgttgcacaaattgcaagccagtttaatgttccgtttttaggaattcgaattttatctaataatattaccaataatggagcttatgaccctggtacaggagaagcttgccaagactacgtgcttaacgtagctgaagaatatatgaaatctaaactaccaaaataa

SEQ ID NO: 63274 - DNA, 684 bp, Acinetobacter baumannii
  misc_feature (627)..(659): n is a, c, g, or t
atgaaccaacagaatactaataccgaagatacaattgacttaaaagaactgtttttttcattgattgctcagtggaaactcattgctctatgcgttattttaagcgttgtatgtgccctactctatttacgtgtaacgccagatacctattcggtagatgctttggttcaggttgaagacagtaaaggggcttctgctgcacttttaggtgatctctcacaaatgattgagcaaaaatcaccagctcaagcagaaatagaaattttaaaatctcgtttggttttaggttctgtgattaaagatttacatctgaatatacaggtctctagcactgagaatacatttacacatcgcttattgagtgatactgattataaaactgaatatgctaaaaaatcggttttatttaaagatggtttaaaaagttttgatatacgtcagtttgagattccagcttattatctagataagaacttacttcttgactttgataaacagtctttacgtttaacagacccagatactgaagaagtcatcttaactgttccattaaaccaagctaacagcgttacaggaccgtatggtttatggaaagttgctatatttacaaaagaccaatttgactcnnnnnnnnnnnnnnnnnnnnnnnnnnnnnnnnnattaagaaaatatcacttcctttag

SEQ ID NO: 63275 - DNA, 459 bp, Acinetobacter baumannii
  misc_feature (428)..(437): n is a, c, g, or t
atgaatcagaatgtgacttctaaggtttatccgtggcaacagacaatgtgggaaacgttaacaacacgttttcctaatattgggcatggcttattattttatggtaaacaaggttgtggtaaacatgcttttgctaagcatttcttagcgtgggtactttgtttaaataaacaacctcaaggtgcttgtggtgaatgtagtagctgtcaatggttaaaatcagatacgcatccaaactatgttcatatcacgacagatgaagaaaataaaaaacaaaatgcaaaaattaaaatagaaaaaattcgagatttattgccatttgtacaacaaactggtgagggatggcgtgttgttgttattgagccagctgaagctttaaatcttgcgtcatcaaatgcgctgctaaaaaccttagaagagccaggtgnnnnnnnnnnttgttggccgatcattatttga

SEQ ID NO: 63276 - DNA, 153 bp, Acinetobacter baumannii
gtgaaacagactattagcaatcgtcaaggaaaacagttagcagtttatacagattgtctaaaagatgctcctgtacttgtgttttctaattcattaggaacagaccatggtatgtggcaatctcagctgaatgaattaaaaaagtcattttaa

SEQ ID NO: 63277 - DNA, 264 bp, Acinetobacter baumannii; identical to SEQ ID NO: 49318

SEQ ID NO: 63278 - DNA, 267 bp, Acinetobacter baumannii
atgttgtttgatgaacctacttcggcactcgacccagaaatggtaggcgaggttcttgaagtgatggtgcaacttgctcatgaaggtatgaccatgatgtgtgtaacacatgaaatgggctttgcaaaacgcgtatctaaccgtttaatttttatggatgaaggtaaaattcttgaagattgcccaacccatgaattctttgataatttagaggcacgtcatgagcgcgctaaaattttcttggaaaaaattcaggcaatgcactaa

SEQ ID NO: 63279 - DNA, 636 bp, Acinetobacter baumannii; identical to SEQ ID NO: 41964

SEQ ID NO: 63280 - DNA, 747 bp, Acinetobacter baumannii; identical to SEQ ID NO: 46214

SEQ ID NO: 63281 - DNA, 759 bp, Acinetobacter baumannii
gtgattcacgttaatggtaaaattgatccattagacgacatcgcaactatcaatactgaacttgcgcttgcagaccttgagactgttgctaaagcaattttacgtttaactaaagttgctaaaggcggtgacaaagaagctgtagcgactaaagcagttttagaaaaaatccaaccattacttgacgaaggtaaaccagctcgcgcggctgatttgtctgatgacgaacgcaaattaatccgtggttttggtttaatgactttgaaaccaaccatgtacattgcaaacgttgcagaagacggttttgaaaacaacccacatttagaagctgttaaaaaacttgctgccgaagaaaacgcaattgttgtgccgctttgcaaccaaatcgaagctgaaatttcattattagaagatgaagatcgtgctgagttcctagaagcaatgggcatggaagaaccgggcttaaacgtagttattcgtgcaggctataaacttttaggtttacaaacttatttcactgctggtgtacaagaagttcgtgcatggacagtaaaagttggtgcaacggctcctcaagcagctggtgttattcatactgatttcgaaaaaggctttatccgtgctgaagttgttgcatatgatgacttcgtacaatacaacggtgaaaacggcgctaaagaagcaggtaaatggcgtttagaaggtaaaacttacgttgttcaagacggcgatgtaatgcatttccgttttaacgtttaa

SEQ ID NO: 63282 - DNA, 567 bp, Acinetobacter baumannii
atggtaagtttaagcggtagtgttgttgctcactcagatggtattttatttggacctgagcaaggccaaaccatggtacttgtgcatgcacctgatgccgctggagcaaaagtgaataacacggttggtctaagtgtaaataaagcgggttatgcagtagttccttatgttacgccataccgccttaatgacattactcttgacccacaagaaatgtcgagcgaagttgaacttgaagaaacaagtcaacgtattgccccatttgctggtgcaattgcgaaagtagattttgcaactaaaacaggctatgcagtttatattaatagtaaaactgcagatggcaacagtttaccatttgcagcgcaagtctttaaccagaaagatgaggctgtaggtattgttgcacaaggtagtatgatttacttacgtactccactcgctcaagatcgtctctatgtgaaatggggcgatgaaagtaatgaacgttgttcggttgagtacaacatcagtaatgagttgaaaaataaacaacaaagcatagttatgactgaggctgtctgcaaatga

SEQ ID NO: 63283 - DNA, 1278 bp, Acinetobacter baumannii; identical to SEQ ID NO: 62422

SEQ ID NO: 63284 - DNA, 684 bp, Acinetobacter baumannii
  misc_feature (646)..(655): n is a, c, g, or t
atgaatattcgccaagtgtctgctatttgtctttcaatagcagctactcattttgtgtatgccgcttcaaatgttgcaaatcctgtaaatgattcttcccaaacaaaaggaattattaaaaatcaatatattgttatattaaataaggatgcaggtccttctaaagatttcgcacaaaatattgctaaacaacatgctggtaaagttttacaaagctacgatactgttcttaaaggttttgcaatttatttacctgatacagcagggacagcctttattgaagcgatgaaaaagaaccctcaagttctttcagtagaaagcgatacaatagtaaatattgatgcaactactcaaagtaatccagattggggactagatcgtatagaccagaaagctttaccattaaattcggcttattcttatttacagacgggttcaggtactacggcttatatcgtggatactggtatattgtctagtcaccaagagttttcaggacgtgtgttaagcggttataccgcaatatctgatggcaatggtacaaccgactgtaatggacatgggacccatgttgctggaacagtaggtggtacgacctatggtgttgctaaaaatgtcaatttagttcctatccggattctggggnnnnnnnnnntatgttgctttgcttatttcgaatggtga

SEQ ID NO: 63285 - DNA, 825 bp, Acinetobacter baumannii; identical to SEQ ID NO: 45759

SEQ ID NO: 63286 - DNA, 819 bp, Acinetobacter baumannii
  misc_feature (804)..(813): n is a, c, g, or t
atgaagcctatgttttcagggcatgaaacttttcctttacgtcaattgtggttaaaaaaggcatatcaccaagtttttaagttttatgaagctgatagtgattatgctcctaaaaccgttttttcagctcctgacgctattgagcgatttggtgttggtaagaatatggttgcggctattaaacattgggcattagcttgtgatgttattagagaacatacggataagaatggattcgaaattggagaaattggatatttactctttgatgagaaaagtggcgtcgatcaatatttagaaagtgaagctactctttggttattacattggttactagccggaagggcaagacgtacagcaactatttattctatttataattttattcaaaatcagacctttactgagttggaggtgaagaagctcatttccgatctagctctatctaatcagaaaggcaggtctgatgtcacgttatcaactgatataacgacaagtatgaagtgttatttttcatcgcatgacacagaggacaatattgaacctttacttgcaggaatcggtttactatcagaaattagtaaagggcaataccgttttaataggggaaatcaatattcattgcctgatcaggtttttgcatttgcattactagatttttgggaacaatgggaattgattactaatacttctcaaaaaactttgtcatttaatttaattgctcatgactacggatctcctggacgagtattcaagttagatgaaagtgccgttggcgatcgtctttcaagaatttcagagatnnnnnnnnnngactga

SEQ ID NO: 63287 - DNA, 1020 bp, Acinetobacter baumannii
atgagagaagtgttagcaagaattcaactcgtcaagcaaactttgaatgatgagttaaaatatgcttttaataattgtttatggcagtggggtaagcagacgtttactggcagtctgtccaaaatagcatcagacttggctgatcaaatttttaatttatcacctaaagttagtagtgaacttgtcaatagaaatactctttcagctagtgcagttaaagcccagaaagatcttttaagagcactacttgcgaatgacaatattgaaaacttaggttttgagaatatgtctgcagctgccagcctttatagaacaactattaaggccttcaatattcatcgttatcaaaatgatacttggcagatatgtgcacctgaagcagaatttgatccatgtaatattgttggggtatggaatggaataaaagatttcataagaaaagcaaagggtgtagtcaatctctctgaaatttttgatttattatctaaagctccttttggtgtaaagaaaggtttacagccaattttagtttgggctttttttatctcatataaacagtatattgccgtttatacagatgggatgtttaccccagatttaaatgaaacatcaattgatgaatggttacagtcacctaaaagaatcagttggaggtttgtagagcttaaaactagtgagaaaaagatgttgaagctcttagctaattctttatcatcacagttaagctatccagttaaggttgaaccattagactcagctagagccttagtatcaatagtttttgggctcccagcttggactcgtaaaactaattcactatctaaagaagcgaaagttattcgagatatgcttttacatgcttcagatccccataaggtactatttactgatttacctgctgtatttgagtctactaatgcagagttaatagttgaacgtacctcagaagtcatcaatgaacttatttctatctttgaaattagattacgtaaaatagagaaaaatttactcactgcttag

SEQ ID NO: 63288 - DNA, 591 bp, Acinetobacter baumannii
atgttggtacgtttccaagaagtctcaagtggtcaaatttatttagatgatttgccaatacgtgatattgagctttcaagtttgcgtacacaaattgcaatggtaaatcagcaagttgttttgtttaaccgaactgtacgtgaaaacattgcttatggtcagttacataatgcaagtgatgaagacgtaatagctgcagcaaaggctgcttatgcccacgactttattatgaacttaccaaatggctacgatactgttttgggtgctcaaggtctaaatttatcgggtggtcaacgtcaacgtattgcaattgctcgtgcaattttgaaaaatgccccaattctgattttggatgaggcgacaagtgcgcttgataatgaatctgaacactttattcaacaagcatttgatgaagctatgcaagatcgtacaacgattgtgattgctcaccgtctatcaaccattgaaaatgcggatcgtattgttgtgatggaccgcggacaaattgttgaacaaggtactcatcaagaattacttgctaagcacggtgcttattatcaattacatcagcgtaattttgaggaccattaa

SEQ ID NO: 63289 - DNA, 672 bp, Acinetobacter baumannii; identical to SEQ ID NO: 48595

SEQ ID NO: 63290 - DNA, 621 bp, Acinetobacter baumannii
atgttgattgaatgccgttttcagctacacatgggccagtttcatattgaacctagtttccagtcagatgcttctgttattgggctatttggtgcctctgggtcaggtaaaacgtccattttacatgccattgcagggctgaacactccgcgtagtgggcttattaaaatacaggatcaaacgtggtttgattcaaatcaaaaaattaatgtcagcacgcaaaaacggcatgttggattggtttttcaagatgctcagctttttccgcataaaacagtcaagcaaaatttattatttggttttcagcatctttcccaacaagaacgtcaatttgaagcagattacattattgagttattaaagttagggcatttattacaacgtatgcctatcaaactctcaggtggggaaaagcagcgcgtggcactaggtcgagcattattatattcgcctaagctgttactgcttgatgaacctttatcagcattagatgcgaatcataaagctgaaattattcctttttttcaaaaggtaaaagaggaaattaaaattccgatgatttatgtaagtcatgatattcaagagattaaacaactgaccgaaacaatgtggattttataa

SEQ ID NO: 63291 - DNA, 273 bp, Acinetobacter baumannii
ttgcacttatatgtcattcgtttaaagctagatgaactgagtaaagggcgtaaagaaatttttgaaatcttgagagaaaagggtattggagtaaatgtgcattatattccagtgcatacccaaccttattatcaacaattaggcttcaaacaaggcgatttccctgaagcagaagcttattatgaagctgctattagcttaccaatgttccctgatttgactgatgagcaaattcagtacatttaccagacactaaaagaggtgttggtataa

SEQ ID NO: 63292 - DNA, 321 bp, Acinetobacter baumannii
atggcagatttaatggctgagcatgatttggcgattggtgctgctggtagtacagcttgggaaagatgttgtttaggactgcccacgattatgatttgcatggcggataatcaaaaaatgattgcaaaatatttgcatgatttaggtgtcgccatatctttggatcaagcagagattcatgaaaagttattatgggcattacaacagtttgatcaggaacaattgcaacttatgcatcaaaaagctttatccattaccgatggtataggtgtagatttgctcttgcaaaccattttttctgaggaatttaaggaatgttag

SEQ ID NO: 63293 - DNA, 291 bp, Acinetobacter baumannii
atgatcccaaatagtacagcttatgaatggggtttctatataaaacccgatgctgaaaaaggaatgggacagttgctgggtaacattgcactgaatcatgcatttaataaacttggtttagaaaaagtttttggtcaggttttatcatttaatgataagtctttaaattttcatagaaaaatgggttttgtccaagaaggtttgttgagaaaacattttaaagatcagcgaggcgaatttgatatatatcaatttggtttgttgcgaacagaatggctagagggtaaatga

SEQ ID NO: 63294 - DNA, 195 bp, Acinetobacter baumannii
atgtcgcaagtcatgatcatggtttacgaagcagggaaggttgagcacacatgcaaccttcctgctgagcttgataagaataatgaagtcacaaaaatatatagcccgaatgggaatgagttaaagattaactttttacgtaatgaagtatacttcaacaaaatatggtggcagtttagtaagaagcaaaattag

SEQ ID NO: 63295 - DNA, 2064 bp, Acinetobacter baumannii
atggcgtcactactttctgccgtacgaacccgcttttttgacaaaagcaataagcctcttgctggtgggaaggtatatacctatgaggctaattctacaaaccctaaagttacatggtcagatgaggcgctgacagttcaaaatactaaccctgtactacttgataatgagggcacagctttaattttcttttctgggaaataccgttttcgtattgaagataagtatggagttttagttgaggataaccccacagtaacaagccttgtcggtattgatggtgtcactgccgatattgttagagatggtgatgaaaaccaggcacagattaataaaaaaacagtccgaaaagttgactctattgatgatctagatagtctagaaaaatgggaaagccgttcagtctatgtgagtgatgtcggaatgtttgaagtcaataatgatgcttgggtttttaaaccgacatctgcacagtatgtggttgatagtaccggtgtaacacagcaagcgattaatggtcagttcgtattgcctgagatgtttggtgcaaaagccaatgaccctaactttgataatacgacagcattaaacttagcatttgccactgggaaagctgtttatagtacacctgacaaaacatactatgtgactaaaagtctaaaaactaagggacaagatttaataggtgggtggaagatacattctaaaaaagcaacatcaagaaaaggaacgtgggaaaaagaagttacagttaataatgatgggctagatacatcgaacaatattcgtatgatgtatgtctcttcggcgtgggacttgtcagaatttttagcgattaaagcattgggttataacatgattcatcactatgttgggatggcccaaatggggtgggatcgagatggtaatgtatttgacgtactgaataatgcaaaaagtgctggattaaaagtatctctaggtattgaacaagaccccaacgcggtgtcagatttgtcagcatgggttaaatctgtagatagttatccagccttgtgggcgtatagtgttgtagatgaacctgtttcaagaggattcactattgcgcaacaagacgcaaagattacgacaatgcgtagtttgacaaaaaaaccgttgtttactgtcgattggcaaaataacgcattcgatcaacagtattcaaaaaattacgacttcgtatttgttaatgcttacagcatgaaaaatagtgaatcaacaatagatgacaaggttaaatctgatctaagaaattttagactatcctatggtgtaattaagtctcaagtgaatgtgcgtgtaattccgtgcgtttccatgtttacgttcaatccttctgccaactttttctcagacaatgctgatcaaattgttgctgccagtgaagcttttgctaaggtatctaacggggactatgcggcgttcatatgggatggtgaagctgataatcaaatcactggttcagttcgggatactccagttttccaagatttatcatttcgaatatcaaagcaaccgcgactaagcttgcaaactgatgtaattaaatttggtgggttctctaacatacaaacggatttcggtgtttcagagattattcatcacgttttgcaaaaagataatgatagttctgacgttttcatcggggcatctgcttatccaattgttttgagaagtggagtaactaatgctgacagaacagaatcaacgcttccaaatggcagaacaatatcgggaatcgcatttaaacataatgttgggcgtcttgtaactgatctggcagcaagaaaaaatctacgtttgagattggaggcttttagtcctattaatttgatttctggcgagttttctgtttatacaactgttgacggtggatatacatcaacattgagatttaatgatggagtcgctggcaataaagttctcgattacaacattgatctcgataaatcatacggtaatttaatttttgaactatcagattccaataattacccgttctatcgtaattttttgcgtggtgtaattatcttaagtgactggtaa

SEQ ID NO: 63296 - DNA, 1395 bp, Acinetobacter baumannii
atggcgactattattgatgttcctttcgttggtcagtcttatcatttgaaagactgggcagtcgactgccaaagaacattaaatctttacccccaatctgttgaaagtggtaatgctccacaggtttctgcattactaccaacccccggtttaattgctaaatatgagctatctggaccaatccgtgggctttttccaactagcataggacttcttgcaattgcaggttcaaaactatacttgattaatcaaactgcagagttaatcagtgatattcaagggaatgggatttcctactttgctaataatcggttagatattcttatcgtaagtaatccatatacttatacttttaacattgcatcaaaagagctaaaaattttaactggtggtggtttcttaggtgctgaagatgtaacttttctagattcacgctttattgttttaaaccctaattctgatcaaatccagtggtcaggtctattaagtaccgaattttccgccttaggttatgctactgcagaagcaagctctgacaagttggtccgaatattcactcaaaatggacaattatggttaataggtgagagaacaactgaaatttggcatagcacaggcaacgctgatcagccatttttacgtgtatctggtgcttatatcaactgcggttgcattgcaaagaactctctagcacagtttgggactggtttaatttggctttcacagactgatgttggacaaggacaggttgtattaacagaaggttatcaagtcaaacgcatttcaaatcacgccatggagcaagagtttgcaacttatgaacgcctagacgatgcagttgcatattcatatcagcaagaagggcattccttttatatgctctctttccctaccgctaataaaacatggtgttttgacggctcgactggtatgtggcatgagcgaagttattacaatttagatgcccagcatgagagacataggtctcaagtacattgtttttataaaggtaaacactatgttggtgatcatacgaatgggatcatttatgagttaagtcttgatgctgaaactgacaatggtcggttaattatgcgagagcgcattacccctgtcattaatcctcaagcacaacgtctaatatttgatgaattagaagttcttatacaagctgggcagaaatcaaatcgagagcctattgttatgcttgactggtcagatgatcatggacagacatggtcttttgatcgtcaagagacacttgggaaagttggggaatggaacaaaagattgatatttagacgattagggcaagcatttaatagggttttccgactgcgtttaactgattcaagtagattaattattttaggcgcaaaggctagggtgagatag

SEQ ID NO: 63297 - DNA, 435 bp, Acinetobacter baumannii
atgaattatccgaagatgctctataagggcgataaagttaactttgaatatgcagtagccgaaactaatgaacatgaagatcagctaaaagaacaaggctggatcgagcattcagagcttggtgaacccatccaagaaacgaatactattaaagacgcatcaggcagcgataaagaattagtttcattagaagaatatgaagcaatcctgaatgagcgaaatgaggctcttaccaaaattacagagcttgagaaagtaatcaaaaaaggttcagccgaaaatatcgaattgcaccgccaacttcgcacaaaagagttagaaggccaatcagcagatgacctcaaggcaatcctgaatgagcgtggtgtgacatttggtgcccgagactctaagcctgaacttgttcaactcgtcctaaaatctgagcaggaataa

SEQ ID NO: 63298 - DNA, 1200 bp, Acinetobacter baumannii
atggcgaatacaattttaacgcatcagatgattgcacgtgaagcagcgaagatgcttactgaagaatcacctttcattgctaatatcaacaaaggacgccaagacgagtttggtgttgatgtgcagggttataaaaagggcgattcagtgggaatcaaggtccctactgctggtcgtgtttataacggggcagtttatgctgaaggtggtgctggttctgatgtattggagcaagaagtttcattaaagcttgatacccaaaagcatgttggtctgaagtttggtgctaaagaaaaacttttggatattacagattttaaagagcgtattttgcgccctcagattgttacactttcatctgtagttgaagctgatttaatttcaaaaggcattaaaggaacgtcaaacgttgtgacaatgcctgccaacactccaagtcagggtttggctctggctcgcggtaaactcaaccagtatttggcaccaccatctgatcgtacaagtttaattaactctccagcgaacattgcgctttcaggtgaagtttcaaaaatgtttaacccgaaagttgagtcagataaagcctatctagaaggctatattggtcgtgctttcaattctgacgtctatgaacatcaatcaattggtgtccatacaaatggcacggcagctggaattacagttagtactactgctggccaaaccggtggatctatcaccatggtggcttcaacagcaggtacggttactaaagggacaattatcacaattgctggagtttttgcagtacacccattgactggtgccaatacaggtgtattgcaacaattcgttgtaacagaagatacctctcttaacgcaacagctgccccagtaaaaatttaccctgaaatcatcacagcacagcctggtcaaacggtaactgctgcaccagctgcttctgctgctgtaactgtggtttctactaatggcgctcaaaacttaatgttccagaaggatgcatttacagctgcatttgcaccactgccagtattggcctcttgtgaaggttacacagctcgtttacctaacggtatgtcagttcgtgtcatgacgtttggtgatggcttgaatgacttggaaagaacacgtattgacgttttatatggattcactgtcgttcgtggtatccattcatgccgtattttccaagcaccataa

SEQ ID NO: 63299 - DNA, 465 bp, Acinetobacter baumannii
atgaataatacccatgtagaacacggatgctgtgaagaagatatttgcggtcgtaatggttgtgaaggaacaatcgttaaagacacagatgctcaaggttgtagttgtcatatcagcccaccttgcagttattgccattgcgaagttcagtgtaacgaatgcgattgggcgtcacgaaatgaaaacgttcaagaacaaagtaaaccaacaccgccaagtgattggtatttgcaaatgaagcaaagggaaaatgagtttctcagaaagattaatgatcattctgttgagtttgaaaaagtcgaatttagaacagaaagccattcgaatagctcaatgaaaaagataggtgcatatccgagaggaatgtctaaagatcagctcaaaaaagaagttgatggaacatttggcgggcgcttcgagtgggttactgaaaatcgcttttcattcattgcatacacagactag

SEQ ID NO: 63300 - DNA, 264 bp, Acinetobacter baumannii
atgaatgctcatcctgaacttattgaaatcacgcgcttaaatcatcgaatcaatgatgcagtaagtgatctgcttagtctttcaaatgaatctaacatgatcgtaactcaaagcggaaacatgattaattttaattatgtagggcgtggcacagaaagcattggattgactataagcgaccaatattcaacaaaaactagaacggcttatttaactgaaacacttagccgacttaatcaaatcaaagctgaattagcagcctaa

SEQ ID NO: 63301 - DNA, 240 bp, Acinetobacter baumannii; identical to SEQ ID NO: 54344

SEQ ID NO: 63302 - DNA, 957 bp, Acinetobacter baumannii
atggcgagtcattatgaaatgttcccagcggttgttactcgtgtggaacagctaacccctttaatcaaacggtttacgttcaaacgtcaagatgggcagaactttcctcgatttagtgggggaagccatattattgtcaaaatgaatgaacaactttccaatgcctactcattgatgagctgtacgcaagatttatcaacttaccaagtctgcgttcgtaaggatgtggaaggtaagggcggatcagttttcatgcatgatcagtgcaatgaaggctgtgaaatccagatttcagaaccaaaaaatttattcccgctagctgaaacaggcaataaacatatcttgatagctggtggtattggtattacaccattcttacctcaaatggatgagctggcagcacgtggagcagagtatgagctgcactatgcttaccgttcacctgaacatgcagctttacttgatgagctaacacagaaacatgcagggcatgtatttagttacgttgactcagaaggcagcatgcttaatttagacgaattaatttcatcgcaaccaaaaggcacgcatgtgtatgtatgtggcccaaaacccatgattgatgctgtgattgattgttgtaacaagcaccgttaccgcgatgaatacattcattgggaacaatttgcttcaacagttcctgaagatggtgaagcatttacggtggtacttgccaaatctaatcaggaaattgaagtacaaagtaaccagactattttacaagccatcgagacattaaatattgatgtggaatgtctatgccgagaaggggtttgtggaacatgtgaaaccgctatcttagaaggtgaagcagagcatttcgatcaatacttaagtgatgccgaaaaagcttcacaaaagagcatgatgatttgtgtatcacgagcaaaaggtaaaaaattggtattagatctttaa

SEQ ID NO: 63303 - DNA, 477 bp, Acinetobacter baumannii
gtgagctttgggttaaaactcgcttttggtgagcatgtacattgtatatttgcagagcctacccattctccgtgtatgttgctgggcgtttatacaggcctgcatgatcagatttcagtaaatgacattggtttagataacatcactgcggcagatggattagctgttggccgtgcttctggttttgtcggacgtgctatgcagcagttaattgacggttactacaccattcatgatgaatgtttatatgaactcattgcgcttttaaatcaaactgagaatattcaagttgaaccctcggcggcggcgggcatgatggggccatattatgtgcaaactactcctgattatttggctttgcatcaattgtcagctgaaaagttacagcatgcgacccatgtggtatgggcgacaggaggaggaatggttccacttgatgaaatgcagaagtatttaacgcatagccaaaacaattaa

SEQ ID NO: 63304 - DNA, 372 bp, Acinetobacter baumannii; identical to SEQ ID NO: 58557

SEQ ID NO: 63305 - DNA, 945 bp, Acinetobacter baumannii
atgcaaaaaatcaaagaactaataaaaccgcaactagatgatctatttgttgatattcataaattggtgaaaaagtcgctagatagacagccttcttcacctgaagtattgacgaaagacatgcagcaaaaacttgatcagcagatcgctgaaaaatggcatgacattaaagatagtgttgattatttgagtcaaaagttgagccgagacgaacaatcaaaactgatgcaatttactgaagatgaatttaataaaagaaggaggcaattcaaccagaatgtagataaaaaatcatacagaattaagctaaatccacatacgaaacggatagtactgcctagaaaaattgagagtacagagtcacgattaaaacacgggcatctacatattctggtagtcaaggaattaaggcagtattggcaagattcatttgaatattgggatgaaccgaagtacttatggggaaatttatgcttaagttttatatatatttcaggctgtgcagatgaacagcatttgattactattcagaaacaattgcaggatgccattgagcttggtacagatctgaattgttttcggttataccattctgattatcaaaagatcactaatccattgttactacattatcgtgttgaaaactctcaatatggcaacgatgtagaacagggaaagttgtacaaatggaaacatgttttttttaacccatatgcgcagttcattttacaatatttaaaaaagttgaaagccactcagaaagaatttcgtctgcaacattcagttgaagattgtattttagaaagcttgagtaagataggcaggaaaaaaagtcttggggatctgcaatatcaaattaaacgccgtggtgaaccgtaccgggtttgtcggagagtcaatattctgagagactatcccgatgacaaaattaaaatatacccctga

SEQ ID NO: 63306 - DNA, 828 bp, Acinetobacter baumannii; identical to SEQ ID NO: 54400

SEQ ID NO: 63307 - DNA, 609 bp, Acinetobacter baumannii
atgaacagagaaattcaacaaagactcgtatgggttaaattatttgaagagaccaatgatgctggcctagtctgtcggagatgtggcatttctagaccaacattacgcaagtggtggaaacgatattctgagcaaggtattgatggattaagtagtcagagtaaacgcccattaaaatctccaaatactaaaatcaatgctgagctagaagccttaatattggaaatgcgctcggctagaaatctgggtgctcgacgtttgcaaacagaattgatgaggctgcacggagtctcgttgtccttagcgactatccataaagtactatccacccatcaagtcaaaccgattaaaaaattccgtcgtaaagtagatttcattcgttatgaacgcccattaccaggcgatagaattcaaatggatacctgtaaattgggtcctgggctatatcagtacacatctatcgatgactgcacacgatatcgcgttttaaggatatataaacgccgaacagcggcgaatacgctcgactttttagactgcgtaattgaagaaatgccttttcccatacagcgaatacagaccgatcgtgggcgggaatttttttgctga

SEQ ID NO: 63308 - DNA, 444 bp, Acinetobacter baumannii
atgaacacagacctaaatgactatcattatgacaattatgaaaaatattcaatccatgagacagatgaagacaatattgaaattattgatgatgatgaagcaatacataaagatactgtcattcaactcattaaaaagatgccaatgtatggaaacaatgtatataagtctcatcccacaaaaacgcaattgtacttaataaatcattgggcaatacacaatgcatttaaaaagattgatcctagatttatatctgatgtcacatacacaagtgctgagacagatctatttcgtaaaatctgtgtgaaatgcctgcctttacatattgtaaatgatacatctacaaacttttggcaacttgctcacaacgaaccaatagcgatcagtacaactcattacaagctcaaagctcaaattttaaatgagttcggctttgttgcataa

SEQ ID NO: 63309 - DNA, 831 bp, Acinetobacter baumannii
atgtttttagaaaaacgttttggagtaaaagagccgaatatcagtccataccgccgtgcagtgtgtggtgatttaaccagtgcatttaactttaaaacaccaaatgcagatgttttaccgcagttgagtggtaaacaaacacgtgtgcaggcagatgagttaagagaaaatcaggaagctttgccagctgtgcctgtacccacggatgttaagttacccattcagcaaagtgggatccgtctatcacgggcgctaccttatgagttgcataccagtgcgcgttgtaaagcagatggtaaggtgcaattgattttttctaatacgggcaagcaggcagcggttttccacgtatatgacaagctcaatttagaccgtattccaaagcgttatattgtcgagccgaataaaactttagatgatgagtgggatactttaaacgataacttaggccgttatgacctatgggtacttggtccaaatggctaccatcgtcattttaaaggggatactcaacgtattatcgatagtggtgttaaacctgaaattcgagtgtgctatgacattgctaatggtgatgtttatgtcgaacttatgaatgagggaaccaaggatacaatattgacagtaaaaccttgtgcatatcgacaagatgcaccattgcaactgaccgtaaaagcgggacaagttgttaagcaacattggtcgttggctgatgttgggcattggtatgattttgaagttacgagccagagtgatccgtattattaccgacgttttgctggccgagtcgaaacaggtgaggactcctttagtgatcctgcaatgatctaa

SEQ ID NO: 63310 - DNA, 387 bp, Acinetobacter baumannii; identical to SEQ ID NO: 55443

SEQ ID NO: 63311 - DNA, 2337 bp, Acinetobacter baumannii
atgaaactatcaaatattgagtatccacagcgtacccaagagctagcaattcttttgaatttttatctgatgcagatcaagccgattgacatgaaaccgataggtctgcgtgatgaatattatcctgtaatggcttatctaaaaatcgtttcacagctggaaaaactcattttaagttttgtgtataacgggaaattagaacggaatgaagagcaaaatttgctcgacctactgcacgaaatatataaacaaggagaaggacgttttaagctagaagaaattcctgctttggagatggagctgacagagtcccaaattcaggcgataaacgttgtattatttggtcagcttcatggcatagctcaggtctggctcgactctgattatacgacagcgctttttcaactctatcgggtagggcacaacaaatttaaaagggtgtctcacaaagaaagctattctgatttccttaaaaaaagaaataatattattttgcagaatagttttcctgttcttgagaagtttacatcagatttttgggtgtcacgtgatcaacggatcacgaagttgcaatctacgtttgatcaaatgttcgcttcaaaaaacagtgtaaaagtactgtgtattaatttatttgcaccccaatttaatggcgaagctcaaattgtttttttaaatgaggctttaaaaaaactccgtagtgagatgaggaagcaggagcactacctcggtctattttataaacttgaatatggcgttgatgggcaatttttttacttttgtgttgtggtttttgaaaatttaaaaagcttggcgattcgtgatttatataaaaatgttgctactgtctggcaagcgatatatacggaagactatcctttggaccctcaagtcaaacttcgtttgacagagttcctcaatagcaagctttaccgtacttcgactttacaagccggagtcatttctagaagtgggccaagttatgcacagtttgtaagaacaacacttgcttatattgccaatgcacaacatctcttacaaatactttatagggagattgtctggactgaagaaaagccgtatgaccgtgccgataagcctagagaaatccctaaaaaggccattacgccaagaaaaccaaaaaaactggaacatcatcaggaaaaccagtctctcctacaagcattaaaattaaaaaatgtttttaagcctttgcaaaaggatattctggatattgggctgtgttatgaacacatcccctatattgatcggtcatacagtcagaatattctggactttacccctgcaatgatccggatggaagttgcggtgcttttagctcctgtctggataagagacccggttacgaatgaggggatggagatcaaacaaaatgattggggcggtttactacaggatgagccacaagaacaaaagaatattgaaatttttcttcagtatactgagtttatggggccaagggttctatgctttattgctgcttttttaatgtttccaagacaacaatattctcctgtctatggttatagcttatataaaaccgcattgcatcagaagatacgggaactcatggcattaccgcttaaactgtttaaagagcaaataaagggattggtagacaagcagttgatgcccgctgctgcttttaccaaactagaaaccttgttgacaagccaacggtttcatacagaatcattacaagactggttaaaggtgcaggagcgagtcaaaaaaagatcatttctcagagttgatagctacgtcaaaaaactggaaaacgaacagaatgtttatcgagatgtagaatttacgattaccgttctaaagactcaatctttaaaaccaatcgatacccttttgaaaaacattattgatcattttaataaaactcatccgcagcttatggggtacgttggatattggagttttcagcaagtagatgagcaaaagattcaatatattgcgaccctcacattttatctggatgaacgctatatagaatcaacaggaaccgaaagctggtttgaaaagctcaagtatcaggcggagttacgtctggataaaaagaccgaagctttgaatatttatgaaatcaaggtgaaacaaattgacaacctcatggaatacgtcgggtcttttcaatccaagtttaataaaaaacctcatccgcgacgttatacatcaagtcttttatttgccttaatgcatcgtgatttatactggatgcatacagccgtacttcagaaacaaatgttgattcgcgggcgaactgactacaaaaaaagaaccagaaaaaagacaaaaaaacaggcgtaa

SEQ ID NO: 63312 - DNA, 495 bp, Acinetobacter baumannii
atgaaatctaacttaatcactcggtcaggccatgacaaattagttgctgaattaaaacaactttggcatgaagaaagaccagaaattacgaaaaaagtaaattgggctgcaagcctcggtgaccgtagtgagaatgcagattatcaatataacaagcagctccttagaaaaattgatcgacgagtacgctacttaggaaagcgtttagaagagttgaaaattgttgattactcacctgagcaagaaggcaaagtttactttggtgcttgggtcgacattgaaaatgaagaaggggagcaaaaaactttacgaatcgtcggggtagatgaaatttatgatcaccatcctcagcatatttcaattgagtcacctatggcacgtgcactcttgagtaaagaagtcgatgatgaagtagaagtacacacgcctttgggcaaaaagctgtggtatatcaatgcaattcgctatgaaaaacctaaaaatgatgaaatttag

SEQ ID NO: 63313 - DNA, 204 bp, Acinetobacter baumannii
atgatggatttttacgaaattgctttcgataaagattatgaaagttacaaaattaattctgaaaacataactgtagaactatcagtttttcaatctttgtggggggcttgggaaaagtttgtagaaattttttattttcaactttatatggagaacaaagaaaagaaaattaatgaagatgaaataaaaaaagcttttaattaa

SEQ ID NO: 63314 - DNA, 1347 bp, Acinetobacter baumannii
atgacgcctagtgttattgctgaatatatggcaagtctgtttactctaggtcctaaaaatatcaagcttttagactgcggagcaggtattggttcattaactgtttctgccataaaaagacttaaggacattagtctaatagagctttgggaaatagacccaattatgcaagagcagcttgaaattaacatgcagactcagccagctccttctttaattcataaagaagattttatcttaggtgctgttgaaaacttactttctagccaaggcgaacgatacactcacgccatattgaatcctccctataagaaaattaatagcaattcagttcataggaaggcactacgaaaagtagggatagaaactgttaacctttactcagcatttcttgcattaaccattctcctgatggaacaggatggtcaaatcatagcgattatccctcgatccttctgtaatggaccttattacaaaccttttagagagctaatattaaaagagtgttctattgaacatattcatatttttgaaagtagagatatggcttttaaagatgatgaagtactacaagagaacatcatcatcaaattagttaaaggcaaaccacaaacagccgttgagatttcacaatctaacgaccaaaattttaatgactatcaatgtaaaattgttccgtttactgaggtaatcaggccgaatgaccctgaattatttattcgtattgctacgaatagtcaaccacaagaagaagataatcctgttttctccttctcattaagtgagcttggtctatttgtgagtactgggccaattgtgtcacatagaatgaaggaattcttacaacagtaccctcaagatgattctgctccactgttctatccacaccacttctttaataaacaactcgaatatcctaaagagcataaaaaaccaaatgctattagagtcacaccagattcacaaaagtggctaatgcctaataatggcttttatgtgattgttaggagatttagttcaaaagaagaaaagcgacgaattgttgctaatgttatagaccctagtcaaattgataaaaaatggattggttttgataactgctggaatgtatttcatattaaaaaacaaggttttgactatgaaacagctatgggattagcttgttttctaaatagtactatgcttgatgaatatttccgtgttttctcaggccacactcaagtgaatgcgactgacttaagaaatatgaaatatccaagtcttaagaacctgcagattttaggtaaaaaatacgatattaaaatgactcaagatcaaatagacaaacttgtagaggggattaagtga

SEQ ID NO: 63315 - DNA, 945 bp, Acinetobacter baumannii
gtgaataaccaggagctaaaacttcaacaggcactccaaattcttatagatttaggaatgcctcgtcagcaacaaaatgaacgtacagctctttgtttgctatgtttacttgatatgactccagataaaacatgggatcaggccagtcacccattagtaggaatcactccaattatggattggtctcgcgagcactatcaaaaagactatgctccgaatacacgggaaacatttcgtcggcagtctatgcatcagtttattgaagccggtgtttgtctctacaaccctgataaaccagacagacctgtaaatagtcctaaagctgtttatcagattgagtttaatttgcttcaagtacttcaagcttatgaaacagatcaatatgaaacaatgctgcagcattatttagcacaaagacaaacacttgcgaaaatgtatgctagagaacgtgagatgaatatgatcccactacaattaaaagatggaaaaacgattctgctctcaccaggtgaacactctcaactcattaaagatattgtcattgagtttggttcaagatacatccctggagggtcattggtatatgccggcgatacagggaataagcacggtttcttcgatgtagagttattagattctttaggagttcaattagataaccacggcaaattaccagatgtagttatttataatcctgagaaaaactggctattcttaattgaagcagttacgagtcatggtcctgtcgatcataaaagatatggggaattaacttcattattcaaaaactgtacagcaggattagtttttgtatcagcattccctgataccaaaacttatgtgaaatatagtggcgtaattgcatgggaaacagaggtttggatggcagataatccatcccatatgatccattttaatggttctagatttatggggccttattaa

SEQ ID NO: 63316 - DNA, 258 bp, Acinetobacter baumannii
atgtctctagttgaacataaaactctgaatgaattttctacaaacactaatgatgatttctttaataaaacattttcagccggagctaaagttccgcactctggaatttaccgttgtactcaatgtaagcgtgaagtagcggtcaatgatcatgacaaggacaataagtttcctcctcattatcaagatccaaagtttaattgtactagcccgaaatggaagccttatgtgatagcagatacacaagcaaaattttaa

SEQ ID NO: 63317 - DNA, 597 bp, Acinetobacter baumannii
atggaaatttttgaatcaagcaagttgtttttatttattgtctttgctatcccgggattcattgcaataaaaacatattcattactatgtcctaatcaagataaggatagtacaaagctaataattgatgctattacatatagctgcatgaactatgcaattctaggccctttcatttatatgatgctattcagtaaaaaatgggtattcatatgttcattttttacatttagcttttatgcctttgtaatgcttatttttccagccttcttagcatggttgtggttgaaacttagagaattagaattttttagaaaaaatgcacctcacccgacacctagaccatgggattttgttttcagtgatacttctacttggtattacgtaattattaccttatctgacggtactaaaattgctgggcaatatagtggaaactcgttcacctctagctacccagaagaacctcaaatctatttagagaaaacttgggtgttaaatgaagatggggggtttgaaagagaacgagtgtcttctaaaggaattatagtattatccaaagatattcaaagtattgagttatttgaacatccataa

SEQ ID NO: 63318 - DNA, 141 bp, Acinetobacter baumannii
atgtcaaagatccgtttaccggcaatggatggttatcagccatctagcagaccaaatgatagtcaaactagaggttaccaaccccaacaagtcacaaatacaacaacaccatcaaataaaacaccgccaaagaaaccatag

SEQ ID NO: 63319 - DNA, 162 bp, Acinetobacter baumannii
atgactgataaaaatcgtagattcccaataggtgatgggtacaaaccaacctctggtacacctaataatcctaaacctggagctggttaccaaccagaaaaatcaggaggaactaaccctactaatccacaaaaaccatcttctccacctaaaaaaccataa

SEQ ID NO: 63320 - DNA, 498 bp, Acinetobacter baumannii
atgaaaattgaattaacagataaagagcgtttatttctagctaatcagcatgaaattttaggtcatttaaataaggataattcagattatcactttaagttagctgaacaactacgtgatggtcatgagtggctatactctcaaagttttgataacttctctgaaaatttacctgatgatgctgctgagctggttttaaatatcttacaaatctacgaaatgattcaagatgcttatgatggactatcagataagagtctaatttcagaacatcaaattaagttccctggttttgatggcaataatgaaactgaatttatgggtttcgttgatgctttggagaaggacaatcgttttgttgatgtgatccaaacaggaaatagaaactctcattcacctaaagttcatgtgtatgaacgaatgattgctaagtggcaagcctttggcaagccttataatttaactacagaacagctaattgaaattttaggaagataa

SEQ ID NO: 63321 - DNA, 246 bp, Acinetobacter baumannii
atgcaacatccagaaattaaaccctatgattggatcagagtaagtaatcgcaattgtgttgtgatgaatgtgtatcctgctaattctccttttggagtatgcaaagttgtatttaataaaacgaaacctactactcatgacgttgattggaatggtcaacaatggttttttcctgagcgtcccgattttggaggatatggtagagatggatgtccatttgttcgaaaactaaaacaaggactataa

SEQ ID NO: 63322 - DNA, 1317 bp, Acinetobacter baumannii
atgttaaaaaaaaatattctatttctggtcgttgtaatttatcttattactgctttattaggataccaaattggctggtcagtctttcaatatgatgaacttcgtttattgcagcttcctttagcactatgtgctttattcatattaatcttcgcaaaaaaacttgaatattcaatccatactcaaattaatttttttattattggggtgctgatattaactcaacaaataaattgggaaatttttgagtttcaagagctttggtctgcgatagcattactttttatattttctgccttaacatatgagttaaggaatataaaaaatatagagcatggtattgcactaattgtagttacagcgattattccatgtttatttattttgatttctatttttaattttatttcagtccaacaatggtttgattggcagtttaattcaggctcaattcgaatttatgacagtgtaattgtaccgctattttttcttctcattttccttaaaaataagaaagttccatatattcaatatctttatccattaggtatttttctttttgctttggcttggttgtttgatggtgcaaggtctgctttgcttgctgttctgattggcctgacaagcttatttattttttcaaaagacaatcgtagattggtgctgcaaacgattgtttatatgtttgtggcgtttgctgtttataaaagcacggtttattttgcagataaaaataccatgacagtgttgcgtacagggacatctctacgtgctgagatgtggaagtttgtatttgagcaatggaagcagcatccctttacaggggtaggtggtggctatttatctaaaatccagtatgcgtatgggcatcatatacataatttatacttgagattaatttttgaatggggtgtcattggatttatatttctaatttggatgttatatcaactgattggcttatttaaagatagagccgtttcacttgttcttaaagcgggtgttattgctgttttagttgatgcgatgttctcaggcaatatggtttatcctgcttcacagattgcatgtatcttatttattgcattggctttttcacaacggcaccatattggtgatttcacttcagcattctcaatttggtcaactaaagtacttgttggtatgtggggtatcctattcttatatatagcgatcgttcattttggacaagatttatcttgttggaattgcggtagttatggagggaggatggcgccaaacttttgggaatatgggggagcagagcatcttatttcttctgaccagattccgtaa

SEQ ID NO: 63323 - DNA, 138 bp, Acinetobacter baumannii; identical to SEQ ID NO: 56569

SEQ ID NO: 63324 - DNA, 639 bp, Acinetobacter baumannii; identical to SEQ ID NO: 54446

SEQ ID NO: 63325 - DNA, 381 bp, Acinetobacter baumannii; identical to SEQ ID NO: 44127

SEQ ID NO: 63326 - DNA, 429 bp, Acinetobacter baumannii
  misc_feature (374)..(383): n is a, c, g, or t
atgtttaatctcattatagccatttggctaggtgcaattttaaatattggtttttatcatcaagttcatactttaactccatattttggagtaaaggctattttgtttttagctgctactctcataattcttgttgctacctattatgcggttttacaaatcttaaattggaaatggactgccaaaatctttgcaattttattgatatttattggtggctttagctcttattttgtaaacacattgggtgtcattatttcacccgaccaaattcaaaatatggtgcagaccgatgtttcggaagttaccgatctaatctctttacgctttgttttatggacagtttttttttgtttttttacccatttttttannnnnnnnnnactcaagttaaatttaaacaagaaaaagtatcacggttgttattga

SEQ ID NO: 63327 - DNA, 672 bp, Acinetobacter baumannii
atgttttcagttactcgacctactacttttcctaaaagtttaacaaaatctactaaagactaccgtgctgctgatgttgttgaagtacttcaagatatatttttttctaaatgttatctatgtgaaagaaaaggattctctgacgtaaatattgagcaccgtgatccacacgaaggcgaccttattaaaaaatatgattggaataatcttttctacggatgtgttcgatgtaatggtattaaagccaatatatataagaatattatagattgttgccaaactttagatgtagctcaagctattgagttacactgcccaatagtcaataacgatgaccataaagtaattgtaacagttggaagtttagcaagtactatcgaaattgaatctacaattaaacttcttgaccaatgttttaatgatacgaatacagctctaaaaggtataagtaggcacactttaataaagcagatacagaaatatcaaactaaacttttaattattaaggatgagcttttggatgattcattgatactaacttcttctgaaaaaaatctgagaatagaaaagttaaaggttatgtgtgaccctgaattccctttctctgcattttggaaatggtatatcactcgtgatgttgatttatcaaaaattgttggaaatgttttttga

SEQ ID NO: 63328 - DNA, 402 bp, Acinetobacter baumannii
atgtcatcagtcagcattgctgaataccgcaagttatttccgataaagaaaaataaaaagcggcgttcagcaaagcaaggtacaagacagccgagtgaaggcgagacggtattagcaacacatttaaaagcatgcaagatcagttttgaacaggaatataaattccatcctgaacgtaaatggagagcagattttttaataacgggtacaaagattttgattgaggtggaaggcgggatctggagtggaggccgtcatacaaggggcaaaggctatataggggatatggagaaatacaactccgcagcaatgatgggttttacagttttacggttcagcacagagcaagtgaaagcaggcgtggcgattaaacaaattgagcaattggtaggtgaaaaatga

SEQ ID NO: 63329 - DNA, 237 bp, Acinetobacter baumannii; identical to SEQ ID NO: 54403

SEQ ID NO: 63330 - DNA, 612 bp, Acinetobacter baumannii; identical to SEQ ID NO: 63125

SEQ ID NO: 63331 - DNA, 630 bp, Acinetobacter baumannii
atgatgaaaattgctgttctagtctctgggaacggcagcaacttacaagccttgatagatgcaaatctatcagggcaaattgtaggtgtactgtctaataaagccgatgcttatgccctagagcgtgctcaaaatgccaatatcgcgacagccgtaatttctcacaaagactttcctagtcgtgaagattttgatgaagctatgcatcagcaacttatcgcatggcaagctgacgtggttattttagctggctttatgcgtattttaactgctgactttgtcgataaatggcaaggtaaaatgcttaatatccatccttcattattacctgcctataaaggcattaatacacatcaacgtgtattaaatacgggggatcgattacatggctgtaccgttcactttgtgacttctgaacttgatgcaggtcaagcaattgctcaatctgccattgaagtaaaagaacatgacaatgttgcgtccttggccgaacgtgtacataaacttgagcattttatttatcctcaagttgcagagtggttatgtaatggccagctcacatggaaaaatggacaagcctatttccgcaatcaaattcttgaataccctatccgttttgcatcttggtaa

SEQ ID NO: 63332 - DNA, 522 bp, Acinetobacter baumannii
  misc_feature (510)..(519): n is a, c, g, or t
atgaatattgcggcgcagcctccagttcaggcagatcaaacagtttatttaaaagattatcaaaaacctgcgttcttggttgaatcaattaatcttgatattcaagtctatgacgataaaacaattgttgattcaacattagtcatgaagcgtcaaactgctggagacttggtgctactgggccgtgatcttgagttgcaatctattcagctcaatggccaagatcttactcctgcacaatattcactcgatagtgaacaactggtgatcactgatgcaccagatgaagtcattttacaaactcaagtgattattcacccggaaaccaacactcagcttgaaggtttatataaagctggtgacttatttgtaacgcaaaatgagcctgaaggtttccgtaaaattacgttctatccagaccgtccagacgtactttcagtttttactacacgtgtagaagcagacaaaaaatatccggttttacttgcgaatggtaacttgcttgaaacnnnnnnnnnntga

SEQ ID NO: 63333 - DNA, 2124 bp, Acinetobacter baumannii
  misc_feature (20)..(29): n is a, c, g, or t
atggtaacttgcttgaaacnnnnnnnnnntgaagttggtgaaaaccgtcactttgcgatctggcaagatccaactaaaaagccaagctatttgtttgcttgtgtgattggtgatttagctgtattgaaagaccgctatacgacttcggaaggacgtgatgtcgctttagaaatctatgccattgagaaagacattccaaaatgccatatcgcaatggaagcattaaagcattctatgcactgggatgaagagcactatggccgtgcctatgatctcgacaactatatgattgtggcggtgagccagttcaacatgggtgccatggaaaataaaggtttaaatatctttaacacctcatgcgtacttgccgatgaagaatacacaactgacgcagcgattatgcgtgtacagtctgtgattgcccatgaatatttccataactggacaggaaaccgtattacttgtcgtgactggttccagttgtgcttaaaagagggtctaactgtattccgtgatcagtctttctcggaagatttacaatctgctgcggttcaacgtattgacgatgtcgctgttcttaaatcgcatcaattcccagaagatgcaggtccattgtcgcacccaccacgcccagaccactttgtcgaaattaataacttctatacagcgactgtttatgaaaaaggtgcggaaattaaccgcatgatgtcgacattactgggtaaagaaaaattccgtcagggaacggatgaatatttccgccgacatgatggacaagccgtaactgttgaagactgggttgctgcactctctgcaggtacaggtgttgatttatctgcattcttaacttggtataaccaaccaggtacaccaaagcttgaagcgaaaggtgaatatgatgcagcagcgcaaacttatcgtctaagctttaaacaaagcctaaaagcgcatccgaaatatccaaatttaaaagctgtcccaattcctgtagcgttggcattatttaatgcgaaaacaggtgaacaatatacgctccaaagcgaaagcctatttgtaaatggtgttaaagatggcgtgtatttatttgaccaagatgaagcaactattgagtttacaggggtaactgagcaacctgttgtttcgctactacgtaatttctctgcacctgtaaatctggtatttgattacagtgatgaagaattagcattcttaattcaacatgaaacaaatggttttaaccaatggcaagcaacacaaaccttgcttgaacgtattttgttagaagatcactctgcggatacctatattcaagctattcaaagtacattacctgaattagttggtcgtgatccacttttagcttcgcgtttgtttgatgtaccaactgaaggttatttgggtagccgtattgatcaaaactatgcaccagccgatatccatgtaaaacgtgaagccttactcaatcgtttggcacaagagttggggtcgttctggaaagatacgtaccttacactggaccctgacttgcaaaaagaattttctttagcgatgggtgtacgtgcattaaagaacattatgctcatgatgatggcgcgtcagggtgatcaaagtgcatttgaattagcttatgagcaatatcaaagcacggggaatatgtctgaacgtttaggtgccctgcgtgtactagtgtggcaaagtgcgcctcaagcacaagaagccctagctgatttctataaccgctttaaagacgaagcattgtctttggaccaatggtttatgattcaggcagcaaatccaaatgccacagttgagacaattgaatatctaactcagcatcctgattatgacttaaccacaccaaaccgtattcgcgccgtgagtggtggtttgtcaaataaccctgaaaatacgtggggctttggtgtagctcactttattaatcttgcagaatatctggacgagaaaaacccgattttaggttcacgcttattacaggtgttatctcgctggtacacgcttgccgaacctcagcgcactcaagtgcaacaggctttacaagcgttgcagcctaaagtgaaatctaaaaacgtttctgaaactttaaatagtatgctgagcgtttaa

SEQ ID NO: 63334 - DNA, 243 bp, Acinetobacter baumannii
atgagtaagcgtgcgtcatcttctaaccatgctctcatccaaatttgcatatattcagtggggcggtattcactttggggtgctaaaaatgttaagtctaatgatgaaaataaaggggaaccgccggaaccgcaaaacccaaccatgacattagattccgctaaacgtctggcagccgcatctgttaatgagctgcctttgccaagtagtaaaaaggcggtgtttttctctggaatattataa

SEQ ID NO: 63335 - DNA, 1542 bp, Acinetobacter baumannii
atgctgtctcgtgtggtacgacaaattttacaagcaacggtttatgatgttgcaattgaaacacctctcgaagcagctccacgaattagtcaaaaattaaacaacacaattcgttttaagcgtgaagatttacaaccggttttttcttttaaattacgcggtgcctataaccgtattagccaattaccgaaagaacaacttgaacgtggcgtcatttgcgcatctgccggcaaccatgcgcaaggtgtagcattgtctggtcaacgtttaggtattcctgcaattattgttatgccaagtactacccctgacattaaagttcaggcagtgaagcgtttgggtggccaagttgtattgcatggcgatagttttgatattgcaaacaaatacgctcagcaacgtgccgaagctgaaggattagtttttattccaccttatgacgacgagttggttattgcgggccaaggcacaattgcgaatgaaattttacgtcaatggcgtgatgtagaatatgttttcgttgctgttggtggtggtggcttaattgctggtgtagcagcttacttaggtgatgttgcaccgcatgtcaaagtcatcggtgttgaatatgaagagtcagcttgtttaaaagcagcgctagaagcaaatgaacgtgtagtcctaccccatgtaggcttatttgctgatggtacagcagtcgctcaaattggtggtttaccttttgatatcgttcgtctacgcaagtcagataactctggaccaattgttgaaccagacattgttactgtaaatacagatgagatctgtgctgcaattaaagatacttttgatgaaaaccgcagcatcgttgaaccgtcaggtgcaatggccctagcaggtatcaaaaaatatgttgccgagcataaaattagcggcaaaaacatggtatcgattgtttgcggcgccaacatgaactttgaccgcttacgttacattgcagagcgcaccgaattgggtgaacaacgtgaagcaatttatgcagttactctttctgaagaaaaaggcgcgttcttaggcttctgccgtgctctacagggccgtaacattaccgagtttaactaccgtgcaaataacacagaagaagcacaagtatttgtgggtattagcttaaaaggtggtgacactgaacgtcatgaaattttagaacaacttaaacagcaaaattatgttgtagatgatttatctgatgatgaagttgctaaattacacattcgttatttgattggtggtcatgccaatctggatgacgaaagattgttccgtgttgagtttccggaacgtccaggtgccttactcacctttttaactcgtttaggtccaacccacaatattacgctattccattatcgtaaccacggcgctgctgaaggtcgtgtactagttggcttacaagcaacagatgctaaacaaaacccagatggtttaattgaaactcttgagcaaattagctatccatatgcagaaattactgacaatgtgggctataaacgtttcttgaagtaa

SEQ ID NO: 63336 - DNA, 279 bp, Acinetobacter baumannii
atgatatatccttattttatacatccttctagagagaaaaataagaagaatgaaatacaaaataagacaatcgtgatccagaaaagaaaacttactcaagaggaattgttagcacaaaagaaaattgacgataatcagttaaaaaaaattgaagaaaagaaaaatattgagaagaaaaagcaacttgatgcagcggtcgcgaaagaaattttagaaaacggtgaaaaaaatggatggtgcaagttgctttggcacctaatcaaaataaagcaaatatga

SEQ ID NO: 63337 - DNA, 498 bp, Acinetobacter baumannii; identical to SEQ ID NO: 58604

SEQ ID NO: 63338 - DNA, 2154 bp, Acinetobacter baumannii; identical to SEQ ID NO: 58607

SEQ ID NO: 63339 - DNA, 282 bp, Acinetobacter baumannii
atgaaaatactagtactgtgtatcgtgaacttcataatctttacacaatccgctttagcactagagtatcgacagattagaaatactactgatgatcagtttgaagtaattgaaatttctaatttagaacaattacgcttatttctgaaaaatccgcaaactgatcaatattataaaagtttcgacaatattcaatatcaacttaaagcatgtgaacagcttacttttgcgatgaatggaggcatgttccattccggtttttctccagtaggacttttttag

SEQ ID NO: 63340 - DNA, 2328 bp, Acinetobacter baumannii
atgtcagaatctaacccaagccgtcaaaatgctgctgatattccgcgggtatcattaaaacagacactggaaaaactctttggtgacgagcagttcaaccgtgcagaacatattcaatatattgctgatttactgacttcacaccccagtgatcaatatctgaaggagctgaacctcgatctattagattttgatctacaaaccaattctgttgttgctagacccgctgccttagtctcctctcgaaaacatactgttagtgcaacacccgttacttggtatgtgaactcaattgcacaattagcagagtcagaagaaaatgccttaatctggaatatcctagtcttaaaagcagcaatctatttaattgcactgccagacattaaacctgaactttttaaagaggatcacactgaacatttcaatactgtaaaacgtttattccaacgcttccgtaccgccaatcggattctaagttccgaaaaagaatatcaaaatactcctgaatatagactcctttgggaaaagtatcttaaagatccctccctttccttagttgaatttattcggtatttgaatgaggttattgatgaagaacgtgataaagagtcatctaatgattttatgcaaaacctgctaaacgtgatccgcatcacctttaattatgttttggaaaataaggcaaaaattgcaaaagcgagcatcgagacgcaactgcaacatgaatttttagacgaagatcagctgattgcagaaagttcagaaattaaaaaagggcaaaaatctaaagccctcaatatagaacaacaactagatgaccaagatacacgtcaaatattagtagacccaaccatcgttaccccccttgctgcatattcagaatccagccagagctatgtgctgcctctggttgccaaacatattcaacggaaagaacatttgctgccatacagcagcctctttcctaataccacaagcataagtgccctaattactgaactatataaaaattacattattgagattaaagaagactctaaagacaaggataaagaaaccaaaaaaaagaaggcatccttgatcctgatgttgtcatttctgacaggaaataaaatccaggagtggctacgtctacaaagtaaacgtgctaaaaatttaaacgctcgccaacaaatcaagcaaagcaatggacaatattatctgagaagtaaattttcaatttttgaaaataaggattttgcttatccagagggcttgctcaaccaaacagttcatctggacatcccgatcccgaattcatttattgaatctctgcgagacggtgaccccgttacggaagaggaccttcagcaacatttgaaacagctgagagccaaattttatattccaaaattatcactaataagaattggctctcttttacatcagactattttgcaacgcactggaaataaacagcttgctgacattcttactggtattgatgccaataagtcttcttctacttcttattgtcatcaaaatatcctgactttacagactgaatatgtctcaattttaaaagagctgtgtgagtcgttatccgatgactaccagaatattgaatatgctgcagaaaaaaactttggaagccgcaaagcacctacttcaaatgtgattcaaaatatctttgccactctcaaattcagaataatttcacaaaaagaagacgactggatagcaatttttaatcactacaatctgtggatgtggcatttcttgttgctctttactgctgcacgacccgtcgctgaatttccaggttttttaaaaagctttaacctgaaaagaaaaatatgcatggtttctgataaggaggtgggtgggcgtcaaggctatggacgtttaattccactgggtcattttgttgtacaagaactccagaaattcatagattttttacattattttaaaactcaaattgctcctagtcagccagaaattccacaacatattcaacaaattttagagagcaagctcccactattgaatatctttcaggatggtcaatggtaccccttaaggccttcgattataaaaaaatctaaccctgagttaagtttgctacatgaaaactggcaccggcatactgcccgtgcgtttctcagccataaaattagcgaaattgaaattttagctttattcggtcatgaaccgatgcagcaagaagctgctcatccttattccagcttatctatttcacaatattcaaggattgctcatattcttgaacaaatgaaagatcattttaatattaccggtattgaactcgatgtcctcactcaataa

SEQ ID NO: 63341 - DNA, 306 bp, Acinetobacter baumannii
  misc_feature (236)..(245): n is a, c, g, or t
atgaacacttctctttttccatcaatgaccttggatttagaaggtatgtttaaaccaatctcactgtatatagggttgagatatactcgcgctcgacgcagtaatcattttatttcttttattgcattggtttcgatggtcggtttgacacttggtgtcgctgtactaattacggtactttctgtaatgaacggtttcgaccgcgaattaaaaaatcgtgttttgggaatggtacnnnnnnnnnnacgcaaatccttacggattggcctgaactggttaaacgagttgaaaatcatccccacgtga

SEQ ID NO: 63342 - DNA, 1461 bp, Acinetobacter baumannii
atgtacaaatataaaaaagtgagtgatgaccttactcttcaaattcagaatggtaggcaacctgtgggttctcggttgccatcaattcgagactgtgcccaacattatcaagttagtattaacaccgtaaaagaagcttatcggaagcttgaagaccaaggtttaatttctgttcgcccccagtctggctactatgtttgccatacaccttcaaacttgccagatcttgaggagcgttatatcagtgaagaaaaagtgcccctttcaggaattagctgttttctcgcgcaaattgttaaaaagcagatggaccccgactatgtcaatttggccctagcttgcccatctggtgaaaacttctacccgattgaacgcttaaaacgtttaactgctcaggttttacgaacacagccagatatttttaaaagctatactttaccgcccggctctatacgtttacgtactcaaattgctagacgtagtttacagcttggtatgtttctatccgcagatgacattgtgctgactcatggcactatggaggctttaagtctcgcgattatggcaaccacccaagcaggtgacagcatagcgcttgagatccctacttttcataacttatatccacttcttcagaatttaggacgaaaaattgtagaagtgccgacttcgccgcatacagggatgtgtctagacgcacttgaagaactcttaaaatctcaaagcgcacaagccatattaactattccaacaggacataatcctcttggttttagcatgcctgaaagtaaccgacgtcgtttagcagagctcgctaatcaattccaaattcctgttattgaagatgcgatgtatgccgaattacaactcaccgaacctctactacccaacattaaggcatttgaccaaaatggatgggttttggtttgtggcagctacaccaaaactgtggcacccgactatcgaattggttggctagaagctggacgcttccgtaatattgtgcagcagcttaaatttacaaccactgttgccgagccagctttactcacagaaacgttgggactttttttagaaaatggcggatatgatctacatttacgtcagctcaaaaaacgctatcaacaacaaattgacaccatcaaatcttatatttgtcgttattttccagtcggtactcgagtcagtcgtccacaagcgggatttattttatggttagagctacccgaatcaattgataccctagaactgtttcatcaggccatggatgaaaaaatcttatgtatgccgggaattttgtgctcggctgataaacgttttagtcattgtttacgtattgcagcttgttttgagttaaatcctaaaatgttaaatgctttgatgcgtttaggagagttagcaaaaaatatgctacctgtacaaaaagctatagatcaaatccctactaattcagtaggttga

SEQ ID NO: 63343 - DNA, 2715 bp, Acinetobacter baumannii
atgagcgtatcggaaatccgaccgattgccattgaggacgaactcaagcattcatatttagattacgcgatgagtgtaattgtatctcgtgcattgccggatgtgagagacggtcttaaacctgttcaccgtcgtgtgctttatgccatgcacgaattgggcaatgactataacaaagcctacaagaaatctgctcgtgtcgttggggacgtaatcggtaaatatcatccgcatggtgactcagctgtttatgaaaccattgttcgtatggctcaagactttagcttacgttatttattggttgatggtcagggtaacttcggttcgatcgatggcgatagcgccgcggcaatgcgttataccgaagtccgtatgactaagctggcacatgagcttcttgcagatttagaaaaagacacagttgactgggaagataactacgacggttcggaacgtatccctgaagtacttccgacacgtgttccaaacttgttaattaacggtgctgctggtattgctgtaggtatggcaactaacatggcaccacacaacatgacagaagttgtgaatgcttgtttggcttatgctgacaatccgaatatctcgattgaaggattgatggaatacattaccggtcctgacttccctacaggcggtattatttacggtaaatcaggtattgttgatgcctaccgtaccggtaaaggtcgtttacacattcgtggtaaataccatttcgaagaagatgaaaagacaggtcgtacaaccatcgtctttactgaaattccatatcaagtaaacaaagcaagagttattgaacgtattgccgagttagtaaaagagaaaaagcttgaaggtatttcagaacttcgtgatgagtctgataaagaaggtatgcgtattgcaattgacttgaaacgcggtgaaaacgcagaagtcgttgtaaataacttattcttaaatacccagcttgaaaactcattcagcatcaacatggtttgtctagacaatggacaaccaaaattgatgaatctaaaagatattattgcggcatttattcgtcaccgccaagaagttgtgacacgccgtaccatgttcgaattacgtaaagcacgtgaacgtggtcatatcttggaaggcttgacagttgccttagccaatattgatgaaattattgaaaccatcaaaacttctgcaaaccctgctgaagcgcgtgagcgtttacttgcgggtgagtgggcaggtggtggcgttgttgcactacttgaaaaagctggtgcaatttctgttcgcccagatgaaattgaaggtgaagatccaaatcgtccatttggtttaagtgattcaatttaccgcctgtcaccaacacaagtaggcgcaattttagaattacgtttacatcgtttaactggtcttgaacaagacaagttacatgcggaatatactgaaattttaggtcaaattgctgaacttactgcgattttaaatgacttcaacttgttaatgggtgttattcgcgaagagttggcacaagttttacaacaatatggtgatgcacgtcgtaccgaaattgttgaatctcgtgttgatttctgccgtgaagatttaattcctgaagagcaagtagtattaactgtttcacaaacgggttatgcaaaaactcaaccactttcagactatcaggcacagcgccgtggtggacgtggtaagtctgcgacttcaatgaaagatgatgactttattcaacatctgattgtggcatcgaaccatgcgaccgtactttgctttaccaatgtgggtaaagtgtaccgtctgaaagtatttgaagttccccaagcatcacgtggggcaaaaggccgtccaatcgtgaacttgttacctctagatgcaacagaaaccgtaaccgcaatcttgccgttaaccgagttcccggaaaaccactatgtgtttatggcgacagcttctggtacggttaagcgtgttgagttagaacaatttgcaaacattcgttcaaatggtctacgtgctattgaacttaatgaagaagataccttaattggtgttgcgattactgatggtaatcagcaaatcatgttgttctctaacgaaggtaaagcaattcgttttgctgaaactgacgtacgtgcaatgggtcgtacagcgaaaggtgtacgtggtatgcgtgtaagctttgcaagcagcaccttaagtgaagaagatgcagatgtagaaaatgatgattcagatgataatgatgactcagcagattcaagtctagtaagtcgcatcgtatcgcttgttgttgtacctgaaacaggtgaagtactgtgtgcgagtgccaacggttatggtaaacgtactccagtaaatgacttcccgaccaagaaacgtggtggtaagggtgttattgcgatcaagacaagtgaacgtaacggtgagctagttggtgcagtttctattgatgaaaccaaagagttattattaatttctgatggtggtacgcttgttcgtacgcgtgctgcagaagttgcaatgacaggccgtaatgctcaaggtgttcgtctgatccgtttaagcgaagaagaaacacttgttggcgtagtttcaattgaagctgtagaagacgaagaagaacttcttgaaggtgaagtagatacgactgaaactgatagcgaagaagctgtatctaataatgaagatacttctgaagagtaa

SEQ ID NO: 63344 - DNA, 1251 bp, Acinetobacter baumannii
atggctccaattgatatcctgtttttatttggctttttaggtatttggattccacaagcattttgggcatggttaagctatcaagcgtggaaatattccaaaacgactgaaaaagagctgcaaaacttaccaataccagaaagatggccagttttaagtgttttgatccctgcttataatgaaggcgttgtgattgaggacactttgcatgccattgctcaacaggattatccagcagagtcttatgaagtcttactgatcaatgatggctctaaagacaacacccttgaaatcgcagaaaacctcgcaaaaatttatccttgcataaaaattgtcaatgtacccaaaggtatgggtggtaaaggtaaatcaagaacgcttaataatggtcttccccatgccaaaggtgagttaattgttgtttacgacgccgatagtacccctgaacccgattgcgtccgattacttgcccaaaccttattagccgataaaaagctagtcgcggtaaatggcaaagtcagaactcgtaactggcaagatagtatcttgactcgttttattgcgattgaattcatctttttccaatggatctttcaaggtggacgctggcaacgttttgaactatcaacattaatgggaacaaattatgtcatctggcgcgacgccttagaaactttaggtggttttgatgaaaaatcgctagtcgatgatacagaaatgagtttccgaatttttatcggacaaaaacgaattaaatgggttccctatgcaatcggttggcaacaggatcctccttcattaagcgtattcgttaaacagcgctcacgctggactcaaggtaatttttatgtaacacgcaaatatttacctgtagcactgagaaccccattcccaatcgggattgaaattctaaataacattatgtgctatatcctttttgtaccggctttattctggagtcatattaccttaacgcttggcttacttgatattgcaggtatttcagttcctggtccatttacactactgtggggactctcattttgtctctatgtagcacaaatgtggtttacgctttctttagaaaaagttaaaccagaactctatttttattctgtcttatcttacgtaagttactcacaaatcttcttatttattgtgtttaaagccgcattcgacatgctaaaaaataaaatacagggcaactcccttcaatggtacaaaacggaacgtagcaaggagaaaaaataa

SEQ ID NO: 63345 - DNA, 327 bp, Acinetobacter baumannii
  misc_feature (25)..(34): n is a, c, g, or t
atgtgtcgggccttggtacaccagnnnnnnnnnngtacaccagacgatttagttgaattccgtgaacagcaaaaaggttttcaggcacgacttgaacgttggagcgatatttcacgtggttgtcagtcttgggaatatggcgcgaccaaaaactcacaagatttaggcattcaacccgttattactggccgtgaatttacccatgaaggactctatgtaaaccagcatggacactggcaacgtctcatgctcgacggcttaaataaaaaagcgctgaaaatgcaggatattacttttgaaaacaatgccgtaatggatgaggtgtaa

SEQ ID NO: 63346 - DNA, 273 bp, Acinetobacter baumannii; identical to SEQ ID NO: 54601

SEQ ID NO: 63347 - DNA, 1056 bp, Acinetobacter baumannii
  misc_feature (1018)..(1027): n is a, c, g, or t
atgcaactgccgaaagttgacattgatcctgctctgtcacaatgtctcattgaaaatacagcaacctgtggcttatcagaaatagaatttgaacgatttcttcatccaaaatttaaatatcagcagaacactcttactgattcagatgtagaaaaatcaccatctattgtgggtcaatcttactcaaatgatgacattcaacaagcattatatgatgtgataaagattcacaaagaccttttacaattgattcgtaccacacaaactgatcaaagcatcgatgcattaatcattaaatattgcattgaaaatactaataaatttaatgagtacagtaaacgtgtcgccttatggctcatcagcctttataaaccagaattagaacaaattcagtcactggctgaacgtttaaatttttgcactagccaatttcaaaaatcgtttcagcagaataagcgtttaaaagacggttcgatttacacttattattcgcgtattgcagagccttggctgacccattctttacaatatctagatagcgaagatgatcctaatacaataatcattaatatctaccgacaaatcattacaaacacccgacttgcagctgaagccggcgagcctaactttaaaaaatccattggtcaaactgtcagtatgttgaagcgcttccagagctttcaacaaatagtttttgaagctgaacctctcgaattagagtcaatcgctgtacaaaataggcctagagcccgtattattagccctttgacttatcaagctttcatgaacaagttagataccttattttcaggtgctaatagtcaagaaaacacttataagatattaaaaatcatctatatcttagcttaccgaaccggtatgcgtattaatgaaattctgggcttacgtgtgcgggatatcgagggcttgagctgtctatccgtatggattcagccctacggctcaaaaaagaaaggaaacttacatcaacttaaaacagatagtgctgaacgcaaannnnnnnnnnacgcaaagtccctgtgtattgcttattaa

SEQ ID NO: 63348 - DNA, 1377 bp, Acinetobacter baumannii
gtgtattgcttattaaaaaccgatgaatatcaaatatttcgtaattatgtagtcgagcaacgattactcaatcaggaaaacttatacctattccgtaattggaatgaaaatagcaagctgaacaaacatacggtgacaacaccttttagaatgattatgaacgagctttttaaaactcatgattattctttccactcatttcgacacacagcagcgaatcacctatcggttgttctcaactgtaattacgctccattggtcaaaaatctgacggattatacagaagaagaatatcaatctattcgagcagaattactccgtcatacgcatggtcaaaatcattggtttatgattgcccatttactgggtcacattgaccctacagaaacctttaaaagctatattcatcttagctacctgatcgctgggcataaaatactgcaatatcatccagacatcgatactcaattagcaaagaagatgatgggctacctaccttctttcaaatttttaaacacagtaaaagattctgctccattcaattttgaaaagcatgctgttcatttaagtcagcagttacttaacgatcaaactgactggttaaaaagtaacgtagaagacattctagatgaggtttcatttaactcacagcctcatgatttttttaaatatttcgcaggaacaaaagaatctaaagtttcatttgcatggttttttaagtgcctaaatttactggaaattcatcatgatccagaccgggtatcacaagaaatgagcttacctgtcgaactggttagctattggtatgaaaatgccaaacaactgggccaactcaaatctcaaaaaagcaacccaaggttatttgatctcaacaacaaaaatcatctggataaacctttgaaacccgccatgatagataccgttgaagagcgcatagcaagaaactatttctttgaaaatattcaaaatatctttgaaaaaaagccagatgaaataaaagcggtgcttgagacatttttaagtcgtgttacggtttcgcataccggcattcattatcgatggaataaaatcgatcaattggaatcattttattccaaggtaaaagacctgtttccccatcaattttggcatttgctcggacaagacttggtacaattgctagataaaaagaaacagcctttattactgaagctggctaaatcgagcacaacagagcatcctacgactcaagaagattatgttcgtctccagctttactcaacaaaagatactaaagcactggccgcatttaaattctgtttacatttagcctgtattggcagacctcgatctcttgaacttaaagccgaaggtctaaaaataactacatgctgttaa

SEQ ID NO: 63349 - DNA, 1023 bp, Acinetobacter baumannii
atggggctgcaaattgatcaacaacagatattagtagcttggaaagctttatcttcaacagataatcaggagggatgggttacttttcctctatataaacataataattggtctttgttggcaagttacaatcttttaaaacgtgaggaagcaatttttctggatatcaattactcccagattctcgaatcaaggattaccttacctatagctcaaggttttagggtacaaaggtttaatgaggcggcaagaaaaggttttgctcttgtacggcaagtagatggtgatctggacttattcacaaagatgattgtggatgtatgtaacacaataatccaatatcaggacttgaatgaaaataaactagtttctgtatttattaatagaatttatgcttggctttcttttatgtcgaaaggggagcgagagctctctcaggaggcggaattaggtttaataggggagttagaggtaatattgagtttaatttccttaaatctacctatctcagaagtattaaatgcttggaaagggcctctggatggcctaaaagactttgaaatgggttctggtgctatagaaactaaaagtacattatcaaatcaaggttttgttgcaaaaattaattcactcgaacaattagatgatagtgagaaatcaccactatttttaaatggctatcgtttttctctaaattcagtaggtaaaacattaactgaacgaattaatttaattcgtgagcagttaaatgattatccagctgaactttctaggtttaataaccttttgttgagaattggatatctggaaagtgagaaagaaaactatatccgtaaatttaaaactgaaaactcgtttttttggttggttgatgaaaattttccacgattagtacctgggaatatcgctgtaaatataagacatgctaaatatgaaatagatttaacaccctttataaaccagtctattgatttaagtttagttcttcagaaattaggaattggaaattgtggaattaattga

SEQ ID NO: 63350 - DNA, 1182 bp, Acinetobacter baumannii
atggctaccatccgggaacgaagtggcaaactgattgccgactttcgctacatgggcattcgttgcagagaaacaaccaatcttgaagacaatgcttataaccgacgcattttgaaaaaacgtctcgaacagcttgaagctgaaattactttgggaacttttgaatacgaaaagtactttccaaaaagtaaccgtgttgaggagtttaaggaaaaaagaagtcagcaaattgctgtacagaccaaagttcctctttttaaagagtttactgaattgtggtttaagcagaaacaagttgagtggagaacctcataccagcaaaaggtttcaattgtgatcaaaaactatttgattcctgcttttggtaatcaggttctctcgaaaatcaagaagtcagacttgctgaacttccgtgcctctctcgccaaagtgacacacggaaaagatcaaacaagtctgaaagcatcgaggatcaatcaaatcatgacgcctttacgtatgatactcaatgatgcggctgaacgatacgagtttgagtcgccttataaaaatattaacaatctgaaggaaagcaagattgaagtcacacctttttctttggaagaggtgcataaaattcttaccacagtgcgtgaagacttccgcccctattacaccattcgcttttttacgggtatgcgtaccagtgaaatcgatggtctgcaatggaaaaatatcgacttacagcgtcgtgaaatccatatcagagaagcgttagtgaatggtgtgcttggtgcaaccaaaacttatggttctgaccgcacgatccagatgaatgaccgcgtttaccaagcctttctgcaacagaaaagcttaaataatggtaaatcagagtttgttttctgcaatcgtgatggtggacctctcgattaccgtctggtgaataaacgtgtctggcatccgatcttgcgctttctaggattgaagtctagaagagcctaccaaacacgtcatacagcagcaactctttggttgtcggcaggagaaaatccggaatggatcgcacgtcaattgggacattcaacgactgaaatgctattccgagtctatagccgttacattcccaatgttacgcgccgcgatggcagtgcatttgaagccatgttggaaaaactaaatacagaggagcttgcacatgaatag

SEQ ID NO: 63351 - DNA, 591 bp, Acinetobacter baumannii
atgtcaaaatcaaaaaaggggattcaaaattaccgtgtagctgtaaaaaatctgcacttaaagtgttatccaaaatgtatgcatgcatatcaaatatggatagctttattcctccaattgagtgataaacaacagaactaccatcttgatttagcttttaaacagaatatcgacattccactcattaccactaacacactgggtcactatttttttagtagtcatttcagctggatctatgcctatttttacaacaagaataaaaatgaatttacgtttagagcttatgagaaaaataattcctacgaattcacaatccaggctttaagcgaagtaatggccttactgtgttccggattacatcactcaattcatggcttagatatcatcgcgcattggctaaatgaacaatacttagccgcacatcttcaggaagttttcggacaggaagttttaactatcaatcatctaagagaattatcagggctatctaaatcccaaagtccagtaagttctatttcaaattatgctggtccactttcattagaaaaaacagttttcatgactaaaacggatttctttacttcttga

SEQ ID NO: 63352 - DNA, 1248 bp, Acinetobacter baumannii
atgttagaacgttttttgaagaagcttcctttttataacaagacctggtttcaatttattttattcgtaattaagcgttttgaagcggatcgttgccgtgaacaaggcggctctctcacctatacgactctttttgccgttgtacctatgttaacggtatttttagttattatttcttcaattaaggcattggaacctgctagacaacagttacagcacttaatctacagtaattttttgcctaaaagtacgattgcttttgataaagctcttaatgcttttaccgaaaagtccagtaatttaactgtaattggtgtgctattcctctttgtcacaacagttttaatgcttacttcaattgaaaccgtttttaaccgaatatggcgagtaaaagaaacccgtagcggtattgtaggctttatgcgttactggaccattatttcgcttggtccaattattttaggcagtgcatttgttatttcatcaactgttgcttccatgaatttattgagcaataacttcacaggttatcaacttgatggcgcctttttactctggcttatttcttttgttctcacaattttaggtttttttattttatattggactattcccaaccgcacagttcccctatatgcagcagcaattgctgcatgcttaagtgctgcattatttgagacactcaaaaatttatttagctttgttatgtcaaatttcaccagttatgaaatcatatatggtgcgtttgcagcagtacctattttcctattatgggtcttcttatcttggaatattgtattgcttggtgtcgaggtgagttttgctcttaccgcttttcattcaggcaaagagcaaaaaagacatccggttttaatgctgctcgacatcttggaattgttctataaaaagcaaaaacttggtgaaagcgtaagtgataaagaagcattagaaattttaggtcgtggtgaagttggtcgttggcctgcttatgttctcttactagaagagcaaaatctggttaaacgtaccgataaggatgaatatgttttggtccgcaatttatctcaagtcgacttttggagcttcttcactgcactgccttatccattacctttacgtcaggatgtatcaaatgttcatgatgatgacgaatggatggaaaaaattggcccagctttagtagagtctaatgattatttagctgcaaagctctctattccactttcaacaatttttgaagagaaataa

SEQ ID NO: 63353 - DNA, 912 bp, Acinetobacter baumannii; identical to SEQ ID NO: 52200

SEQ ID NO: 63354 - DNA, 153 bp, Acinetobacter baumannii
atgacaacccttgaacaatcattatctgaaatccctgcattttcgatcattcatgaacatttatttagttcagcgcaaccttctatcgaacaacttaagctcattaaactaaatcattggtttgttgcaaagattgttgaagttctaaggtag

SEQ ID NO: 63355 - DNA, 516 bp, Acinetobacter baumannii
atggctttaaaagtcggaattattaaaagctcggacgtatcaaaatggtgcgaatacaaaggtgctgatggagaggtacaggcagaatttaaagtccgtggtatcgcttataagccttttcaggtagctattgaacgagcaggaaatcagatctcgtctaaaggctatgatgtgatggtcaaagatgaaaatgccaagctttaccatgaattgttaatggatgcatgtgctgcccacttaattgaagactggaaaggtgtggtatttgccgaaatcgtagacggtaaaactgttgagtctgaaaagccatatacacctgagaatgcctcaaagcttcttaatcttggtgatattggtatttcaatctggctattcattaaagaacaggctcagaggattcaggaagaagccgacaaggataaggctttaattctgggaaagtcgtcgagctctacaaataccaaaaaacgtatgcgtcgaaaacgccgcatgaaatcgaacaaatcaagttcttag

SEQ ID NO: 63356 - DNA, 135 bp, Acinetobacter baumannii
atgatgaaacggatagttgacatcgtaatttccttaaccgcattaatcattttgtccccaatctttttttgggtagcctataaggttcgtaaaaatttaggttctccagttttcttttatcaaggatacgtttga

SEQ ID NO: 63357 - DNA, 1542 bp, Acinetobacter baumannii
gtgccgcagattaataatgaaactggagttgttgacttaaattattacgtgaacccaggtcagcaagttaccgtacgtcgtattaattttactggtaatagcaaaacttctgatgaagtattacgtcgtgaaatgcgtcagatggaaggtgcattagcgagcaatgaaaaaattgacttatctaaagttcgtttagagcgtacaggtttctttaaaacagttgatattaaacctgctcgtattccaaactctcccgaccaagttgatttaaacgtaaatgttgaagaacaacattcaggtactactacattagcggttggttattcgcaaagtgggggtattacgttccaagcaggacttagtcaaactaattttatgggtacaggtaaccgagtagcaattgacttatctcgttctgaaactcaagactattacaacttaagtgttaccgacccttactttaccattgatggggtaagccgcggttataacgtctattatcgtaaaacgaagctgaatgatgactataacgttaataactatgtaacggatagttttggtggtagtttaagttttggttatccaattgacgaaaatcaaagtttaagtgcttcggtgggcgttgataacactaaagtaaccacaggtccttatgtttctacatatgtacgtgattatttattggcaaatggcggtaaggcaactagtaaaggtacatattgcccaacagatgcaaatggtaattctcaatatgataccgagaagggggaatgtaaagtccccgaagaaacatatgataatgcttttgaaggggaattctttacttataacttgaacttgggttggtcttataacactttaaacagaccaattttcccaacgtcaggtatgtctcatcgtgtaggtcttgaaattggtttaccaggtagtgatgttgattatcaaaaagtaacttatgatactcaagcatttttccctatcggcagtaccggctttgtgctacgtggttatggtaagttaggttatggtaatgatttgccattctataaaaacttctatgcaggcggttacggttctgttcgaggctatgacaacagtaccctaggacctaaatatccaagtgtaaatctacaagaaactaagcaaaatgatagttctcctgaagaagtaggtggcaatgctctggtccaatttggtacagagttagttttaccaatgccatttaaaggtgactggactcgacaagtacgtcctgttctttttgctgaaggcggtcaggtttttgatactaaatgtaatattgataactctgtttatggcaacaaaggtatgaagattaatggccagaccattacggatgttagaaaatattgtgaagataattatggatttgatttaggtaacttacgttatagtgtgggtgttggtgtaacctggattaccatgattggtccattgtcacttagctatgcattcccgttaaatgataaaccgggtgatgaaacgaaagaaattcagtttgaaattggtcgtactttctaa

SEQ ID NO: 63358 - DNA, 711 bp, Acinetobacter baumannii
atgaaaactaaacttgctacactcatgttgagtttggcttttttcggttctgctcatgctgatgttaaaacacttgaacaaaatctgaagacaaattatccagacctccctgtaaaaggtgtctatcagtcacctgtcgctggaatttatgaagtctatacaagtggccgtattgtttataccaatcaagatgcaaaatacttttttgtaggcaatttagttgatatcaaacaacaaaaaaatatgacagaagagcgaattgccgaattgggtaaaattgatgttaaaagtctcccattaaatcaggcaattaaatacgtcaaaggtaaaggagaacgtactctttatattttcagtgaccctgattgcccttactgtcagcgtctagaacaaaatatggttggggtggataacgtaacggtatatgtattcttatatccgctgaccagcttacatccaaatgctgaaaaggtttctaatcaaatctggtgctctaaaaacccttcagaagcttggacaaattatatgcttaaccgtaaattgccagcagctggcaaaagctgtacaagtccaattcagaaaaatattgctttaggccagaaattaaatatagatggcacaccaactctgttcttacaagatggtcaaagaatctctggcgtaccaagtgatgcaaaacagattgaagcattattacagtcagtaaaataa

SEQ ID NO: 63359 - DNA, 1038 bp, Acinetobacter baumannii; identical to SEQ ID NO: 48297

SEQ ID NO: 63360 - DNA, 816 bp, Acinetobacter baumannii
atgttagatcaaaacattaaaactcaattaaaagcttacctagaacgtttagaaagtccaatcgaattagttgctgctttagatgaatcagataaagctgctcaaattaaagaattagtaactgaaatcgctgagctttctgacaaggtaacagcccgttttgacggtaataatacacgtcgtccaagctttggtgtggctaaagcaggtgaacaacctcgtgtgttcttcgcaggcttaccaatgggtcatgagtttacgtctttgatcttggctctgttacaagtgtctggctatgcacctaaagtatcggatgaagttttaaatcagattaaaggcttaaacctcaaagctaactttgatgtattcgtatcattaagctgtcataactgtccggacgtggtacaggcacttaacctgattgccatttataacccgaacaccacggcaaccatgattgatggtgcattcttccaagacgaagtggaacaacgcaaaatcatggctgtaccgatggtattccaggacaatgaacacattggtcaaggtcgtatgacgcttgaagagattgtggcaaaacttgataccaattcagctgaaaaagacgcagcagcactcaatgccaaagatgcgtttgatgtattggtgattggtggtggacctgcgggtgcaacagctgcaatctatgcggcacgtaaaggcattaacacaggtatcgtggctgaacgctttggtggtcaggtcatggataccatggacattgaaaacttcacttctgtgcaaaagactcaaggtcctaagtttgctgctgaatga

SEQ ID NO: 63361 - DNA, 1503 bp, Acinetobacter baumannii
atgggtaattttttcttattacaagcatttacggttgtatttgccttatcaattgcgaccaccatatttaataagcgtattttgggctttcctcaggctatcggtgtacctcttgtttctgcgatttttgtcttcattttgcaatggggagccagtcttttaaatggtaatcaattcattactatcaatattcataatattgaggaagcagtacgtcacatcgatttctatgattttttaattaatggcgttatttgctttattctgacatcttcagcacttaaatttaaaatttcagatctaagaagctattggaaacagattagtattttggccactattgccttggtaatctgcgctgtattgtttggtagcttactttacggtttccaattgttagttgggcatcatgtaccaattttggttcttctattattaggtgcagcattaggtgcaacagacccgatcggtattaaaggtgttttaagttcaattcgtgctcctcatcatctcattgttaaattagaaggagaatctttatttaacgatgcgatgtgtattgccttatttatgacattactgaatgttttacagggtgaacatttttcattggttgcgacattagaagctttgctttatgaaattgtggtagctgttggtattgggtgggcatttgggataggtaccttacgcttattgcgtggtaaacacgaaatggaatccctgattttaacaactgcattacttgcaagcggagcatatttggtggctctattcgctcatgcttccgcaccgattgcctgcgtaattggtggtttaatcgtcggtaataaatggaaagaaattcgcgaagagcgtgagatcagagaggttaaccatttttggcatacagtagaagggattatcaattcattcttatttaccttaattggccttgagttatttattcttgacttaaactttagcctgattttaggtggaatagttgctttctttattctccatatttctcgttttgccgccaactttatgtcttttgctttcttcccaacaatgcgtaagaccaaaagttacaatggtagtttaactattttatcttgggggggggttcgaggagggatttcactcgctttaattttggcggtcgcgaatattccggcgctgagtccttatagtagtattctgattggatatacctttattagtgtattgttatctggtgtagtatgtggacttggccttcctgcggtaatgaatgcgttttattacaatcctaatgaagaaacggaagggcttaaaggcttttatcaaaagctatgccataaaatgaatcgccgtggctttcaatatatagttggagaagatgcattaggaagagaaacaattactgtctttaacccagatgttattgttgatcaaaaaacagaagacggaatcgcaaccatgcatgatccaaataagttacaagaagtaaaacgtttcgaaagtccacacttcttgtag

SEQ ID NO: 63362 - DNA, 1083 bp, Acinetobacter baumannii
atgctcaacattggtaattcttttaccatccccttacccaaagtttatttagatcgaatctttcagttaaaaaattgggataaagctgatattgcttctgatgtacaagattatctacgtagaatcagtgatgatcttactttccctttaacaactcaaaatcttcctcgtttaatcagtgacattacattgaatgaactaggatatgaattagaaagtaaattattcgctggagaaaatgttaataactacactccatgccattatttctcaacgaaaattattgatatcttagatatttatattcaaacacttgatctggtttgccctcagcttgacactggatatattgaggaatttaaatcccctattacgtttggcagtcagcaagtaccgaatctcccattcgtccagtcttttttttaccagcttgaccacaaagttaggaataatctcaatccctttcagactttaaatcattattcgatgtggctttggcatatttgcatgttgacaacttcagcacggccgagtgagtccttcccgcccagtctagattatattgaccttgacaacaaattgatggctgttgcagataaagagcagcgttattcaggcaccattggacgctatttaccttttaataattttcttcgtgatgaaatacagcattacctaaagtatttgaaatattttctgcagctcgcaaaagcctatttgacgcaagaacaagtacaagcaatccaagaggtcttcgatggtgaacgtctcttgctcttattttacgattcgaaaggatatgtccgaaatctggaactttctgatattcaaaaatactgtaccgaaatagcattacagcgcaattggacccgccatttcgctcgctatttttttgcccaatactgcaatgaagatctaataaatggcatctttggtcatgatgaagctatgcaggaactgtttgaccgctattcaggttttaagacaatagattacgatcagattagagcagcacaagacaagctggtcgaaatcttagcgcttaaaagcatgtctacgtttacaggaatgactattgcatga

SEQ ID NO: 63363 - DNA, 1404 bp, Acinetobacter baumannii
ttgcgtatacatgatcatgcagctttatggcacgccagccagcaaggaccttcactcggtttagtcatcttatcgccagagcaatggaaacaacacgccgatgctccaataaaaataagtttttatttacgacaactcagaacgcttcagaaagagttagcagcactgcatattccactagttattcaagtcattccctattggaaagagatcgcaaactttatttctgatttcagcaagaaatataatattgaaaatgtgtatgccaatatcgaaataggcgtaaatgaattaaaaagagataaaacggtacaagactatttaaatcggcatggcaaagaactatttttatttcatgaccgtactatttttcctttacgttcaatccgtaaccaatcacaacaaccatatcaagtatttagtgcattcaaaaaagcctgttatacaaagctcgacacaagcggtttacctcaatgttatccggtccctaataaacaaaatgaagtaccactagattttttacaggggaaaaatattgatttagacgaaattgaaaagctattttgctcatctatctcaaaagaacagcaagatttatggcctgttggcgaacaatacgcattagaacaattagatcaatttattgaagaatcggtttgtcattataaactcgagcgcgattttcctcatatacaaggtacaagtaagctttcgccttatttaaatattggtattttatctattcgacagtgtttacaagcactctttcgtaatcaacatggcaactttcacttagtcaatgagggccaacaaacatggttagacgaacttctttggagagagttctaccaacatattttatttgattttccgcatgtttctaaacacatcccgtttaagaaagatagtcagaagattaaatggaaccataatccagaacatttaaccgcatggcaaacgggtcaaaccggtattcctattgttgatgccgggatgcgacaacttttacaaacaggctggatgcataatcgagtacgtatgattacggccatgtttttatgtaaaaatcttttgattgattggcgcattggtgaacaatggtttatgcaacatttaattgatggtgacctcgccgcaaataatggcggttggcaatggtgtgcctcaacaggaacagatgccgtaccttattttcggattttcaacccaattgctcaatcaaagaagtttgatccggagggtgaatatattcgccaatgggtgaaagaattggctcatttggacaataaaacgattcatgaaccctactcaagcaaaaccgatcttggtttaaattatccaaaacccatagtagatttaaaagaaacacaccttaaagcaattgaaactttcaagaatatttag

SEQ ID NO: 63364 - DNA, 1281 bp, Acinetobacter baumannii
gtggaagtgcgttggttacaagcgctttctaaccgtccagaaattgttgaagttgctcctttctcagctgaaacaaatgcagctctagatgcaatcgtaagcaacttctctgaagaagatgcaaaccgcattaaagaaattgaacgcacaactaaccatgacgtaaaagcagttgaatacttcttgaaagagaaaattgcaggtattgctgaattacaaaatgcgggtgagttcattcactttgcttgtacatcagaagacatcaacaacttgtctcatgcacttatgcttaaaaacggtcgtgaagttttagtatcaagcatgaagcaaattttaaatgcaatctctgctttagctacaactcatgctgaacaaccgatgttgtctcgtacacatggtcaaactgctagcccaacaactttgggtaaagaaatggcgaacgttgcatatcgtttagctcgccaaatcaaacaatttgaaaatgttgaattattaggcaaaatcaatggtgcagtaggtaactacaatgctcacctttctgcttatccaaatgtggattggccagcgcattcacaagcttttgttgaatctttaggtttaacatttaatccatatacaactcaaattgagccacacgactacatggctgaattatttgacgcgttacgtcgtttcaatacaattttgatcgactttaaccgtgacgtatggggttatatctctttaggttacttcaagcaaaaacttaaagaaggtgaagttggctcatcaactatgccacataaagttaacccgatcgactttgaaaactctgaaggtaacttaggcattgcaaatgcagtgttggctcacttaggcgaaaaattaccaatttctcgctggcagcgtgacttaactgactcaactgtacttcgtaacatgggtgttggttttgctcaaagcttaattgcttttgatgcttgcttaaaaggtattggtaaacttgaactcaatgcaaaccgcttaaatgaagatcttgaccaagctcaagaagttcttgcagagccaattcaaacagttatgcgtcgttataacgttgaaaaaccatatgagaagttaaaagcattaactcgtggtcaagcaatgacgcgtgacatgatggttgacttcgtaaatggtaacgaacttactcaagtaccaagtgaagagcgtgctcgcttagctgagcttacacctgcaacttacacaggtaatgctgctgaacaagctaaacaaattaacgaattaattagcaaaatctaa

SEQ ID NO: 63365 - DNA, 135 bp, Acinetobacter baumannii
atggcaaaaaaccatgataagactcctactgagcttccttcaaaggagcaattcaaaaacaatgaactaagcaaaaataatatgtttgttccatataaaattcgtctagttgtacttttaagccagctatattga

SEQ ID NO: 63366 - DNA, 501 bp, Acinetobacter baumannii
atgccacaaggtaagcgtgatagcatggggcaggtaaatggagtacttggtgtaaaaagtgatgctggaaaaattacaattcctgacgaatataagcaaacaattcaatatactccaatacaagcttttgaaatggcacttgataaaactggccaaatctctagcatgattttgaattcaatagtaaaaatggttaagggactaattggattagaaaatctttctgggccaattactattgcaaaagtagctggccaaagtgcagaaatgggttgggaaacctttatctcttttatggctttaatgagtgtaagtcttggaattttaaacttattaccaattccaatgttagatggtggtcatctagtgtattacattattgaagctattcgtgggaagcctgtttctgaacaaatacaaatgtttggtctaaaaattggtatggtactgctcggtagtatgatgcttttagctttatttaatgactttatgcgtttgtaa

SEQ ID NO: 63367 - DNA, 1176 bp, Acinetobacter baumannii
  misc_feature (776)..(785): n is a, c, g, or t
gtgactgtaatatcttgtggcaaggatggaacccatagtctcagatgggatttagatgtcttagcccgtcaacaggatggggtgtggcatttattggaaggcccgtttccagagcttgaggatttaactaaagatctaaatcatgctggtcacggaacaatggtaatttgggaggagctagatagaattgtatcttcaaaatttaccgttgatgactggttgaatcttatagatcagatcgaatctcatttatctatggtctttcaccgctatctggaaataaaagaaaaacttactatccggataaatggaaaagcaattaaaccttgggacccttttttttcaggacatccatcaaaaccatggaattcaccagttcagccttttaaaaatacgcagattgaaattgaatgtcatgtattaccccataaggatcgtctaactgcacaagagttgaaaatagctgaaggaccaaatgggtggatagctcaacagggtttctatgtttatcgtaatgaacgattaatagtggcaggtagctggttaggtcttaaatcttctgattcccaaagaaaagcatgggtcaaggatgaaatccataaacttgcaagaataaggcttgatatcccaaatacaatggataaagagtgggaaattgatattcgaaaagctgttgcacgaccaccagtatatttacggaaatggttggccagtcatgctgaaaatacaagaaatagggcgcgcaaggtttttattaaccgtggacaaattactcnnnnnnnnnntactcaaactacgattgataagaccgaagtcaagcaagcatggaaggccgaacattcaaaaaatgggatgagatataaaatagatttggatcatccggttattaattccgtattaaataaatctgagaatttacttccagaattaaaacttatgttaagagttatcgaggagactgtaccagttcaaagaatttggttagatactgcagaaaataaagaagcaccattaacaggattttctggagaatcatcagaagcaattttagatattctaaaaaccttataccaaaacatggtggaaattaaaggaatatccccggaagaagcaaaaattagcctccgaacaaccgaaccatttaataaatatccaaatctaatttcaactttataa

SEQ ID NO: 63368 - DNA, 942 bp, Acinetobacter baumannii
atgaaaaatcaaaacagtccagaagttattacggtaaacgaccaaaattttggtagtcatggagagcattggaatctactgacttcccatccagagacagatgtaccaaaatggcttggactggcgcttgatgctcctgtaatgccaatgggtttatgtcaaaatgaagacgaaatggatcaatctttttggctcattcaaggtccacaaggtcagaaggtcaccattaatcaaattattgcagttgaaaatcaaaaacctcgcgctttaaaaactgccttcccgagttttgatagtccatatcaatataatgcccaaattgagcgcatcattacttgtgactctgctactcaagcggtattaagtttaaaattaaataaaagtacaacgatttatgcatttgataatttatttagcgttaatcgttgccaatatgacaaaacccaaacttaccaagtccaatttaatgcatgggcctatgaattagaatcagtgcctaagggagaaacaattgtcgtagatgatccagcttcaattaaacatcaccgtgcattaaatgcgattttaactgaacataatgggattgcacccgaaaacctacaagaactgattaatgaatggcaaccaaaaactaaagaagatcaagaacctgtaacggttgatttttctaaaatggttgcatatttatatggagaaaatcttggtcaagaagatgaagcttggttccaaggtaatattgtcggtaaaacttcaatgtcatttatgggtgcagaatataccctttatgatgtcactttagttttagaagacaaccttcctgccatattagtgcgcattgctacaaaaaatgatttgtacaaaaactttaatattggcgaatatattcgtggcaatatctggattcaggcgaatatttatgctaaaaatagtgaaactaattga

SEQ ID NO: 63369 - DNA, 444 bp, Acinetobacter baumannii
ttgaacagtgctcgttatggcattgcatggggggcgatgggtgctgccgagttctgttggcatacagcacatcaatacaccatggaccgcaaacaatttggtcgcccgttggctgcaaatcaattgattcaaaagaagctggcagatatgcaaactgaaattgctttgggtttacaggcagctttacgttttggccgcatgaaagatgaaggcattgcatcatttgagggtacatctctaattaagcgtaacaactgtggaaaggcgcttgatattgcccgcatggcacgtgacatgatgggtggaaacggcattagtgacgagtttggtgtggcacgccatttggtcaatcttgaagtcgtaaatacctacgagggtacacatgacgttcatgccttgattttaggtcgtgcacaaactggtattgccgcatttagtaactaa

SEQ ID NO: 63370 - DNA, 762 bp, Acinetobacter baumannii; identical to SEQ ID NO: 47863

SEQ ID NO: 63371 - DNA, 936 bp, Acinetobacter baumannii
atgtctggccttcaggaagaatatttacagcatcaaacaaaaattgagcagcttcgcctctcaattcaatatatccgctggtatcttgttagcctaattttactgtgcctaatttcagctattattttcttttgttactttacttcttacattacaaactttatttggtcaattggctttactattttgacgcttacttgtctattatttgtcccaaagctattaacacattatcgtgatattcatttcattaagaaaacagatttagtgctacaaggcatttgtttggcgtctggaattttaatgggaataaatatcatggttctgcatttttcccttcctgacactttaatatctgtttctgatgttcatatcctcatagcattatttattacctcagcccacataattggtcttacatttttaactcaacaacctcgatatttttatttactctttattccaagtacagttccactcattattggacagtttactcattctcaaatcacccaactccccttttactttgcatataatttagctttcgtcgcaactttactttgtgcttatgcaactcagcgtaactatcaaaaaatttctcaactattatttaaaaataaacaacttgttcaagtagcagaacagcatactcaatgggctgaagagttatgtgtacagctccaacaagaagtaaataaatctaaagatattgaagcacagcttcaatttaataatcatttgctcgaacaaaaggttcgggaaaggacatatgacctcactaaaatgaatgagaggcttgaaagccatcatcataatttagcatttgcacatgaaacagcaggtatccgaccgtgggattgggatattgagaaacaaaaattagaaataacgttttttgatcaacaaaaacaaactcaaaatacctttaattaa

SEQ ID NO: 63372 - DNA, 561 bp, Acinetobacter baumannii
atgtctaattctaatattgcggttgtatatttctcgggttatggccacactaaagtagtggctgaaacttttgctaatgaaattaatgctcaacttatccagattaatcaggaaggtaatatcactgaccaagattgggaaacattgaataatgcaaaaggcattgtgtttggtgcgccgacttatatgggtacagcaccatggcaatttaaaaaatttgctgatgcaacttcaaaggtttggttcacacgtggttggcaagataaagtttttgcaggctttacgaatagtgcaagtttaaatggggataaacaagttacgcttatccagctgcaaactttagcatcacagcatggtggcatttgggtgagtctgggtttattgccagcgaatacaaaagatgcaacacgtgaagatgtaaacaacttaggcggttcggtagggcttttagttcaatcaccttcggatgcaagtgtagatgaaattccaacaggagatttggaaacagctaaagtttatgcaaaacgtgtgcaagccattgtaaataaaatatatggttaa

SEQ ID NO: 63373 - DNA, 600 bp, Acinetobacter baumannii
atgcattctaaagaacatcatgctttccatgtcagtgcacaacaatatggtttaaacccagaatcactagagaaagctacaggtattgttcttaaagctattgagaaagtttttagtaaaaaatggaatttattggtaactgttggattagaacactatacagctgttctggtggtcagcatgatgcaatccgtaaatgagcttatgaccgacaacactattcgcaacctatggttatggcacagtgtagaagaaaccgagcataaagctgttgcattcgatttatatcaacatctatatggcaacggattagatgcatatattccacgtgttggaatttttacattcagtttagttttgattacagccttttcaactatttaccatattgttttaatgaaacgagataaacaactgaccaatttcaaaacttggcgcaacttttttaagtttgcgagcaaacaatataaagtgttgattcctaaatttcttgaatactaccgttttgattttcaccctaatcaaacagatgaaaaagctttagttgccgctacaaaagtaaaacttggaataaatgatagatcactcctcttatcttaa

SEQ ID NO: 63374 - DNA, 156 bp, Acinetobacter baumannii
gtgatttgcgcgggccaagaatcatttactgcgatgtatgaccaattaaaagcagatggtaagaatgttcatttgattggtggtgctaaagaagcaggtgagttggatgctaaacgtgctattcgtcaaggtgctgaactagcagcggttatttaa

SEQ ID NO: 63375 - DNA, 495 bp, Acinetobacter baumannii
ttgttttatggtaatcgatatagtgagttgaggcttgcacggaaatcagattttgattttagtaaaaatacatggacagtaccgtatgaaaatcataagacaggagaaagtaaaggggacattgttcgacctattattgatgagatcaaaccgtggcttcagtctgcaatggatttgagtaattctgaatacattttcccacatgaaaatggcaaagagccaatggggcgtagtgggccaacagataccccttataacttcatgcaatttgcaaggaagaattataaaattgaaatggatcattggtctatgcatgatttacggcgtacagcaaggacaaatttcagtgcgtttacaagtagggatgttgcggaactgatggttggtcatgtgatgcctggggaacaggggacatatgactattatgattatcaaaaagagatgtcgaaggcttataaaaaatggtggaaaaaattaagtaatctgtctagctag

SEQ ID NO: 63376 - DNA, 399 bp, Acinetobacter baumannii
atgccatatctggcgtttaccggaacattattaaatggtgctcgtggtgtctggattaataaaaaaatagtaaatagagctgcgcctgaacataaacttgaactatggagctttgaagcaagtccgtattcaagagtagtaagaagtgtattaagtgagcttgaactaccttacattttacatagtgttgccaaagaaagatggcaagatatggggcctgcgattcttcggttaaaaccgggcaaatatgaacctttaaaagagggaaagcgagaaaaattgttgccgatcatgcaaggtaaaatgcaggtgccttatttagtggacccaaatacaggcgttaaaatgtttgaatctgcagaaattgtaaagtacctaaaaaaacaatatggcagttaa

SEQ ID NO: 63377 - DNA, 372 bp, Acinetobacter baumannii
atgttgaatatagtacagcctaatatttgcttcattggtagcagtaatttgtctttagctttaattggaggtttagttttaaaaggctttcaaagagaaaaaattaatctaatagaggaagtcaaatttgagaatcaaatcattctaaagcaaaagcaacatgaggtgaaaaaggcagatatagttgttctattactagacccaaaagacttaaaggctatactggcgcccttaaaaaaatggttagctgataaaactattgtgtcgatgatggccggagttaatattaaacaattaatgagtattacgggttcaaaaaaaattatcagagtcatttctaatccccctgggctttgttgcacaaagatttga

SEQ ID NO: 63378 - DNA, 393 bp, Acinetobacter baumannii
atgagttgcattttgctagatattcatctgccttcaaaacttggacaagccttagaacttttaggaagaacagcttcgcctctagcattatttgctattggtggcagcttggttggtattggtattaccgccgtgaatttccaaagtatattgttggctggatttaatgtcatccttatgcctgttgtgatttttggactgttccttttactgccaaacgtgagccaagagatgttatatgctggcactttacttgctgcgctgccaatgccgatcgcttttggtatttttgggcaagcctacggtttaaatgaaagagcattaacccccttaatgattagtaccattattggctttatgggggtgagtgggcttattgctttgtggtggtaa

SEQ ID NO: 63379 - DNA, 345 bp, Acinetobacter baumannii
atgtctttgccaaactgtccaaaatgccaatcagaatatacatatcaagacggcgatttattaatttgtccagaatgctcacacgagtggaaagaaggggaagctttagtaactgaagagcaagaagttattaaagacgctaatggaaacgttttggcggatggcgatagcgttactgtaattaaagatttaaaaattaaaggttcttcttcagttgttaaagtcggaacaaaagtaaaaagtattcgtttagttccagatgcaagtgatggtcacaatattgactgtaaaattgatggtattggtcagatgaagttaaaatctgaatttgtaaaaaaagcttaa

SEQ ID NO: 63380 - DNA, 357 bp, Acinetobacter baumannii
atgaacatacaaattaaaagaatttatgaggatgtaagcggtgatgatggaaagcgaattttggttgaccgactatggagtcgagggattagcaaagaaaatgctcatttagatttatggttaaaagaaatagctccttcaactgaacttcgtaagtggtttcatgcagagtccgcagaacattgggatgagttcaaacaacgttatttaaaagaactagaaaccaaccccgcagttaaagagttattagaaatcgtttcacatcataaagtcacacttttatattcggctaaagatgtggaacataaccatgcgattattttaaaagaatatttattagaaaagagcaaaagttaa

SEQ ID NO: 63381 - DNA, 186 bp, Acinetobacter baumannii
atggaagttactaatgatatgcataatgtgaaaagaacctattcaggaatcttattagttattgatgttattaatactaaaggtataaaaaatatcaatgaagttgataaagaatttacagaaactctagaacagcttcatgagctagcattacaaaaatattcaaacatttttaacgaagggtaa

SEQ ID NO: 63382 - DNA, 732 bp, Acinetobacter baumannii
atgcgttatagaattcattatattgatgtgcaaaatgccctacaaaactatatctggattttagaagatactgatactcatgaagctgttgcagttgatccaacagaggctgagttagtcacccacttttgccaagaacatcaattaactctaaaacagatttggcttacccattggcataaagaccatatcggcggtgttgctgatttaacggctaacacgcctatggcggtatatggcccaagagatgaactaagtaaaatccctggcattactcatcccttacaacacgatgatcatctaaaatttaatgatttaaaagtagagattattgcaacaccaggccataccttaggtcatattgtatattttattgaagagcttaatgccctcttttgtggagataccttatttgcaatgggatgcgggcgactatttgaaggtacagcagaacagatgtaccactcactaaatcgtcttgctgcactacccactgcaaccaaagtgtattgcacacatgaatatacactttctaatgcggaatttgccttgagtgtagagcctgaaaaccacgcactgcaagaacgtgctgaacaagtccgtatgcttcgtcaagaaggtaaaattaccttgccaagtagtattgaacttgaactagcaacaaatccctttttacgtgctgaaagtgtagatgagttcgctcacttacgtagcttaaaagacaatttttaa

SEQ ID NO: 63383 - DNA, 648 bp, Acinetobacter baumannii
atggccaagttagcgattttcggaactagcgggttctctaaagaggtccttgatattgcatatgatcagggctatgaagagtttgtttttctaacaaatgatgtgttgtcagagaataaggtattagggttcccaattcaaaatgaatcatcaatccctgaactatgtaaatcaggatataagtttgcaatagcagttggtagtggcgtaattcgagaaaaaatctttaaaacatatcctgacttgcaatatccaaatttgattcattcaagcgtaacttatggttatggtatgaaagaagagtttgcgaattcaaagggcttaattattgctgctggtgtgagggtgacaacctgctgtgaatttggcaattttattgttttaaatttgaatgtaactgttgggcatgattctgttttggaagattttgtgtcaattatgcccggagcgaatatttcaggtaatgtacatttagcttctaagagttatgttggtacaggcgcaacaattttacaaggcaaagatgagagtaatcgtatgctcattggtgctaaatctgttgtaggtgctggttctgttgtagttaaacctgtagcagagggaattgttgtagttggagctcctgctaaggagctaaaacgtgattag

SEQ ID NO: 63384 - DNA, 1095 bp, Acinetobacter baumannii
atgatctttaatcaagacgaagtttatattattgcagaaattggtgtaaatcataacggttctgttgaactggcaaaagagcttattttaaaagctaaagaaagtggggccgatgctgttaaatttcagacttttaaggccgaagaggttttgtctgatcaagcagatatggccgcatatcaaaaaacgaatacgggtaaagactctagccagttagaaatggttaagaaattagagttaagctttgaagatactaagacattaagagacttttctgagaataatggaatcacttttatttctactccgtttgataacgatagcttagattttctttcaaatgatttagatgttccttttttgaaagtgtcttcagcagatatttctaatttaccatttctttataaaattgcattaacaggaaaacctgtagtgctttcaacaggaacagcgagtttaggtgatattgaaaaagcattatcagtatttacttatgttattgagtatggcaagacggaattaccaacggttgaaaagttaagattgtcttatgctaaacaagctaatcgacaagctctaaaaaataagattgtaattttacattgtgtaacacagtaccctgcaacattagaaggcagtaacttactagctatttcaacgatacaaaatgcttttggtttaaatgtgggatattcggatcacacattgaatgaatatactgctattgcagcagtagcattgggtgcaacagtttttgaaaagcatattacattagataaaaaaatggatggtccagatcatgcggcatctatggaaattgatgattttacaagatatgtttcgactttgcgtaagataaagttaggccttggtgatggcattaaatttatgcaagagcaggaaaaggataatttctcactagttagaagatcattagttgcgcgtaaagatattaagcaaggtgaaatatttacagaacaaaatatcgtggctaaaagagcaggaaaagtacagttattgccagaacagttttgggagttgcttggaactactgcaacgaaaaactataaagttaatgagttaattgagaaataa

SEQ ID NO: 63385 - DNA, 1149 bp, Acinetobacter baumannii
atggatacttctaaatttaatcaatttgtacgtgatatctatcagaccaataattttattccattacatgaacctcgttttctaagtaacgaaaaaaaatatgtactagatacgattgatagtactttcgtctctagtgttggtgcttatgtaaatgactttgagtctaagattcaacactttacaggctgtgctaaagctattgcgactgttaatggtacagcagcattacatattgctcttttattggctggtgtaaagcgcgacgatattgtaatcacgcaagcgctgacttttgtcgccacatgtaatgctttgtcttatatcggtgcagaaccattatttattgatgtttcattgaaaacaatgggtctatgtccaaaagcattagatacttatttgcaagaaaatgcttttcttgatgatcaaggtgtgtgtaaacatacagctactaataaacgtatttctgcaatcgtaccaatgcatacatttggccatccagttgaaattgatgagcttcaagaagttgtcacaaagtggaacattgcattagttgaagacgctgcggaaagtttgggttcttattacaaaggtaaacatactggaatttttggtttagtttcagcacttagttttaatggaaataaagttattaccacgggtggtggtggtatggttttatgtcaggatgaagaacttggtgtaagagctaagcatattacgacaactgcaaaaataccgcatccatatgagttttaccatgatgaaaatggttttaactaccgcttaccgaatttgaatgctgctttaggttgcgcgcaaatggaaagcttagaaggtttcctgagtaaaaaacgtgatttagcccatcaatatcaaaatttctttaaagatactgatatttcattctttgtagaacctgaaaattgccaatctaactattggttaaatgcaattatttgcaaaaataaaacccaaagagacttgattttggatgaaaccaattcaaataaggtgatgactcgtcctatctggactttaatgaccagattaccaatgtatgaaaatgcattacaaggtgatttaactaactcattgtggctagaagaaagagttgtaaatattccaagttcggttcctctggagtaa

SEQ ID NO: 63386 - DNA, 2136 bp, Acinetobacter baumannii
gtgtctaaattacctaaaaaacaggttatccaattgaatgcggacgaaaccattcaagatagaattcaactgcattatggcaatacattgatccgagccaatacaggggcgggcaaaactacttttgtgcttaaatctttaatgcgtgatcacaatgtggtgttatgttgtccaaccattgctcaagtcaagcaatgtgaagaagactatgggcatcaggcaaatatccattttatacatggagaaaagtcaattcccaaagaaagactaaagaacttatgcaaatccagtatagtcattacatatgaccaatatgacaaaataaaaaattatttggatcaaaaaactgttgttgtgattgatgagtgccagaagctttattctgctggaaattatcgtgacaaagcgatttatcccttattgtcatccatcaaaaatggcaaatatgataaaactgttttgttgacagctactttaactgagccgttattcgaacaacttggcattaatagcagccactattttgatattcacaaaccggtagaccttaaccgcagtattcatattcaaagatacaaggaagcgcataagttaaatggtttgcgccatatttgtactcgtctttcgaaagcaaagaaagaaggtaagaacaaaattgtattggttcgactgaatgatattgcacaatctaagcttattcagaaatacctagagaagcaaggttactcggtaatgcttatcaatcgggatgaaatgtcccgtaaaaaatgtactgagatgttgagtgtttctaaactagattcaaaatatcaagtagttctctgcacttctattatggatgaagccattaacttgaataatgtcgatgatgaagtcgatagcgtgcatatcatggggcaatacgctcatcctgaagaaattacccaatttattgggcgaatgcgtaaagcaaacccacctatatttattcatctttcacaagacatcgaggtgaaaaagattgactgcaacaaggaacaccaaatacatgtgtctacgatggacgaacaatttaaaaaaatggaatattatctggaatatgaagtcctgaagctaataaacaaagataagttcgaaggctttgaggacttgattaacgacaaaatggacagggttaaggccttcaatgcactgactgatgaagtattacagtgtaaggggtttatgctggataataaaaaaatatgtctaaatacaccaagtttggcagggagacgataccagctcgacttgcataaatgttacttcaatagtagttacctaaagtttcgcctattagggttgatgcctcatgctcaagtgaaagtcaatttatcgcaggatgtacttgataatgaattgcttgctaacctagagctatgtgcggaagaaatgaagcaaatgaagcaaaaggtcattcctgaagtgattgctgatgtcatcgatagagttcagacgaattcgtacactctcattagctatttacaagaaaatgtaaaagatggaattaacctctatgataaaagtgaggaaccagttcattatgaaattttggaacagatggggaaactgagtgatcgtctaggtaatattgcagatatagctgacgccatccagaataatcggattaatagtgtaatggctattggttttcaatataaaatgcatccccttgtaaaatctgttatgaaggggctagagcaatggttacccaaaaataatcgggggaaaaattggtatgggtatgctgagattacgaagttaatgaacagttggcttaagttgcttgcaaaaaacaggtctgttgttgctctccttgaagagcaccccttgaacgatgtatatgtaaataatcagaaacagttagttttcacggatggcggttcaattcggtttttaaaaagatatgccaatgtcgaagtgagaaatgataaaaaaccatatgcgatgaagaaggttgcgttcaacagtttatgcgcatatggctatgtgttcagtgatttggaaggatcctttagaactaagtacgtatctgtaaacgatgttgaatatgatgcaaaaactggtcgtaaaaagcgaaaaagaaaaaatttaactgagatctacgatgaagtctga

SEQ ID NO: 63387 - DNA, 1164 bp, Acinetobacter baumannii
atgtcacttaaaaatatcgattggtcccaatttgaaaagggcaaagaatatgatgtcagcaaattaacttctggcttcaaaggcttgaagtttatcagtaacgctgaaggtgttcggttcattattcgcttgacttaccaaggtaagaaaatatcccaaagcttgggttcatgttctcatagtaatattattatgaaacttaaagctttaaagccacaggtagagaaataccatcgcttaatcagtcagaactgtcatccatttgcgcagcaactgaagccacaggtagttacctttggtcagtttgcacaaactgtttatttggttgaggccaagagtcgtaagaaatcttatggtgatgatgaatcacgcctaagaatgcatattgcgcctgtactggggaactatacctttaaggaaattacatcgggacaattaagccagttaattgcggatttacgccatcagaagaagctgagtaatgcaaccattaatcgtgtaagagcattattatcgtcaatcttcaatatggcaatcgatcatgagctaattgaaactaatccagtactacgagtgaaaaaatataaggagaataaccaaaaagaacgctatctcaatgatgatgagctgaaaaagttgatgcatgttctcagccagccaacacgatttggcatcagtaatctggtcattgttgctgtaattaaattcttactgctgactggtgtgcgtaagcgagaagcactggatatgctatggactgacgttgatcttaaaacaggcgtatggctgctatctgaaaataagtcaggtaaggccagacgcatacatttgaatcaagatgctctgtctattattcatcagatgtctaaacagcatcgtcatattttcgccaatccacaaacaggcttggcattcaatgatatccgtaaaacctttgacaaagtaatggctattgcagggatcgacaatatgcgtattcatgacctacgtcataactttgccagcttagccgtaaacagtgggcaaagcttatacgtggtacagcatttacttggacatgcttcaccacaaacgactcagcgatatgcccatttgcaatctgacactttactggctgcatcagaacatgtagcaagcaaaatccgtgaagcgaaagtcgcttaa

SEQ ID NO: 63388 - DNA, 381 bp, Acinetobacter baumannii
atgagcttaaatgtcaaaactcgtgtaggagattttactggccgtatttttttcacaaattctaagtcaataactgtggtagtaccagtaacccatatattcgatcatctagatcagttacctttagaaaagcctatcgcagtgaaaaatgctagagctttgtttaatagtatgagcacacaaattgtgctggatcgtcagatgtatgaactattgattgtcttcctaaaaggactctatgcaatcagacataatcgtagtgataaaactatagaaaagttaccaagcagtgctaccttgcctagttatttacactctatgccaggtcaatacccatctattcattttgcctggaatactattccacccggaatgatttaa

SEQ ID NO: 63389 - DNA, 612 bp, Acinetobacter baumannii
atgtacgaaaataaaatcaaatgtattcaatatcagctgaaagctaattcagatctttttttttatttgtttcttagtggtaataacggccttaaattaaaagttgctgcccagagaaaaaaaataaaaaaagaatttttgaagcagatttcttctacatgtaattgtcacccctcattagtttacaaagtgttgaggaatgaagttgaggctaaagactcactatattttgtagccaacaagcaagctaaatttgataagcatgatgtacatgaaaacttgctatataaagataaatttattcctcgcgaaaatagctataaatcaaataggacaatttcacattcagattttaagttgtttatggaacgtagacttactaccacaggcttcaaaaatagctcggagttatatgagttgtttattcaagaagccgagattaaccctcctctttgccataagacattttatagatatttcaaagattttctaaatgacgtagggtcaatacctcaatacggtaaatttcgcatcatcaaatccaaaaatcgtaaacgaggttactacactgcctataaagagaaaaagaatatcaacggatccaaggactag

SEQ ID NO: 63390 - DNA, 279 bp, Acinetobacter baumannii
atgaccaagcgaaacttatttgctttaggccaagtcgtgtctacaccgaatgcacttcgcttcgctgaagctgaaaacattgacttactggcattacttgcacgacatcatcagggagattggggtgatgtgtgtgaagaagatcgggaatccaacgaagaagctttactgatgcaattacgcatcctatccagctacaacttttccaaggataaaatctggatcataaccgaagctgatcgatcagtaactacgattttactgcccagtgactattga

SEQ ID NO: 63391 - DNA, 342 bp, Acinetobacter baumannii
atgcaattgatcaagagtaaagcggatatctacaaagtgcatgaacagcccatagctcatgccattcttgaaacgatgcaaatccttgagcatcagtatgaagaaccttatcaagccaccctacatgggtggtttgttgtttgtgaagatgagcaagacctgattcagccttttgaaaatcttagcttcagtctttctgaaaagctgaacatgggagagattgagtttgttgaaaagaagaaggattggtttgaggtctacatcatgcttaacgacaatgaaggtattttggtctatgttccgaaagccatttttgaacaacatcaactacaagtgatgtag

SEQ ID NO: 63392 - DNA, 558 bp, Acinetobacter baumannii
atgcaaccacgtattcatgacaaaataggctataacctgattcatacttttacctgcaataaactgtctgaacgtgctgaaggtcaactgcactatcaattatggcaacacagtgaagaccaatcttttggtattgcattaagcaagaatgaatctacaggaggctttagtgcagagctgattaaagtcgatgacattattcaactgcttggtaagttataccaagaaggcaagcctttccatgctaccgcattgaaatcactgttcattggtaagtcagtcaataactcaagttttttaggggctgtactggtcgatcagaacgtgattcatacccatccacaaactgcacgtttgctggaagtcaatgaagactatgaactctggtcaattggtctggaaagtcatctgaaaacggggcaagaagatatcgattcatctcacgctgataaaactactggactgaaatccacaaaaaagcgtcagcataaaactgctgaaaaagttgaatctacttcgatggatgaggggagtgaagatgcaattgatcaagagtaa

SEQ ID NO: 63393 - DNA, 159 bp, Acinetobacter baumannii
atgaaaaaatattatccagaacttgagtcagtgtcagatgtattggaatgtattccgcatcatcaaacccaatccatagcgaatgctattcgtgtctgcaatgatatggacagtgataacgtgaccaaagtctgtgctgtattgaaagtcatcttataa

SEQ ID NO: 63394 - DNA, 573 bp, Acinetobacter baumannii
atggtcgacacaagacacttaagcccttgctattgttgtaataggctaatgacgatatcacctaacagtgacgtaagcatgaaccctaatgatgatactggtaggcgaatcagcaatgatcgtacctgtaactatcgtcacaaacacaatagtcctttagctatcgaaacaacttggaaggtacttgataatttcaagatggagggcggcatgtggtcggcggtttatgagccaaaatatgttcagcagtttaaatggataattcaatatacgattattctgatacagctcaacggatattatgattctgcaattttaattgcattattaagtgtattaattttggtgatagacatgaaattatggtataatgatagtggcatgtttaaaattaacttgggtgtggaaccccaatgctattgttgtaataggctaatgacgatatcacctaacagtgacgtaagcatgaaccctaatgatgatactggtaggcgaatcagcaatgatcgtacctgtaactatcgtcacaaacacaatagtcctccccttctttatcattatgagatagcttaa

SEQ ID NO: 63395 - DNA, 981 bp, Acinetobacter baumannii
atgctattccatgattatttttcagataacttcgatattattttcaaactattcaaacaaaaaaatcatgctacttatgaaagtaaatatcataccaattacttatcattgaaaggctttgaacagaatttaaaatcccataaaacgaatctgatttctgcaataaaatcaaaaacttttagattctcttctttatatccagtcgttatctacgataaaaaaaagcctgaaaagaaacctagattgatctgtatcccaacgatccaagatcggctagtacaaatgatcttgattaaatatttggcagaacatcataaagatgatttagctatgttcaaaagtagcgatttttcagttgagggagtaggaataatacaggccagacaaaaagcaaaagacttacgctccaccaaagaatttgtcttgaaaaccgatatttcttcattttttgacaacttggatcgttctcaattaatcaaagatttcaggcaaactctacctttagatatcttctatctttttgaatcaatcgtaaaatgtgatccacttatacctttagactattcaaaagacagaaagcagctcattcaatctaagtcaggcaaaggagttcgacaaggtatgcctttgtctcctttaatagcgtctttttatctttccgaatttgatgaatggctaaaaagaaagaaatataagcatgttagatatgcagatgatctcatcttctttttggattcaaaagaacaatgtgaatccgtgttcctcgaagttgaacaacaattaaaaaatattcagctaagcctgcctaagatagatgaagaaagtaaaacccaaattattgctccgtaccaacctgtcacattcctagggttggatttatcatatgaaaacgaacaatataactggtacattccaagtcatattattgcgaacgtagaagatttgaaccgtaccgggtttgtcggagacttttttatttaa

SEQ ID NO: 63396 - DNA, 225 bp, Acinetobacter baumannii
atgatagagatgcttgaaaaattaagttttgaaattggcagcacatctaataagaccctttctctatgtatagatcaatacttgaaagatagagatgaagggaatttagatcgatggcaagaaattaatgatgagctccattgtattgtcggtgaggagacagtagttattattgctaaagatcaggtagaacatttcaaatcagtagtgaactttaatttctag

SEQ ID NO: 63397 - DNA, 1821 bp, Acinetobacter baumannii
atggcagttcctgataaagacgccctgattgggcctacggtcacagaggcacaatttaaaaccaatcttggtgcaattgtggatttcattaaaccaattgaatctcaaagccctaactatgcaaccactgctttgctgactgcttcaagacccgttaaaaaccaaagttatgcaaaagccctagatacagggaaggtatggtattggaataaaccagcaggatcaccagaaggaaattattgggtagagactgagctaagtgatcttgatcaggcaataacctatacagatgggcaatttaatctagcaataaaaagagcagtttttgaaactttatcacagctatttggactggctaaatcagacgatccaactaaaattggagttttgttggacggtgttggtcgtatcttgttgggttatgacttagaaaaagatacaggtatttatgccggaatgcttgagcaagttgttgagattgtaccaggattaaaaatttacaatgatggtcgatatttgggtcttttggcggattctgaaagacgaatcttaatcggttatgacatgcttaatgacttgccaatcattgcgggccttgatgagctcatcgcgggtcttgcaattccaaacaaaaaaccagaagttgctgaagtaaatcatttcgtatttgatgggcagtctctaggcataggtgcgactgctactacaatattaagtacataccagccttattttaatgtgacatttggtacgggtcctcgcatggactcagccccagtctcagttattccgttggtagaacaatttaatagcccggcatcagatggtggcacagaccgaggcgagaccccatgttcgggtgcagcaaattacgcaagtcgagcaatgatgttagaaaacgggatcaacccgaaagatcatgtgatattttgttcagccgctggtcatggtggatatcggatcgatcagcttgaaaaaggcacaccatggtatgaatttctgcttcaccatgttgcggaagccaaaaggctaagttatgggaaaacatacaaagttcaagcgattgcttgggtgcagggtgagaacgatgctattactagtactcaaacctcatatgaaatctacaaacaaaaacttgagaaacttcaaaaggatgccagtgcagatataaaagcaattacaggtcaaacggatgaagtgaaattcattacttatcaaatgtcgtatgcggctagaacatgggaaaaacaagcgcttgttcaactgcatctttgtcagcaatcagatgagtttttgatggctacgccaatgtatcacatgccttacgcagaagatgacattcatttaacaaatgtgggatacaaatggatgggggcttattttggccgtgcatacaagcaactgatcgtagacaacaaaaaacctgactttataaaccctatcgttgctcgacttaatggtactgagctacgcatcaaatttgacgtgccgaagcttccacttgtactggatacaacaacgcttgcagcaacaacaaatcatgggtttaaagttacagataatggtctgaatgttgcattttcaacaccaaccatagatggcgacactgtagttattcaacttgcaagcgttccatctggcattgtcaaagtgcgctatgctctcgattatcttggcacaggactatctataaccgggggggcttctggaaatctccgtgattcaacaacagattcaattgaaattgcaggtgtagaaagaccgctatatcacgtatgcccgcattttgaattaactgcatttacagacaaaggaatttaa

SEQ ID NO: 63398 - DNA, 1095 bp, Acinetobacter baumannii
atgaatatgccagtgaaagtcgaatattttaaaaatcctaaaaatcgagatttgactccagcagaacttgaagcatttgcaaaagagcttgatcagatcaaacaagaagtattggatgatttgggtgaaaaagacgctaaatatatccgccgtgtctatgctgctattcgttatagtagctttttaggccgggcttgtttatttgcaggttggttcccgccagcgtggattttaggtacgggtttattaggtttctctaaaattatggagaacatggagctcggccataatgttatgcacggtcaatatgactggatgaatgacccgaaatttaatggtcaaacttatgaatgggatactgtaggtacctctgataactggcgtcaaacccataactataaacatcatacttataccaatattaaaggtattgatgatgacattggttatggcttacttcgcttattccctgagcaacgttggaagccagggttcttattgcagcctatttacagtattccattttgcttattgttccagtggggcgtagcaattcagaatcttgaaattgggcgtgtactttacaagcgtaaaactaaggcacaatttttagaagagttaaaaccggttaataaaaagattggcaagcaactctttaaagattatgttttcttcccacttattgcagggccggcagcactaccagtatttacaggtaacttagttgcaaatggtcttcgtaatatctggacctttagtattattttctgtggtcatttcacgaaagatgctgaagtgtttccaaaatctgttttacaagaagaaagtcgtggacactggtatatgcgccaaattcgtggttcttctaacttaacaggttcagaagcattccatattttgtctggtcacttaagtcatcaaattgaacatcacttattcccagatattcctgctcgtcgttatcgccaaatggctccaaaagttgaggcggtttgtaagaaatatggcttgaactataacaatgccagctttgttaagcagtttggacaagtggttgggcgtattgtgaaatatgcgttcccatttaaaaaataa

SEQ ID NO: 63399 - DNA, 783 bp, Acinetobacter baumannii; identical to SEQ ID NO: 47349

SEQ ID NO: 63400 - DNA, 2883 bp, Acinetobacter baumannii
atgtcagtacaaagcgaagaacaacttgaaaatgaattgattcagcatttaaagactttaggctatcgtcaagttgatgtaaaagatgaaaagcagctcctgatcaatctcaaaacccagattgaacaagccaatggactttctgtactgtctgaaaatgaatggggacagattctcaatcatctgaaagccggtaatagcttcaattgtgccaaagtgctacgtcatcgctttccagtgaactttgatgatggttcaacacgacatattgactttctattctcggacgcaagtaagaacatttaccaagtaacacatcaaattgcgattgatcattccagtatcaatgggcataccagtcgctttgacgttactctgctgattaatggcctaccgttggttcaaattgaactgaaacgtgccggtgtagaactccctgaagcattcaatcaaacgcagcgctatgccaaagcagcctatggtagtggtacaggtttattcaactatattcagctttttgtgatcagtaatcgtgaccatacgcattactatgccacagggacaaataacttcgaatttacctttccttgggcaaactttgacaacaagcatgtccacaaaatcgatgcttttgctgatacctttctgaatcattcgcatattactcagatgctgactgaatatatggtgattctggaggtagaaaagcgtttaatggtacttcgcccctaccagatttatgcagtacagcaaattattcagcgtgtacaaacagccaaaactcatggctatatttggcatactacaggttcaggtaaaacattaacttcattcaaagccagtcaattgatcatgtgcttgcctgaagtcgaaaaagtgctatttgtcgtggatcgtagtgatctggacacgcaaacagtacgagagttcaatgctttcaaaaaggatagtgttgataccaccaagaataccaatactctggtcaatcaattgggtcagaaacatgacaagctgattgtaacgaccttacaaaaactcaatattgcgattaattcggatcgctatgcagataaaattgcctatctgaaagacaagaaagtcgtgattatttttgatgagtgtcatcgtagtcaatttggtgatacgcatcgtaatatcaaacgctttttcaaccatgcacaaatgtttggctttaccggcacacctatttttgaaaccaacagccaacttaaaattgattccaaggctgtgaccaccaatgccctatttgatgaatgcctgcataaatatgtgattaccgatgcaatccgggatggcaatgtattacccttccagattagctacctaggtaaatacactgcaaacggtatcgaaaccagtcacaattatgaagaagatgttgaaggtatagacaccaaagaactgtttgacaatccagaacgtctggagatgatcactcgctatattgtcgacaatcaccacataaaaaccaagaaccagaacttcactgccatgttctgtgtaagttcagtcgatgtactgaatcaatattatgcgctatttgaaaaagtacagcagcagaagcaacaagaggcagaagaacaaggtcgaatctttaagcctctcactgtggcaactatattctcctttgcagccaatgaagaactcaaagttgaagacagtaatggtttgattgatgaagaatctgctgatatcccaacaagaatcagtcaatccaaccgtgacaagctcgacggctatattgcgaaatataatgctcaatttggacagaattttaactcaggtgatgagttttatgcctattaccgagatattgccaatcgggtacgcaaaaaagaaattgatattctcttggttgtgaatatgttcctgacaggttttgactcaaagactttaaataccctgtatgtggataaaaacctcaaatatcatggtttgattcaagcattttcacgcacaaatcgcatcctgaatgcagacaagccatttggcaacattgtctgcttccgcaatctgaaacaagctacagataaagccctagcactgttttcaaacaaggctgaagcagaaaagatagtattgattccaagctttgaaagcatcaaggaaaagtacaacgttgctgttgctgaattacttaagattgcccctgacccagacaaggtactggaactacccacagaagagcagcaattgcagtatgtgaaggctttccgtgaagtcatgcggatcaatgcacaactggaaaactttgttgaatacgatcaggatgacactgacttaaacaaggctgaatttcagaagcatacctcacaatataagtacctctataccaatactcgtgtcgtacaaccgaaagacaaagtttctgtactgaatgatgtgaacttccaactggaactcattcacaaagatacaatcaatgtcggctatatcctgaatttactgcaatctgcagtcaacaacaccgatcagaaacaaaagcaaaaatatcgcgcacaggtgcaagatctactagcaaataatcatacgctgtacgacaaacaggaactgatccaaaagtttctggatgaaaatattccacgcatgatcacagggcaaagtgtagaagaagcgtttgcacaattttgggatgtagaaaaggaacgagcgattgatgagctttgtcaaaaagaagcaatcaagcctgaagtgttcaaacaagtgatcggtaaatatgaatacaccaaacgtctgccaagtcgtgaagatgtgactgatctacctattactcggcctaagatttcagagcgtaagacactcatgaatacgctagtactcaagactagacaattcatcgataagttctacactgggctgtag

SEQ ID NO: 63401 - DNA, 924 bp, Acinetobacter baumannii
atgacccacggaaaaagtatcaagctgtttctggttgatggttcgattaatggcatcctgacggctgaaatcatcaactggactggtcatgttctttcagcaccacgcactaaactcttggatctcatccagcgagaagaatgtgccagaacaggtatctatttccttgtgggtcaagatcccgaagactccttaccaagcgtttatattggtgaatcagatgatgtcgctaaccgtttgaaacagcataaccgtactgaagaagcaggtggaaaggacttctgggaaaaagtatgtctggtcacgggtaaagaccaaaacatcaccaagacccacattaaataccttgagagtcgcttgattgatattgcgaagcgtagcggacaatgcctactcaaaaatggcacagcacacctctacaaccgcctacctgaatcagatacagcggatatggaatactttctggaacaaatacaagtggttcttcctgcacttggatatacattcctcaaggaaatgaaatatccaagtgaacagccaaaagtacatagtattgctcctacttcagtggatacttccaacactgaagcagatttctacctatccgctagagacattcaagccaaagcaaaaatcattgatggtgaattctatgtactcaaaggttcccaagtacgtagagatgtcagtcaacctacacacaactacatgaagaaccttcgaccacagttgtttgaaaataacatcattgatccaaatacctatacgttcaatcaagactatttattttccagtccatcagcagcaggcgcagtcatcttgggaagagcatgtaatggtcgtaaagaatggaaagattccaccaaccatctgacttatgaaacatggcaacaaaaccaagttgagcgtgtaatccaagaataa

SEQ ID NO: 63402 - DNA, 1236 bp, Acinetobacter baumannii
atggctacaccaaagttaagattcaaagaatttgatggggattggagttcaatagcaattggcaatctattaaaaataaaatcaggtttaggctttaaagctgaagaatatacgactgaagaagctatacgattgttacagatcgaaaatgtgggatatggggctgtgaagtggacacataatgttaaatatgtaccacatgattatttatctatacattctgagctggttttaaaagaggatgatattgttttagctttaaatagaccagttactaatgatcaactcaaaatagcgaagttgactaaagatgatggtccatcaattctttatcaacgtgttggaaaattagaatttacgaaaaatgaaattgatcataattttatttttcagatttttcaaaaagaagttaaaagctatgttctaaatagttcgatcggtagtgatcaaccttttatttcaacaacagatttatataaacataaaataactttacctgctcaaaaagaacaaaccaaaatcgcctcttttctatcagcagtagatgaaaaaatcagtcaattgacacaaaaacaccaactcctcagccaatacaaacaaggcatggtgcaaaagctgtttagtcagcagattcgtttcaaagccgatgatgggagtgagtttggggagtgggaggatatacaactcaaagatatttcccatcgtattaccagaaagaataaagagctgaatcaaaatgctctgactatttctgcccagttaggtttaataaaccaacaagaatatttcagcaaacaaattgcttcacgcgatttaagtaaatactacttattacacaaaggtgagtatgcttataacaaaagttattcggcaggctatccaatgggagcgattaagcgactaaaactttatgataaaggagtcgtttcaacactctatatttgtttttcacttaatgaatatataaattcagactattttgagcagtttgttgaaagtggtctcttggttcctgaacttgaaaaaattgctcaagaaggtgcaagaaatcatggtcttcttaatataagcctacaggagttctttgaagttaatctaaaaatgcccagtttagatgaacaagccaaaatcgctaatttcctttctgcgattgaccaaaaaattgacgttgtttcacagcaaattgaacaagccaaacaatggaaaaaaggcttgttgcagcagatgtttgtataa

SEQ ID NO: 63403 - DNA, 1575 bp, Acinetobacter baumannii
atgacccaggttcaattgcaacaactacaaagacagctttggaatattgccaatgatttacgtggaaaaatgggtgctgatgagtttcgtgactacatccttggtttcattttcttcaaatacttgtctgagaaagcaattacctttgccaatgagcttctgaaagatgaaggcatggcggaaaagtacaatgaattggatgaaagcaatcctgatcatgcagaattgatcgaaggcatcaaagaaaactcggtagatgaagtgggttatgccctatctcctagtcaactctttcatagccttgcagaacgtggtcgtcaaaatcaatttattctggatgacttggccgaaacactaagagcgattgaacgtagtacattaggtgctgagtctgaagatgactttgctaacctatttgaagaccttgatatcaactcaaccaagttgggtaacaacgccaatgaccgtaatgagttaatcagcaaagtactcactcatctggacaatatcgattttgacttgagtaactcagaatctgatgttttgggtgatgcttatgaatacctgattggtgaatttgcttctggcgcaggtaaaaaagcaggtgaattctatacccctcaaactgtatctactctccttgccaaaattgtcacacaaggcaaagagcgcttacgttctgtatatgatccgacctgtggttcaggttctttgctattacgtgttaaacgtgaagtcaaagacgtagatatgatctttggtcaggagatgaaccgcaccacctataacttggcacgtatgaacatgattttgcatgatgtgcattttgccaagtttgatatcaagcaagaagatacactgacacgtcctcagcatatagatatgcgctttgatgctgtagtcgctaaccctcctttctctgcaaaatggtcagcagatcctatttacttacaagatgagcgtttctgccgttatggtaagttagccccaagttcaaaagctgatatggcttttgttcagcacatgcttcatcaattggatgagcaaggcacaatggccgttgttcttccgcatggtgtattgttccgtggctcaagtgaaggtgtgatccgtcagtacctgattgagaaaatgaatgtggtagataccatcattggtttacctgccaacatcttctatggcacatctattccaacctgtatcttggtgctcaagaaaaatcgtacccatacaggtgatattctgtttatcgatgctagcaatgactttgacaaacagaagaaccaaaacaagttactgcctgagcatttggataagattattgatgcctttacacagcgtcagaacatcgagaaatatgccaaagtcgctacgttgcaagaagtcaaagacaatgactacaatctgaatattccacgctatgttgatacttttgaagctgaagatgaaattgatctgaatgccattgctcaacaactcaaagaacttgaacagcaaagccaaaatacagacaaagtgattgctgaattttgcaaagaacttggcattgattcaccttttgcggaggtgaagtaa

SEQ ID NO: 63404 - DNA, 390 bp, Acinetobacter baumannii
atgaaaaagcttgcaataaccttagctgttttgattccactttcaacttatagctttgccaatgactcgactggttatgtcggtacaggtggtattcagtatttaaaaaatgcacaagttgcgatgcaaagtgaggatctatttattagtaaaaaaatcattaaagtcgattatctatataaaaacttaagtaataaggatgcgaaggaaaccgttttatttccgctaccacgtgtagataacttttttgaagcagattttgcaaatactgaagcacttttaaaaagctttaaaattgtggtggatggtaaaaatataaaaccagaaatgcatgttagaacgtttattcaaaaagatgaaaaatcacctttaatggatgtaaccgaatag

SEQ ID NO: 63405 - DNA, 1149 bp, Acinetobacter baumannii
atgcagaagtttaaagctaataaattgaggacattgatctgtaaaaatcagatcacccttgcatcacctaatgttcaccagccactgtttttatacagtgactttcggttagatcagatgctggatatacctcgttttgttctggaatgtaataagacccaattgccagcagcaacagtcaagcagacagatcaagggagggagtattttgaatgtgaggactggttcaggccattttttatcaagacgtttgatgacctgataagcaccaatccttacttcttaaagcctttcgatctatgtgaagagactaaatgtttctttagaacattagatgcaatgattagtcctccaaacctatacggcttgtttgaaagaaatttgaaaggaagaaacccaagtaatttgaaacaacggatcgaattacttaatgaatttattgaattgttacgtaaggagctaaacagcccaaccgttaaagatgttattcggaaaagagaggagcagcacaaagagaactttacgtcatgtaagttgctagtaagcaaattactccagaagtacggtcaactatgggttatacctgtagattttgcttatacaccagatcagcaagatttacagcacaacaacccaaccgacctgaaacaggagtttcataggtctcatcgacttgagctacttaaacaacagatagctcaactccttgagaacagacggcgtaataaaaccctgaaacaaattgtagggtatctctttagctttggtcacagcctaaaaaaaggcttctttgtcaaagtgatcttttttctggatggcaattctcatagtcaggctaaggattacgccgaatacctctctcaatactggagcaggctgacgaatcaacaaggctgtacgtatttctgtgacggcgacttaagccaatcccctactgtggggattagcctgatcaaagaaacggataaaaaacaacgggagaatctcatgttgagcattcaatattactgtcagttagaacagttttttaggctgaaatatctaggagagaactcctataaacgattacagatgagccaacctcctgtaatcagtaaagttaaagcaagtggttttaatcagaatttgaatgtgaagaggggcaaatag

SEQ ID NO: 63406 - DNA, 1158 bp, Acinetobacter baumannii
atgaataatagcgaaacagattatttctatagtccgcccccattaacagaatttgccccaaatcattttgaagctgaggaaaatgaggaaaatgaggaaaacgatgattcaactccttacatccttaaacaacttggtatctatgaaagattcgttcttcactattataagtgtcagaaagtagctgatcgtgatttattgcaaattcatccagatgactttgcaattgcagtcgaagatgaggctatgatgtatcaagtcacttattgcatgtcagaacatattgaggtcttgtctccttatgatgactatctgcacctcagagatgagctattaaaaaacccctttgaaattgctaaaaaacctgaagagttaattttagcgtatatgttctgcgtttgtaaggatactcgacaagcactctgggatggcgacatagaaaaaagtcaaaataacattgaatatataatacaactctttatcaaaatacaggacttaacacgtagcatttatgagctatggtcccaaaacccacatgaaatacctacgactcataatgaaatagcctataactatccaattgccaatgagctccgttatagcgttgatcctgactatgataaaagtatccatgtagccttaggtaaaaagaagacttctcttttaagtgaatggcgtattttccaattcaaagaactccttaaaaaaactgctgccaagaaaggaggctggaaatctgtaaatgcagcggttgaagcaatggcaagcatttatatctatcagttagaaaaacaagcttttctaactgctgaattatttaaaataggtcgtttagacttcattcaattgtataaacatgctcacaatcggctacaaatggaactagaagataatgcatggcttagtacacatccttccaatcaagaacgccgtgaattagctgaacaaaagatgattcacctcgatatgttaatcgaagagcagcaaaacctatatgatgccttacaacgaaagaagtggaagttaaatattgatggttataaaaatttattaaaaatggattatagcgtagatacactttctaattggattcgtggagataaagttcttcttgaagaaatcttgctaaaaacagaatctgataagaagaaaatataa

SEQ ID NO: 63407 - DNA, 189 bp, Acinetobacter baumannii
atggttttcaagctttttggagaaattacaacttcttctaaaaccacgccttattcgatgccttattttgcaattattaccttcaattcctacagtaaaaaacttaccaatactttgcttgcagtttttaaaagcagtgatgaaactgtcccaatgatcacttgcaattcgggtgtagtgaatacctaa

SEQ ID NO: 63408 - DNA, 303 bp, Acinetobacter baumannii
atggctagagttaaattaacagtgagagaaataattttaagagttgaaaaacacttaaatcagatagcaagacgtactcattcagatgagttggtacttcaattaattcaatcgaaaacagaaaatcaatttaccgaagaagacacaaaaagattaaataataaatatcacaaaatcttagaattagacagattatcagaattaatggattctatctgcacaatcgaaaagagtaatcgctctgatattgaaaatgatatcgttgattttagtggatatgaagatcggcagagtaaaacttga

SEQ ID NO: 63409 - DNA, 435 bp, Acinetobacter baumannii
atgctgaattttaacttttataatccgacccgcattatttttggtggcgatacaatagctgaaatcaatgactatgtgcctacagaagcaaaagtgttaatgttatttggtggtgaaagtgcacgtaagaatggtactttagctgaagtgcgtgaagcattaggtgcaagagaaattcatgaatttggcggaattgagccgaatccgagttatgaaaccctcatgaaagccgtagagctgattcgtgaacaaaagattgatttcttgatggctgtcggtggtggatcggtaattgatggtactaaatttattgcagcagcagtcaattatacaggggatacatgggagattttagaaacccatggtactaaaattactcaagctttgccttttgcgagtgtactcacccttccgaactggttcagaaatgaatag

SEQ ID NO: 63410 - DNA, 264 bp, Acinetobacter baumannii; identical to SEQ ID NO: 47503

SEQ ID NO: 63411 - DNA, 168 bp, Acinetobacter baumannii
atgttctatggtctcattgctggttttgcggatgccttcatactgcatcagccgggaaatgtagagataatggccggtcgcatagcccttatttttgcttttgacgctgaagtggtagctggccatgttcacctctgctgggttgtgggttcggtttttatgcagtga

SEQ ID NO: 63412 - DNA, 432 bp, Acinetobacter baumannii
atgatggctaaagattttgaagattatatgtttaatagtggagcgttttctaaacgattccatgagtcatttgggaaagatgttcccaatgattatccaaggcatgtgatggaagcacatggattagcgcatgttcatatctttgatgcagaagctatgacagatgaagctatcgaagaatgggataaaaataattttcctcgtaggtttataggacgccgagggacaagtgacttatgtatggtttatacattaggttcagagggaacagttttgttattagctttttttgctcccccagcgcatgaaaagcacgatgattgggattacatcaatacattgattcgtgccgctaatgacttttttcaagagcaagataatggagagtatgttttaccaagaagtagaatcctagatattttagctgcttga

SEQ ID NO: 63413 - DNA, 228 bp, Acinetobacter baumannii
atgtatcttcgtattcataatctatctgggtttgagtatagaaattatataaatggttatagtgagttcatgagaacagaaaatatagtgtctatatctcaatctaaaaaagtagttaaaaaagtagctagaaaatcttatggtttaacgaaagaaaaagccgaaagaatttctatgaatactcgaaatgcttacatgatgaaatatccaaatacatcagaagcatag

SEQ ID NO: 63414 - DNA, 846 bp, Acinetobacter baumannii
atgaaattatctgacttttctactcaacgtcttggtgaatatatagctggagatctcgaaggctggccatatagacgtggtgtcgatcttgtagaattcttcaataaaatggggtttagagaaacgtatgggcaaggttttccaagccgtgcaatttatgcgaaaggaaaagtttctgaactgaatggtaagccgaaactaaaagatgccattcgagaaatgcttgaccctaggctttggattgatcttacgtctaaggggcattcagtagaaatctgcgctgctcaagtcaatgagattttaaattatgacggctatgaagtagttagagatggaaatttttataaagtacgagagttagctggaactattattgaaattgaaaagcgatttgaaaaatctgaagaacttagtgaacttcttatagaagaacaaatccaaaaatgtaaggctaaaattgaggccgaagattactcaggggccataactaatgcacgcagcttaattgaagcggtatgtgtgaaaattgaagctgaattagatcctaatgctaaaggaaatgatggagacctagttaagatttttaatcgagtaagaaaactattaaatctagatccaagcagacaagatatttctgactcaattaaacaagttttgtcagggttatccaatataattaatggtcttgcgactatgagaaataaaatgtctgatgcacatggtgtaacgtataaaccaagtagacaccatgcaaagctagcagtgaattcagcaaaaacacttgcagacttcctatttgatacaatgagctatcagatagaaaatgggaatcttaaaaagaaataa

SEQ ID NO: 63415 - DNA, 567 bp, Acinetobacter baumannii
atgaatacagctacaaaatacagtgttagtgatgctgcaactctgtataaaaaatcccgagcgacaatctataaagatataaaaaacggtgtattaagccgtgactatgacggttttatagatttttcagaattacttcgcgtctatggtgagcctttcggagcaaaacaggcaaaacgtattgatacgtcttcaatacaaaatcaaaatacacctgaatacactgataaaacagtggtagagctgaaaaaccaaatcgactttctaaaaaaacagttagaaaaagccgaagatcgtgaatccaaggcgaatgctcgtattgatacgcttctaacgctcattgaaatgaagcctcccacggccaatatgactacgtttaccgatcaagaaccgctgcaaccaagcatggccaaaacagctccagaaccggacacagcagaagctaaacaggacggattgactactccggagcagacggaaaataagcgtattccagtgccagagcaggttgaaccggagcagccgaaaagaggatggttaagccggtttttcttgccgaatggctaa

SEQ ID NO: 63416 - DNA, 591 bp, Acinetobacter baumannii
atgttgcaaaactctaagcgtattggttttctattactcgataacttttctatgattgccttctcaaacatgcttgaagtattacgtatggctaactatgtcatagaagataatttataccaatggaacgtaacgggtttagatggacatcatagctgtgcaagtaatggcttacaaatacaacacacctgtgttttatcacatttactcaatatggacattgtctttatttgtggtggctttcaattatataaaaatatgacgccacgattaaagaattttttatatcaacttgatcagaaaaaaatcgctctaggtggtttatgtacgggtgcatatgtattggcaaaagcgggtttgctcaatggctttcgtgccagtatgcattgggaaaatactttagccgcacaagaagaatttcccttagtacaatttaccactcatatttttactattgatgtgaatcgtttcacctgttctggtgggcttgccgcaattgatttaggcctacagcttgttgaaatgcactatcctaatattactaaaaaaatttgtgagcaatttattgtccatcaaatacgggcagagtaa

SEQ ID NO: 63417 - DNA, 984 bp, Acinetobacter baumannii
  misc_feature (876)..(885): n is a, c, g, or t
atgctagcactagagcctcaacatattcatatgaatcaacatgctgttgataaaacacatgcattaaagtgtctagtagatatattagaaaaagatgggttagttacgcctgaatatataacgggactcatcaatcgtgaacaacaaagcgcgacttatttaggccaaggcattgccattcctcacggtactcctcaatcacgtgaatatattttaaaaacagggattcgcttagcccatttccccgaaggtgtgatctgggatggagaaaataaaatttatttagctgtagtgattgcagcaaaatctgatgaacatttgcaagttttgcaaattcttactcgtgcattaatgcatgacgtcagcgaacaagtaaagaatgcttccaaacctgagcagattatcgaattactacaagctcagccattatctttagcacttcatgaaaatcttattcaaaccgaaatcgatgcacaagatatcgaagatttattttgggcagcttctcaaacactcaaaaaacataattttgtaaaatgtggttttctaagctcacttgatccagaacaagctattcaactgcaagatcaaatctggtccatttctagcaatcactttgttcagcaaccagctattagcattactaaaccatcacaggctttagagctaaatggtaaaaagctgaacaccctcgtttgtatagcagccaatgaccaactcgataatgaaagatttaatcgtttaattgatattttatttaaccctgagcaagttgccgagctagataaaactcaaactccaaacgaaattgcaaaaattattggagctgacgttgttcctgactggcctcaacgttcagtagtgctggcaaatgcnnnnnnnnnnggcaaatgcacacggcttacatgcccgaccagctacacaccttgtcaatcttacaaaaacctttcaaggcgacatccaagttgcagtagacgatggtag

SEQ ID NO: 63418 - DNA, 273 bp, Acinetobacter baumannii; identical to SEQ ID NO: 47774

SEQ ID NO: 63419 - DNA, 1461 bp, Acinetobacter baumannii
atgcaggcggtagtttaccatagccaagatatccaggcatgggagcaacgttggtttgctgcgcaaaactcctcattaggcctaatgcaacaagcagcttggtcaatcactcaacaactcattgtactttttcaaaaacaaaattttaagaatattgctgtttggtgcggacagggtaataacgctggtgatggctattttatagcaagctatctcaaacaagctgggtttcaggttgaaatatttgcggctgagttgggcgagtcagttgatttacaccacgctgtccattttgcgaaagaaaatgatgttcaggttcaccaaggttttgaggtgagtaaaacctttgattgtcatattgatgcgttgtttgggattggtttaaaccgtgaattaaacggttattggcaacacgcgattcaacaatttaatgggcaagcagggctaaaaatttcgattgatataccaagtggtttacatgcaaatactggctctactttaccttgtgcaatacgggctgatcttacatttactgttttagggcttaaagcaggattgtttaccggccaaggtaaagaatatgcaggacaaattcatttaattaatttaataccaataaaccaagagctgaaacctcttgcttacttgacgccaacacatatcaaccttcctaaacgtttggcttttggacataaaggaagttatgggcatgttttggtgataggtggacatgagcaaatgggcggggccgtcattatggctgctgaagctgcttttcatgcaggggcaggcaaggttacggtagtttgtcatcgcaaccatcatcaggctattttgtcgcgagctcctaatattatgctgcgtgatattaatgatttcgatgaaaacggtattaaagaaattttatctcaggttgatgcagtatgttttggaatggggttaggtcgtgatgactgggcacaccaaatctatcaacagtggtttaattatttaaatcagacttcacatttagaagttgtattagatgcagatgccctatggtttctcgcaaagcagcctgaaaaattgagtttacatatttatgcaacacctcatccgggggaggccgctacattacttggttgttctacttggcaaattgaaaatgacagaattgctgcgatttatgcgttgcagcaaaaatatgcaggccagtgggtgcttaaaggagcaggcagcttaattttagaagataacttgtatatttgtacgcaaggtaatgcaggtatgggaactggtggaatgggagatgtgttggcgggcatgattgcaagcttaaaagcccaattccataaagcaattaccctacatgagatcgtaactctccatgctcaggcaggtgaccaacttgccaaacaaggcatgcgcggtttacaggcttatgagatgaaccaagcaattactcaagtagtaaatcaataa

SEQ ID NO: 63420 - DNA, 342 bp, Acinetobacter baumannii; identical to SEQ ID NO: 47765

SEQ ID NO: 63421 - DNA, 318 bp, Acinetobacter baumannii; identical to SEQ ID NO: 54614

SEQ ID NO: 63422 - DNA, 4158 bp, Acinetobacter baumannii
ttgggtacaggcgatgtactcgatggtacggacggctttgtggttgatacgctagctccggcaccggtgattacgattgatcctgtaacgaatgcaatcacgattgactttggtgaagcagtcaatgcggttgatggcagtccgcttacggcagatgcgcttgagggattgctggacattgctaacggtacattgactgaccttgtagacaacggcgatggcagcttcagcggtacgctgttaccggctgcggactttgaaggcgatgtggtggtgaatgttccggcaggtattgttacggacgtggcaggtaatgccaacctgactgcaacagagagccttacggtcgatacattggcgccgggcttggtgattacggccctggaccctgcactcactgcgactgaatcgataacgatcagctttacgtttagcgaggcggtcagtggctttgatattgatgacatcacgccagtaggcggtacgctgagcaatctggtccaaagtacaaccaacccgaatgtctggacagctacgtttactcaagacggtactttaactgcaccgagcatcagtgttgcagacggtgcctacacagaccttgcaggtaacttgggtacaggcgatgtactcgatggtacagacggtttagttattgataccattgatgctattaatgataatgtaacgtttgatccaggtacgtttgtaagtactatttggggcgcaccaataatagctcaggatattaatgttcttgatacctctattattggtgatacttcaatgaatgttgagttttctgttcctagaaatagcgcggatattggtacaggtcatgaaggtgatgttgttattcaagtaagccaagacaatttgatagcagttgcttctggttttagtgtattggtggaatattttgatggaactaattgggtacagtacaccacggctacaactacaaatggaggtttaattgctgatgcgctaggtttaggggttctagggattgtagatgatggcaaaacaatagctgtgcatctgacaggcgtgccagaaggtcaatatcgtgttgtagtgcagaacgatagtagtgctattggtgatttgttagacgacttaacattagcacaactgggtgaccaaggtattttattaggagctgacaatcaggatgctgtattagatgcggtagaaactgccttaaatggtcaagtattaactttaggaactttagtaagaaatgttttagaaccactgttaaatgctgctaatgctgctggtgaaaccttggctgtaactgatatcgttgcagcaattgtgcaaataccattagttggtagtctcttgggaggtgttgatactgttttagattttattgctgatgccttggttgataatctacttactgtacttgagtttaccaatgtaaccatcaatggttcagaaacttattacactacaccagaattagcgggtaatgtctttgctgacaatggatctggagcagatgatcgtggtaatagtaatgcagcacttgtaaccaaagtagatggagttgatgtccctactgatggtacagatgccgtgattaaaggtttgtatggtaccttgtatattaataaagatggtgtttatcgttatgtgctgaatggtagtgtagattctaatggtcaggtagatgattttacttacactttatcagacggtactcaatcagatacagccgttttaactataagtgtggaagatgttattgcaccaaaagcaccaattgtttcttcattggatgaaaccaccgttactggtgttgccggagctgcggaagctaatagtgttattaatgtctatggtggtacagacagtgatggcgacggcatcccagatacattacttggtacaactacagctaatcctgatggtagttatacagtcacgttgaaccctgcaatcgctttaggggacacagtggttgttacttcaaaagatgcggctgacaatatttctacaccaacaattgcaagtctgcataatattgtcgcgcttgatgatcctaaccaaactaactatgagttatctactacagcagatcgtccaaatattagtggtggtatttttactttagctaatgctggtgttcttggagatttaattgatttagatctgagtgctacatccgctcctggtgtgattgtcggtacaaatgaacaaatcactttaacattaacggcaagtgggtctactggtttagatataagtgcagttgggaatttgattgatgctattttaggtggaaatattggtggtagtcttgatttgattattgctaaacaaacatcaacaggtagctatgaagtttataatactattgctaatgcatatacgttaaacaataatgttttaacttttaccgcgtctggttcgcaatccatatctttggatgatgccggtgtctataaatttattcttgctccaaattcctcaacctcgagtgctttaagtaacttattatctctgaacttattaggtaatttagtattatcgtctgacgatgtagtagcaaccattaataatacagatcttattactggtaatgttttatctaatgatactgctgcaccgataggtttagatttgtcaattgtttccattaaagaaactacagcaggtgtagatgaaactgtagtgtctggagctcctaaagtcattgaaggcaagtatggtactttaactatagattcaactggtgcatatagttatcaaatgacggctaatgcaactgctttaggtaaggttgaagcatttacttataccgtacaagataatgatggccactcaaaacaggcacctatttatattcgtttggactctaatttagttacattagattggacgggtaaaacaggactacaagaagctgataagttagtaacgcaactgaccgctgataataaggcttctgcaggtacagttactactttatttgatcaggtattaaatggttctggtgattctttaaatagtattcaggtaactggcagtaacggtgcattacctacttcacctcctgcgacaggtagtacggcaattccagatgattctgggcgttttaccctaggtgtagggcaaacagcatatatttctttcacatcaatattaccatcaaatgtgactcagaattttggtctaggaggaaatcaaaccagtgcttataatgtggttattgaactagagagagatggagcagtactagatactcaattggccacttggacatcaaccatcagtggtacaaaatattattataaagtgactaatacaggaacttcatcggctgattatgatttaaatattgcttatggtgatggttcaggattgtttaactggacgaatactactggtaagacatttggtattaataatattcaattagatattacaggtacaacatatacagcatctactgtatcaggtgacctaatctctaatgacttattgtattcaagtgtctttaaaattggtgttgcggctggatcgactacgcctagcaattatttggatgtaaattcaacatcgatagtaggaacgtatggaactttaactgttaatttagatggaacctatagttatcaagctaatggtaaaattgctgatcttggtaaagatgatgtctttacatataaaattgagacattggatggtactgtaaacacgcaaactttaacaattaaggtagatgctgataatgttttgattggtacgccaaatgcgggcacagcagggaacgacattgctgtaagtcaatctacaaatgaagtcttcacattaggtgatggcgctgatttgttaatttacaatgtacttaatggttcaagcccaacaggtggaaacggtactgatcaatggctggattttaatatgtctgaaggcgataaaattgatgtgtcatctttattatcaggtgcaacagcaactactattaataactatcttagtgtgagtattagtgggaatcaggttactttattggttgaccgagatggtagtggtggtatttcaactcctaccgcactgttaactttaactaatgaagaccacgcaacaaatcctattactagtttagtagatttgttaaataacaactcaattatctattaa

SEQ ID NO: 63423 - DNA, 963 bp, Acinetobacter baumannii; identical to SEQ ID NO: 47782

SEQ ID NO: 63424 - DNA, 3423 bp, Acinetobacter baumannii
gtggcaaaagctcctaaagcaaaaactaaagcgcttaaagtcaatttccacgagcaattgattttaaataaatggttgtggtcgaagtttaatcctaatcgcttggaaggcatgaaacaacaacttgatcatcagcaatttgagggaatcgagcatgagggtgataatgcaggacaaacgaaattctttagtgtaatcagcaatactttatttaacaaacaggttgtagatatcgatgttctacgtcgctatgacttaaacattgtgaagcactggcaaaagatcactgaaaaacgtaatgaaatagaagggcatgttttaaatctaaaatatttccaatacctttcattgctgtttacagaactttatttagatcaatattttaatcatcaagcggacatgctaaatgagctgaatgttgaacttgaacaatataatgatgaccagaaaattgatgcagaccaatttcagcagtatttgcctgaagacctaaataaaatcggctattggaatgcaacgggcagtggtaaaacattgcttatgcatgtcaatattttgcagtatttagactatttccaacatcaaaatggcgacagcacttacccagaccaaatcattttacttaccccaaatgaaggcttgagtgaacagcatttacaagagctgacagactctggttttcaagcgactttgtttgataagcaaaaaagtcgtaatagcttgtatcgagatgaaattcaaatcatcgatatgaataagctgagtgatacggatggtgataaaaccgttgcgacaatgagcttggaaggtagaaaccttgttctgatcgacgaagggcaccgtggtacgagtagtagcgcaggtgcttggatggagcgtcgtgatattcttactaaagatggttttagttttgaatattcggctacctttggtcaagctgtaagtaaggcagacaacgtttataaacgctttgaagatgcaaaaaaacaaaaagccaaaatgctgtatggtatggcgattaataagttaaccgaagaacagaaaaaaaatattcagcttgatgaattagaacagcaaaaataccgtagggaagcacttcgagaagtgtatgctaaaagtattttgttcgattactcgtacaaatatttctatgcagatggctatggtaaagaagtcaatattctgaacatgaaagaatatcatgaagatgatgagcgtaatctttatcttacagcttgcttactatcgttctatcaacagcaatatctatttaaaaagaatcaggcaaagctagcaaaatttaatattgaaaaaccactgtgggtatttgttggtaacaaagttaatgatgatgactctgatattttaaccatcgtcaaatttttggcagacttcttggattcatcacgtaagcctaaggtgatcggttggctcaatgatttgatcaccaatacatctcgtttggtcgataccaatggtattaatatttttgccaatcgatttgcacctttacatgggcaaaatgcaactgatctttaccaagatattttaagaagcttttttaataccacatcaaatcaacgtttgaatgtagtacgcataacggcgaataaaggtgagttgcgcttacaagtgggcgaaagtacaccttttgctgtgattaacgtaggtgatgaaaaaggcctatacgacaattgtgaagaatctagtcaaacacattatctaaatgcacggactgatgattttgcggaatcattatttcctacattaaataatgatgatagtgaaacacatcttctgattggttcacgtaaatttactgaggggtggagtagctggcgtgtctcgaccatgggcttgttgaacatgggttcaggtgaaggtgctcagattattcagctctttggtcgtggcgtacgtttaaaaggtgagaacttctctttaaaacgaacaccaagagaaatttatagtaagtctgaatataaaggtctgcatttagatttgatgcaaactattaatatttttggtttacgtgctgactatatggaaaaattccgtgactacttgaatgatgaaggaattatcctaaatcaagatttagttaccttggattttccaaccaataaaattaaagcaccgcgcttaaaaacactgaccttgaaagatggctataaagataatcaagccaatggttttaaggctaaattaaagctctcgatgtttaaaattccaaaacagtatgaaggtaaaattaaaaaaccttttgtcgttttggatttgtatcctcgcttgcaagcctttcataccgataagtcaaagcgacaaacagatgttaaagacaaacgccaagagcatgagatttcaccaaaaatcatgtgtatgtttgattttgatgaaatttacttgcaacttcagcaatataagttccaacgaggatatagcaacttacagttgaacgttgatgatttacaggagttttgcttaagagatattaagacctctacagaagactggtacaagcttctggttgactcatctgaattaaccaatgacgtgagtggaattaagaaacagcaagcgattctaacggagcttttacaatcctatatggataagttctatcatgcgattaagaatgcctatgaagggcagttttatgaagtgactgaatttagcttggatgataaggatttgcctgtacagatttgtgagcaatatacccttactgctaaagacggtcaaaataacgaggcacaagaagtatttgatcgtttggaaacactgaaagatttggttgccaagggtgatgtggaaaaattagcaccttggaaagaagatggtagctttagggcgattacgtttgatcgtcatttgttctatccgttgttggataagaaggatgaaagcttaccatttacatggtcaccaatgttatttgactatacgagtcatacccaaagtagtgaagtgaagtttgttctggatttgcaaagttatatcaatacaccagatgcaaatgaactcttgaaagatcatgaactctatttgttgcgtaatgctgataataagtatcgtggactgggttttgccttggcaggtaatttttatcctgactttttattgtggctagtgaacaaacaaacaggacagcaatatttaactttagttgatcctaaaggcatccgaaacatgaatcacgatgatgccaaaattgagttctataaagagataaaaagtattgaagcaaaactcgatcattctgacttgattttgaatagctttattttgtctattactccaatgaaagatattctgaataacactctttctgaagaagagtttgctgaaaagaatgtcttatttatggtgggtaatggtacagcttatcttgggcaaatgttgaagaaaatttttgttcaataa

SEQ ID NO: 63425 - DNA, 249 bp, Acinetobacter baumannii
atggcccagtacgcagttgatcgctttcaggcagtgggcattcctgcttggcggaattcgaattcaatcactgtggtatttccgtgtccttctgagcacatctggaaaaagcattatctggcaacctctggaaatatggctcatttaattactacggcacatcatcgagatacacgtcagattgataacttaattgacgacgttatttttgatttacaaggtgcctctaaacgtacagttggcttttag

SEQ ID NO: 63426 - DNA, 306 bp, Acinetobacter baumannii
gtggtcaatgcacttaaggtattattattatttggaaaattacgtaaaaactttctacattttcaatgcataaagaaagatgatgagcaacaaattgctaattttattgctggtatagagccaattattggagatcacctaaatttagacaaacagaattatccagtcaatctggaagtgcttgagagaacagttaaatttagttttcaaagagttgttggccataataaaaaaaatgttactctactggttatatttaatttaatgttaaaaatcatgcaagaagatgaactttggttaaaatag

SEQ ID NO: 63427 - DNA, 912 bp, Acinetobacter baumannii; identical to SEQ ID NO: 47868

SEQ ID NO: 63428 - DNA, 2736 bp, Acinetobacter baumannii
atggatttaaaacccagtctacttagctatatttttacgggttctgccaactgggaattaagctacacatttccaaaattaaagctagatctcaataaacaaaccactcaccttaccttggatgaaatacttgatataaatattcaaagtggttggatttggtcatctgtcacactatctacttcagaacaaaattatgtacttaaaggtgttttcaattcacaagctaaagttctaaaatcaaatctactagatgatattgagtttctaaataataagaaaaacgcggatacgattaaggaaatactaaagccatacttaaaagagtatcaaaattttatccaacaaaatatttacttatctcatcgcctatgtagtctatttagatcagacttaacagagagagtaaaatctttggtagaaaagtttagcaatctcatagaacgagatagctcttttgcatttgaggctgatctacaaaatctgtttgaacaacttcgacaatttattgaattgccaatcaaagcaaactacgccattgacgctaaaaataaatgtttagttgaaagcgagttaaaagcatttaaaagtttttttgatcaggtggaaagtacccctctaactaatgaacagcgcatttcctctatcatctttgaggatcgcaatctattggttgcagctgcaggttctggaaaaacctccacgattgttgggaaagtgggctatgcgctattaacagggctctacaaacctgaggagattctagtcctcgcattcaataaaaatgcaggagaagaactcaatgaacgtattaaccttagattaaaagatattctcgctcaatttaatactggtgttgaagcccttaattttcataaatttggtgttaaggtaattggtagagcaacaggtaaaagcccttcagtttctgaagatgcagtgaggattcagccactattaaatagaattattcaaaatttgactgaaactgatctagaatttcaagaaaagtatcttttatttaaaactgcttatttaagaccaccgttatcccccttcgcttttaaaaccagaaatgattgggaaaaagcacaaaaacgatcatttgatagattcaagaatggcttcgaaacctatcagggagaaatcgttaagtcacatggtgaaaaagccatagcaaactggttatacagtcaaggagttccctatcattatgaaaaaaattatgaacatgatacagctgatgaaaaccaccgccaatataaacccgatttttacctacctgaaataaatctatatcttgaacactacgctatagatcaacatggtaagccacctgcacactttgggcaaaagtatctagatgacatgaaatggaaatcaggaatccataaacaatataaaactgatttaatcactacaaccttccatgagtttattacaggttcaatttttgaaaaattggaacaagagcttaaatcacgaggacaagaatttagacctcgtagtcttgcagagatcgattctaaagcacagtccatctttgaatatgggagcaatgagctttatggtagttttttaaaccattataagtctaatcaaaccaatatggctgatttattagccagacctctactcagcctacgggaaagcctttttttagaactattttccaaagtttatcaacaatacgaccagttattaaaaactaatacagaatatgactttgatgacttactgattgaatctgctcaactaataaatgaaaacaaatacaaaagttcttttaagctgattatcgtggatgagttccaagatacttcacaggctagagctagactcattctttccttattgaatcaggtgcctgaagcaaaattgttttgtgttggagatgactggcaagccatatatcgttttgcaggctcagatatcagtatttttactcaattcgaaaaagtctttggccctactaagcagacacagctgacccaaacattccgttcaaatcagggtattgccaatgtagccagtggttttattcaaaaaaataaatctcagcttcgaaaagtagtgaatgctattgataagacaagtaataaagttgttgagataaactttttaacaaagacacaaaagattcatgaatacctatttaagacacttacagatatcaacaacgctaatacaaactctaaaaataaaaaaactatttatattttaggccgctataaccacaataaaccgaatttagataatcttttgccctttcttaaaaattgtcgcattgagtttaaaacaattcactcttctaaaggtttacaggcagactatgtcattatcgtcggattaaacactggtaacaatgccttcccttcagaaaaagaagatgatccattattaaatatagtattgccagaaccagaggtacatgcttttgctgaggaacgccgtctgttttatgttgccctgactcgagcgaaagaaaaagtctttctcataggtgagcgtaattcaatatttctggaagaaatcaccaaagagcagaattttaaagaatttatccatataccacaggatgaacataaaccaatcaacagtgatataccacctgaatggctatgtccaaaatgtgaagaaggtcgcttatggaaaaagactggaaaatttggtaattttttgggttgtgatcgctatccaacttgcagttatactaagagtttaaagcaacgttga

SEQ ID NO: 63429 - DNA, 684 bp, Acinetobacter baumannii
ttggctaggaccggacaatcggcagcattaaaaggtaaggatgtcagtaatggctacattttgttggcaaccgcatgtgatggcacactagccaccacggcgcaattcaccagtgttcgtgtggtgtgtaacaacaccttggcgattgccttacgcgggcagaatagtagtgctggtgtagtgaaagttccacacagtaccaagttcgatgccgagaagattaaacagcaattgggtatttcggttcatgcatggggcgagcacatgtatgaaatgaaacaactcagccagcgtaaagttacccagcaggaagcagcagcttattttgatgcagtgtttaataacacgaacctgagtattgctgaacaagatgaaagtatcattcagttctaccgtaatgtagctacgcctaaacaaatcaactcatccaaagccgacaataaaacagaaccaaatggacgtgctatgtctaaggtcatggccatgtttaatgggcatggtcgtggtgccgagttagcttcagctaaagatacggtgtatggactgctttgtagtattacggagtttgttgatcatgagcgacgtgcgatctcaacagatcaccgactagattcagcatggtttggggtaggagccaaccttaaacaacgtgggctggaacaggcattaagaatggttgtataa

SEQ ID NO: 63430 - DNA, 264 bp, Acinetobacter baumannii
atgtttgaattcgccctagtaccagtcgtgaatattggccttgccatttatttattctgtgcaaaaggaactgaaggtcctaatgattatggacctaagcgtccaacgccaagctgggagcgtgttttaggctggatttatattgtgcttatcccgcttgcattaatttttggtgttattgccgtaattatggctccaacctatgaaggttatgtcgagaaaagcgaaagtattgtaattggtagcccatctcagtctgaataa

SEQ ID NO: 63431 - DNA, 681 bp, Acinetobacter baumannii
gtgggatcgatcgatgctttgtttgtaaaagacaccaaggaaaaacgagatgaaatgcatgggactgtccgtcttactgtgtcgtctgtgttagggcgcaaattggtagtacccgcactagcagaatttgccacacgttatccagatattgtcgtggattgtgtgctaacagattcacactcggatgtgatcgatgagcggatagatatcgggatcagatttggatttttgccggacaatcgatatgtggcaagggaattggctaaagtgaacttttattctgtgggtacgccagagttaattgataaggtcggaatgcctaaaaaaattattgaccttgataaataccctctaacagcactattcgatcataaaacagggcgttactggccatggacattcaccgaaagtcgaagcttcacgccatcaaagcctcgttttattacagatgatctagaagctgaatttcaagctattctcgctggagttggattcggacacatgcctggatttctagttttgccgtggcttaggagtggtaagctcattcagatacttcataaggaaacctctcccgtttggcgcctgtatttatatcgtccacagcggggcccgacacctttgcgaatccgagcattgtttgattacttagcggaagtgttgggccatatagaaacctga

SEQ ID NO: 63432 - DNA, 966 bp, Acinetobacter baumannii
atgaaaaacaatcatcaaatagagcaaaaaaatactttaagacgtgttgctagcgccagctttattggtaattttgtggagtggtttgattatgctgcatatggttttttggcaacagttattgcagtggtttttttcccgaaaagtgactctttaacagcattaatggctacatatgcgatctttgcaatttcatttatttttcgtccattaggcggtattttttgggggcatgttggggataaatttggtcgaaaaaatgcactatcgtggtcgattatattaatgacactggctacggtatgtattgcactgttaccaagttatcaaagtatcggtatttttgcaccgattatgttattaatattccggatgatccaaggcttatccgcttcaggtgaatatgctggtgcagcaaattttcttgcagaatacgcccctaagggaaaaagaggactttataccagtttagttcctgcaagtactgcaacgggtttactactcggctctttaatggcagcggcgatgttcgctttcatgtcagaggcgtttttacacgaatatggttggagaattccatttttattggcagcaccaataggtttaatcgggtattatatccgtgtaaagttagaagaaaccccagagtttttagaacatcaaaaaaatagcaacaaagaaatttttccaatcaaagccttatttactcagtatcaaccagcactttttaaagcatttgcagttgcatctttaaatgccaccgccttctatcttatttttagttatatgccaaattatttagctacagagttaggtgtaaataaatccaaagcctttatatcagggtcaatttcattgctattttatattgctgtagtttttgtgatgggcaaatattcagatcgaattggacgtaagaaaatgttgctttgggcaggtcctatcttgaatcaaatcagcaaatag

SEQ ID NO: 63433 - DNA, 1107 bp, Acinetobacter baumannii
atggaagagctagaaattgatcatattctatttagttcaatccataacattaactattatgcagactttatttattgttcatttgggcgcttctacggtctggtggttagcccagaaaaagtggtgacaatttcagcaaatattgatgctgggcaaccttggcgtcgtacgattggcgactataacgtagtttatactgactggcagcgtgataactattttaaagcggttgcacaagaaattccaaataaaggccgtgtaggaattgagtttgatcatttacctttagaacgtttaaacaagttaaaagcagttttaccgaatgtgcagtttgtggatattagttccgcatgcatgaagctacgcatgattaaatctgctgaagaaattgcacatatcacccaaggtgctgcagtatgtgatattggtggttttgcagtgactgcagcaattcgtgaaggtgtgccagagcatgaagtggctttagcctctactcaatccatggtacgtgaaattgccaaacgttttccaaactctgaactcatggatacgtggacttggtttcaatcaggcattaatacggatggtgcacataatcctgttacaacccgccaagtccaaaaaggtgatattttaagtttaaactgcttttctatgattgctggctattatatagctttagagcgtacacagttctttgatcactgtgatgatgcttcattacgaatttgggaggcgaatgtcaaggtgcatgaagctggcttaaaactcattcgcccaggtgcacgttgcagtgatattgctaaagagttaaatgaaattttctatgaagaaggtttattgcagtaccgcacatttggttatggacattcctttggtgtgttatcacattattacggtcgtgaagccggtttagaattacgtgaagatattgatacggtgatagaaccaggcatggtgatttcaatggaacctatgattatgattccgcaaggaatggctggggctggtggttaccgtgaacatgatatcttggtcgttacagaatcaggaaatgaaaatattaccaaattcccatatggtccagaacataacattatcaaataa

SEQ ID NO: 63434 - DNA, 1404 bp, Acinetobacter baumannii; identical to SEQ ID NO: 47381

SEQ ID NO: 63435 - DNA, 657 bp, Acinetobacter baumannii
atgctaaagaaatgtgttttttcattggtctatctcttgccaattcatttatacgctgctcaggttgatgtattgcgtgagcaagctattcaaaattatagagcaggacaaactcaacaagctgtatctcaactagatcaattgctaaataaatacccgcatgatcaaaagctgcttgctgattatctgtttattatgtcaagtgaaaaaagggatcttacgaatttttcacggtttttggtaaatattaattatgtagactttccagaatatgcaaagttacctttaattcaaaatttccgtgattttaagcattttaaaactgcaattgactggtcaaataagttcaatattcaaaagtcagttgatgggcgtattttattatcggttttgtatgctgaagctcaagatgtggcgaatgctaaagatcagttgtcgaagatcgatattaaaggtttaactgctgatcagttggtacgggttgcatatgcttatcgtttaataaatttaccagtagatgctttagctacagttgagcatgcttatcaacaacaaccaaaatccttatccgttttacaagaatatgtttacgatctaattgctattggctcatataaaaaggcgcagcaattactgcaagcgagcgaaaaaaactga

SEQ ID NO: 63436 - DNA, 1446 bp, Acinetobacter baumannii
atgaagcaacaatcaaaagtatggcagtttaagtattactatgaaaaagaattcaaaaaaattgaaagcataaaagctcgtattggtacatccaactaccgaaaggactatcgtcctttgcaatcaacgtctaacgctcaagccttaggccctggtgcacgttatgaaattgatgccacgatcgctgatatttatcttgtttcaaattcaaatccagaaagtatcgttggtagacctaccatttactttgtgattgacgtctttagtagattagtcgcaggcttttatataggttttgaatcaccttcatatttagctgcaatacaagcattgaatatagcgatgaccgataaggttaagtattgtgctgagtatgggatctcaattcagcaagaggattggccatctgttggtctacctgatgctttactcgcggatcgaggagaactactcggttatcaaattgaagccttagaaaaaactttcgctgtaagactcgaaaatgcgccagctagacgtggtgatgctaaaggcatagtggaacaagctttcaatacatatcaggcttattttaaaaaagaaggtaagggaaaaggtgttgttgaaggcaccactgtaaaaaagactggtggtaatgattaccgtcaagatgccacattaaatattcaccaatttactgaaatcattcttgcctgcatcatctcgcataatcaatttcatgtactaaaaacgtatgatcgtgagccagacatgcctaatgacttaccaactattcccttacatttatggaattggggtattcaaaacagaacaggaaaattgagaagtgttccagaagaagctctcagaatcgcattattgccacgtactaaaatcacaatatcagacttaggcatcaaagcatttggtctttactacctagcgaaagaagtacttgatctcggttggttacatcgtaaaacaggaagttctcgccctcaaaaccttgaagctgcatatgatccttactcaatgaataaaatttatatttttcctaaagataatagtcttgaatattggatggggtctctctccgatcgatcgagagaatttatggattgtactttgtgggaagtcaaagaaaggcaaaaagcccaaaaagagcaccttgtacagcacgaactacaggcttcaaaaaaacgaagagagcttgaagcttttatcagtgagaaacttaaaactaagcatccgaagagtccaattaaaccatctcaacgaaccgctgaaataactgaaaataaagcaaaagaaaaaaatattgaacgcaaagctaaggtaaaacagcaagaaatattggatacaaatattattccaatgcctaaactgaaaaccgcaattaagcctcaagatgctgaagcggttcattatccagacttaacagacgaattatttggtgaggatgactaa

SEQ ID NO: 63437 - DNA, 204 bp, Acinetobacter baumannii; identical to SEQ ID NO: 63313

SEQ ID NO: 63438 - DNA, 618 bp, Acinetobacter baumannii
atgacaactcaaacgaaagaaaccagtaaaaaattaaatgcgaaagatcgttaccgtgcattaacccgtgatctggactgggacttttcctatgctgaccgtaaagatgccttcccttatgaagagtttgaaggtaccaaaattacggactggtctaaatgggaagatccattccgtttaactatggatgcttactggaaatatcaggcagaaaaagagaaaaaactgtatgccatttttgatgcctttgctcaaaacaatggtcagatgaatgtcagcaatgaacgctacttaaatgcgatcaaactctttttaacggcggttaccccacttgaatatcaggcttatcaaggctatgcccatgtaggtcgccagtttagtggtattggagcacgtattgcttctcagatgcagtcgattgatgagctgcgtcatgtacagactcaaattcatgccatgagccattacaacaagttctttgatggctttcaggactgggcgcacatgcatgaccgcgtttggtatttgtctgtacctaaatcattttttgaagatgcccgttctgctggccctttcgaattttggtggtgtttcaaaaagtatgctgacattaaatga

SEQ ID NO: 63439 - DNA, 708 bp, Acinetobacter baumannii
atgatagggcagtatcgagttacagctttgattcctgcacgtggtggcagtaaacgtttgccacgtaaaaatgtaaaattattgggtgataaacccttaattgcatggtcgatagagacagctaaagcatctaagtatatagatcgagtagttgtatctaccgatgatgaagagattaagcaggtttctgagcagtatggtgcagaagtgccatttttacgcccagaacatttgtcaaatgatcacgcatcaagcttcgatgttataaagcatgccattggttttctacacttagatcagacgaatgaactcattgttttacttcagcctacatctcctttacgtttggtttcggagttagacactgctttagaattttttattgcaaaaaatgctaaaggtattgtttcggtttctgaaactgagcatagtccaatgtggtcaaatacattgccagaaaatggttgtatgtctgattttattcgtccggaagtacaaggtaagcgaagccaggacttacctaagtttttccgtttgaatggttcaatttatatttatgaaactctatctttattagaacaagccaaaatgttttttgatgaaaatgtttatggttttgaaacatctttagagacagctgttgatatagatactgcattagattttttagtagctgaaactattatgaaacatagggctattgaatga

SEQ ID NO: 63440 - DNA, 1137 bp, Acinetobacter baumannii
atgcaaatgattagcccgactcgacttgcttcttttaatgatatgcaagacagtaatttctttactcagtttttaaatatctgttgtggaaaacctgtacaaccaaactataaagaatatgtgtctttacaacatgctctttatgaaggggatattgaaatggataaggtgattgattgggttatgcaaagtcccaaagatcaccgaataatttttgagaagatattatttcaaggccgtgatgaattctctaagcctatacctactgaattagaaaatttctttaattacattgaacaaaaacctgattggttagaccaacaacaaattgatgaggctgttaaatttacccatcgtttaggaataaataatggttttattcttagagacttatccttaatggcgggatatttatatccggggtttaatcaacccctaattttaacgggtgcattaaagaaagaagcgggaacacgtttagcagaaaccacaaaatggtgggtggatattactgaacctcaagggctttttcgtttgagtgcaggttttacgtcaacgatttatgttcgctttattcatgcactcgttcgccggcaattaaaaaagtctagccgttgggatagtgaggtttggggaattccgcttaatcaatttgatttagcaatgactaatttggcttttagcagtgtcgttttactcggtattagagctttaggtatatggccaacaaaacaagaggcaaagagttttttacatttctggcgttatgttggttggttaatgggtattgataaaaaatggcttattcagtctgaacctgagggttggaggttactttactggatgcagtttgctcatcctcgctccgatcacagcagtattgtattaggattgagcttgtcgaaagaaccttttgagagaaaatatctgcatttacgctctttacagcagaaacttgcttatcgacaacatttggaacttacccaattttttattggtaagaaaagaatgaaactactcggattgcctcagcaatctgcctcatggtttgcttattatttaattgtgcgtaatttactactttataatggcgcaaagctttcaccaaaagttgaaaagtggcgaattcaaacatga

SEQ ID NO: 63441 - DNA, 567 bp, Acinetobacter baumannii
atggcaaaagttgttactggattacgccctggtggacgcagcgaaagaatacaaactgcggtacatcaagctgtaaaagaactacaaaaagattttgagcagagccaaattactattcctatgattgcagcgcaggcaggggttacgccttcaaccatttaccgtcgatggggtgacatcaatcaattattttcagatgtagctttaaatgaactcaaacctgatatggaacccaaagatttaggttcgttccaacaagatattacagcatgggttgagcaatattttgaagaatatgcttcagaggttgggcaagacttattgcgagatgtactctatacattaaactcggattctaatgcccgtaaatgtgagactttaattatccagcagctcgatattattcaaaacagggcaaaattacgtaatgagcttactatacctaatcaggaaatcatcgaggcagtaattgcacctatgttatttcgaattttatttaccaatcatgatcttagtcttgagtatgtatatgaccttttaaaccgtctttttataaaaaataagtag

SEQ ID NO: 63442 - DNA, 1041 bp, Acinetobacter baumannii
ttgaaaattgctattttacttcctgaaatttataattgtgggccagttaatgttgctttgaatctggctaattttttattttcttgtgaaaatgttagtttaatgattgtttcaataaggccattagtccataatgagactttggatttctttaaaaaaaaatcttctttaggagtgcatactttagatggaaaggattatttaaaagaattaaaaaaaataacatcggattttgatgttattcattcacatggtttttttcctgataagcttttatctaagctggatggtaatataaaaaaaatatctactgtacattgcatgttttataaagattatccaaaagaatatggttatctaaaaggaattttaggtgcttttactcactttcatattctgagaaatggaggctttcatcatattattggttgttcagattctgtcgctgagtattgtataaaaaacaatctaaaaaatgttgaatctatccataatggtgttgatcagagccgttttaaagttctctctattgatgataagaaaaaaagaaagcttgattttggtttcgaggggaaagtttttatttatgcaggtcgttttattcggcgcaagaaagttcctgaattaattgaatattttttaaaaaaatcgactgatgattcagtgttgttattgctaggagatgggcctgagaaagaacaatgtatagcgtcttataaatctaagaagcttaaatttattggtcaggttgataatccagagtggtattatcagtttgcagattttgttatctctaattcttcagcagaaggatatcctatgagcattattgaggcaatctcatgtggttgctatgctttattgtcagatattcacccacataaggagctcgtagaaaataatccattatgtgcaaagttattaaatgagataaatttttgtgatttaacagtagcagtaataaaccgagaattagttactaaactttcagcagagcatatggctttaagctatttgaaattatatgagactaataaatga

SEQ ID NO: 63443 - DNA, 960 bp, Acinetobacter baumannii
atgttacaaaactctaagcgtattggttttttattactcgataacttttcaatgattgctttctcaaacatggttgaagtcttacgtatggctaattatgttacagaagacaatttataccaatggaatgtaacgggtttagatggtcatcatagctgcgcaagcaatggtcttcaaatacaacatacctgtgtttggtcacatttactgaacatggatatagtttttatttgtggtggttttcaactttataaaaatatgacagtacgcttaaagaattttttatataggttggatcaacaaaaaattgctttaggtggtttatgtacaggcgcttatgtattagcgaaagccaatctactaaatggctttcgtgctagccttcattgggaaaatagcttagcggcacaagaagagtttccattagtacagtttaccccacatatttttaccattgatgcgaaccgttttacctgttctggtgggcttgcagcgattgatttaggcttggcacttgttgaaatacactatccaaatattgctaaaagaatctgtgagcaatttattgttcatcaagtgcgtgagagcaatgaaattcaacatcaacctattgctgaacataagaaaaaacttgattttcagattcaagaagtattgcgcttaatggaaaataatattaatgagcctttaactattgctgaaattgcacagcatgtaaaaattcaaccgcgtactttagagcgcttgtttaaaatgagtctacaattggctccaaaagaatattatttaaaactaagactcacctatgcacagaatctacttaaacagtctacgttaaacatttcaaatattgctttggcatgtggtttttgtaatgtatctagttttactaaagcctataaagctttttttaactattcccccaaatttgaacgtaacattctggattttgctcattag

SEQ ID NO: 63444 - DNA, 1266 bp, Acinetobacter baumannii; identical to SEQ ID NO: 47826

SEQ ID NO: 63445 - DNA, 1404 bp, Acinetobacter baumannii
atgatgcattttaaaatgtattgcaccaatttaattcattactatgctgaggaccgtgcattgaaatataacaacctgaatgaattcctgaattacgtgcaagcgcgtgatccgcatcaacctgagtttttacaagctgtcgaagaggtcatgacaagcttatggccatttattgaaaaaaatccagaatatgccgagcagggattgctagaacgtttggtggaaccagaacgtgtgatccaatttcgcgtttcatggatggatgatcaagggcagactcaagttaaccgtgctttccgtgttcaatacaattcagcaattggtccattcaagggggggatgcgtttccatccgtcggtcaacctatctattttaaaatttttagggtttgagcaaacttttaaaaactcacttacaactttgccaatgggtggaggaaaaggtggttcagattttaaccctaaaggtaaatctgatgctgaaattatgcggttctgtcaggcacttatgattgagctttaccgtcatttaggtccaaataccgatatccctgctggagatattggtgtgggtgcacgtgaagtaggttatatggctggcatgatgaaaaagctcagtaatgacacggcatgtgtgtttacaggtaaaggaatttcatttggcggtagcttaatgcgtccagaagcaacaggctacggtacggtttattttgcagaagaaatgctaaaaacacgtgggcagtcttttgctggtaaaaccgtttcgatatctggttctggtaacgttgcccagtatgctgctgaaaaagcaatgttcttaggtgcaaaagtggttacgctatcggactcaaatggtaccgtttatttaaaaaatggttttacagatgagttgcttgctgaagttatggaactcaaaaatatcaagcgtggtcgtatttcagaatttgcttctaagcatggctttgaatattttgaaggaaagacaccttggcatattcctgtagatattgctttaccatgtgcaacacaaaatgaattaactggcgaagatgccaaaacgctcatcgctaatggggtaatttgggtggctgaaggcgctaatatgccatctacacttgaagctgttgagcattttattgaagctaagattttgtatgcgcctggtaaagcttctaatgcgggtggggtggcaacgtctggtttagaaatgtctcaaaatgcgattcgtttaggctggacacatgctgaagtcgatgaacgcttacatgcaattatgaaagatattcatgccaactgtgttagatacggtactaaagaagatggtactgtgaattatgtagatggtgccaatattgctggttttgtaaaagttgctgatgcgatgcttgcacaaggtatttattaa

SEQ ID NO: 63446 - DNA, 213 bp, Acinetobacter baumannii
atgcaatcagatgatctttttgaacgtgccaaattattcacagaggaagtgggtgtcgtttctgtatcgagtttacaacgccattttttaattgggtattctcattcagaacaactacttagccagttaattgaagcaaatatttgtgaatctacaaaaacttttgttctagattatgggtatggctataaattgcatcaaggtatgaaataa

SEQ ID NO: 63447 - DNA, 762 bp, Acinetobacter baumannii
atgagtacttttgaaatgcaaggtctgacatggaaggcaagatcgaagtatcaacaagatgccatattgattgaaaataaagttattcaacatgatggactcatcactaaactatatagccattctgaaaaagaacagtggtgtgttgctgtagcggatgggattagcaatagtccagcacctgagcaagcatcctatacggtcttaaaagctttaatgcaaaataaaaagatagaaccttgtcaagcatttaccattcagcagtatcttgttgatcaattagcacatcagaaaaatagttttggcgcaagttcaacactcgcattcattcaaaatgatggcgatcaaggttttgtgaccattcaacatcttggcgatagtcgagtttatttgtttagccaacatgatcaaaagtggcattgtctgaccagagatcacaattatcttgaacagttaagagaaagtggcgagctaagagcaggagaaaactacgccagtatttatggtgcattattacaatacttttgtgctgatcccttgcatgaagtgatggattttacaaaaacagaagaatatttgactgcgaatgatgccttattggtttgtaccgatggtgtgcatgatgtgatggagtgtggggaatggcttcctttaaaagcagatatggagcttcgaacatggttactcaatatgaaagcgtcattagattcaaaacaggcgtatgacaatgtcagtatggtcttagtacgagcaaaaatttaa

SEQ ID NO: 63448 - DNA, 1014 bp, Acinetobacter baumannii
atggtagaggaaagtaaaagaaaaaaagctccacatgatttgcctaggctgatccaagaagttttagcacagcttgggtatgatcttgactctgatactgtggctgagcaagttcgtagacttgatattggtctgccagttgaagatgaattttcagtagtatgtgcgtggttaggaaagtgtcagcttttacataaacttgatcaacaacaagtacctgttacatccaaacaaagatttcaagttccggacttactagcaaaattttcaactcaaactaataaatctcctgttttaattgaagtgaaatcaaaaaaaggaaatgtactgtcttttaaacccgattatctggaacggttaaaacgttatgcagatttagtaagtatgccgttattgatcgcatggaaatttcataatttttggctactttttgaggccagacatatgaaaaaatttaataaaaattttaatattacatttgaaactgcaatgaaagagaatttaattggagaattagctggtgacattgcttataaaattggagaaggagctggattacatttctggttagaccaacaggaattattgagtgtggaaaaagaaaaaaataagcaaacagaactagatacaatcgaatttgaggatgtgtattttacaaattatgagaagatgcagattctagatttagaaagtgacattaaatctttatttgctacttgggatcttgctgaaaaaattgagcagataaattctcgtacttatttacattatattgctgagaaggagggacttcagtttacccatatggctcttgtccgtcttttaaacgcagaaaaccctcacgaaattcgcccccactggcgtagtctacttcataaagaaaaggtgatatcaagcgtgacagacttttcctctgctttaaataaagcattggatcaaaaaattgtttcttatatttttaatataagaccacagaatattcctgaatttttgaaagatgataacagtagctaa

SEQ ID NO: 63449 - DNA, 372 bp, Acinetobacter baumannii
atgctaagtcaaaaacgtatatttgatcctctatatgggactattcatctatctgaatttgagtatgagttaattcaattaccagaagtccaaaggcttcgtgaagtaagaatgtgtaatattaattcactattaattactggtgcttctcaaatttcaagatttgaacattccattggagtaatgtatttagctaaagtttggttagaaaacaacaaaaaaatactaccttacccacttaaagccgaagatatcctcgctgcagcaattttacatgacatgcaaacaggaccttttggacattctttacaatatttccagaaattaatgctcctaattccgaggtgccctcaattaattgagaaatgttaa

SEQ ID NO: 63450 - DNA, 1062 bp, Acinetobacter baumannii
atgatgaaaaagtcattattttgtatgacagctgccttatttgctctgccaacagtcacttccgccgcttccccatattttagtttaaaagatggtgatggtttcaaacgtttttcagtctcagctggttggctccatgctatgcctcaaggctcaggaaatcctgtcaatatcaatactagcgttgcagaaggtacaaaatctaaagttggagatgtatctacaaaagccgttttagacgcaatcgatcaaagtaaatcttcaggacaattttggcatagcactattagccttcttgataagtttacagacactcttccctcatcacttgcgggtacagcagaaattaatggtctttctcaatgggaacaacaaggttctggcttagaagctgctgatgttgataccgttggtcttatgtttaactacaactttacggataatttatctttagaaattaaaggtggtattccccctaaagtagatattaatggaaaaggtaatatttacgctcccctctctggaaaagcgactccactaaaagatggatctgtgattggaggaatcatcggagatggtattgccaaagcgggtggagatattcctttaaagcaagacattcatattactgatctttctcagggcggtaaggctgcgaccgcacgtgcatggttaccagctgttgagctacattatcaatttggtaaaacaggtgtaaataagttccgtccttatatcggagctggcgtgatgtatgcatactttaatgatttaaaaatgaattccggtattgaagctgatttaattcaagcgggtcacatgatccagaatatccatgataataaagcaggtgcagcattagatcgtaaaacatcttctgctaatcctattgtgaaactagaagcgacagatacatttgcacctatcgttaccgtaggagcaacttatgattttaatccgaacttgtttgctgtaggctcagtttcttattcgaaaatgggtggtgtttcaaaaagtatgctgacattaaatgaagccattattgatgtaaaaaaaggttaa

SEQ ID NO: 63451 - DNA, 1101 bp, Acinetobacter baumannii
ttgaaattacgcgattcaattttaattcgagacttgcaacaacaagatattgatagcttttccgtggggaaacaaaaaagtgaatttcagatcacattaaaccaaggccttccaaatcaatggggtaatttttatttagtaggctcgtggattaattattggaaccagcctaatcgtaatcaacaattccaatttggatatagcaatcaatttaaagatctgacttacagtatttctgcaattactcatgagcttgaccaagaaaatcaaaattctggtcatgaaacgcaatatttgttgtctttatcttttccacttcaatttaaaaaaaataccgttaattttaatagttctatttcagaagatagccgaactttaggaatgaatggttatatcggaaaccgctttgattatggctcatcaatttcatatcaagatgcaggacagacaagcctaaatatcaatggcacctaccgtactaactatacaactataggcgcttcttttggtcagtccgatacataccaacaagaaatgatcaatttaaatggaagcttggtcgctcactcacaaggtattttatttggcccagaccaagtacagaccatggtattggtatatgcgcctcaagcgactggtgctcgagtcggcaatacctctggtctaagcattaataaacaaggttatgctgtcattccttatgtaaccccctatcgcttaaatgacattagccttgaccctcaagggatgccatcaactgttgaacttacggaaacaagtcatcgtattgccccgtatgcaggatcaatcactaaagttaacttttcaacaaaaacgggatatgcagtttttattagcacccaaacacctaatggcggccatttgccatttgcagcacaagtttttaatcaaaacaatgaaatagtcggaatggtagcccaaggtagccggatttatttacgtactcccctaactcaagatcatctttatgtgaaatggggacaaagtaatagtgaagaatgtcaacttgattatgacattcaatcaaaaatcttacaggaaaaacaattaattattatgacagaggcagtctgcaaatga

SEQ ID NO: 63452 - DNA, 864 bp, Acinetobacter baumannii
atgaaaaattcggttcaatatcttttttcttgtttactggggatgaccactttttcggtaggtataacgccgacttcagcaggtcagatgtacatttaccaagacaaaaacggcagtactttactgactaaccgtaaaagttatgaccattcactcaaaaaagtaaaagtcacctactacccggatagtaatattcatagttatagcaactgggggacttcagaggcttcggttctaccaagctatagcaaaaacaaaaatgcttttgaccatattattaagcaggcagcacaacagcacggcgtttcggaaggattaatcaaagccgttatgcataccgagtctggctttaacgtaaatgcccgctctccggttggcgcccaaggtttaatgcagcttatgccggctactgctcgtcgttttaacgtatctaacgcttatgatcctcagcaaaatatcttcgctggtgctaaatatttaagttggttgctcaaacgttttaacggtaatacgcaaatggcccttgccgcttataatgcaggagaaggaaacgtcgataaatatggcggtattccgccattccgtgaaacccaagattatgttcgacgagtcactagccgctaccaaaacttatattcttctggtgtaggcctttcttcttttagcaattcgagtatttctgcccaagcgataaaccagccagccataccgcacagtacttcgacgcaagtctctgctcagcctataaagtattcttcctcgcgccaaatcgtgacattgccagatggtacatatacagacgcacctacgggaacttatgtcaccaataatgcaactgctattgcacatatccggattgagtaa

SEQ ID NO: 63453 - DNA, 990 bp, Acinetobacter baumannii; identical to SEQ ID NO: 55591

SEQ ID NO: 63454 - DNA, 138 bp, Acinetobacter baumannii; identical to SEQ ID NO: 47447

SEQ ID NO: 63455 - DNA, 321 bp, Acinetobacter baumannii
atggtagttgctttacttgcagtagcggaagaagaagtgattctttttagcccaccacttcgtgaagcgactaaagccattggcgtggatgttgaaggtgacggctattaccatgttcatggggtatctactgacgaaacctcagaagcagcagatgatgatcatgaagatgatctctggtttgcgttagcgcaagcaataactaaagaagactatgagagcttaacaacgctttgtatggattattgtgctttatggaatgagttttgggatgcacaaattgctgatattcactacttagaagcaaagaagttagcataa

SEQ ID NO: 63456 - DNA, 306 bp, Acinetobacter baumannii; identical to SEQ ID NO: 54617

SEQ ID NO: 63457 - DNA, 585 bp, Acinetobacter baumannii
gtgattgcagctaatggcgaacgccatgaagttgacgtgattatttggggtacaggttttgaagtgtctcatccacccattggtaaacgggtacataacgaaaaaggggaatgtctggcagaactctggaaagactcctcaccggaagcttacctaggaaccaacattgaaaatgtgccgaacgcatttcttatgctagggccaaatgtcttggtttacgactcattcattggtcttgctgaagcccaactgcaatatattgtagatggtttattgcaaatgaaagcgaaaggtattgctaaactttctgtaaaatcagaaataattaaaaagcataatgagcttgtacaaaagcatttacaaaccacagtattcaatagtggtggttgtaagagttattaccttgatgcaaatggtcgtaactttgcagcatggccatggtcattgaaaaatcttaaacagcgtttacatcatttaaatttagaagaatatgaggtcatctatggcgaattcaaacatgaggtgcgacagtttgaaaagtcttatgataatcaacaagctgagcaaatttctctaatggtgtaa

SEQ ID NO: 63458 - DNA, 585 bp, Acinetobacter baumannii
gtggttgcagctaacggtgaacgtcacgaagtagatgtgattatttggggtacaggttttgaagtgtctcatccacccattggtaaacgggtacataacgaaaaaggggaatgtctggcagaactctggaaagactcctcaccggaagcttacctaggaaccaacattgaaaatgtgccgaacgcatttcttatgctagggccaaatgtcttggtttacgactcattcattggtcttgctgaagcccaactgcaatatattgtagatggtttattgcaaatgaaagcgaaaggtattgctaaactttctgtaaaatcagaaataattaaaaagcataatgagcttgtacaaaagcatttacaaaccacagtattcaatagtggtggttgtaagagttattaccttgatgcaaatggtcgtaactttgcagcatggccatggtcattgaaaaatcttaaacagcgtttacatcatttaaatttagaagaatatgaggtcatctatggcgaattcaaacatgaggtgcgacagtttgaaaagtcttatgataatcaacaagctgagcaaatttctctaatggtgtaa

SEQ ID NO: 63459 - DNA, 639 bp, Acinetobacter baumannii
ttgactctccgacaaacccggtacggttcacagacatacgatctagttattgatagttcagttattccagatacttggttacaagatttacaacaacttgcaccgactgaaaaagaaccaaagcgtacagtgttgcaaaagcacttgagtacctatacgcagaagaacacagcagattattttattcataaagacttaggtaaattcctgcgtcatgagcttgatttttatattaagaatgaagtgatgcacttagatgatgtggtaagtacggatcagtttattcagattgaacgtcagcttagtattattaagtgtttgcgtcaaattggtttagaaattattagtttcttagcttcgcttgaagacttccagaagaaactctggttaaagaaaaaatttgtcgtaagtgctgagtactgtattactttagatcgagtggatgagtccttgtatgctgaaattgcagacaatacagaacagtggcaacagtgggaagatttaggttttaaaggtacagatgtaggttggggaacgattgattatttaaaacagaaccaagccttgatggtggatacgtcattatttagcgctgagtttaaagcgaaaattttggtggtgtttcaaaaagtatgctga

SEQ ID NO: 63460 - DNA, 489 bp, Acinetobacter baumannii; identical to SEQ ID NO: 47932

SEQ ID NO: 63461 - DNA, 594 bp, Acinetobacter baumannii; identical to SEQ ID NO: 47933

SEQ ID NO: 63462 - DNA, 558 bp, Acinetobacter baumannii
atgcataattcaccttttttattctttatttctggcactggtgctgtttatattttctttatattaagtggatatgttttaacagcagcaaacttaaatgcaaaaaatccaaaaatcaaactaaaaacatcaataataaagcgctatcctcggcttgctatacctgcattatgttcatgtattatttcttatttaatttttcatatttctattgatttatctaaaactacaaattggtttagccaacttataccgcaaaatattagttttttaaatagcatctactcaagtttaattactccatttatatttgcagagtctaaatacaatacggtgctttggacgatgaaaaatgaattaataggctctttaattatattttatctaatttatttaaaaaacattcaaaaaattaaacatttttatttttttagtttcctatttttaataatttctcttagcatttcaaaaatttttcttttaggaatattaagtttcattcttgggatggctatatatcacatgcaaaatattaacaaatggcagagtaaaacttga

SEQ ID NO: 63463 - DNA, 480 bp, Acinetobacter baumannii
atgtttttattagtgttgttttcagcattttttacaacattattaccttacttgctgaaaattattatcgattattctgcacatgaatataactttctgctcgatattcagtttccatttaatttcttatacctcatcgtatttgcctatgctatagcatggttagcgaatgagttgtgtaactggaccaaaaatatttttagcgcttatttgatggtcgatttcaaaggagcattaatttttgcgggcttaaaaaattatttaaatcttaaaaaaggagaacaagatcaaattgaggcaggagcagtaattagtgatcttacaagagggagttctgcttttggtgaagttaacctcacattgcttcttcatgtagggccaattatttttcaattggttatgattttcgcagttttattcacgaccattagtttacttggcagagtaaaacttgaagtgcgacataaaccacctaattaa

SEQ ID NO: 63464 - DNA, 255 bp, Acinetobacter baumannii
gtgaaagcgagtaatggagcgcctttagtcagcggtaaattagtcactggttttagcaatactgaggaggctgctgtaggcttgactgaaattgtaccatttttagtcgaagacatgcttaaagaaaatggtggtcattattctaaagtagatgattggcaagtacatgttcaagtagatggcttgctggttactggacaaaatccagcctcttctgctgcaactgctacagcattacttcaattgttgaaataa

SEQ ID NO: 63465 - DNA, 228 bp, Acinetobacter baumannii
atgttagggacaaccggagtaactgaaccaccagccggaatcacttcaccattaatggtttgggaaaccgtttcgattccaccttcagcaacaacgccaccaaagaaaatggaatttaataaggtgccgttaattcgcccgaatgaagctttacatttaatggtacctttaccgcgtgcagcatctacggcgaactgtccacgaccgaaaagttcttttaagtcatag

SEQ ID NO: 63466 - DNA, 129 bp, Acinetobacter baumannii
atgttgaatatagtacagcctaatatttgcttcattggtagcagtaatttgtctttagctttaattggaggtttagttttaaaaggctttgttgcacaaagatttgaaatgcaaagcgcccctaattga

SEQ ID NO: 63467 - DNA, 198 bp, Acinetobacter baumannii
atgtcttcacagttaatcaaaattcattatcatgcatattctcgcgttgcagatctattagcagatctagataagaaaggagaggtcactaaaatttatgacctcaatggcaacgaattaaaaattaatggtggtgtttcaaaaagtatgctgaaacaaagcaggttgaattttgataaaatagagaaatgcgaataa

SEQ ID NO: 63468 - DNA, 162 bp, Acinetobacter baumannii
atgataaataaaaatttagcagcggaaggtttgcgtggtatagcatgtataatagtagttctatcacacctttcattaactttcttccctcaacttcacaactatttttcacaagaaaactttccttcaagtgattttttagcatggcgaattcaaacatga

SEQ ID NO: 63469 - DNA, 327 bp, Acinetobacter baumannii
  misc_feature (276)..(285): n is a, c, g, or t
atgaaaactaaacttgctacactcatgttgagtctggcttttttcggttctgctcatgctgatgtcaaaacacttgaacaaaatctgaaaacaaattacccagacttacctgtaaaaggtgtttatcaatcacctgtgcaaggtatttatgaagtgtatacaagcggtcgtattgtttataccaatcaagatgctaaatacttttttgtaggcaatttagttgatatcaaacaacaaaaaaatatgacagaagaacgaattgccgaattgggtaannnnnnnnnnccatcgatatttaatttttgtcctaaagcgatattcttttga

SEQ ID NO: 63470 - DNA, 921 bp, Acinetobacter baumannii; identical to SEQ ID NO: 54743

SEQ ID NO: 63471 - DNA, 363 bp, Acinetobacter baumannii
atgttagcattagttacaggtgcatcggcaggttttggttatagcatttcaaaaaaattgattgagttgggctataaagttattggttgcggaagacgggcagaaaaactagaagaattaaaacaagaacttggtgagaaattctacccactcgtgtttgatatgacagatacagtagaaaatataaataagttatttaaagaattaccaaatgaatttcaaatcgatcaaattgacttactggtcaataatgcaggcttggcattgggtctagagccagcagataaagctgaattagatgattggtacacgatgattgataccaatgttaaggggcttgttactgttacccgactaatttaa

SEQ ID NO: 63472 - DNA, 207 bp, Acinetobacter baumannii
atggattgcccagttgaggaaagtgtaatggttgatttaaaggtaagagctagcaagagcaagccaaaaggtgcaactcacttccactattttgaaaaattcatttactacgctgtaagaggtgagaaggtgtggcagtttggcgaggatggaatttggcgaatacgcaaagagatcattaaagcacctatgatggaactgtattga

SEQ ID NO: 63473 - DNA, 198 bp, Acinetobacter baumannii
atgaaaactaccgaagagtatgcatatcagttcagccttgaactactcaagaattgcgagacctataaagaaaaagaagcagccattgaagaagcttggaacttagcgctgaagtttacaaccttcggcactcttattcaggaatacaatcagcattctggcttcattgatcctttgccaaacgcctgcataccttaa

SEQ ID NO: 63474 - DNA, 921 bp, Acinetobacter baumannii
atgagttctggtgcacgtcagctaacacaaatagctaaagaaacaacaattggtgttacgccaagcccatttgaccgtcaaacatttgaattcaccgaaaacggattggatgcaactgtaagtaaagagaattcaaactctattaccagtggtcgtcttgctcgatcatcaatgattaccggtgcagagtatgccggggaattaaaatgtgaagcgaagtacagtccattgattcaagacttaatggccgcagctgctttcaacaactgggataacaatgtactgacatttggtggaaacgtacgtcaaacatttagtgtgcttcgcggtttcactgatgtaaatgactaccatatttttaaaggcgctcatgtaaacacctttggaattgatattccagagcaaggcttaatcaccatgactttcgggttaatggctctaggtcgtttgggtgcaactactcctccattgggtacagcaacgccagccgatgacaatcctaaaatgtctaacatttcagttggagatattttgattgatggtgtttcgcaagctggtatctcatgtattacagcttttacattcaattgggataactcaatgcaggttcaacgctgtttaggtagcggcattgatcctaaaaagattcttgaaatgattgcagcagggacaggatcatttacagcagcttggtctcaaaacacctctgagatgtacgctaaacaattcacgaatgccaatatctctcttcgtgtgccaattacagacagtgaaggtaatgaatatgagctattcattcctaaagttgaaattacggcaggattacctacaggtggtacaagcgacatcttaaatacttcttttgactacactgtagttgatgaagcaccaacaattacccgtacaccagcaacgccttaa

SEQ ID NO: 63475 - DNA, 507 bp, Acinetobacter baumannii
atgagcgagaatcaaaaagaccctcaatacaaactaaggtggtctgaagagttacgtgacaaggtggctgaatctgccaaagcatataagcgctcaatgaatgcagacattattgcccgtcttgaaagaagctttgagcaggaatcagacttgtcaccgcttaatatgccccctgaagagttagaggcacgtcttaccaaagttctagaagaacgtgaacaaaataaaaataaagatgcagaactcaacattgagatttcatctgaatctgagaaagacaaaaagattcaaagcctagaagaacaactcgctaattccatgaaaatgatggaaatgattacaggcatgttcgagtcaatgcttaatggaacccaagatgaatatatggataaagtttttaagaaatatccaaatgttaaaaagttctataataagtctttagaagagtctaaaaagttaattgatgatgaactggacaaagatgacccagttaaaggctcttggtaa

SEQ ID NO: 63476 - DNA, 270 bp, Acinetobacter baumannii
atgttactgactactgatgaagttgaactactcaaaacatgtgatgaaagccctgaacaatacattgcagtttttcaaggtcaacagatcggatatctacgcttaagacatggcgaatttcgagttgattaccctgattgcggtgatgagaccattttgtattctcaagagccacaaggcgatgggtgttttgaagaagatgaacgtgagtactttttgatgaaggccaaaaaagcaatcgttaagaagtttaatgagatggaggggtaa

SEQ ID NO: 63477 - DNA, 348 bp, Acinetobacter baumannii
atgacagatttgaataaggaaagtgaggcttttttagggtttcttagaactaaaggtgtagttaaagttggctggaatagtttaggcgttttaacaaacctagtccgtgaagctggatgcactcttagctataacgatattgaactaatgcaagaagtttggatggaaaaagccaaagctcaggcggtgccagatactcatattgttgtgccaaagcagccaacacctaagatgattgatgctacttgggattttgacgatgaaattattgagatgagtagcaatactcgcaatgaatttatctggaagaaaatggttgaagcaagcgaatcgggagctgagggatga

SEQ ID NO: 63478 - DNA, 177 bp, Acinetobacter baumannii
atgaacgaatttgtagattacacctcaatgatgaagctgcgtagaacttataacctcggtactcgcaacagagaaacaagagcagcagcgaacctctacgagaaattaagaaagctgaaaatgctagaccagctcaagcaggaagccatgacaggacatgacaaggaggcggtatga

SEQ ID NO: 63479 - DNA, 228 bp, Acinetobacter baumannii
atggctcaaccaggaacatttaccaagtgtaagaaacaaattgaaggtgcaattaaacgtcagactaagaaaggcgaaaacttttgtgcaatggatcttccttaccacctcaaagaagataaagaactaacagatgcgtatctccaagaattaaaaggtcgcggtttcataattgaaattagtactgatgctgattggccagagttgtgcgggaaagtgaaatggtaa

SEQ ID NO: 63480 - DNA, 183 bp, Acinetobacter baumannii
atggtaaagcctattgtagaaatactggaagataaatttgaagatgagctcttggcttttctaaatcaattccaattagaaaatgactgcaagataaaagagtggtcttttgtccctgatggcagcagtaactatacgttacgcgttgagatcgaaaaggaagattcaaatctaatgtgctaa

SEQ ID NO: 63481 - DNA, 483 bp, Acinetobacter baumannii; identical to SEQ ID NO: 59882

SEQ ID NO: 63482 - DNA, 459 bp, Acinetobacter baumannii
  misc_feature (435)..(444): n is a, c, g, or t
atggcaacagatatcaaaaaactatttgaagcactcactcagcaccaggcctatctttatcgtgcttcatcaaaaacggtaaatgagttattggctttattcaatgatgatacgagcaagatgctatctaagcttcgggatttattggatgagcttaatgagtcggagaaagttgctttagctggtggtaaatatacaacttcaaatttaagggaaattagggatttgattgcccaatggtttgccagtgttaatttagcattacctgaagcttttgccgtttctgctacggcgctggctgtttatgaggccaattacgtagctaagctctatggagcaaaaattaataagcctgatggggaaaaactatttttatccgctaaaaaagttccgttggcaggtggcgctcttgtagatgatcttctatccagaatnnnnnnnnnnatccagaattgctga

SEQ ID NO: 63483 - DNA, 333 bp, Acinetobacter baumannii
atggggtggacgggagtaaagccgactagctttagttttgaagttgagaaacaggcagatgagcttgtaaagaaaatcacaatggatacagttcaatctcgagcatcgcatattatttctgttggatctggtgattacggtgtgcgagagccttctactaatgccgtgcaagatgcagcgattcaagccgtgaaatttaaacttggtagtttgatttatattcaaaacaaccaaccctatgctgagcgcttagaaaatggctggtcagatcaagcgccgttaggcatctacagcacaacgtttacttacattactcaaaagtacggtggctaa

SEQ ID NO: 63484 - DNA, 534 bp, Acinetobacter baumannii
atggctttaaaagtaaccattcagactagtaaaacagtgagtaaatggcgggagtacgttgataaagaaggaaatgtattagctgaatttaaaattcgtggtatctcttataagccatatcaagtggcccttgaacgagcaaacaaccaaattacctccaaaggttatgatgtcagtaaagcttcaaaagaagataagctttatggtgaattgcttcttgaagctactgcatgtcacctaattaaagattggaaaggaatagtgtttggggagcaaaatgaaaaaggtgaaatatttgaaactgtgcctgaatattcctcagaacacgcgacaaagcttttaaacgatggtgatcttggcgtacaaatttggttatttgtattgaaagaagctgagaaaatccagaaagaggcggattcttataaggatgaagtagtgggaaagtcgtcaagctctacaactggtccaagttcaactcagaagaagaagcgaacgactacggccagaaacaaacggcaatcgccaaagccttaa

SEQ ID NO: 63485 - DNA, 294 bp, Acinetobacter baumannii
atggttgaagataaacaagagaatccatttgaaggtgcaatgtcacaactaattaaatttatctctgccaaagatgattcaacacagttgttgatcagtcatttggttagttatcttgaggagaaaggggttattgatattgatgattatttggaatatacagagaaagccaaagatcgactgattagcaaaatcaataatggttccaatccagaagagagcgaacaatttaaattagcggtacagcaaacatttaattggcacattgaagattttaagaagtcagaaaattaa

SEQ ID NO: 63486 - DNA, 138 bp, Acinetobacter baumannii; identical to SEQ ID NO: 54765

SEQ ID NO: 63487 - DNA, 870 bp, Acinetobacter baumannii
gtggaactggaacctctggccaatgccttaaaacaggtggtgctgcaacagcgggtgatccatgccgatgaaacgccggtcaccattatgcggatgggtgagaatgagaaaaaaccgaagaaaggttatgtctgggcctatgccaccacacagtacaatccagttcaagcggtgatctatgactttcaggatagccgttcaggtcagcatgcagaagagttcctgaatggctggcagggccatctggtctgtgatgattacagtggttataaagcacgctttaaatcaggcgatgtcattgaggtgggctgcatggcacatgcacgtcgtaaatttcatgaactgcatgtgaccgggaaaagtcagatcgctgaacaggcattagtgctgattcagaaactgtatgccatagaagcagaactcaggaaaaagaccgatagtacagcagaacaccgccgcgaataccgacaacagcacagccaaccggtgatgcaacaactgtatgaatggctcaaccaacatgatctgacggtgccatcgagttctccaaccgccaaggcgatcaattacagtctgaagcgttggccagccttaagccgctatctggatgatggcaatctacccattgacaataactgggcagagaaccaaatgcgtccctgggccttggggcgtaagaactggctatttgcaggttcgctgcgcagtggtcaacgagctgccaatatcatgactttaatccagtcagcaaagctgaatggcttggatccgtatgcctatttaagtgatgtgctgaaaaggttgccaacacataaagtgcctcaaatagaagaattactacctcaccgctggaaacctgaaccccgttaa

SEQ ID NO: 63488 - DNA, 1080 bp, Acinetobacter baumannii
atgagttatccaatgattgaaattggtgacttaatgctaaagcgcaatggttctgttgatccttctaagttccctgatgaaacttttgaattacatagtattcctgcttttgacaaaggaactcctgatattgtaaaaggttctgaaattggatcatcaaaacagttagttcaagaaaatgatgtcatgatttcaaaaatcgttcctcatattcgtagagcttctgttgtttgtccaaagggcgattatcgacaaattgcttcaggtgaatggatcatatttcgtagtgataaaatatatccagattacttaaagcatgtattgatttcagacacgtttaacaagcagtttatggctaccgtctcaggtgttggtggctcattattacgagctagacctgcttttgttgctaaaattaaaatagccctcccaccacttgcagagcaacgtcgaattgcgtctattttggatcaagcggatgagttacgccaaaaacgtcagcaagcgattgaaaagttagatcagcttttacaagccacctttattgatatgtttggcgatcctgtgagtaattctaaagggtgggaggtacttaaatggagagatgctctaaaaattattaatgggaaaaatcaaaaagctgttcttgatcaaaatggaattttcccaatatgtggtagtggcggagtcatggggtatgctaatgaatggcttactccagcgaagtctgtcattattggtagaaaaggaaatatcaataaaccaattttgatgtttgaaaatttttggaatgttgatactgcctttggtttagtgccaaataaagatgtattaaatgcagattatttattttggttctgtcatttttttaattttgagcaactcaataaaacagtaaccattcctagtttaactaagtctgatttgttgaatatagacataccaactcctccgttggataaacaattatgtttttcaaatatatgtgatcaaacacgtatattaaaaagtaaaatggaactaaaagatttaaatctttttagctcattacaaaaccaagcatttaacggtactttataa

SEQ ID NO: 63489 - DNA, 207 bp, Acinetobacter baumannii
atgtcagaattatctactgaaattggtcgattattacgaaaaaaaagagcggagaaaaaaattacccaagaagcattagcattacaatgtggaattgatcgtagttatttaggtcgtattgaacgtggtgaagtaaacatcactgtcttaaaactctatgagcttgcttctgtacttcagattgatgctaaagagttattgccttaa

SEQ ID NO: 63490 - DNA, 765 bp, Acinetobacter baumannii
atgccttttacaatctctcatgctgttcttgctccaccgattgctaaactaagtcgaaacactctgcctgttgccgccctagctattggcagcatgacacctgacctttaccgcttatttacagttcagtcaggtatgctgactcatcaatggaagggcttgctttacccaaaccttgcattaggtttattgttttgcgtcatttggtatttactttatcgacctgtggtttaccgtttttttggtattcagcatgatttgaaattagactcttttaaacgttttatctactttttaattggaattatatttgcactcattatcggtattgccactcatctcatttgggatggtcttactcattctgactttcgaacttttatcttccaagattttttatcccaaacggttcatttctttggtcgtccctatcctttgcatcgactacttcaactcggttcttctgctctagcattaccttttttaggctggatgagtattcattactatcaaaaacataaacagcactggaaaataagtcataaaattaaaatttttgcatggtctctgtttattttatctacccttttgggcttattttcactttgggattatgcccgttacattcctcatgaggtttggcataccgacacctattactttacaggtcgatctattaatgaattcatgcaaggctggttaagcacttttagtttagggtgcttattattcctgtttttagatcgacaacaaagaatgggctaa

SEQ ID NO: 63491 - DNA, 201 bp, Acinetobacter baumannii; identical to SEQ ID NO: 54996

SEQ ID NO: 63492 - DNA, 198 bp, Acinetobacter baumannii
atgatccttcggcataataatttatgcaaaagtattttgctaattttgttgtcgggtggttgcttaaatattgctctcgctggagatttacctccaccaccaaaaaatattaatgagattaatcaactttttaaattgtatctggatttagtcgtaaatcaatattcaattcagcaagtcgtacctgttattgtttaa

SEQ ID NO: 63493 - DNA, 558 bp, Acinetobacter baumannii; identical to SEQ ID NO: 61952

SEQ ID NO: 63494 - DNA, 345 bp, Acinetobacter baumannii
atgcaagcatggttaaaaaaacgtggtgtcgatgcaaaattattagaacaaagaagtatgaatacttgtgaaaatactcgttttagttcattactgcttcaaaagaaaggcggtgcacctacagtaatgttagttacagatgaatatcatatgccgcgtacgcgccgtttatttgctctgaatggtatcgaaacgattccagttattgcccctatgccaacaccgcttacacgttggcaaccgagtatacaaaactacgatcatagtcgtcgtgcaaattatgaattacttgcgacaattcgtgacatgttatttggttcaagtgattgtcgagaggtgccttaa

SEQ ID NO: 63495 - DNA, 279 bp, Acinetobacter baumannii
atgaatacgctgcctgatttaagccaactgacccatgaacaactgctggaatttaccagacagttggcgatgcagcatcagtctctggcacaatctaaacaacaactggaacaatcaaatcagcaattagatgccagagttcaacatcttgaagtcaccaatcagcaattagattctaaagttcaacatctttctattctcaatcaaaaatacgagcatgagcttgcactatttaaacagcataaattcggcagtaaaaatgaacatctatgtgattga

SEQ ID NO: 63496 - DNA, 336 bp, Acinetobacter baumannii; identical to SEQ ID NO: 50238

SEQ ID NO: 63497 - DNA, 186 bp, Acinetobacter baumannii
  misc_feature (165)..(174): n is a, c, g, or t
atgactataagcacgaaaaaagcaattgtagtaggtgctacaggactcgttggattagctctagttgaagagcttgaacaaacaccggaatttgaagcgattacagttgttgttagaaaagaatcacaactacttaatacatataaaaaagttactcagttagtnnnnnnnnnngttagtaattga

SEQ ID NO: 63498 - DNA, 129 bp, Acinetobacter baumannii
atgctttgcggtagccctgcattcttaaaagacgttgctgcattacttgaccaacatggtttagttgaatcacctcgcatgggtgaaatgggcgactacgtgattgaacgtgcgttcgtagaaaaataa

SEQ ID NO: 63499 - DNA, 933 bp, Acinetobacter baumannii
atgaataagcctacacctaaaatctaccgtacaaccaattggcccacatacaaccgagctctcattaatcgtgggaatattgccatttggtttgatcccaaaacacaatggtatgctcaaccaaaaagccaacatggtcgaaatcaaacttattccgatacagccatccaatgctgcttaatgattaaatccatatttcgtctttctctacgcatggtcactggctttgtacaaagcctgattaaactttgcggattagattggacagcgccagactatacgacgctttgcagaagacaaaaacatattgatattgcgattagctaccaaaaaagtagcaatggtctacatctactcgtagattcaactggtttaaagtttttgggcgaaggtgaatggaaacggaagaaacatcagcctgaatatcgtcgacaatggcgtaagcttcacattggtatagatgctgaaacgctgcaaatacgtgcagttcagctcacaacgaacaatatcagtgattcacaggtgctcggtgatttacttggtcaaataccacttgatgagcgagtagattctgtctataccgatggagcctatgacactaaatgctgcagacgagtgatctcagatcgtcaagcatatgcggtgattccgccaagaaaaaatgcgaaaccgtggaaagatacaaaagttcattcgcaagagagaaatgaattactaaaaacagttaagcgtctaggaagagccctttggaaaaagtggtctggttatcatcggcgaagtttggtcgaaaccaagatgcattgcatcaaattattaggcgataaactctactcaaggaattttgacagccaagtgaatgagatccatgcacgtgtagccgtattaaataaatttacagaattaggcagacctcatacccaagttgtaacctaa

SEQ ID NO: 63500 - DNA, 147 bp, Acinetobacter baumannii
atgatcgcaattaatattagcctttgctcagatagatttagtgaatacgatgcttcaaccaaattattatctttatatactatgttactcatagggagatatattaaggaaaatgttataaatagatatattgacaatactacttaa

SEQ ID NO: 63501 - DNA, 450 bp, Acinetobacter baumannii
atgattattgtcgcttcaccaaattttttaaaaaataaaattttacctagtcatccagaagatatatctaactgggatggaatcataatgaggtctccccaaactggtaagctgcatgaatacaaatttataggacccgatcagggagaagcttatctaaatcttaatgaaaaactaattgcggatgatccaagtgctttacatcaaggtgcagttttaggaatgggaattgcagcaatctctactgcacatgctaaaagttatatagaaaatggaactttaattcggatcttacccgagtggtatgcagatctaggcgaaactaatctttatttttcaagtaaaaagcatatgccggccaagacacgctgttttattgactttatcgtatcgaaatttgaacagctaaaaattaatgagcaattatcagctcataagcttggaaagtaa

SEQ ID NO: 63502 - DNA, 201 bp, Acinetobacter baumannii
atggtgtattcaataaatgctggttttgtctgttttgcaacaagtgcatcccaagtttctttagtaagttcaccagtaggtgataaaccattcatttgctggaaagatgcaattgctttaagcgtgtttttaccgctcatgccatcaattgcacccggtgaagcatgcgcattgtttagcatgacatgggcacgtgcataa

SEQ ID NO: 63503 - DNA, 330 bp, Acinetobacter baumannii
atgtggattgccatttcagcccttaatcttgcttttgcagtcatgttgggtgcttttggagcacatggtcttaaagctcacgcgagccctgaacaaattgcttggtggcagactgcaaccgactactttttttatcatgcacttgggctattagcccttggtattctaagtaaggttcttccccatttcccaatcaagttatctttcttgcttattcagattggcattctgttcttttgtggttcgctttatatcacgccaatcggtggagccttaatgattgctggatggctagttttggcttggaatgctttcaaatacgcaaaataa

SEQ ID NO: 63504 - DNA, 831 bp, Acinetobacter baumannii
atgattttatttggtaagaaagaccagcctagccgaaacgcatatgcggtcgtaactggggcaggcagtggaattggtcgtagctttgcagttgaactagcgaagcgcggtggcaacgtagtatgtgcagatattaatttagaagctgcaaaagaaactgtaaagttaattgaacagcttggacaaaaagcatttgcagtccagtgtgatgttgggcaagcagaacaagtacaggctttggctgatcaagcagaacagttacttgatcatccagtaacactcatcattaataatgccggcgtagggctaggcggcaaatttgatgaaatgagtttggaagactggaaatggtgtatgcatgtaaacctatggggtgttattcatggttgtcatgcatttgtgccaaagctcaaaaaactaggttacggtgcaattattaatgtagcttctgcggcgtcttataccgcagcaccagaaatgagtgtctacaatgtaacgaaagccggtgtattggcattatcagaaaccctttcagccgagctacgcaaattcaatattaaggtcaatgtgctgtgcccaactttggtacctaccaatatcattaaaaatggtcggattccgggccgttattccaagcttgcagaccatgcactcatgaactatgccatgacaaccagtgacgcagttgcggctttaacattgaatcgattagatcgagggcagctgtataccacgccacagatcgacgccaaattattctggcttatgaaaagaacgtctccaaccctatatgcaaagttccttgggctttcgtatcagctatttaaataa

SEQ ID NO: 63505 - DNA, 243 bp, Acinetobacter baumannii
atgactaaggccatagcacctgttgctgccgaaatcatggcagaacgaccacctacaaaagaaataataaccgcaatacaaaaagatgcatataaaccaatttggggatctacacctgcaataattgaaaaggcaatcgcctctggaattaaagccagaccaacaacaagcccagaaagaatatctgcacggacattagagaaccattgttctcgaagattcgttaacatggaaatagcctag

SEQ ID NO: 63506 - DNA, 921 bp, Acinetobacter baumannii; identical to SEQ ID NO: 54743

SEQ ID NO: 63507 - DNA, 483 bp, Acinetobacter baumannii
atggcccccataaacgccgtaccaaaaccaactccagtaataatagaacctaaaaatagaactacagcattggttaggttaatggcgatgaataagacaatagcaccgatagcaatcgagagcgtaccggttaataaaatacggaaatttgtcgactttctaagcgttaatatacctgccgcacctgaaagggcgagcgccataaaggtaataccatttagccatgcagatgaagtatggaaaatttttgccaataacgatggcatgagtgacaagaagaaaccactaaccatccatagtgcaatattaattggactaatagtcaataaagcgcttttcgtttgtggaggaatcgccatcgcaggttttaaagaggcaagtgcgccggatcttttttgcgctgtttcaggagtaagaaaacttaaaatgagttccaaaataagaagaaagcataagaactcaaaaactacccgtaagggttga

SEQ ID NO: 63508 - DNA, 255 bp, Acinetobacter baumannii; identical to SEQ ID NO: 47851

SEQ ID NO: 63509 - DNA, 672 bp, Acinetobacter baumannii
  misc_feature (295)..(304): n is a, c, g, or t
ttgttatttatcgattcttatatgtctgagcaaattttcattcagggtccagtaggtaaaattgaactttttgtagaccgccctgaaggtgaaatcaaaggctttgcggttgtttgccatccgcacccattgcaaggtggaactcctcaacataaagtccctgctcttttaacccaaatctttaatgaatatggttgtattgtttaccgtcctagtttccgtggtttaggtggcagtgaaggtgttcatgatgaaggccatggcgaaaccgaagatattttagctgtgattgaannnnnnnnnntgattgaacacgttcgtaagcttcatgaaggcttaccattctatgcaggcggttttagcttcggctcacatgttttggcaaaatgtcatgcgcagcttagccctgaattacagcctgtacaattaattttgtgtggtttaccaacagctactgttgtgggattacgtcactataaaacccctgaaattcaaggtgatattctactcattcatggtgagcaagatgatattactttactttcagatgcaattgcatgggcaaaaccgcagaagcatccaattacgattttaccgggcgctaaccacttctttacaggttatttaaaacagcttcgtcaaatcattacacgctttattatcatgaaataa

SEQ ID NO: 63510 - DNA, 591 bp, Acinetobacter baumannii
atgcaacatcaagttttgcatgatatggctaaatggataaaattaggttttcagccccttccagtatctctaaatgctgcaccagttgagtttttaagagataattatgcagaacggctattaaaaaaaattaatcatcttgaaattcctacacatttaattgaagtagaagttactgagcatatgcttggggaccgtggttcggaatatgttattcgcgcactcaataaactaaaacaacatggtgtacgcattgctttagatgatttcggaacaggattctcttctctaacacatataagagattacccaattgactgtctaaaagtcgactgtagttttatacaaaagatgcaaaatgacccatcaatttattcaattgttcaagccattggcttacttgctccaaatctctcacttggtctaattgcagaaggcattgaaacaccagaacaagaagaattacttcttcaatttggctataacattggacaaggctttttattcgaacaagctatcgatgccaatcaggttgtatctattctcaaacaaggtcaggcttacttagaaagtcattattcaatgagttaa

SEQ ID NO: 63511 - DNA, 771 bp, Acinetobacter baumannii
  misc_feature (676)..(685): n is a, c, g, or t
ttgtgtgtttcccggaatgtcactcaacaatatcttactgaaaaccgtttaagagatattagtgaaagagatgaacttactggattatttaatagacgctcatttaagcttcaactaaaacgtactctagcctactcaagggaaacgcaaacaagtgtaggactacttttaattgatttagatcatttcaaacacattaatgacaccataggccatagtgctggtgatcacttattaaaaatactatccaaacgttttaatcaatgtgtagaccatgaacgatgttctgtcgctagattaggtggcgatgagtttgcagttattgtcagccatctaaaaaatgaaaatgatgtgcgcgagcttgctgaagtattgcttcagcaacttaatcaacctattacgtatgccgggaatgtactcaacggcgggatgagcattggctgtgccatttatcctcaagatgctgttgatcaatcaagtttattaagctgtgcagacatggcactgcatgacttaaaagctcgaggtcgtggcggtatacgtatgtataacccgagtatgatgcaattaaccgaggcaatcgcgtctcaacttaacattgcccggcagcttattcgtcaccataccatccaaccttattatcaacctaaagttgatttaaaaacacatactgtcnnnnnnnnnntgaagcattactccgttggcacacgacgtcggctcagacaggtttaccttctcagattgctgaagctttcaaagattacgatttag

SEQ ID NO: 63512 - DNA, 573 bp, Acinetobacter baumannii
ttgccttgcattagtttgtttaatcaacgctatccggaaattgaattagaagctcatttgagtgatgaagtaattaatttagttgaacaaagaattgatgttgcgattcgaacaggacctttgaaaagctccaatttggtagctcgctcactcgggagtacacataaatattatgtatgttcacctacatatattgaaaagtatggttgtcccaaacatccggatgagctacatgcacatcggcttttagatgtaagttatcaacgccagaacaaaacctggttattcaaaaaagcaactcaggaaattaacttaacgccatctagagttttaaaagtaaatcagggtgaagcaattttacagttagcagtgtcaggtgttggtattgctcagctgaatgaatttcaaattcaaaaagcaatacagcaaaagcaactcatcaagattcttgaagactggaatattcatgcttgtgaagaattccatgctgtctggattggtcatgataaatatgttccaaatcgtgttcgcgcatttttagattttttggtagagcatgctcctatacagtaa

SEQ ID NO: 63513 - DNA, 399 bp, Acinetobacter baumannii
  misc_feature (219)..(228): n is a, c, g, or t
atgaaagcaagttgtttttcaaaccgatcagatgtacaaatatcatcagtatccatacgaaaaacccaatcagcactacactgttttagcccttcatttaatgccttaccaagccctacgttttgcggtaacgcaactacttttagtttttcagcgattttaacttgccactcctgtacagaagttgtgagttgctcaccaataggcccatctaaaacnnnnnnnnnntttcacttggcttcaagctctgattatcccaaatgctttcaaaacacttttctagatattcaggtttttctttatgatatagagataatagaaccgaaaacatacaattttaaccttccaaaaccttttcaatccaaacttttaagatctgttcaggttgatattttttag

SEQ ID NO: 63514 - DNA, 1116 bp, Acinetobacter baumannii
ttgcaaattgaaagcgatgcaaagtttctcacaaaattctctaatttacatttagtgaccctattgggtggtgttgattttgataagcagaagaaacaacttgatgctaattttgtcgatatcatggttgctacaccaggacggttaatcgattttgtagaacaaaaagaagtctggctcgatcaaattgaatttttggtaattgatgaagctgaccgtttattagatatgggctttattccttcggtaaaacgtattgttcgttattcaccacgtaaggaacaacgtcaaaccctgatgttctcggcgacttttagttacgacgtcttaaatttagcaagacagtggttgtttgagcctgtaacagttgaaattgagcctgaacaaaagaccaataacgatgtagaacaacgtgtttatgttgtagctaaacaagataaatatcgtcttttacaagatattttacgtgaagaaccaattgataaagtcatgatctttgccaaccgccgtgatcaagtgcgccgtctttatgaccatttgaaaaaagatggatataaagtaggaatgctatctggtgagattgctcaagataaacgtttgaaaatgctagagcagtttaagcaagggaagcataacatcatgattgcaacggatgttgcaggtcgtggtattcatgtagatggcgtatcgcatgttatcaacttcactttacctgagcagtctgatgactatgttcaccgtattgggcgtacaggtcgtgcaggtgcacaaggagtaagtattagtttcttgtctgaagatgatgctttctatttaccagaaattcaaaaagaaaataatcagtttgaagtgactggtatcggcaaaactaatttaattgcaaagaataatgcagttactgccgctcagaaaacgtgctctaagaatacaactcctgttattgttgatgaaaaaaccacttatcatggtgtattaaaagatgtagtaagtgaaaagacgggtcaaatggtagaagccgctgcaggtgttattggtactttaactggtaaaaatgcgtctttagcaaaagatgacgactatcaaacaacgcttacattctattgtaaaattaattaa

SEQ ID NO: 63515 - DNA, 279 bp, Acinetobacter baumannii
atggatattgtcatggctcaggtggtgagagcctttggctacatcaaaccgcattgtgcttacctgttctgtaataaacgtggccatcgcatgaaagtgctggtacatgatggactgggcatctggctgtgtgcccggcggctggaacagggaaaattccactgggcgcaggttcaccagggtgaaagcatggcgatcagtccggaacagttacaggcactgatccagggtttaccttggcagcgcattggacgacagcaggtggtgacgatgctttaa

SEQ ID NO: 63516 - DNA, 279 bp, Acinetobacter baumannii
atggatattgtcatggctcaggtggtgagagcctttggctacatcaaaccgcattgtgcttacctgttctgtaataaacgtggccatcgcatgaaagtgctggtacatgatggactgggcatctggctgtgtgcccggcggctggaacagggaaaattccactgggcgcaggttcaccagggtgaaagtatggcgatcagcccggagcagttacaggcactgatccagggtttgccctggcaaagaatcggactgcagcaagtggtaacaatgctctaa

SEQ ID NO: 63517 - DNA, 279 bp, Acinetobacter baumannii
atggatattgtcatggctcaggtggtgagagcctttggctacatcaaaccgcattgtgcttacctgttctgtaataaacgtggccatcgcatgaaagtgctggtacatgatggactgggcatctggctgtgtgcccggcggctggaacaggggaaattccactgggctaaagttcaccagggtgaaagtatggcgatcagcccggagcagttacaggcactgatccagggtttgccctggcaaagaatcggactgcagcaagtggtaacaatgctctaa

SEQ ID NO: 63518 - DNA, 219 bp, Acinetobacter baumannii
gtgcccgttaaattaaactctgtgaacccaattatcgttaaatttaagaaagataaaccagttgccaaagctcaattttccgatgcgacgcaatatctagatagtgcatttcaaacaccgcattatcagtactactataagcacgatgataaaacccaattagttaaattttcggagttacccgtattttttcaagccattcttgatgctgaagtctaa

SEQ ID NO: 63519 - DNA, 669 bp, Acinetobacter baumannii
atgacttggatgattttatgtttagttggtgcagtcggtgccggtttctttggtattgcgtatttccagcaacatcctgaacttgcaggtgttgtaagtaaaaaccctgaaactgtatttatggaattgactaaaattttattcaatccatggattgtcggtatcattctagctgctattttagctgcggttatgagtacattaagctgtcaactgttggtatgttcaagtgcgctaactgaagatttgtacaaaggcttcatccgtaaaaatgcttctcaaaaagagcttgtatgggttggccgtatcatggtacttgcaattgctgttctggcaattgtactcgctggtaatcctgacagtaaagttcttggtcttgttgcttatgcgtgggctggttttggtgccgcatttggaccactcatcatcttgtcattgttctggaaacgtatgactttagaaggtgctttagcaggtatgatcgtaggtgcagttgtcgtaattggttggaaaaatcttttcgcaagcaccggtgtttacgaaattattcctggctttatctgtgcatttatcagcatcatcgtagtgagcttgattagcaaaactccaaatactgatgtaactgaccgcttcgaacaagctgataaactttataaagaaagtgtataa

SEQ ID NO: 63520 - DNA, 372 bp, Acinetobacter baumannii; identical to SEQ ID NO: 52267

SEQ ID NO: 63521 - DNA, 378 bp, Acinetobacter baumannii; identical to SEQ ID NO: 58515

SEQ ID NO: 63522 - DNA, 780 bp, Acinetobacter baumannii
atgcttgctttaatttctcctgcaaaaactttagattatgaaacagcgttacctacagatgtgtttactcagcctcgcttattagaaaactcagcacaattaattgatgtttgccgcaaactttccgcttcggaaattgcgagtttaatgaatgtcagtgaaaaaattgctgcattgaatgctgatcgttttagagactggactcccgaatttaatttctcaaatgctcgccaagctatttatgcgtttaaaggggatgtctacacgggtttagatgcttatcatttaaaagacaaagatattgattttgcacagcagcatttgcgtatgctctctggtttatatggtttattgcgtcccttagatttaatgatgccttatcgtcttgagatgggcactaaattaaaaaatacgcgtggtcataatttgtatgaattttggggtgatatcatcactaaccaaattaatgaagacttggcagcaattaaatctgaattgctggtaaatctagcttcggatgaatattacaagtctgtcaatgaaaagaaaattaaggctgatattgtgaagcctgttttccttgaccagaaaaatggcaaatataaagtcattagtttctatgcgaaaaaagcacgcggtttaatggctcgttttattgttgaaaaccaattaaataaagctgaagatatcaaagcgtttaatactgagggttactactttgatgctgataactcatctgcaaaagagttggtatttaagcgcgatgagcaagtggcttaa

SEQ ID NO: 63523 - DNA, 279 bp, Acinetobacter baumannii; identical to SEQ ID NO: 63495

SEQ ID NO: 63524 - DNA, 150 bp, Acinetobacter baumannii
atgggaagtaaatacacaccatctctaaggattgcggctccacttgctttaagagaacgccatactctcatacgtgtagatgtgttctgtgtaggcaaagaggatatgagtaaagatattttcatgttgtatactcaacttatttgttaa

SEQ ID NO: 63525 - DNA, 279 bp, Acinetobacter baumannii; identical to SEQ ID NO: 63495

SEQ ID NO: 63526 - DNA, 396 bp, Acinetobacter baumannii
gtgaatagccttcgcaaacataagcaactcacgatttctttggtcgccacagaaaacgacttaattgtaggtcatgtggctatttcaccagttacaatcacgtcaggtgaaactggctggtatggcctaggccctatatctgtatgcccaaataaacaaggaattggcattggttctcttttaatgaatgcagcacttcaaaagttgaaagaattaggtggaaaaggttgcgttctattaggtgatccaaattattacagtcgatttggttttaaatcatattcagatttaaatttacctgatgttccaaatgaatactttcaagctataagtttcagcaaatatattccctcaggagaagtttcttatcatgaagcatttatggcaactgaataa

SEQ ID NO: 63527 - DNA, 279 bp, Acinetobacter baumannii; identical to SEQ ID NO: 63515

SEQ ID NO: 63528 - DNA, 279 bp, Acinetobacter baumannii
atggatattgtcatggctcaggtgctgagagcctttggctacatcaaaccgcattgcgcttacctgttctgtaataagcgtggccatcgtatgaaagtgctggtgcatgatggactgggtatctggctgtgtgcccggcggctggaacaggggaaattccactgggctaaagttcaccagggtgaaagtatggcgatcagcccggagcagttacaggcactgatccagggtttgccctggcaaagaatcggactgcagcaagtggtaacaatgctctaa

SEQ ID NO: 63529 - DNA, 126 bp, Acinetobacter baumannii
atgacaaaaaataatagtgctgtcaaaattgctgttgatataaaattagggatattggggaaccaagcaaagtattcgataaaaactaatgataatccaccagccaaaaaagcggctatcgcataa

SEQ ID NO: 63530 - DNA, 465 bp, Acinetobacter baumannii; identical to SEQ ID NO: 50031

SEQ ID NO: 63531 - DNA, 270 bp, Acinetobacter baumannii
  misc_feature (227)..(236): n is a, c, g, or t
atgtctaattctctatctaaaacgacggcatacgtccaagtcattcaaaatgatcaacaagcaattaatgctgcttatcaagtggctgattttgctttagagggtcgtaatacacgtgatcaacaacgcttattaccgcatgagcaaatcgaaagctttagccaaaaaggcttaggcggaattcgtattgcaaaaaaatacggcggtgctttcgtttccaataaaannnnnnnnnnaaacactggcacaagttttccgtattttaagtaa

SEQ ID NO: 63532 - DNA, 327 bp, Acinetobacter baumannii
atgtatgctgaaaggaatgttttattagattgggcaaatggatttgttgatagggataataaatttgtaaaagaattccaaactacttttgagtcttctttttgggaattatatctaaataaaatcctgaaatctgaaaatattgatatagattataatcatcatgcgcctgactttgtatgtaacaaaaataattcacctttttgtattgaagcaacaattgccaacccagaacaagatggcctaccagcatttggttttacagatgcaagtttaaaaaatcatataaagatttatctcatgttatgggtaagccttttattttag

SEQ ID NO: 63533 - DNA, 273 bp, Acinetobacter baumannii; identical to SEQ ID NO: 49501

SEQ ID NO: 63534 - DNA, 1086 bp, Acinetobacter baumannii
atgaaacgcttaaagtcccttgtctcagaacaaagtcaaatcaagcacctctctacccgactatttcgtcctcaaacattagtattgtcacaaagcactccgtttgaagtgattggtgaattcaatcaaacccgcgttcgttattatgcagctacagaaaagagctttagagaaccattagtatttgtggcacctttagctattaatatggcgatttatgatttatatccatatcgttctcttatcaaatacttccaaaatgcaggttttgacgtataccttgtcgattgggggcgtttaggctttaaagatagacatcttaactttttatcgtttattgaagattttattcctaaagctatagagcttgttcgcacacattcaggcagtgatcaaatttctctacacggatggagtatggctggcatattcgttactttatatacagcgcataatcatccgaattatgtcaaaaaccttatagttttaggtagcccaatcgatagctatgcttctggttatattggaaaactctaccgaaccataaacaacactattgcccgcaataaaaagcttcaggaacgtatttactcaggtttaccgaagcgtttgattcatactccgggcattttaaattctttaggctttaaaattcttgaccctaaaggctggttcgatggtcatattcaattacttaagaaccttaatgaccttcagttcgtacaagaacatgccacattaagcagttttttaaaaaatatgattgattatccgggaggtattaatcaggacatgttatttaatgtttggctgcaaaatccattaagacaaggttctattcagttaaaagataaaaaaatcgaattaaaaaatatcgactgttcactcttagttggagctggtcgtagtgatcaattagtgacggcagatgcagctcagccattaagtcagttaaccagtagccaagatgttacatttactcttattcctggcggtcatttaggtctaatgtcaagccaagcaagtgcgcaggaattctggccaaagttagcaacatggctgagtgagcgttcaacaaaaatctaa

SEQ ID NO: 63535 - DNA, 1176 bp, Acinetobacter baumannii
atgttaaacactgcatttgaaccatggccaagttttacaacagaagaagctgacgcagtcaaaaatgtattactatcaaataaagtaaattattggaccggtcaagagtgtagaatttttgaaaaagaattcgctgagttttctgatacaaaatatgcggttgctttggcaaatggtaccgtggctctagatgtcgcattaaaagctttagatattggtgcgggtgatgatgttattgtgacatctcggacttttttagcttcagcaagttctattgtaacagcgggcgctaatcctgtttttgcagatgtagaattagattctcaaaacatttcacgtcgtacgattgaagctgtgcttacaccaaacactaaagccattatttgtgtacatttggctggttggatgtgtgatatggatccaattatgcaacttgctgccgagcgtggcatatatgttattgaagactgcgcccaagctcatggagcaaaatataaaggtaaagcagcgggttctatcggtcatattgcggcatggtcattttgccaagacaaaattatgacaactggtggtgagggcggtatggtcaccacgaatgatgaaacgctttggaaaaaaatgtggtcttataaagatcatggtaaaagttacgacagtatttataataaacagcatccaccgggtttccgttggttacatgactcatttggtaccaactggcgtatgatggaaatgcaagctgtgattggccgaattcagctaacccgtatggctgaatggactaaaaaacgtactgaaaatgcagaaaagattttaaaagcctttgaagactctcctttctttagtgttcatactccctctgtagattatattcatgcatattataaatgttatgtccacgtgaatttagaagccttgccagatggttggtcacgtgatcgtattatgcaagaaattaactctcaggaagtaccttgttttagtgggtcttgttctgaagtttatttagagcacgcatttgatggtacaccatggcgcccagaaaagcgtttggaaaatgctcaaaaattaggtgaaactagtttaatgttcttggttcatccgactttgagtcaagacagtatagaaaaaacaattcttgcaattaatgctgttaatagagctttacaatcataa

SEQ ID NO: 63536 - DNA, 1428 bp, Acinetobacter baumannii
ttgaatcaaagctcggcacatagattccgcattttagagcaatatgcaggttatcgggaccgcccatatcatcctttagccaaattaaaagaaggtctcagtcagcaagagtatatgcaatattgtccggaattcgctcaagaattatctattcattgggtggctgtacataaagataaaatgatgtttggtgaaggggtagaaaatatttttaaacaacagccaagcgaaatttttattcctcgtgctgagcgatatcaattaaaacaggaaatgtttcaacgtgggttaaatgaaacccacattgcaatgccaattcatccttggcaatttgagcatttatttcctaagttctatgcggatgatattgccgacggcgtttgtcatcctttgaattttatttctaaaggaatgtatgccagtgcgtctatgcgtagcctcttatcaaaaaatgttttagaagaaagtctaaaattaccgataggaattaaagctcttggttcattaagatttttgcctattgtgaaaatgattaatggtgaaaaaaatcagaaattattacagcaagccaaggcaaaagatgctgtcttaaaactaaaattatggctttgtgaagaaacacaatggtggtcatatttacccgagaagcaaaatgaccggacagcagacaatgagtggttatttgtagagaaacctacccatttggcagctcagcgccgtcatattccagctgaattattgcaagaaccttatcaacttataccaatggcaagtcttggacatacaattacgggtcagcctgccatttttgattatattttgcagcttcaacacaaggacataaactccaagcagatacttatcgagtttgagaaactgtgtacatgtttctttgatgtaaatttgcgattattccgcttagggcttatgggtgaaattcatgggcaaaacatatgtcttgtgttgaaaaatggcgaatttgatggattgatgttccgtgatcatgattcattacgtatttatttaccttgggtagagcaaagcggattgaaagatcctaattatttgagtccccatgattttagaaatacgctttatcatgaatcggtagaggctctgttattttatattcaaactttaggtattcaggttaatctagggtgtattgttgataatttagcgagtcattatcaaattgaagttaaggatctatggtctgtacttgctcatgcgttacagcaagttattcaaaatctaaacttccagccagagattttgacccagctccaacatttactatttgaagtgcctgaatggccatataagcagttacttcgacctttgctagaacaagatacacggattggtagtatgccatcgggaattgggaaaacccgaaacccactttggtatgccttaaattgttag

SEQ ID NO: 63537 - DNA, 168 bp, Acinetobacter baumannii
atgaatcactgcatgaatgatagcgatgcactagagcgaaccgtagatagccatgtaagtaagctgagaaaaaaactagaagaacaaggcatatttcaaatgttaattaatgtgcgtggcgtgggatataggctagataatcccctagctataaaagatgacgcctaa

SEQ ID NO: 63538 - DNA, 375 bp, Acinetobacter baumannii
ttgatagaacaacttaatctgttatttaagcagttagcgaaaataggtcgcgtaccttatatattactctgggaaaatttaactgttcgagtagtacagttttatcattcttttacaaagcaaaatctaaatctggatatacagtctcggttagaacagcaaaaacaattctttaagtcaaaaactgccgaaagtttttatttaactgaaaatccatttatgcgtttatggaatggatggcatccagaatttaatacttttatgagacaaaaatgctgtttctattttcagctcgaagaggctgagcagaccttatgccgtaattgtcccttacgtttaaaagaaatcggaaaatttaaagatgaatcaaattga

SEQ ID NO: 63539 - DNA, 795 bp, Acinetobacter baumannii
atgagagcttctactgttacaattaaaactgaacaagatctagaaaaattaagagtttctgggcgtttagctgcacaagttttagaaatgataggggagtatgtcaagccaggtgtaacaactgaatatttagacaatatttgtaatgattacatcgtaaatactttaaaagttataccggctaatgttggttatcatggattcacaaaaacaatatgtacttcagtcaatgaagtggtatgtcacggtatcccttctcaaaataaaattttaaaagatggcgatattattaatattgatgtagcaattattaaagatggctattttggtgatacgagccgtatgtactatgtcggtaacgtaaatccacatgctaaaaaattagttgaaactacttatgaagcaatggtcgctggtatacatgcggttaaaccaggggcgactttaggggatattggttacgctattcaatcggtcgctcatcgcgaaggatatagcattgttcgtgaatattgcgggcatggtattggtaaagtttatcatgaacagcctaatattctgcattatggacaacgtggccaaggtcttgttttgaaaaaagggatggtctttacaattgaacctatggttaatgcaggcaaacctcaggtaaaagagttaaatgacggctggaccgtaattacccaagatcattcgttatctgctcaatgggaacatatggttgctgttacagatacagggtttgaattattaacgccgtggcccgaaggtgtgggaaattatctagaaatttaa

SEQ ID NO: 63540 - DNA, 213 bp, Acinetobacter baumannii
atggaagctcatgcccattacctagatgaacaatacttactagaacttgttgaaagtatttactctcccgaagaaaaattgagtttattacttgaaactttattacataagttgacggaaaaagatgtttggcatggcaaagtttttattcgcgaactgttttcaccgtctgagcagaatgagaaaattttttcttattcgaaagttgattag

SEQ ID NO: 63541 - DNA, 255 bp, Acinetobacter baumannii
atgagaaaattttttcttattcgaaagttgattagtcaagtggcgaacttagatgaaaatgatccggccgttttaccttgtattttaagcgtgatgaccccttgcatgatgcttattattgctgggcctaatgctcaagcacctgagccacttaaaaatattgctcagatgcccttacatgatttagttgaacactttaaaaaattttcattagctggattaaaagcaattagccaatcaaatcttaaaaattag

SEQ ID NO: 63542 - DNA, 267 bp, Acinetobacter baumannii
atgtatagaaaatttttgtgctttatattactaatagttgttggtggaagcgtatgggcaggaaatgctagagggaagataacaagtattattgtaagagactctgatggactggtgtatgtaaatgtagaaggtagagctaataaacctgattgtgcggttggtaactatatgatcattaaaaatgaaaattctgctacaggaaaaaggcagcttgcactattattaatggctcaagatataaattatattctagtcgaaaaatga

SEQ ID NO: 63543 - DNA, 210 bp, Acinetobacter baumannii
atggaagaagctcagaaatatgcaattgaacacaactttaaagtcagtatagccattgttgatgaaacaagctctttattacttatgaaacgtctagatggcgcttctcctctcaccacacatctttgcttagaaaaagctaaatgctcatcaatgagtggtcgtccttcaaaatggtcgtcttggtttcttgagcatgccaagtgctaa

SEQ ID NO: 63544 - DNA, 297 bp, Acinetobacter baumannii
atggcactagtacagcttaaccgtaacttagagaaccgcccaaacaaacgccctgtaaatgcagatctaaaagaatcaggcgacttagagcaagacgcagacatcatcatgtttatttaccgcgatgaagtctacaacaaggattctaaagaagcaggtacagcagaaatcatcataggtaaggctcgtaacggctcaattggcacagttcgattagctacagacttgtcacgcgcaactttcgctgacttaagccctgagtattaccagtctatggaagagagaggtgcagcgtga

SEQ ID NO: 63545 - DNA, 288 bp, Acinetobacter baumannii
  misc_feature (257)..(266): n is a, c, g, or t
atgaattttaagcctttggcatatatccttcttgcgacctcaagtttaacagcgtgtaccatggcacctgtaaaagaacaaaaaattgaaccgtttgtttttaaggaaccagagcttacacctccattttatgcattaaacccatttaattatgatgctccgcctgcatttgaagttgctttaaaagaagctgctgcacagcctgtaaccaaaatggttgtaactcgtcaggacgatccaaccaaaacacttacatnnnnnnnnnncacttacattagatacgaataa

SEQ ID NO: 63546 - DNA, 210 bp, Acinetobacter baumannii
atgtacccttattttccaaatcaacatcaattaaatctgtcgctgataaagcaattatacaaagtaatttggttacagcatgtagaatttacttctgtcggtatatcacatttaggagtattaccatttaagtttaatgcattaaatttcaaatttagtccagtatctttttcagccgccgctgctcctaataaatatttacatgcataa

SEQ ID NO: 63547 - DNA, 561 bp, Acinetobacter baumannii
  misc_feature (7)..(16): n is a, c, g, or t
atgccgnnnnnnnnnnccttaagtggcatgattttaccttttgttgatcatcctcaagcgttttcctttgctcatggtatcgactcaatctgtgtgtctggtcataaaatgattggctcaccgattccgtgtggcattgttgtggccaaacgccaaaatgtagagcgtatatcggtagatgttgactatatctctacacgtgatcaaaccattagcggttctcgtaatggtcataccgtcttactgatgtgggcagcaatacgtagccaaaccaatttacaaagacgacagagaattcaacattgtctaaaaatggcccagtacgcggttgatcgctttcaggcagtgggcattcctgcttggcggaatccgaattcaatcactgtggtatttccgtgtccttctgagcacatctggaaaaagcattatctagcaacctctggaaatatggctcatttaattactacggcacatcaccgagatacacgtcagattgatagcttaattgacgacgttatttttgatttacaaggtgcctctaaacgtacagttggtttttag

SEQ ID NO: 63548 - DNA, 705 bp, Acinetobacter baumannii
atgaatcgtcgcgaatttcttttaaattctacaaaaacaatgtttgggacagctgctctagcgagtttcccgctgagtattcaaaaagcgttagcaattgacgccaaagttgaaagtggaacaattcaagatgttaaacacattgtgattttgactcaggaaaaccgttcatttgataattattttggaacactaaaaggtgtacgtggtttcggcgaccgttttaccattcctatgacagaaggccgaaaggtttgggaacaatatgacgccaacaaaaagaaagtattgccataccacttagatagtcatttaggaaatgctcagcgtgttactggtacaaatcattcatggtcagatggtcaaggtgcttgggataatgggcgtatgagtgattgggtaacgcataaacaaccgcagtcgatgggctactacaaaaaacaagaagttgaatatcaatttgccttagcgaatgcttttacgatttgtgatgcctaccactgtgccatgcacgcgggaactaacccgaaccgtaaatttatctggacgggaaccaatggacctacaggtgcaggtgttgcgagtgtggtcaatgaatttgatgggattggaccatcaacagaaggttatgaatggacgacgtatcctgagcgtttacagcaggctggcgtgacatggaaagtttatcaaaaacatgccggataa

SEQ ID NO: 63549 - DNA, 777 bp, Acinetobacter baumannii
atgagacacaagtctcattattttgtcgaaattgtatattttttgattgatttttcattttatattcttataatacgttttttttcaaatctcccccctttgattatgcgtttaacttctttgttattaggcatggcctttgctttttctaattttcaggctaatgctaatcttgcgactcccctacacacccaagttcagcaaaaaaatgttcaacatttgacatataaaattgctgaagttgaccctcgttttggtttaagtcaagagcaattgatccagattacacagcaagctgctgatatttggaaagaaggtacaggtaaaaattactttacttatgacccaaatgcaaagttagaaattcgtcttgtatacgatgacagccaaaatcgttcaacagagcgtcaaaaaatcgcttctcagttcaaacaagaccaacaacgtgtaattgatgagcaacaacaaattaaacagttgaagcaaaatttaagtcaaactcaatcggatcttgaaaataaaaaacagatcttaaatgagaaattgaagaattttgatcaacagatgatgcagtttaaggaaggaaaattagcacctgaatacactgcaaaatcactttcgaaaactcagaaagatttacagaaacagacagttgctttaaagaaagatattgctgcttataatcagcaagctgcagacttaaataaaaaggttactcactttaaccagattaatgatgaattcaatcaatcctctgtacacgataaaaatagataa

SEQ ID NO: 63550 - DNA, 381 bp, Acinetobacter baumannii
gtggctaataccacctccaaatctaatccgacaaccaaaacagttaaaccggtagtgaaaagtactgaagtaaaacaacctgttcaaaaaccgtatccggtgcaaaataatagcctaagcagctatgatagatttaaacatgaacaacatcaaaagcataaatcttcaaatgattggatgacttggatgttgttagcttggatcgtgtccggctcttcaaatagtcatgcatcaaactcttcagttgaaacaaaagaaatcgttgtcgattgcaaaacctggttaaaagagaatggtcataagtctaatgacattgaaaacctatcaaataaagactttgcaaagatcaaagcatactgtgaaaaagttgataataaataa

SEQ ID NO: 63551 - DNA, 717 bp, Acinetobacter baumannii
  misc_feature (697)..(706): n is a, c, g, or t
atgatccacgctggcaatgccattaccgtccaaatgcttgcggacggaattgcagaattccgctttgacttacaaggtgagtcggtcaataaattcaaccgtgcaacaattgaagatttcaaagctgctatcgcggctgtaaaagctaataacgatattaaaggcttagttgttacctcgggcaaatctacattcattgttggtgcagatattaccgaatttggtcaaaactttgcacaaggcgaaaaagcgattgttgactggcttatgcctgttcacgaaatcttcaatagctttgaagatttagaccttccaaaagttgctgctattaacggcatggctttgggtggtggttttgaaatgtgtttagtttgtgactatcgcgtgatgtcagaagctgcacaagtcggtttaccagaaatcaaactcggtatttaccctggtttcggtggtagtgttcgtttaagccgtctcattggtattgataatgcagttgaatggatggcaatggctactccaaagaaaccggctgctgcacttaaagatggcgctgtagatgctgtggttgctgcggacaaattacttgacgctgctactgatctggttaagcaagcgatttctggtcgtttaaactggaaagcaaaacgccaagaaaaacttgaagctgtaaaattgaacccacttgaacaaatgatgnnnnnnnnnngtacatgctaa

SEQ ID NO: 63552 - DNA, 189 bp, Acinetobacter baumannii
atgtgtcgaaaatatgaatatagttttattgatgatgaatttttaatattgctttatgtcgatagaagttttgatgagattgacgctatgaattcagaaatatttagtaaatgctatgatgagggtttaattgatgaactgaataaactttcatattttattattccttatgaagtgggcgtggattga

SEQ ID NO: 63553 - DNA, 432 bp, Acinetobacter baumannii
atgaagaagtttttcacgctcgccttgcatcattttagcaaccggaatacctgttgcagcactaacgacttcggcaatttcattttcagttacttttgtacgaatgagttttggctcttcgttttcttcagcaacttcatcttgttcaagttgtttttgcaactctggaattacaccatattgcaaacgtgctgcttctgccaaatcgccttcgcgctgagctttttcaaaagcaatacgtgctttatcaagttcaacctgagcttgtttagtgccttctaccaatgttttctcagctttccacacttcttccagatcgttgtattctttctcgacttcagcaatctgtttttcaagatgagtaacttcggccttactgcctgcgtcttcatcttttttcaccgcttccaattgcattttcaactggattaa

SEQ ID NO: 63554 - DNA, 468 bp, Acinetobacter baumannii
atggtatcttctacacttggttcatcgaccagcactttttggaaacgacgctccaaggctgcgtctttttcaatgtattggcgatattcatctaaggtagttgcacccacacagcgcaactcaccacgagccaacgcaggttttaacatattacctgcatccatcgcgccgtcacctttaccagcaccaacgagcgtatgtagctcgtcaatgaataagatgatttcgccttcgtgtttcgccaaatcttttaaaacagcttttaaacgttcttcaaactcaccacgatacttagcacctgcaagcaatgaacctaaatctaacgataaaacacgtttattctttaagccttctggtacttcaccattaacaatacgttgtgccaaaccttcaacaatagcggttttacctaccccaggttcaccgatgagtactgggttatttttagtacggcgtgacaagacctga

SEQ ID NO: 63555 - DNA, 1458 bp, Acinetobacter baumannii
atgggtaaaaagaaacctgaagaaatggtgaaacagcgccaaatcttccttgagggtgctggacaaaaaggtattgatgaaagcacagctaaccatatcttcgactatatggaaaagttcgcaggctatggttttaacaaatcgcacgccgcagcctatgcacttgttgcataccatacagcatggttaaaagcccactatcctgccgaatttatggcagcagtaatgtcatcggaaatgcagaacactgacagtgtcgtatttttgattgatgactgccgaaataacggactcgaggtcttaccgccatcagtcaatatgtcgacttatcatttccatgcgagtgatgataaaaccattgtttatggtttaggggcaattaaaggtgttggtgaacaggcaatgcagtctgttattgactcacgtcgccaacaagggccttatactgacctatttgatttctgccatcgtattgatttgaaaaaaatcaataaacgaaccttagaagcacttatccgtgctggtgcgcttgattgtttaggtattgaacgttcaagtctaatggctcaattgccagaagctgtacaagctgccgaacaagcacgtagtaaccgtgaaagcggtattatggacttatttggtgaagttgaagaagttcaacgtaaaccagctaaacctgttaagccatggagtgatgaagttcgtctcaaaggcgaaaaagatacacttggactatatttaacaggtcacccaattgatgtttatcgtcaagaactcaaagcgtttattcctgcaaaacttaatgaaattaccgcaactcgtcgcggtgtaacgactgtttatgcaggacttgtccttgatgtagcgaatttcccaaaccgtgttgttattgtgcttgacgacggaacagcacgtattgaagtcagttgtaaccacgaacgtttccaacgctttaaagatattattcaagttgagcgcgtagtcgtctttgaaggcgagatctatgagcgtgaaggttttgatcgtccaatgggacgcttgaacaaagcgtttagcttaaatgaaatcagacaaaaacgcgccaatagtattcaaatcaaattaacccatgatctattgcaaccaagtttggcaaaagatctacaaaatatattattgccttattgtaatgtcgatatgcatcagcatattgcaatacagttacagattgaccaaccatatgctcaggctgagcttcagcttggcccacaatggaaagtcgctcctttagatgaacttcttgccaaactaagagattactttggtaaggataatattcatattgaatatcaggtaaaatctaaggcagctaaagcagcagaacctgttcgtccacaacctgttgcctcacctcctgtggacatgactattgatgatgcattggattcataccaaagcgaagtttctcaatattcgtaa

SEQ ID NO: 63556 - DNA, 279 bp, Acinetobacter baumannii
atgcgtatcagcatcaaaaaaccactttctgaaaacgcagtaaagctaatccttaaaaaacttatctcgtttggccctttggctaaccaatcactggaaaactcaattatcggaaattatcagggtgtatttgagcctcgccaaaatcaaattcaggaaaacccacaatctcataacgttcctgaagaaccgggttatttcactcaaatgtacgctgagagcaaccgttcaaacgtgattgacgttacgccagtgtcacaagattttggaggctattaa

SEQ ID NO: 63557 - DNA, 423 bp, Acinetobacter baumannii
atgagcagttattcgatacaaatcggacaagttaagggtttatatgatgtatttctcgaaacttgtgtaccaaaaaattctccccaatatccagagcttcagaaaatcggtgatgattttctaaataaagtcgtgatggaggaccctgattatcataatagtcaggtcttcactattttgagtcaagtagctgttcccgaaattcaaaatagacttaaacgtcttgagtccaaagcaaaaaataaagattttgaaaaaaattattttgattggaattatattgagagaggggttgttatatatgcagatctcttgaatgcgaatcctcaaaatctcagaagaatgcttacacataaaagagaaattgatactcgtctattagaagaggcaaaaaagtgtcttgaaaaactttctactaaataa

SEQ ID NO: 63558 - DNA, 561 bp, Acinetobacter baumannii
ttggcaaagtttaaaggttttttaaactatcaagcaaaacgcattgaaacccaaggactttgtacttacgaatatgcacgagcagtgggtcctcactccattacaaataaacttattcctgatgcatataaactgccacttgatttttttacttatcaaattatcaatttaaacgaggccactcaacttcttcttaccaaagccgatattgcaggacaaacagctgcatacaccctgcatattagacatctggaccagccagctgaaatttacacagatgtaagctttgatattatttcgcatcaagttgatgacttcgtttcacctagtgggcaaaaaatgcgacttccaaaatatttttcatggatcgctcgaaatgatgcaaagcaaattatcttaaacattcaggcagaaattgactgcccattccgctatggtcatgggcgaggttatgcaagtagctatatatttactggtcattattttggcaatgaagttcaaggccgtggatacatcgaatatattgatatcgaaaatccacaagcctttgaagatgaataa

SEQ ID NO: 63559 - DNA, 2148 bp, Acinetobacter baumannii
gtgcttatttttcatggaaaacctgttcatggagctatcttcgatatggatgggacaatgtttgatactgaacggttgcggtttcaaacattgcaacaggcatctcaagaactcattgggcaggagttttcacacgaatatttaatgcaatgtttggggttaagtgcgactacagcggaaaagcttgcacaacgtttatacggagtagatgttccatataaggaaattcgaaaacgtgccgatgagatggaactagaacatattcgaaaacacggcgtgcctattaaaaaaggtttggttcaagttctagagcgtttaagaaaatctggtttaagaatggctgtggctacttcaagccgtagagcaattgccgaagaatatttaattaatgcaaatgtttataaattttttgatgtcattacttgtggggatgaagtagaacaagggaagccacatccagaaatctttttaaaagcggctagtcaacttcatttagacgctaaccagtgtcttatgtttgaagattcggaaaatggtttaacttcagcacatacatcgaaaggtttaacgattttattaaaagatattaaagaaccaaatgatgaaatgctggaaaaagcgcatttttattatgatcagatgtatgactttttaaccgatcttgatcaatttatccctgttatggacatgccagaaatgcaggaaccttttccgcaaagtctgaatcagcttactgttggaatacatggtttcggtgctattggcggtggttatatagcgcagatcttgtcgcattgggatggttatacgaaaccaaaacgtataattgcgtcaacacgaaatagtcttttccgcgaagctgtaaatgcgtttggaacctatagtattcgctatgggcaattttcttatgatgaacgtattgaaaatatgaccattgttgattctgacaatgagcaacaaatgttagagatgtatactcattcaagtttgattgcattatgtttgcctgagcaagcgatcgaacctgaatcaaagataattgcaaaagggttatatgcgcgttttaattcgcaacttgaaacatgtatagaacctttaacctttctaattattttaaataaggttggtgcgaaatatttggttatgaagcatcttaaagaagctctactagagttaaccaacgatgaagatgtaaccgagcatattttaaaagagcattacttttgcgacaccgtagttaatcgcatggtttcaaaactttctaatcagaatttatatcgtcaacttcgtattaagcataattttcttgaacagcatttagaagatgtggagcaagaagaccaaatcgaaattgaagactgtaataaactgaatcaagaacaactaaatcaggcttctatctatgttgataacatgcgccgtaatttccagccgggacatatcttacaaagcatggatttaatcttgttccatagtgaaactgatatgccaatctatgtagagaaaggcagtcctttacttgaaaagttgcgtcaggtggtattggttgaccaaattactgacattcaactcattaaaaatcgtttatggaatggtgtacatgcgatgcttgcttggtatgcatctttaatgggttatgaatctattggtgttgccatgggtgatcatttagttaaagcatttgcagagaacttaattgcagaagtgaagcagggacttgctattgtattacctaactatgcaaaagatctggatcgaatgtcacaaagttttctagactcatgtgaatatgcatttaaagatccttgtcaacgcgtagctagagatccactacgcaaactcaatcataatgaacgtgtcatggcatcaattgctgtgaatatttgtcatgatttgccttataaaaatttattaaaaggtgctgctttaggttatgcctatgcgattcaatttttagaaattgaagagactaaagctgttgaacagctgcagcaacaaattcagaacctagacttgagtacaactcaaagaagacagcttgaagctgaattggttcaacttatccaatatttgttttctgaacaaggtaaacaacctttggacattaagctgaacaataccaaaactacatcaaatcaatatgtttga

SEQ ID NO: 63560 - DNA, 378 bp, Acinetobacter baumannii
gtgggttatgccgaaatttatgaagggaagcgtgatcgcctagctcgttattataaaggtgaagacaatgatttaggttggcatttactatttggggagaaatctgcttttggtcaaggctttttgcgcccaacaattcgtttattgaatttctatatttttgaaaattccccaacaaatagaattgtaggagaacctgatcatacagtgaagccttatgcggctgtagtagaagacatgtgctatgaagagcagggcttaattccaatgccggaaaaaacggcaatgttgtattactgtttccgtgaaaagttctatgacagattttttgagttataccaggcatcgcaacaaaaattacagcaaaaagcgagttaa

SEQ ID NO: 63561 - DNA, 246 bp, Acinetobacter baumannii
atggctttccaaatgggggcaaggttttgtgaaaaatgtaatggtactggaaaacgaccatatacgttgaaagagaaaatgaatattgctggcattgatgcaaccaaaacagcttatataaagagttatcagaaatttgagctgtttggagaatcaatcgttgctgaatgggaaaatgaaattagaacgcgtatttctcgatcattccgttttgaacttcctgatagtcaagaaacttacgcttga

SEQ ID NO: 63562 - DNA, 540 bp, Acinetobacter baumannii
atgttggttgaaaagtttgattttattgagttacttcgccttgctattgctcaaggcaaagctgaaggtaagaaaatttctaaagatgtagttttaggtgaattagcgctgttatcgccagctgcaaagctttgggccactgtcttgattgaaaaggttgattttgagcgaatcgcaataattaccccagcacaaaaacagactgaaactttttacagtaagtatgactttaattttcaaactgaacgccgtattgaagatattccgggcaaggttgagtttgttcgtggtgagattaaatcaggtaattttttcagagcgcgaaataaattagcggtagagattcataaagaaatggtaaagaaaaaatttacccctactaatgcccaaggtgatcttactaatctggcaaaaggtatggctgagattattttgcgtggccatgtttttgttaaggctatgtgtggagtctgccaagggttgggtaaaattgagacatttggtttaaatggctttccaaatgggggcaaggttttgtga

SEQ ID NO: 63563 - DNA, 1278 bp, Acinetobacter baumannii; identical to SEQ ID NO: 62422

SEQ ID NO: 63564 - DNA, 918 bp, Acinetobacter baumannii; identical to SEQ ID NO: 58010

SEQ ID NO: 63565 - DNA, 393 bp, Acinetobacter baumannii
gtgaagagcaatccaggcgaagcactttctgttgcttacgacatggtattaaacggtactgaagttggtggtggttcacttcgtatttacacattagaaatgcaaaaagcgatttttgaagcgcttggtatttccgatgaagaagcagaagaaaaattcagcttcttactcaatgcgcttcgttacggtgcacctcctcacggtggtttggcatttggtcttgaccgtttagtaatgcttatgactggcgcgacttcaattcgtgatgttattgcgttccctaaaacgaaaactgctgaatgtccacttactcaagcaccggctcctgttgaagcaaaccagcttcgtgacttgggcatccgcttacgtgaacaacaaaagaaagaagcttaa

SEQ ID NO: 63566 - DNA, 927 bp, Acinetobacter baumannii; identical to SEQ ID NO: 46217

SEQ ID NO: 63567 - DNA, 360 bp, Acinetobacter baumannii
atgtataaccttgaaatcttgcatagcaatattgaagataatccggaaaatactactcgtttcttagtgattggccgtgaaaaaattccacaaagtggcaatgacaaaacatcgttattaatttcagcgcatgaccgtgcaggtgctttattagaaattttagcgccgtttgcaaaacataatatcagcttaacgagcattgaaactcgcccagcactacctgaaaaatgggcatatgtattctttattgacttagaaggtcatatcgatcaggaaaatgtggctgcggcaatcaatgagattcgtccaatggtaaaagaacttcgtattttaggttcttatcctgctgccgttctttaa

SEQ ID NO: 63568 - DNA, 378 bp, Acinetobacter baumannii
atgacccagttccagtcttctaggctgagttcgtcaaatttaccgcctaaacctactccagcattattaatgacaagagtcacaggatgcccaaataagatttcagcagtttcagctaggtggttaacttgttcagcgtcacccacatcacagcgcatagcaaaagcttttgcaccctgttgttcaagcaacgttacagtttcttctgcagcttctaaattaatatctgcgcagactacgctaccaccacgttttgccagttcaactgcaaagcttcgtccaatcccactgcctgccccggttacgaccgcatatgcgtttcggctcggctggtctttcttaccaaataaaatcatagtaaatcctaaaaaattttag

SEQ ID NO: 63569 - DNA, 171 bp, Acinetobacter baumannii
atggaaaaatatgaatatcttgcagagcatgtacttgaaatcatgcaattaagcgttagtgaacggattgagacattattcactgatcggtggattggctataagaaagcccactctattgtaaacaagacatttttatcttttatattcaatggcttattttcctgctaa

SEQ ID NO: 63570 - DNA, 171 bp, Acinetobacter baumannii; identical to SEQ ID NO: 51532

SEQ ID NO: 63571 - DNA, 627 bp, Acinetobacter baumannii; identical to SEQ ID NO: 46144

SEQ ID NO: 63572 - DNA, 303 bp, Acinetobacter baumannii
atgatgttctttgtgtttatcctgactttactaggcatgtatttactattcatatcgactgaaaaatatcgctcaccgaaatcaactggtcatttcaaatctttagctcaaaaatattattcattgttgaggatattggcctttttattatttgcgttgagcgggtttattctcatcaaaaaatatggtttttcaattggttttgtcagctggtggatctttgcaacacccttaacctttttgctgatactttggcttaatccgctcaagccatcaaaaacttcctctaagtcatcaatttga

SEQ ID NO: 63573 - DNA, 741 bp, Acinetobacter baumannii; identical to SEQ ID NO: 63005

SEQ ID NO: 63574 - DNA, 489 bp, Acinetobacter baumannii
  misc_feature (414)..(423): n is a, c, g, or t
atgaatgtaaacaataagattggggttaaagcacgtaatcacatacgttcaaaacaagtactttttaagatgacaccttgttgtcttgccatatcggctatttttgcacagcaggcttatgcagaaaccgtaactcaaacggctgaggtaagcgaaaatgcaacacaaaaaccagtaacccaattgcaaaagattgtagtaactgcgactcgtacaccaaaaaatattgcagagattgcaggtacagttcaatctattgatcagaaacaaattatccagcaagctacggcgggtcgtaaagttgccgacattcttgcacaacttgtaccatctcttgcatcaagtagtggaacaacaagtaattatggtcagacaatgcgtggacgaaacgtattagtcatgatcgatggcgtnnnnnnnnnncgtattagtcatgatcgagggcgtttcgcaaacaggttctcgcgatgtttcgcgtcaattaaatag

SEQ ID NO: 63575 - DNA, 213 bp, Acinetobacter baumannii
atgaagttaaaacagatggcatgctggcattttaacaacctaatagattctgacttccttgactcggcagcttacattgttgaagttgccagctttaaaccaaatccgaaaaataaaatgccaactaagaaaattccgcttgctgcaattttatggttttgtttgaaaaaagttgaaagtttaattccagagaaaataagcgcagttaaataa

SEQ ID NO: 63576 - DNA, 1404 bp, Acinetobacter baumannii; identical to SEQ ID NO: 45796

SEQ ID NO: 63577 - DNA, 384 bp, Acinetobacter baumannii
ttgatcatagctttatgtcagccagaacgctcttgtgtattgcttgattcaaatggtaagaaaattcgttttttgaaacagtttattgctgaccttaagcttaaaaacgtaatagctgtgcaaacgcgtgttgaaaatcaagatacaattgatgaacttggccaatttgatgtaataacaagtcgtgcatttgcatcattaacagattttgttgaggctgcacgtccatatttacatgagcagagtataattgccgcgatgaaaggactgattccagttgaagaaatggaagagcttaagcaggaattttcatgtaaagtgattgaactgcatgtaccgagacttgatgaacaacgtcatttacttttacttcaacgaatttaa

SEQ ID NO: 63578 - DNA, 723 bp, Acinetobacter baumannii; identical to SEQ ID NO: 45758

SEQ ID NO: 63579 - DNA, 156 bp, Acinetobacter baumannii; identical to SEQ ID NO: 63038

SEQ ID NO: 63580 - DNA, 174 bp, Acinetobacter baumannii
atgttccataagcaagccttggttttggtgaattatgccaatgcatctcttgcggatgtaaagaaaacttatcaagctgtacaacatgatgttgaacagcgtttccaaattatgttagaaccagagcctgtgctttataacaatttaggtttaattgaaaatcatacggaatag

SEQ ID NO: 63581 - DNA, 366 bp, Acinetobacter baumannii
gtgactttgagcttaaccggtaaacagattagagatgtgcttgaacaacaatggtctggtgcaaatgcaaattcgcctagaattttacagccgtctaaagagttgagttatcaatatgcggcaaatacatctgtttcaccacgagcaagtaacatcatggttgctggttcaccattagttgacactaaagtatatcgcgtgacggtaaatagtttcttggcagatggtggtgacaactttacggtattaaaagaaggccaaaaccgtgtcggtggtggtcaagatatcgatgcgcttgaaagctatgttgctaagaactcaccgttaattattccggctacgactcgtattaaagtcattaaataa

SEQ ID NO: 63582 - DNA, 1902 bp, Acinetobacter baumannii
  misc_feature (1716)..(1725): n is a, c, g, or t
atgacatcattgcccactttagctagctcaaaccagcacaatttagaaacgtatattaatagagaactatctttattagagtttcataaacgggtgcttgctcaagccaaagatatagaacacccattactggaacgtttgaattttttaattattttttcgcgtaatctggatgagttttttgaaattcgtgtggcaagtttaatccagaaaattagcttgatgagtcaggcaaccggaccagaaggtttaccgttagtagaagtattaaagcaaatttcaaaaaatgctcatgaggcggttgaagagcaatataaaatcttaaactatactttgttaccgcaactccaaggctatggcgttcattttattcagcacggcgatatattagaaaagcataaagaatggattaaagaatacttttttaaagaagtacaacccgtagttacgccaatcagtctagatccagcacacccatttccaagattggtcaataaaagtctaaacttcattgtaactttagaaggtaaagacgcttttggacgtcaaattgatttagctattgtgccggcaccgcgttcgttaccaagacttgttaaaattccagaacatatttctggcggtgcggagcattacattctgctctcggccattatccatcaacatatttcggatttatttccgggtatgaaagcgacgggctgtcatcaatttcgtgtaactcgaaatgccgatttaaccgtttctgaagatgtagaggacttggctgctgctttaaaaggcgaattatcttcacgccgttttggccaagcagttcgtttggaagtagcaaaaaaatgtcctgaagaaattgctaactatttattagagcaattcgatttagatgcagaacatctttactacgtcgatggccccgttaatttagcccgttttatctcaaactttgatttaccagagttacgctataaaccatatcaacaagttttgcctcagcttttatacactaaaaaaccgatttttgatgtgttaaaagcaggagatgttctacttcatcatccatttgattcttttgcacctgttatcaagttccttcgggaagctgcgcaagatccaaatgtcttggcaattaaacaaaccttataccgtagtggtgccaactcggaaatcgtacagctacttgcagaagcggcgcgtaatggtaaagaagtaaccgcggttattgagttgcgggcacgttttgatgaagaatcaaatattgaagtcgcaaacgttttacaagaagctggcgcagtcgtggtgtatggcattgttggctataaaactcacgctaaaatgattttagtggtccgccgtgaacaagacaaaatcaaaagatatgtgcatttaggtacaggcaactatcatgcagtgaatgccaaaatctataccgattttggtttgctgaccaatgatgcggaaatttgtgaagacgtccataaaattttccaagaactgaccggtatgggcaaaatggcaaagcttaaaaagctttttcatgcgccatttaccttacattctcagctgttagaacttattgaacaagaaattaaaaatagccttgctggtaaaaaagcacacatcatcattaaagtgaatgcgcttactgaaccacagctcatcagcgcgctttataaagcatcacaagctggtgtaaaaattgatttaattattcgttcnnnnnnnnnngactttcagagaatattcgagtacgttcaatcgttggtcgttatttggagcatacgcgggtttactatttttataatgatggtgatacaaaagtttattgtgcaagtgcagactggatggaacgtaatttgttctctcgtattgaaacctgcttcccaattgaaaataaaaaattaa

SEQ ID NO: 63583 - DNA, 216 bp, Acinetobacter baumannii
atggaacgtaatttgttctctcgtattgaaacctgcttcccaattgaaaataaaaaattaaagaaacaagtcattgaagatggcttaaacaactatttgaaagacaatcgtcaagcatgggaattacaggctgatggaacttgggtgcaatgtcatcctaagccggaagaagaactttatattgcacagcaacacttgatgaacttagctgggtaa

SEQ ID NO: 63584 - DNA, 375 bp, Acinetobacter baumannii
  misc_feature (6)..(15): n is a, c, g, or t
atgccnnnnnnnnnncgccgtgcgtcatggcgtgaggcagcaagcagttctttaactgaactatttgcacctcagattcatcagtctcgacttgaatcatggccacagcattacccttggattgatgacaagggctatgaatatttccgctctcgtttaagtcaagcacgccgtgatgttgaacatggtttaacaatcacgcttgattcatttactactcatgaacaacaacaaagaatgctggaaatattacagtttaaactggatattttatggagcattttggatgctttaacactggcatatgtacacaatgaagcaccgtatcatagcgtgactcaagaacgggtatggcacaaaggactatttaaatga

SEQ ID NO: 63585 - DNA, 180 bp, Acinetobacter baumannii; identical to SEQ ID NO: 51115

SEQ ID NO: 63586 - DNA, 444 bp, Acinetobacter baumannii; identical to SEQ ID NO: 49443

SEQ ID NO: 63587 - DNA, 177 bp, Acinetobacter baumannii; identical to SEQ ID NO: 56206

SEQ ID NO: 63588 - DNA, 171 bp, Acinetobacter baumannii; identical to SEQ ID NO: 46042

SEQ ID NO: 63589 - DNA, 504 bp, Acinetobacter baumannii; identical to SEQ ID NO: 51095

SEQ ID NO: 63590 - DNA, 957 bp, Acinetobacter baumannii
atgactacaacagttaattcagacatgatcatctacaatcaattggctcaaactgcttatttagagcgtttgcaagataatttgaatgtatttaaccaagcctctaatggtgcaattgtttatcgcaatgagatcattgaaggtgatttcaataaagaagcattctacaaagtgggcggtagcatcaaacatcgtgatgtgaattcaaccgccaaagtagttccagagaaaattggttctggtgaatctgtaggtgtaaaagtgccatataaatatggtccttatgcttctactgaagaggcattcaaacgccgtgcacgtacacctgaagagtttgccatgattcttggttatgatttagcagatgcattggttgctggtcgtttacagtacagtttagcctccttaaaagcagctatttctagcaacccggatatggttgccaaaggcagtattgctgtagatgggcgtaaagcattaacacgtggtatgcgtaagtttggcgataagtttggacgtattagtttatgggtaatgaactcagatacttatttcgatattgtcgatgatgcaatcactaatcaaatttatggcgaatctgaaatcgttatctatggtggtttaccgggtaccttaggtaagccggtattggttacagatgccgtaggtgatgatgatgcatttggtttgcaaatgggtgcagttactgttacagaatcacaagtaccaggcttccgcgcgtatgacatcaatgatgaagaaaacttggcaatcggtatgcgtgctgagggtacatttaacctagatattcttggttatagctgggatacatcaaaaggtgaaaaccctgaccttactttacttggttcaagtgccaactggaaaaaacatgctactagcaacaaaatgacagcaggcacattgcttgatctatctggcacaacaacaactggttaa

SEQ ID NO: 63591 - DNA, 405 bp, Acinetobacter baumannii
gtgcttgcaactgaacttgcaaaatcatcagtttatgcggcgcagtggaatatcgaacagaaccaaattgataatattcaagtagctcgcctctcggctgaagagttcactcaagcctatcaaggtgaacgtgaattccgccgtctacaagaagcagatattgatattcaaagctacgacttcgatacagtattcgttgatcctccacgcgcaggaattgacgatgaaactttaaaactattgcagagctttgaacgtattatctacatttcatgcaaccccaacactttatatgaaaatttaaaaacgctcactcaaactcatcgcgttactaagtttgctttatttgatcagttcccttatacgcatcatgtagagtctggtgtcttacttgagaagatttaa

SEQ ID NO: 63592 - DNA, 390 bp, Acinetobacter baumannii; identical to SEQ ID NO: 51639

SEQ ID NO: 63593 - DNA, 897 bp, Acinetobacter baumannii
ttggttcaagcagtagaccattattcatttgatatagctgaattgtggaagaaatttccttttattccacaatggcgccgtgatgacattatggtgtcttatgcccccaaaggtggttcagtaggaaaacattttgacttttatgatgtttttcttgttcaaggatatggtcatcgtcgctggcaactcggccaaatgtgtgatgcaaacactgaatttgtacctaatcaacctttaaagttgctatcagaaatagatgttcattttgatgaagtattagctcctggcgacttattatatgttccacctggattatcacattatggcgttgccgaagatgattgtttaactttctcctttggtttccgtatgcctaatatttcaggcatgatcgatagaattagcgatcaatttgctactgatgaattacttcaaaatcctgttgtcgatattacccgtaagaatcctcctcaaattggggaaataaacacggaagagttggcttatttaagagatttagtgctagctcaattgaaaaattcaacagtacttgatgctgccctcatgtcttacatgagcgagcctaaatatccagacaatattccagaaccagatgaaatagaggttgaagacctaaatgctattttgtcagaagggtatgagctgctactcgaacctgcttcgcgtctactttatacagaacaaaatggcattttaaagttttggggtaatggagaagaattaccgattgtggaatcttttgccacccaactcaaatcgattgccgatgggaaaagcattcctttcaatagtgagcttaacaatacagatattttagaaaacattgttcaattattgaataattcaattcttatgttgttacctcctgcagagtaa

SEQ ID NO: 63594 - DNA, 162 bp, Acinetobacter baumannii
atgacagaagctttaaccgttttaggcggtattactgctgaacagtttttaacagagtattggcagaaaaaaccattacttgtacgtaatgctatgcctgaaattgtgggtatgttagagccgaatgatgtaaaagaactcgcttatccgtcaaaaagataa

SEQ ID NO: 63595 - DNA, 471 bp, Acinetobacter baumannii
atgaagtcgctgcataatcacaatgatcggcgtatctggcgagttagtacgcgactcaagggtgttttggaaccaatcaattaccccttctcgaattgttttagaagaagcttcatgcgctttgtgtgggtcatcgataatgatgcatccaccaaacccatcacgaagtttacctgcgccaaaaccagtaatcgtaccgcctgtaccagtcgcatagcagacaccgccttgagaagttctccagaagtctttagccttactatcatcacgcaatgtaagctcgggaaagacttttctatacgcctcttcttgcacaagggttcgaatctggaaggcgttatttgcggcaagcattgccgagtaactgatatgaataaactcacagtcaggcttctttccaaaacaccaagccataaaattaattacagcaatttcagttttagaatatcgtggtggaacgttaataattaa

SEQ ID NO: 63596 - DNA, 192 bp, Acinetobacter baumannii; identical to SEQ ID NO: 45978

SEQ ID NO: 63597 - DNA, 270 bp, Acinetobacter baumannii
ttggactatcctggtgttgggccacaacatagtttcttaaaagatttaggccgtgtggaatatagcattgcaactgaccaagaatgtttagatgcgtttatgaccttatcacgagttgaaggtattgttcctgcgcttgaaagctcacatgctgtcgcatgggcaatacgtgaagcgccaaaactgtcgaaagaaaccatgatcgtggtaaatctgtcgggtcgtggcgataaagattctgattatgtggcagaaaaacttaagctttaa

SEQ ID NO: 63598 - DNA, 159 bp, Acinetobacter baumannii
atgattcctaaagtaggctgtgcccttgacgctgtaaaaggtggtgttgtgagcgcacatattgttgacggtcgtgtaccgcacgcaacactacttgaaatctttacagatcacggggttggtacgcttatttctaaccgtacacaaacaactcactaa

SEQ ID NO: 63599 - DNA, 162 bp, Acinetobacter baumannii; identical to SEQ ID NO: 46255

SEQ ID NO: 63600 - DNA, 330 bp, Acinetobacter baumannii
atgaaaagtctcatcattcatttatctaaaatttcgtctgctttttgctatcgcttcggtttatacaataaaatattgaatattctgtgcaactttaagcaacaaggcggtttgcaaagcgatgtgaacaccccctataatgctgcaagattagttgaggatctatttatgactgaacaagcacgtgatactgaagcgttaattcgcgatcaaattgcgaagcatcccgttttactttacatgaaaggcactccacagtttccacaatgtggtttctctgcacgtgcagagaaaccacattgtggaaactgtggagtgcctttcatgtaa

SEQ ID NO: 63601 - DNA, 1209 bp, Acinetobacter baumannii; identical to SEQ ID NO: 50799

SEQ ID NO: 63602 - DNA, 432 bp, Acinetobacter baumannii
atgactatcgttgcacaagtaattaagaacaaatctgaacaagccatttttacaatttcacccgaagcaactgtcctcgaagcaattacgattatggctgaaaaaggtattggtgctttagtcgtagcagaaggtgaacaagttgttggaatattatctgaacgcgattacacacgaaaagtaacgcttatggagcgctcatcttatagcactacagtagctgaaattatgacagcaaaagtgatcacggtaggtttaaataatacggttgaagaatgtttacagctcatgaccgatcgtcatttacgtcacttacctgtattagataatggaaaattggttggtttcatttcaattggtgatttggttaaagccgcaatggaagaccagaaagttttgattgaacaattaaagcaatatatttcaggctaa

SEQ ID NO: 63603 - DNA, 426 bp, Acinetobacter baumannii; identical to SEQ ID NO: 51081

SEQ ID NO: 63604 - DNA, 234 bp, Acinetobacter baumannii; identical to SEQ ID NO: 44344

SEQ ID NO: 63605 - DNA, 360 bp, Acinetobacter baumannii
atgacaaatactattgatggctttgtttttgataatcctcctaaagaggagcaaatcatagaacttgcccattaccatcgtaaattattagacgaagcaattttccatcaagaaatacatttaggggattattgtttagcacaaaggaaacgggttttcgactatgctcgtcaattagaccctaatcaaaaagcttggttctatcaagtttatgatggtgaacttagaaagattgcagatgaagatgaattgcacccagcagatgcagaagaaggtttaagtatttttgctatgctattagtattagttattattgctgcaattttatacttctctgtaattcgttccttaatgggctag

SEQ ID NO: 63606 - DNA, 327 bp, Acinetobacter baumannii
atgctcacattcaaagaaaattttcttaaattaaagtctgagttaaaggcagatcaatgttttaatctggttgtgattattatcattggctgtatttttatgctgtcttatttggcattactacgtcctgtgaattcagaacagtatcaacgaattgtgcaactttctcgacaggctacttatccaagaactcaagatatggccgagttgattatggctcaatcagaaattcatagagcagagtatttaaagttaatgcatgcttatcagtttgaacataatcatatcaagcaatatcctgcattagcgcaagaagatactcaataa

SEQ ID NO: 63607 - DNA, 1107 bp, Acinetobacter baumannii
atgcaacaacaatcgaatatgcaaaataaattcttgatagatgctgagatcggggatgacgatgtcacattgcctaatttacctgctatcgatgttcctatcgttgagtcacctgttaagcaagaagtaaaagctgaagaagttgtcgaggctgcaccttctacagaacctgagcaaccaaaatctggtttctttggacgaatgaaagaaggcttgagcaaaactcgccgtaatttcaccgatgggatggttaatatcttaattggtgggaaagaaattgatgatgagttgcttgaagaagtcgaagagcaattattagttgcagatattggtgttgatgcaacaaaaacgattattaccaacttaactgaacgtactgctcgtggtgatttgatctattcacattcactttataaagccttgcaagaagagttagttgctttgcttgctccacgtgtgaagcctttgcatattgaccctaataaatcaccttatgtgattttaatggttggggtaaatggtgttggaaaaacaacaacaattggtaaattagcgaagcgtttacaaggtgaaggcaaaaaagtgatgttggcggcaggtgatacattccgtgctgctgctactgaacaattgcaaatctggggtgagcgtaacgatattgctgtagttgctcaaggtcatggtgccgatagtgcatcagttatttttgatgcttttgaaagtgcgcgagctaaaggtattgatgtactgattgcagatactgcgggccgtttgcataacaaaagtaatttgatggaagagcttaagaaagttaagcgtgttatgcaaaaaattgatgcaacagcgcctcatgaaattatgttggttgtagatgcgggtactgggcaaaatgcaatcaaccaagtacaagaatttgaccaggctgtcggtttaacaggtattaccattactaagttggatggtacagcaaaaggtggagtattatttaatattgctagtcgtactcatgtgccaattcgtttcattggtgtgggtgaaaaaattgatgatttaagaccattctcggcgaaatcgtttgttgcagcactatttgaaactgaaaaataa

SEQ ID NO: 63608 - DNA, 597 bp, Acinetobacter baumannii; identical to SEQ ID NO: 51633

SEQ ID NO: 63609 - DNA, 672 bp, Acinetobacter baumannii; identical to SEQ ID NO: 48595

SEQ ID NO: 63610 - DNA, 525 bp, Acinetobacter baumannii
atgatcaaattaaatttccgtttagcagaatttagtgacatcccaacactagtagagttgattaatcagtcatatagagaacaacaaggtagaagctggactactgaagttgaatatgtaaaagggcaacgtattaataaagagcaattgaaacaacaattagaattacctaattcagtattattaattggagaaatagattcttcaaaagttgttacatgtattggtcttacatttcaaagcaatacagttgagataggaacattttgtacagatccgcatgttcagaatatgaaaataggacgttctgttttggagtacgctgaacaatttgctttacacaaagtacctgaattggacagcgcaatcatgtatattttaaatgtgcgttcagagttaattgcttattatgaaagacgcggatatataaaaacaggtaatcatgaaccatatccgcttgacgcaaatgttggattaccacttataccaattaaactaatcgaaatgaaaaaggacctcaaatga

SEQ ID NO: 63611 - DNA, 297 bp, Acinetobacter baumannii
atggcaaccgcaatgacagcatcaaatcaacgaaaagctcaagcattcgcaatggccatttcatttctgttggcattgccgcttgctgtaattttactggtgcatccttccctcatgttagatgcaaacggacactacaatcatagccagcttatgctggtgatggtgggtatttccggaggcttcatttatggagtgggttttgtgccgcacttctggttatggaaatggttgtttagtccatggatagcttggcctctcatgcttttaggctattacatctggtttctaacctaa

SEQ ID NO: 63612 - DNA, 1146 bp, Acinetobacter baumannii
atgattgaatacgaactcctaaaaatcatatggtgggtgttagttggagtcctactcattggatttgccctaaccgatggtttcgatatgggctcaatggcactcatgccttttgttggtaaaactgataacgaacgccgtgctgctattaatacgatcgcacctcactgggatggtaatcaggtctggtttatcactgctggtggtgcactatttgcagcttggccaatggtatactcggtcgcattttccggaatgtattgggccttattacttgtgctatttgccctgttcttacgtcctgtaggttttgattatcgttctaaacttgaaaatacccaatggcgcaactcttgggactggggactttgtattggtggtgccgtaccagcacttgtttttggtgttgccttcggtaatttattcttaggtattccttttagtttagacagtacattacgctcggaatattcaggtagcttctttgctcttcttaacccatttgctttaatttgcggtattgtcagcctttctatgttgtgtgctcatggcggcgcttggcttatgctacgcacagacggtgccttgaaacaacgctctgctaaagcaactcaaattatggcagccatatttttagtttgtttccttgtaattggtgcatggttgtacttcggtcaagtcccaggttatagctatgctgctgcagttgatccaaacgcagcacttaaccctttagccaaagaagtagtcacaaacaacaacccaggctggatgaataactacagcagctatccgattacaaaagtagctcctgtactggcaattttaggggcaattattgccttctttacagcatcaaaagccaaagcgggtttaagttttgctggcacaagcttaatgattgtaggtgcgattttaactgccggttttgcactcttcccatttttattgccatcaagtgttaatccaaactctagcttaacaatgtgggatgccgtatcaagtcatcgtactttaggggttatgactgttgctgcatgcatattcgttccgatcattttgatctacaccagttggtcgtattacaaaatgtggggcgttattactaataaacatatcgagtcaaactcgcatagcctgtactaa

SEQ ID NO: 63613 - DNA, 1587 bp, Acinetobacter baumannii
atgatttctgaaagcgtggttgatctttcgcggttccaatttgccatgaccgcaatgtatcactttcttttcgtacctttgaccctaggccttgcatttattctggctattatggaaaccacttacgttatatctggtaaagagatttacaaggatatgactaagttttggggaaaactatttggtattaactttgccttaggcgtaactacaggcttaaccatggagttccagttcggaacaaactgggcatattactctcattatgtaggtgatatattcggtgcaccattagcaattgaaggcttaatggcattcttccttgagtctacatttatcggtctattcttttttggatgggaccgcttaagtaaagttcaacatctaggagtaacttggttagttgccctaggttctaacatgtcagcgctctggattttagttgcgaatggctggatgcaaaaccctgtaggtgcagcatttaacttcgaaactatgcgtatggagcttgttgatttcggcgcacttattttcaacccggttgcacaggttaaatttgtacatactgtttctgccggatatgtaacaggtgcgattttcgtactcgccatttcaagctactatctacttaaaaaacgtgaccttcccttcgcacgtcgttcatttgcaattgctgccatttttgggcttgcttctacactttcagtaattttactcggtgacgagtcgggttatgaactaggtgatgttcaaaaaactaaactcgctgcaattgaagccgaatgggatactcaccctgctcctgctccgtttactttgtttggtgtaccaaaccatgaagaaatgcgaacagattatgcagttaaaattccatacgcattaggcctcatcgccactcgttcaactacgaaagaagtcactggtttgaaagacttaatgcaacagcacgaagttcgtattcgtaacggtatgcttgcttatgctgagcttgaaaaattacgtgctggtgatcgctcaccagagttattagcttcatttgagaaaaatcaaaaagacttaggctatggtctacttcttaagaaatatgctccgaatgtagtcgatgcaagcgagcagcacattcaagcagcggtaaaagatactattccgaatgttacagctctgtttttctctttccgtgcaatggttgcttctggcttcttaatgctgcttcttttcattttagcaacttgggcagtagcgaaaagaaatgctgagaataaaccttggctacttaaatatgcattatttgccctaccacttccgtggattgctgcacaaactggttggtatgtagcagagggcggccgtcagccgtggtctattggtgaaattttacctacgcacttatcagcttcaagtttaagtacgggcgatgtgtggggctcaattctcgctctggcagcgttctataccatacttttgattattgaaatgtacttaatgattaagtttgctcgcttaggtccaagctcacttcacactggtaaataccattttgaaaaacaagagccaaaagcagctgttaatggggaggctttatcatga

SEQ ID NO: 63614 - DNA, 195 bp, Acinetobacter baumannii
atgagccttaaaaatctagatattaactcccgattaattagagaaatcgcaattattctaataattaaagtcgcgcttctcttaacaatcaaacatatttggtttgacgctcctactatccccaaaaattttgacaatcaggtcgccgagcatattgcaggcgataactcttcccacattaaggagacacgttga

SEQ ID NO: 63615 - DNA, 2256 bp, Acinetobacter baumannii; identical to SEQ ID NO: 49297

SEQ ID NO: 63616 - DNA, 741 bp, Acinetobacter baumannii; identical to SEQ ID NO: 63005

SEQ ID NO: 63617 - DNA, 927 bp, Acinetobacter baumannii; identical to SEQ ID NO: 46217

SEQ ID NO: 63618 - DNA, 267 bp, Acinetobacter baumannii
atgtttccagcaattcgtaatggctggtatgttgtatgcgaccctgatgcagagcttgtgccgaatgagtttgttcaggtgtgcttgaaggatggaagatgcacaattaaagaatttgtcggcatcaatggtggggttttaagtttgctttctgtgaatggtggtgagcgatttttctttgaaatggacgaggttgaaagtattaccgctattacagatatcgtgccgccaagtcagcacagacaagaacatccttattcgcattaa

SEQ ID NO: 63619 - DNA, 1008 bp, Acinetobacter baumannii; identical to SEQ ID NO: 46193

SEQ ID NO: 63620 - DNA, 504 bp, Acinetobacter baumannii; identical to SEQ ID NO: 61023

SEQ ID NO: 63621 - DNA, 204 bp, Acinetobacter baumannii; identical to SEQ ID NO: 46177

SEQ ID NO: 63622 - DNA, 441 bp, Acinetobacter baumannii; identical to SEQ ID NO: 49901

SEQ ID NO: 63623 - DNA, 291 bp, Acinetobacter baumannii; identical to SEQ ID NO: 49902

SEQ ID NO: 63624 - DNA, 324 bp, Acinetobacter baumannii; identical to SEQ ID NO: 48570

SEQ ID NO: 63625 - DNA, 327 bp, Acinetobacter baumannii; identical to SEQ ID NO: 49402

SEQ ID NO: 63626 - DNA, 684 bp, Acinetobacter baumannii; identical to SEQ ID NO: 49392

SEQ ID NO: 63627 - DNA, 531 bp, Acinetobacter baumannii; identical to SEQ ID NO: 49266

SEQ ID NO: 63628 - DNA, 156 bp, Acinetobacter baumannii; identical to SEQ ID NO: 63038

SEQ ID NO: 63629 - DNA, 1191 bp, Acinetobacter baumannii; identical to SEQ ID NO: 49895

SEQ ID NO: 63630 - DNA, 333 bp, Acinetobacter baumannii
atgagtaaattttttgtacccgatattcgctatattttatttgccatcagtgtttttattttttggaaaacaaaactttatttccaattaaatgagcataaatttaaaatcccgatgttgcctgtattgtttacactcgcttttctgatctggattgctgaaaatattagtaccttttataaaatttggctttatccaagtcaggtagaggcttggcatatggtggggtggggtaaacttggatcatggtatttattattgcttttgagtttagtgttagtacttaaaatattaggtcatcgagataatcaaggcaattggaatttaagataa

SEQ ID NO: 63631 - DNA, 444 bp, Acinetobacter baumannii; identical to SEQ ID NO: 49294

SEQ ID NO: 63632 - DNA, 2094 bp, Acinetobacter baumannii; identical to SEQ ID NO: 51573

SEQ ID NO: 63633 - DNA, 546 bp, Acinetobacter baumannii; identical to SEQ ID NO: 56012

SEQ ID NO: 63634 - DNA, 534 bp, Acinetobacter baumannii
atgattttaccttttgttgatcatcctcaagcgttttcctttgctcatggtatcgactcaatctgtgtgtctggtcataaaatgattggctcaccgattccgtgtggcattgttgtggccaaacgccaaaatgtagagcgtatatcggtagatgttgactatatctctacacgtgatcaaaccattagcggttctcgtaatggtcataccgtcttactgatgtgggcagcaatacgtagccaaaccaatttacaaagacgacagagaattcaacattgtctaaaaatggcccagtacgcggttgatcgctttcaggcagtgggcattcctgcttggcggaatccgaattcaatcactgtggtatttccgtgtccttctgagcacatctggaaaaagcattatctagcaacctctggaaatatggctcatttaattactacggcacatcaccgagatacacgtcagattgatagcttaattgacgacgttatttttgatttacaaggtgcctctaaacgtacagttggtttttag

SEQ ID NO: 63635 - DNA, 348 bp, Acinetobacter baumannii
atgccttcagaacataatgcatatttcttttggcatagattatcagattatcggattgttagaaaattaaatcctttttcagatagggagtcgcatgcagtaattaataagtttgaggaagtaattggtgaaaaaatccatagtgatttaaggcataatttaattgttagtagtcagggatatccatggttattaaaaaaattatgtatccatttacatgagaagattttatctggccaaaaacaagaagatctattagataataaactggatatatctagtttatttgcaagtgatttagaagagctaaattctaatgaaataaaagctctaaaatttattgcctga

SEQ ID NO: 63636 - DNA, 537 bp, Acinetobacter baumannii
atgccgtcatttgccgagtttcgcacctggtgtatcggtgaaagttggatgtctccagaagaagcttggtctcgcgcatgtaagtttacgactgaccgtaccgtggttattacacaaattacaaaatatgcattagacgaagtgatgtatttgatcgaagccggccaaatgcgagcagctcaagataatttcttcgggacctacaacgtgatggttgctaaagctcagttaaaaggccgtcagcaagagttttacactccaccgctacaactagagcataaagaacctgaacacaccccagtaagcaatgacgaggctcaaaagcatctcaaatcattgatggaaagattaaaaatcaatggtcgtaaacctgcaccagttcaaaaacttgaggcaaaagaaaaagagcctgagcttataaaagagttgggccctgatcctttcgataatccacacgaatacgcagagatgtgccgccgtgaaggtatgccaatccctagaaatattcagcagttaattgatggagcgaatgtatga

SEQ ID NO: 63637 - DNA, 444 bp, Acinetobacter baumannii
atgtcaaaaatcgcgacgcttggtttagcaatctttgccatgattttaggtattttgtttgaaaagcaaaacgtagcattcatggtaggtttagcattctctgtagcgtgttgtgcaaacttcccaattcttgttctttcaatgttctggaaaggtttaacaactcgtggtgcggtcattggtggcgtagttggtcttgtaacagcggttgtactcattattctgtctaaagcagtatgggtagatactttaaaaatctctgataccccaattaacccgttcaatggccctgcattatttgcaatgcctttgtcgttcctttgctgctggttcttctcggtaactgacagctcagcacgtgcgaaaaaagaacgcgcttctttcgatgctcaatatgttcgttcaatgacaggtattggtgcttctggtgcatcagaccactaa

SEQ ID NO: 63638 - DNA, 3102 bp, Acinetobacter baumannii
atggaagcagtaaccaacctacaaactattaatcaagctattaaagatgtacataaggcccctaaagtcatcgcaggcgcaggcggtggcggtggtggcaaagggggcagtgaatcagacgacgatcttgaatcgaaatcgttcctgtctttgattgatttgctcggtgaggggcaaattggtggcttggtagatgacagccctaagtcaatcttccttaacgatacgcctttggtgaacgcggcaggggagtacaacttccaaaacgtaacttgggccatgcttaaaggaacccaagaccagccatctttaggtgaaggtttcgacactgttgagtcttctacttcggttgggcagcttattacccgcgattctcctgcaactttctcaattacagacccaaatgcagatagagcgcgtgtaattatctctacaccatctttgatcagtacaaccagtcgtggcgacattgttggctcatcagtcgagtacaaattctctatctcgctgaataacagtcattttgttgagatcggcaaaggcaaaatcacaggtaagacacgctcgcgttatcagcgtcaatacgagtatgcgcttccaaaacaaacggaagacggcacacgcgtaacaatgtggacgatcaagattgagcgcgtaagtcctgagagtaatgaatcatcaacttcaaacgatatttaccttgatagttattcggtaattatcggttcgcgtttgtcttatccaaactcagccgtttttggattgagtatttcgtcagaacaatttcaaagcattccaacccgttcttacttagttgacggtttactcattcgcgttccgtctaactatgactacaaaacgcgtaaatacgaaggtacttggaacggcactttcaaactcgctccaagcgataaccctgcatggattctttacgacgttattaccaacgagcgttatggcttaggtcaatttgttgaccctgcatatgcaaaccctgctcgcttatatgtgattggtcaatattgtgacgaaatggtcgatgatggttttggcggaaaggaaccacgtttcacattaaataccgtaatcaatagcatttcagatgcttatcaattaattagcgacatcacttccgtattcaacggcatggcctactggtctggctctcaatttggctacatgtgcgacatgccaactcagccgaccatgctttacaacgcctcaaacgttgttaatggtgagtttgtttattcgggcgcgtctcgaaaagacatgcattcagttgctttgattacttggaacgaccctgaacgcaactatcaacgcgccgttgaatatgttgaagaccctgaactcattcaacgttacggcgtgcgtaaagctgaaattacatcattcggctgtacatcacgcggtcaggcgcatcgtatcggtaaatggttgctttatacagagcgtaaccagtcacgcaccatttccttcaaagttggtgttgattcttcctttgtgcttccgggtgacgttgtacagattgcagaccctaatcgctcaggcaaacgaatgggcggtcgtttaattggcgcaactgcaacttcagcaactctcgattctgaaattattctcaacgaaaactcatcaatcatgttgcgcttggcgagtggtgattttgtcgaacgtaacatcaagaccattggcactgacttagcaacaggcaactcggttatcaactgggatactgcgctttctacattgccaacggataacgccgtttggattgttaagtctccagagttagagcctcaacttgcgcgtgtagttgccattggtgacagcgaggatgctccgggaacttacacgatcactacaatcgctcacaacccaagcaaattcgacttcatcgaaagcaacattcagcttgatagtccgaatgtgacaatcatttcgccgtcactcattgaggcgacaaagaatgttgaaatcattgaagaagcacgtatcgaacagggtattacggttcgaaacatgtcgatcaattgggagcaagtgccgaacgctgtttcttacgaagttaagtataagaaaaccgaaggtaactggttcacacttccaattacaaaaggattaagcgtagagattgagaatgtctacgagggtgaatatgtggctcaagtagtagctatttcgtccactggcagccgttcaccagcaacctactctattcctacaaaagttaatggccaagcttcggtattgccaaaactaggcttatttaaagctacgcctgcaatgtttgccattgaccttgcatgggaatacgcgccgggcaccaaaggcgttgatcacgtagagattcaaatgagcctagacaactcattagaagctaactttgctctactaggcacatatccagacccaatgaaagcccaccaagtgacaggtttaaacctgagtgatacgcgttggttccgcgctcgcttagtggacaaattcggaatctctggcgaatggtctgatgttgtatcggctgcaccagatattgacccggataaagtacttgaagttatttctgggcatattgacgaaagcgttttagatactgccttacaggaaaaaattgatacctctgagcaaactgccaatgccgcaaaagatgcagcgtcagcagctcaaggcgcagcgtcggcagcgcaaaacgtagccaatgccgcaaaagatgcagcggctaccgctaagaacacggcaaatttagcgcaaaacgtagccaaagaggctcaaagcactgccgcgaccgctcaaaaccaagcaaatgccgctaagaccgccgcagatcaagccgttgccgcatcaaaccaagccaaagacacagcagataaggccacttcagctgcaactactgcgcaaacgatggcgaacagcgcttctacagcggcagcgaaagccaatacagccgcaacgaacgcacaaacaaccgcgaataatgcagcgtccgcagcgtcaaaagttgccagcgatttaacaacctcaacaaatcagttgaaccaaaaaatcgccgatgaagcagatgcacgcacagtggcaatttcggcactgttgcaaagttag

SEQ ID NO: 63639 - DNA, 303 bp, Acinetobacter baumannii
gtggtgaaaaaactacgactatcaattaaagatcgcctgaagcttttgcgaagagcggtaattgtagcgttcatgccaaacgtcagacaggtcaatgtaatttggcaagaagaagtaggcgacattaagcaacacgccttctttgtggatggcattaacccaactgatatgacatttttgtacttctcttacgtggcgggcaatagtgacacttttgaggatttaacaagacgcaccaagtttttgcttaataaaattgcagtagcttatgcgctcggcactgttgcaaatagtcggtggtga

SEQ ID NO: 63640 - DNA, 663 bp, Acinetobacter baumannii
atgttttatttaaaggtgtgggtgggcggctcattaccgatgctcaccaagaacccgattagcatggctgcaaacgcagtgactcaatatcaaaccattatgggtaatgcagttgatccgcaacaagcggcagtgttatcgattggctcaatccaagctggaaactcgaataacgtgattccttctactgcattggtcaaaatgaatttgcgctggtttgatcctaaagtgcgtgaaaccatgctaaataatattaagtctatgagtgaaggtgcggcccaaatgcaggggatgggtaaagatcaattacctacctttacgtttaaaggttcgagcacacctgtagttaacaataaagaattttcggcacgtttaaatgggcctttaaaagcactattgggagataaacatgttctaactgagtatcccgcggttatgggatcagaagatgttcatcatttattgggcgaacaaaaagacattccttttaactttatgtttattggtgtggcagacccagttgtgtttgcaaatgcagtcaagcaaggcaaacctgtgccttatattccacatagtccaaactacattgttgacttaaaagctttaccagtgggagccaaagtcactacagtttcgatgctagaactacttactaaaaaataa

SEQ ID NO: 63641 - DNA, 315 bp, Acinetobacter baumannii; identical to SEQ ID NO: 44769

SEQ ID NO: 63642 - DNA, 300 bp, Acinetobacter baumannii
atgagtgaggccgaatttaaattacagctaaaacaagttttcaacaatccagatatgggaggtaatttatacaaaaaactaactaacccttgtatagataatgaggaagataccccactatatttttgtgtatctgatcaaaaccttcaactagctataaaatatgcgaaagatggtaaagatgagaagttaaagaaaaactgtaaagatgtacttgataagattgggcaagagtcctcagtaatgatgaagaatatgcttaggaaagcacagttaaatgtcgagaaaaatagttattag

SEQ ID NO: 63643 - DNA, 513 bp, Acinetobacter baumannii
atgcctaatataattgtaaaaaatgattattgtattcgcaaagctgaatctaaagatattgatcagttatgtgaattaagaaaaattttactatccaatagtagtgggcattattcttctcaaaatacaaaagaggaaattgaatggttaaatgcttataaaaaatggttaaaggaaaatattagcaatacaagtttcttaattttagttgatgaagatttagataataagaaggttataggttatgctattgccataatagataaccgagtgcctattaatggttgtttaaatgggaagtctggctggattcaaacagttgtggttgtttcgaattatagaaaaaaaggaataatgcgtgaaaatatgtcagtaatagagagttggtttttagaaaattcagtctttaaaatttatttacaaacaacagttatggcggagaattcatatttaaatatcgggtttaatgatactggtgaaaaatatttttataagagtttgagtcaactatga

SEQ ID NO: 63644 - DNA, 1197 bp, Acinetobacter baumannii
ttgttggccgaaaaaaaggtacaagaattaaaggataattctcagtatagagattttacgactatagatagaatatgtaagcaatatccacttgctagatgtttaaatacaaataatgaagttattgtttggtgtagtaatgactatctgggtatgtcacaacatcaaattttaaaagaagcaatgcataaagtaattgatagtcatggtgttggttctggaggatcaagaaatattggaggtacgcattcttttttcaaaaaattagaaagtagtatcgctgattggcatggtaaaaaagcagcactagtctttcctacaggatatagttctaatgatgcaactttacaatgtttgttgaatatttatgacaattgtatagttttttcagatgaaaaaaatcatgcatcaattattaatggtataaaaagttcaggtattattaagaaagtattccgtcataatgatgtaaatcatttagaagaactattaaaagcagagcatataagcaggccaaaaattattgtttttgaatctgtttattcgatggatggtgatattagcccaattaaagaaatcgtggctttggcagaaaaatataatgctttgacttatttagatgaagttcatgcaataggtatgtatggtccaaatggttcgggtattgcagctagtttaggtattgcagataaaatagatattatacaaggaactatggcaaaagctgtaggtgtaattggtggttatgttgctggttgtaactatattatagatgcaattcgctcatatgcttcaggattcatttttacaactgctttacccccatcaatagtggctgcttgttatgttagtattgaatatttaaagcattcaaatgttgagcgagagatattaattgaaaagacaaaaaaattaagatgcttgtttgctgacgcaggtatacctattcatcctgatagttcaactcatattttacctgtaatcattggcgattcaattaagtgtaaacaagctgcgaattacttattggaaaaacataatatttatattcaacctattaattctccaagtgtccctgtgggtactgaaaggtttaggattaatgttactcctaaccattctgatgaacatattgatcatttagttagctctttaaaagatgtctttgatcattttgggttaaagcgttatgcctaa

SEQ ID NO: 63645 - DNA, 1170 bp, Acinetobacter baumannii
atgagttctataaagtcgaataaaataaattttgaaatagtatattttgtagccttgggtgcattttctttaggaatgtcatcctatattaccgctggcttgattccatttattcaaaatgaattcaatatatctattgctttaactgctcaattggtaactgcttttactcttgcatatggcataggttcaccattagttgtagcattactgcctgaaaataaacaaaaatttggtcttatatcggcattgtttgtatttgcaatagctaattttataagtggtattgctcctgattttaaaacattatttatttcaagagtattttctggaataggtgctggtgtttatttagcaataggtatatccgtttctactgctgtcgtatctattgaaaatagggggaaagctatctcattaattatgagtgggatggctgcaggtacagtcttgggtgtaccaattggtttgttaatatcaaaagcttatggttggcagatctcaatgtttatcatagcgattttaggtttaatatctttagttggtttagtaattaaacttcctcaaatcagtttggaaaagcagagtctaatcgaaaaattaaagattttaaaagataaaaaagttttaggtattttatcaatttcgttaattgctgctatttctagtttaggtttatatacatatttagctccttttatggcttatccagattttggttctattagtaatattactccgtttctatgggtttgggggataggcggaataatcggaagttatattgttggctatttttctaataaagtaaaaaacactaaattaacagcaattattatgttaattcttgctttatctctaatttctattccatttttagctcatatcaattcttggctagttttgatccctatcgcaatatggggagctgtaggttgggcattacaagtacctcaaaacgatcagttaattaacgcaagagaaaataaaggaggtggtaatttagcagtagctttaaatgagtctgcattatatttaggtggtgcaattggttccggattaggtgggttaatttattactttaatcttagcccatggttattacctatccttgctggattagttgcattaattggacttttcattcaattaactttaaaaaaagcataa

SEQ ID NO: 63646 - DNA, 288 bp, Acinetobacter baumannii
atgaacacaaataatctatcaaatcaacagcaaataatccagagctggtttgagccggctctatatacgctgaatcaattgcttgaaaagagaaaggaaaacctacgccgaattaaccgagatgaaaataacgcggctgtattaagagatgagcttgttgaatccttggcatatcaacatggcattactttttatttcgctggagaggttatcgcaagtttaggtcgagctaaaaagattcgatttttaggacggtttatccaagccgctgaagaggggaatcaatga

SEQ ID NO: 63647 - DNA, 693 bp, Acinetobacter baumannii
atgaatactcttgctgaacgacttaggtatgctatggaagttttaccccctaaaaagattaagggtgttgacctagctcgtgctgtaggagtcaagccaccttccgttagtgactggcttagtggaaaatcaaaaacaatggaaggagagaatcttctaaaggcttctaaatttttaggtgtaaaccctaattggctagcatcaggtaatggttcaccacatgagatgattaagaaaactaatgaggaagatctttccaatattctatttagggacctgaagttacataaaattccagttttagattatgttcaagctggtttttggcatgaagttgcctacgacggtagttcaccccatagctatacttatacagattatgtaagctgtagtcctgaatctatttttagtgtaattgttcaaggcaaaagtatggagccagattttaaagaaggtgacatgctaattgttgatgcatcaattaatcccaagccaggctcttatgtaatagctcaaaatggctctcatgaagctacttttaaaaaatatcgggttcttgctcatgatgaatacgggagagatgtttttgaattgattcctataaattccgactttccaactttatcttctgttacacatgacatcagaataattggtgtagtagttagacatatgagagattttaagtattaa

SEQ ID NO: 63648 - DNA, 240 bp, Acinetobacter baumannii
  misc_feature (213)..(222): n is a, c, g, or t
gtgcaatttaatgattacccaagtgatcagcctgttaaatttctgttaaatcttaaaaagatttttccaagtactggtgatttattattacctgttttatctgaagataatgatctggaaaatgtaacttgggaatcaacctcaaaagactttgaaatcttcaaaaagttattggcaggttggggtgtgattgagcttcgtttaaatgccatnnnnnnnnnntgccattactgcttataa

SEQ ID NO: 63649 - DNA, 1419 bp, Acinetobacter baumannii
atgcagccatctgacaaacaactagatgctcagcatcagaacagtactgcacctttaaaaagagccatgagtacccgccaccttgtcatgttatcgctaggtggagcaatcggtactggtttatttttgggttcaggggaagtcatttcacaaactggacctattggcgcaattattgcctatattcttgggggtgcaattgcttacatggtcatgctctgtttaggcgagctggctgtacatatgcccgtttcgggttctttcggcgcatacgctcgaaagtacattagtccaagtacaggttacatgatttcatggatgtactggctaacatggacagcaacgctaggaaccgagtttaccgccgctgctctactcatgcaggaatggtttccacaaatctcaatgtggatctggacacttatttttgcagtaactattttcgggttaaatatcagttcaacccgagtatttgccgagtcagagttctggctagcgctggttaaggtcattaccgttattgcttttattgtgcttggattattagcaatttttggcttaattcctttccacggcgctcaaactgctccattgtttagtaatttaactgcccaaggttggttcccacacggttttcttcctattttcaccactatgctcattgtcaactttgctttctctggaacagagttaattggcgtagctgctggcgaaactaaagatccggctcagaatgtccctaaagcgattaatgctgcaatctggcgtcttctgattttctttgtaggcaccattattgtaattagtgcattacttcctttccaacttgctggtttaggtggtgacaacgtaagtaatagtcctttcgttaccgtatttaattacatcggtattccatatgcagatgacatcatccgttttgttattattactgcactactctcagccgcaaactcgggattatatgcagcttcacgtatgatgtggtctttatcggagcaaaaactccttccaggtgtatttgcaacactttcaaaaagcggaacacctattgttgctttagttgtaacgatgttcggcgcaattccaggcttattatcagaacaatttgctcctgaaaccatctttaaaaacttgctaggtgttgcagcttttaccatggttattgtctggatgagcatttgtttaagccagttcaatttccgtcgacaatggtaccgttctggacatacggttagcgatttaaaatatgcagcaccgttatttcctatcgttccaattttaggttttcttttctgctttattacatgtttaagtatggcagcagatcctgaaatgcgtgctggctttataggttgcttaatttttactgccttgtgctatctcagctactttattttctatcgaaataaagcttaa

SEQ ID NO: 63650 - DNA, 1011 bp, Acinetobacter baumannii; identical to SEQ ID NO: 44997

SEQ ID NO: 63651 - DNA, 468 bp, Acinetobacter baumannii
atgtatttatttctggattgtgaatttaatggctggcatgatcaaggtacaggggagttgatttcattaggcttagtgtctgccgacggcaaatatgagttttatgaagtggtgagctgtaagaatcctagtccttttgttgaacaacatgtcctgccaattttaggacaatcagctattcctgtatgggagttagttaataagctatgtagctttttatgggaagtgaataaccaagaagatgaggatatcactatagtagctgactatccttcagatatagagttattcaaccgtattttgctcttaggccaagggcagtgtatcaatgtgcctgtattaggtttcctactcgatttgtcgcttactacaaagaattctgcgattcctcataatgcattggctgatgctagagctttgagtaaagattatgcattgaagtacgctcataagatcacaagtgagtga

SEQ ID NO: 63652 - DNA, 1368 bp, Acinetobacter baumannii
atgttaacacctcctcgcttcgttgttttagatgataaaaaagagcacttaggaccaattattgaaacatttaagcttattggctcctcatgtattggtgttcaatataatgaagaggatgaatctcatctatgtcaagactattacaaaggtgtgagagggctatttatagatttaaatttatcaggtagaagctccattggtcataatactcattatgctgaaattataagaattttagagtctgtcatctcaagtgaaaatggaccttttattatgatcttgtggacagataatcctcaagaatgtagtaatttaattcaatatatagaagaacgcttagatcctgaaaagaaatattgtaagcctttacttattaagcctctttctaaaactcaatatattgatgaaaatagcaatatcaaggtagatactagtgaaaacttaaaggatgaaattaaaggttttttctcttctgttcctcaaatagcagcactgtttgattgggaatcaaaagtcttggaggctgtaaatcaaactttaattgaattaataaatttagttccaaatgataaaagaaatttcaatgattatccatccgagatagataaagtactcagttgtattgctagagaaactgtaggaaaaggtcatgttgcaactgatcctaaaaaagcacttaatttggctatttatcctattttggttgataaaatactaaataacacccctgatcaagcaaatattcagctttggaataatgctattacacaagtaggatctgcttcaatcgctgatgaaaaagctgttgggaaattcaacaagatgcttcatttagcggtaactggacatgagtcaatgagtccttatgattggggagctgtagttgaaataccttctgagatttttaatgatgaattttgtttaggacactttggatataatcaaaattaccttattaaaaacacattttgttttaatagcacagaaaagcttaggcctattctaatacgtttaggagcatcgtgtgattatgcacaaaataagcaaggacctattccatatatttttggattcgttgttgaagcagaaaaataccatgaaagagaaagggactttttagatccagataaaaaatttataagtaaaaaactctctgactgggtatcaccactatttagttatagggatgaagatccagcattttatatagttttaaatcttcagttagtaatttctaaagttaaaggacagcttgatagttatcagaccctatacaggcttcgagaacaattgctgaatcaagttattgtaagagcaactacttttgcttctagaccaggcattaatgaactatatgtaagataa

SEQ ID NO: 63653 - DNA, 1257 bp, Acinetobacter baumannii
atgtctagcactttaaaatttcttgatttattcgctggtgctggcggcttgtcagaggggtttattcgtgctgggttcaaaccaattgcccacgttgaagcagatgcctcagcatgttttacactgaagacacgtcaagcattccattggttaaaaaacaataattcgatagatctatactcaaaatatttaaaaaatgagattactcgaaaagaattatatagtgctgttccaataagtgaaattgattcggttatcaacgagtttatcggcctagatactttagataaaatttttcaaaaaatagatgaacaacttggtaaatcgaaattagatttaattattggggggccaccttgccaagcctattctcttattggtagagcacgtggaaatatggatgatgatcccagaaatcatttatacaaatactatgctgagtttttgaaaagatataaacctaaatattttgtctttgaaaatgtgctgggacttctgactgcaaaaaaccctaatggtgaactctactttgataagatgagagccctgtttgtcgaaataggttatacaattgagtatagagtactatctgcaaatgaatatggtgttctacaaaatcgtaaacgcattattttggtaggcaaacgaggtcatcgcagtaagaaatctttttatcctgaacctgaacaatggctgccacaagctaatgtgtgggatctatttaaagatctccctcaaatatctgctggtggaggccaaactaggccagtagagccgatcagtaagccgtcggaatggcttgaacaagctcaaatttattcaaatcttcctctaacttggcatgaagctcgtccacattctaaacaagatttagaaatttatcagtatgctgtcaatttatggaatactgagaaaagacgattacattatgatgatttacctgaatatttaaaaagtcataaaggtagaaattcctttgtcgatcgctttaaagtagttgctggtaatttagctgcctgccatactgttgttgcacatatatctaaagatggacatcattatattcatccagatattgagcaaaatcggtcgattacacctagagaagccgctagaattcaaagttttcctgacgactactattttgaaaatgtatcaggtaagcctgcacgtactagtgcttttaagcaaattggtaatgctgtacctgttttacttgcgcaaaaaattgcagaaaaattattaaaggattggtaa

SEQ ID NO: 63654 - DNA, 1458 bp, Acinetobacter baumannii
atgcttctcgccagacctagcatcgaaccaaatgaatgcttagttagttatttgattcgaatatcagagaaaaatggctttaagcacataggtcatttgctgcgtcacgctggtttggcttggaaaaataatcgtgtaccagttcatcagattttaactggtgagtttgatctcaatgtgtatttattgcagcttgggttagcaacttgctcctctaaaattgagccaatatctcactcttttcaaaatgttattgatacgccctatctaattgttaaatatccaaaagtatgtccagattgtattgaagaatttggattctgtagatttgaatggagcttattgccataccttgcttgcgttcgacatgggaaattattgatagatacgcactctggtactagcaaacgactgaattggtatcgtaggtatttaaataagtttgatgatactgatgttatcaattcattaagtgatgttgctccgtctgaggcaatcaaactcagtcaatatattgaagtactgttacaaggaggaaatggaatttcttgccctaaaattctgcaaggtttggagctccgagaatctcttagcttaattcattttattgctcattatagatcaaggttattgggtggttcgtttcaacctctttcaatgattaatagtgagcttgctcaacattatcagtatgtatgggcaatgcttgagaattggccagatgcctactacaagtttctcaaccaatatcttgagcatccgatgagcaaaaaaggtgttggtggcctacataaacattttagggatttatatgagtctctacatcgtcagagtgaaaacaaggggattgctcggataaaatttgaatttgaccattacatagagaattattggcctagtgtcttagagtcgaagcgtataacacgcatccagttcactacccgagaacgaaatgttgtttccagaaaggaagctgccaaaattcttaattgccatccagatagagtagataaattagtacaacaacaaaagcttacacctcgtgtttttgaagggaaaaagcactattcccgtgaacaggttgagggtcttgcaatacaggtatcctcaaattggacgatggatgaggcgtgtgaggcattacagctcacaagatatcagctaaagcagttgttagatgctggtatattacatacgcttcagcgcccagatatgtttaaccgagattggatcgttgataaagtacaatgccaagaactgatagcaagtttgtgccagaaggcacggaagaacattccagcttcgggagtattatcaatgacaagtatgcagcgcagaggctactcaatagttcgattagttctagctatgcaaactgggcagattgaatttggacaactctacgttgttgatcgtcctttaagttttaagcagtttacagattttgctttcaaatag

SEQ ID NO: 63655 - DNA, 558 bp, Acinetobacter baumannii
gtgttacttgatcgatcacgaccaaatgatcagcaaacatttgatgattatttgaatgatttgggaaagaaaaatggtttttcggatattaaagcttttaaaaaatttctagtaaattcttctaaaaagtggtatcgcacctattctgttaataatttggatagatatagggctatttctgggctatttcttgagcttggtattgatcaaaaagaagtatcagatattatgcagatacaatgttttaagtgtcttgatcgatacccagagatatggtcatggaataagatagctgagtacgaatgcttagggccagaagcttacaccagtaaaacatgtgagccattacagcaagtatttaaaactaaaaataaagaagaatattgcggtttaataaagtgttctatgagtaagcttgggctaagtacttcaccactaccagatgggttctattttgcggatctggcttcaaaagaagaactaatgaaacgtttccgaaactatagtgggatgaaagagctttccatagataggctgatagcattaagatctcagtaa

SEQ ID NO: 63656 - DNA, 996 bp, Acinetobacter baumannii
atgaaaactactttcgaggatcgtccattcattaaaagtccatttcttacaaaaatggtgaatctatttgattctttgcgcaataaaaagaaaaaatatggtgttgcttcttgcatgttggtaactggagaatctgggagcgggaaatctgagttagcaaaatattatgcaaagaataatccgaaaatagaacaagcggagcggacacatatccccgttctacactacgaattaagatcagtttccacaccagaagaattcctaagatcgttgttggtcacaattggcgatccacagtgcggacgaggtgcgagaaacaaaggtgaactttatgagcgattgattacgttgcttaaggtggttggcatagagttgctgatccttgacgaaattcaggtgatcattgaacgtcgtagtgcaaaggttgttacaggaattgcagatttatttaaagacctaatcaatgatacagagataccgattatttttatgggaatgccgtggagtagatatcttgttgaatcaaatcagcaattagcacgtcggatatcataccgctacaccattccaccttttaggattagcagtaacgaagatcgtgatgattatagaaggctcttgatgtgcctatcagaggcatatggactttctaaaaagattaaattggaagaaatgacaatgtcgctaaggtgttttagtgcaacgagtggaaatctagcagctacggctaatcttgttcgtgatgctaggatgatgtctgaaatggaagacatgaaagtagataaggatttgtttgctgaggttcttagcagttatggtattgatgagcgaaataatgcttttttactaccgattgacaagttggtgttgagagaactcatcgttcattcagactggcattttgggtatagggcaaataaaaacgcaatcatcgatgctgaatatgttgagtttggcgtatcaaaaggcaataaagtgttttgtttggcagggtaa

SEQ ID NO: 63657 - DNA, 1917 bp, Acinetobacter baumannii
atgtctgttgagttatgggaacaaggtgtaatcattgagtttaacaagggtattccttgtcatcgtgctatggtcaggtctgtaggaaaagcagaggtcattttagtagatattgagaatggagccgtatctagattgagtcgagaagaactaggtacagtttatgcttctggaggtatcaaatttcttgcggaatcgcaagattttggggatcttaagtttattgatctttcagaagctgagcagcgtgaaaccaatagaaaatataaatatatcaaaaggcttaaagaaaatggtattagtaaaatcactgagaaaagtgctagaaatacgatagaggaagtcgctttagaattgggtgagaaagcaccacattggcaatcagtaagaagttggtacgctagttttgtcgaggcaggtctaaagatacaaggtctttatcctaagcatcgatttaaagggcatagaaaccctaagattgatgctaaagttattgaaattattgaatattgtgcaaagcgatattacacactcagccagtcgtcaatggcttcagtggttcgtaatgttgaagctaaaattatgtcacacaatttagatcatcctgatgcaccgcttcagaagccaacatatcatacagttcagaaccgtgtgttaagtgggctttaccaaactaagagaaaagggcgatatggtgctcgagttttgcaggcggagcttgctaaagcattaagtgggataactactactagagtcttagagcgtgtcgagcttgatcatactgagttggatattcatgttctacatgatgactataagactttacttggccgacctaatatcactgctttgatagatcattattctggaatgttacttggattccaaatttcttttgaagctccttcatatgcctcagtttgtttggcttgtttgaatgcattcttaccgaaaaatgactttatgaacgagttgaaattggacggttcttggcctgctcatgggattccttcgacgcttgtaacagacaatgctaatgagttttgggggaagaaatttattgcaattgcggatgaaatagggacagtttttcagtattgtccgattcgtaaaggtaattataaaagtcgtattgaacgtttcttcggtatagtcaatgcactagtgcttgacgatttgcctggtgtggttagaaaaattggtaaatctggtgatggctatgacgcaagacaagaagctgcgctcacattttcagagtttaaacgctattttgtgaagtgggtgacagaagagtatcaccatacacctctagaagactcagatttaacaccttatgaaatttgggctagctcggaggagtgcttcccagtgcccgtagaagataaaatggaattgactactattttactggctactgccacacgtacgctgaataaaagtggtatcgaaattttttcgatgaactatgactcaggtcttcttaaagatttatatagaagagatgggcctggggaagtaactgtaaaatacaatccttttgatattggttatatcttggtgctagataagattaacaaggtctatttaaaagtagattgcctgaaatattcttatgcttccaatctttctgagtttgaacataataagattcgagctgctgcaagagctgctcgacaatcaaaatttgataacttgaatctccaaaaagctaaaattcaacttgctaaagagcgtgaagaatatcatgcaagaaatgttcgaagaagtaagcaagtaacaacatctaaagccgcaagatctgataaaacaggtgtccctaatatcagccttgtggtggacaattcacatcgtacgatgaaagttgattttgaagatgatggggataatcttagcttaaatggatggagtatgggctaa

SEQ ID NO: 63658 - DNA, 636 bp, Acinetobacter baumannii
atgaatagccctgcgcgcaaaattcagaaatctgctgttaagaatattgttcgttttccttcaataaaagcgaatgatggaaagacaattcttgttgaatccatcttagagtcgaaatattgtcttcatttagagtttgacgctgaggtagagacatatttcccgcaacctcgaaaatttgaagtttctgataatgatggagaatgtaatatctatacacctgattttgaagttatttatacttctggtgttaggaaatatgtggaggtcaaaccctctgaaaatgttcaaactgagcactatcaacttctcttttctcgcttttccaacttcttgcagggtactaatacagacttcttgatagtgagtgaaattgaaatctatcagcagccattactatcaaactatgaaaagctttatcaatataaaaagcgccctttattaaaaatgaagaatcttcagcagtgtgccgaagatattaatgattcgatgccattagcacagttagtgcatagacttggtgaccgagcacacttgagagaaatatattcatggattgcgctagggtatttgcgatttgatatgcgctctgagccattgagtatgacaacagaggtgaaattcgatgtctgttga

SEQ ID NO: 63659 - DNA, 189 bp, Acinetobacter baumannii
atgaaacaaaacactgcccctagtcaaacgactgcacgcttatatcaacacccaactgttgaggagcagcgcccttctcgtctagcagcttttaaggctaatgtaatcgactttcttaagtttattgccctttctattttcctgtgggtagtcatctcatctgctatcacttggatgtttggaggctaa

SEQ ID NO: 63660 - DNA, 2664 bp, Acinetobacter baumannii
atgatcaatacatcgccattgctgaactatgtctcaagtcatcatgatattaaagccattaatcagtggcgaacggatgtagaaaagcaattgcaagattcatatgaaaatgggcaatctattcgagaaatcattaaagctcgttcagatttagtagatgaagcgctcgtctttttatggaaacatgcagaacttgaccagtcaaaactaggtctttttgcagtaggtggttacgggcgccgtgaaatgctaccctattctgatgtagatatcatgattttgtctgaggatgaaatcagtgaagaaaatgaaaaacgtatctctacatttatttcctctttatgggatgtaggaaatttcaaaccaggtattagtgttcgcaccattcaaagctgtgttgaacaagccgctaccgatttaactgttgccactacattaattgaagcgcgtttaatcacgggcaatacgcaacttgcgaaatggcctcgccgtattgtttcacagacatggacagacaaaacattttatgacgcaaaaatggctgaacaagccaagcgttatcaccaacacaacaatactgaaagtaatttagaacctgacattaaaaatgcaccgggtggtattcgtgacattaatcaaattggctggattgccaaacgccacttccgagtgaaccgtatttatgacttagtgcatttaggtttcatttcagagtttgaattggctgttttagaagaagctgaaagctttctttgggaaattcgacatcatttacaccgtttagccaaacgtgatgaaaaccgtttactctttgaccatcaaagagaaattgctgctaaatttggttacgttcgtcaagaaggccaacctgtaaattatggcgttgagcaattcatgaaacgctactaccgtacggcgcagcaggtttcaacactcaatgaaatgttgctggcgtattttagtgagtctgtcattactcctcgactccccaactatgaacgcaaaattgaagttgtgaacgatcactttaagattgtcgacaataaacttgcagtacagcatcataaaatttttgcagagcatccgagcgcgatcttagagttgttctatattttagcgaatcgaccagatattgaaggtattcgcgctcgaactttgcgcttactcattcttgctgcaaaacgaattaaccaaagttatcgtgataacccagagcatcaagcactatttatgtcgattattcgctcaccatatcgactatacgataccttggtcgcgatgaaacgttatggtgtgttaggaaactatattcctgcttttggccaaattatgggccttatgcaatatgacctattccatatctatacggttgatgctcacaccttattattgctgcgtaatttaaatcgttttagagaacctgaatttgccaaagaatttcctgtggtaagttcggtgttccaacgtcttgctcgtcaagatattgtctttattgctgctttattccacgacatcgcaaaaggccgtggtggtgaccatagcgaacttggcgcagaagacgcgattgagtttggacgtgcacatggctttacagaacgtgaatgcaaattaattgcatggcttatacaaaaccatttgctcatgtcactcacagctcagaaaaaagatatttctgatcctgacgtcgtgaaagattttgcagaaaaacttggcgatatggagcatcttgattatctctacactttaacagttgccgatattaacgccacaaatccaaaactttggaacacatggcgcgcatcgcttatgcgtcaactttatacgcatgcccgtgatgtaatccgtacaggtttaggtcgtcctgttgactaccaaatgttaattgaagacaccaaatttgcagcaagtgaattactggtaaataactttgcattggctgatgtcgaaaaagtatggcaagaacttggtgatgaatacttcattaaagagtcggcagatgaaattgcatggcacacacaagcaattttaaaacatggtgataatccagagccattagtcctcttgcgtgcccaccgtaaagcagctcaagatgcggtgcaaatctttatttatacacgtgaccaacctaacctgtttgctactactgttgctgttttagaccgaatgaacctagacgttcaggacgcaaaaattatcacagcaagtaccgcatttagcttagacacttatgttgtactcgaccgtttcggtacattgcttaccgacccagaacgtgaagaaaccgttaaaaatgcattagtgaaggcgcttagccaaccagaccaatacccgggactcatgcaacgtcgtattccacgtcaattacgtcacttcgatattgaaaatacagtcgacgtaacattaaatgaagccttacagcaaaatatggtcgaaatttcaacactcgatcaccctggcctacttgcacgcgtgggtggtttatttatgatgcaaggtttagacatccattcagcccgaattgcaactttaggtgaacgtgccgaagatattttctttgtcaccaaaaaagatgggaaaccgctgaatcacgaagaggtcaaactcttctcggaaaaactgaaagctgcattagatgaagcatctaatcaaatttgtcagcactaa

SEQ ID NO: 63661 - DNA, 216 bp, Acinetobacter baumannii
atgcaaaatttagaaaataatttaagaaaatataaagcaagttggattgcgctgttttgtataatttttcttttcattcttacaatacaactaagtgaaattagtaaaaaaattaactatatagaacttgataattcaggtttagaaaagtctttaggcgaaataagtgaaaatttaaatgagattagaaaagaatatactgatagctatatttga

SEQ ID NO: 63662 - DNA, 381 bp, Acinetobacter baumannii
gtgaaatatatagctcaaatcatagaatgtaatgagaatctcgaattcattctaaaaattaaggttcgtaatgaaattctagaggtatttagttcttcaataccctcatgtattgatctcaaaaaaaattaccttatagatttagaagctactatttttgatgattaccttattgagaaaacacattattcccatcaaattaagcaaatagataatagtctaagatatgaaattattggatatttaaaagaagggaagctagatgttaatggcttaatttttgaagatgatattttaaatagagattttttttacttagataacaatacagtaaaatggactgtcgatagaattaatgctgactttgatgacagagattga

SEQ ID NO: 63663 - DNA, 1236 bp, Acinetobacter baumannii
atgactacacttaattatacggtaaggtttcaaaaaaccgttttagcaagtttaattggtctttttataagccaatcgagttttgctcttgaagagctttctgatgctggtttgagtgaaactactggtgaaggtattgctattttacctcaaaacacttatatggtatttcgtggagcaggagcgaacgaaaccacaaatcaaattttaactgaccgtactaaagatacaggctatatcaattatgtacctgttgggccgttaagtatgacggctgcagataccaataaaaatggtacgattgattcgggtgaccgtgcagtaggtaaagctgatatttttctttatggtttagctctttctaaatctgataacgatacaaatacccgtctcgcttctaccgaggcagcagcggccatttcgagttggggtacggctattaatccgtggatttttaaagttgcgacagaaaattctgtgccgaatttcagtgcgacaaattgtagtggtgcagctgatccaacttgccaagtaacctatttagctttagaagcgcctttatatgaagtagggacaagagatactgctgggcttgatgcctataaacttaaattaggtttatggtcagatatttttgttcgaaatccaaataaaataaatggtgcgacagatcaatttaattatggtgactctaatggtttgatcggtacgagtactgatgcaagccgtgcgaatcgtttacgtttgcaagctatttggaataactttagtttaaacggtagtcgtctacagctcttccaaactttaggtggtgcaacatctgctggtggaatgagtcccttttataatgatacgttaggtttcgctggtgttattcgtttaaacagtggcgatgcttctaatttaagggcaacaattactgcaaatactccaacctctacagtagggccatgggtaaaccgttatagtacccaatatacaggagcgcctagcaataattcccctagttccgattggttatatcgtattcgtagtcaaacgactactattacttcaacaggttcatggactgcgccaactgacagtacaatgaataatgtattgcgtttgagtactcgtgaatctggtactggtcaggggaatttaattactccagctattaatggagggcttgcaccaacctttatgcaaacgaaggtttatatctttataacccgaatattaatcttgtattag

SEQ ID NO: 63664 - DNA, 777 bp, Acinetobacter baumannii
ttgagttcagatggtaaaaactttagtttggaactagcgcgtattccgaataaacctgaaatttataagaaaatttatactgattatactggtaatgatagtagttatctcggatctacctgtaatgtttaccaatgtggaaagaatgtaactttaggaggaagaacttatcaaggttcgagtgcaacacatagtagtatctcaattggttctactgtttataatgcagccacaaatactctagaggcatttaaaggaaataatactcaagatgctgtaggtatttcttttggaaaactaccaacaggaacagttgctgctacaacacaaactagaaatttttatcaattacaaaatcaagaacgtcgtgtaaacagctatacatgtagtttaatttttacttgttatgattggcaataccgtacagcaacaggctggacaggaaatgctggttcaggcttaagattcgattcccaaggagcaaactgggcgaatattgatagtactgcttattataatccaacaacaaatacgacaggttataccactactactgatgcggggaatggtgctcaatttgttgtaccaaatggtacgcctttacctgatgcactgtataacaatgcacgttggtatacgactacaccaaatgcagatataaacacgtataaattatcgggtgcacagattagctcttcagttagtaataacatgggttcagctgttattgatggtgttttaattcaacatttaaaactgacaacaaaaggtctctaa

SEQ ID NO: 63665 - DNA, 1182 bp, Acinetobacter baumannii
atgagaggctggagtctctggagtaaacatggcgatctttgtccaactactagaacttcagtaaattgggaatgggttaaaaatgctccattaaaacccgactttgtattagaaggaggcaattatttattatcccctcccccaacttatgcagatgcccatgaggacttatcaattttgactacttctggtgatgtcaatttaccttttgaatgtcatcgggatagtagcgctgcatgtgctttagcatcaaattatgcggctcaaattgcagataagtatccgaactattggcctgaaactataagggggttattaatacattcatgccaatatactaaagcaatggtatcgcaatataataatttaataattaatgatcgccttagtcctaaaaaagcggctgaagtcttacttcgtacagtcggatatggagtgccaaatcttgaagttgctcttaatagttctaataaccatgccatcattgtaatacaggatcaattaaagccatttaaaaaacataaatctgatgtgcaatttaatgaaatgcaagtcatacaattaccttggcctcaatatctcctttccaaaattggggataaggatgttgaattaaaagtaactctttcttattttattgaaccaaaccctcagaacaaaggctttcgtagtagattttcttatcaatcatgtggacttcgctttaaaatgattgctcccacacaaactgttaaagagctgaaagcaagtattaataggcaagcaatgtatgatgaatatgaagctactacaggaaatgatagcaataactggtttttaggaactaatttaagaactaaaggtagtgttcattccgacacatggaaaggaactgcagcagagttaatgagtatggatcatattgccatttatcctgtcactggatggtggaaaagttctaaagcgcagaaacgatggactcaaaaaattcgttattccttaattattagtattcaagcaaaagaaaatatttcaatttctgaacgagtcaaacgagctacagacctgactacgttggatgcgattgaaattgatatttcagaaacagatgaacggattcaagaacccctaatggagctggttataaaaagaagaaaagaacttgaggttgaaggtaactttttattggagtcgcctcaatga

SEQ ID NO: 63666 - DNA, 771 bp, Acinetobacter baumannii
atgaagttaattgaaaataatgcttggcagtatctatctgttaagttacccgccgtaggtgcattcatcatgctaattttattgccagcactacaatggggtgttgattatgaagttattcctgaaaaatatcatgcatttgttactggtactttaatgcttgttctgtcatggattggtaagaaaatttctcaaccacgactcaacggcccgcaattaacaggccagttagtaggaatcaacactttaatgaatattcctacaacgacaaagtttgacgaattagcttggatggctgaagcaaaaaaacacattggtctgcaagaaataccaggtaaacagcacaatccaactattttgaaatggttaaaggagcttaaagcttggtgggtggatgatgaaacagcgtggtgcggtactttcgttgctcattgcttgaaatcagctggaattgcttatcctaagcattggtaccgtgcattggattatgtgaattatggtaccaaattagctaaaccagcttacggttgtgtagctattaaaacccgtaagggaggaggccatgtctgttttgttgtaggacgtgataagtctactggaaaacttgtttgccttggcggtaaccaatccaatagagtgtgttacgcgctttatagtgattcagatttccaagagttccgatggtatggacgtacacctcagccagcaagtaaacgttattctttaccgcaattaaagggcgtaacagctactagggtttctgaagcctaa

SEQ ID NO: 63667 - DNA, 225 bp, Acinetobacter baumannii
ttggtcttagcaaataaccatttgaaagattacggtgagcaaggattagcctatacattacaacagttggatcaggcgagtatttcttatattggcgctggattgaaccaaaaagatgctcacaattactttgaaatcacttttgagactaagcactatgcgatttttaatggttattggcatagagacacagcctatctggattatgacttttatgcgttatga

SEQ ID NO: 63668 - DNA, 930 bp, Acinetobacter baumannii
atgaataaatcaatggtgtatgcctatactcgtgttgtaatcacaatgctgttttggggctcggcatttaatgcgatgtcttatgtgattcaatatatgccacctctttcagcagcagctgaacgttttacaattgcaagccttggtctatttattctttttgcagctataggaaagctacgttgggccgcattacggcaaaatttagctatctatcttattattggaattataggtattgccggttttaacctaggctgtttctatggtttacaaaccacctcagcagtcaatggcgctttaatcatggccacaacacctttaattactttactgttaacaattttacttgatggagaaaaactgacgcttaataagtctattggtgttgtatttggcttaagtggtgtactttttgttattagtcatggccatatttcaacgctactacacttaaaaatagcaatcggtgacttattcatcttactaggtggtgtcagtttttgtttagcgaatgtgctatcacgccgttatgtaaaaaatgctacacctttagagaccacaaccttttccatgatgttcggtgctttgactttaatcatattaagtgtaatttttgagcacccttctcaagcaattgctatggcgcctatcactgcacacttagctatgggatacgtcattatttgttctaccatgattgcttatttattttggtttaatggtattcaaaaactaggtgcaggccgagcatcaatcttttttaactttgttccggtttttagtatgttagttgccttgttagctggtcaatcacttaatatctggcaacttataggcacagctttagtcatgcttggcgtgatgagtagtggaggatttattcagattaaacgtcctgcacttatagctaagccttgcacaaagtaa

SEQ ID NO: 63669 - DNA, 156 bp, Acinetobacter baumannii; identical to SEQ ID NO: 46103

SEQ ID NO: 63670 - DNA, 291 bp, Acinetobacter baumannii
atgctaatggcagcctataaaatggtaaatcgattaaaagagcaaggccataatgcactttttgaacaagcatatatgtctgagttaaaaaaactcattatgtttcgagccgaatttcaaaccacaggttttttctatccggaaatagccatgtatatggctcgaccagataaaatattgcatgctttttatgtacggcatgaccgctttagagtaagaattgatgatcaggaacacaacctttctggttatattgcctacgtaaaagatttcgaaggaggggagatatga

SEQ ID NO: 63671 - DNA, 894 bp, Acinetobacter baumannii
atgacttaccctctatttgaacttaagctgctagctgctcttgatcatgctcaatttgaagaggcaatttgggcatttgaaattgatggagacatttctacattattactgattgactatgcattagaacaatttcatcaaaaaaaagttcaagctgatgaagtctatcgggttcctgaacaaaaaattaagaaaattggtaaacaaaatttaggtctagaaaaaaatgaatcatatacatttgccgagctcttacaattcttaatttttactcaggcaaatgatgttaaagatgccttaagcaatatgctgttgggttctgttgagcaaacacaattgatcttgtctaaaagagcagaagattaccagttagctttaagagcacctaatcaattaaaaaatctatttttgttggtaaaacacatttatagctatccagccgagctgaaaaaacttttctttattagaacactttcttttaaaaataaagtatatcaaccgattacgcctttgcttgctcatccggtactcacttcggttttatatatctcacatacctttagacagatttatatcacttattccgaacataaccggagcattggttttttctcttttctggatgatattcaccgtctggagcatttggttccttactatcattattttcaagaagggcatgttgaggcaaaaaaatattcttctcaaacaggtattatcaatattcttggagatacctattttggtgaaatgtataccgaaaagcgtaagtcgagagggcaaacagatgccttacagcaatatggatatcattattcatttgaaaaaatacagccctttttaggtaaaaatgacatcaacatcgctaactttgaagcagtattttctttatag

SEQ ID NO: 63672 - DNA, 276 bp, Acinetobacter baumannii
ttgcatagccagattcaagaaaatggcaaattcatttatggatattttcctgcttatgatcgtgatatacggaactataatacggtacgtcactgtacttcgctttatgcgcttttagagacttttgaagtacaagataaatctgaatactggcctaaaattgttgcagcaattcaatacgcacttactactttctataaagaaaatactgcttcaaagttagcgatgttgatgtcatttttacctaaaaagggctgtattttttcaaatgaataa

SEQ ID NO: 63673 - DNA, 285 bp, Acinetobacter baumannii
atggtgttaacttcagagcagcaggtccatcatcaatttcacaataatcactaccgtaaaggtattggttttgatgaacactgttcagtggtttttctggagcaggaaatatatggaaaagccattattcggggcttaagttatgacaagccgaacttttttgatgaaacaaatctgaactatgcaattaaacaaaaatatcgtgcggcaaagccggaaattagacttcagtcactacaagaagtgtggacttttgatacctatgcaactttttatgaaaattga

SEQ ID NO: 63674 - DNA, 774 bp, Acinetobacter baumannii
atgattttgggtacattcctgaaaaaggatgtatttacgttgttggctggcttcggtgcaatggcagccgtattaatgttagttttccaaaatacaattttgtcattggtcgcgagtgtacaaattgcctcttatgacatggtacgtattggggactggattgaaatgccatcgctcaatgctgatggtgatgtcattgatatttcattgcacacggtgaccgttcaaaactttgataaaacatacaccacgattccaaccaataaactagtgacagacacttttaaaaactggcgtggtatgagtaatgcgggctgtcgccgtatgaagcgttctctttatatcgatcaaactagcgtgcacttcatgaccgaagaagagcaacaaaaactcaaagattttttattgctagatcaatacctcaatgccaagcaatctgagattgacgaatttaataagcatttaggtagtcagtcacgttataacaaaagacgcttaaccaatattggaacatttagagcatatgttgaattctatttgcgccagcataaggggattgctcaaaatcaaacgcttatcgttcgccaactacaaccaacgagtgaaggtctaccattagaaatctatgcatttaccaataccaccgcatgggtttcttatgaagcaattcagtccgatatttttgatcatctgattgcgattttgcctgagtttggcttaagagtgtatcaggcaccttcaggccatgattttcagaaattaacagtagaataa

SEQ ID NO: 63675 - DNA, 375 bp, Acinetobacter baumannii
  misc_feature (358)..(367): n is a, c, g, or t
ttggatttttttaatttttatcgtgatcttcaaggtgagttaagcaactatccttggctagaaatgctagtttcgctcacacttttgatcctttttgctgcattagcaaatttcattgccaaaagaattattgttcggggaatacgtcatttagtgactaaaattaagtcactcaaccagtcggtttttgcccagcatagtgtcattaagcgatttgccaatattgtgccggccattgtcattatgaacggtattactaccgttccgcatttgtcggaaaaagcggttgctttggtacagatgggcgcacaggcatttatttttctcacgattgcgctcaccattagtgaattattannnnnnnnnnatatttaa

SEQ ID NO: 63676 - DNA, 699 bp, Acinetobacter baumannii
atgattgagcaaattcaaaaaagatcactggtcgatgaagtgattcatgtcatacgtcagaatattaaaaatgacatttggaaagtagatgagaaaattcccactgaacctgagcttgttcaaggtttgggtgtgggccgaaacaccattcgtgaagcaattaaaattttagaatatttaggtgttttagaagtcaaacagggactgggtacttttgtacgcaccaaaaatgacttttcaattgtgattaattcaattcatcattctgatttatatgaacacgtagaagtaagatgtttattagaaatcgaaattgctaaattagctgctagacatagcacgcctgaagatatgcgcgatgttatagcgtgtttagaacatagagcagcaacaaatcaacaagatgttgctaacttcatgttaagtgataagaaactacatttggcaattgccaaggcgactcataataaagctttacaggcaacttatgagtatttcttaaactcaagctatcaatacaccttagagctagtgactaataaaaatttacctgacccaaaccagcaaatacatagtgaacttgttcaagctattcaacacaagtctgagtcagaagccatgcgagttgcggagtctatgttgtcgcccatattacgttcgctagattcaattaaagctgactttgtccaaaaccactaa

SEQ ID NO: 63677 - DNA, 396 bp, Acinetobacter baumannii
gtgtttaaagaaaataaattgttattagcaaaagaaattggcgatgaacgctggtctgttcccggtggttgggctgatgtaggctactcagcatcggaaaatgcagaaaaagaagttttagaagagacaggattgcgggttaaagccattaaattattagctttaactgatagaaccaagcaccctcatcctccaatgtttttacatgtgtataaggcatttttctggtgcgaaattattgatggcgagcttaccccaagtattgaaacaccagaagttggcttctttagtagagatgaattacccccgatttctaccgcacgtgtaactgaagaacagattcaacaattttttgattatttagagtcaatccctgaagcaacgaagtttgattaa

SEQ ID NO: 63678 - DNA, 906 bp, Acinetobacter baumannii
atggaagagttcgaacgccgtggcggtcaattggtgattcaggatgcgggtatagaagagttagaacaactcgcaaacgactatgagcttgtattactcgccgctggtaaaggtgaagttgttaaacagtttgaacgtgatgatgtacgaagtgtttttgataaaccgcagcgcgctttggctttgacctacgtcaaaaacatgaagccaatttcaccttattcacgtgtgacttttaacattattcctgaagtcggggaatacttttcatttccggcactgaccgtgaatgggccttgcgacattatggtgtttgaaggtattccaaatgggccaatggactgttggcaagatgtgaaaacaccagaacagcacctgcaatgtagtcttgacttactcaagaaatttgtgccttgggaatatgaacgctgcgcaaatgttgaattaactgatgctggcggttatttggcagggcgtttcccgccgacggtacgtaagcccgttttaaccttaccgtctggcaaaaagatttttggcatggcagatgccttagtggtcaatgatccaattaccggtcaaggctcaaacaatgcggctaagtgtagcaagatctattttgatgccattttagccaatgataatcaaagctttagcgaacaatggatggttcaaacttttgaacgctattgggcttatgcagaaaaagtcgtggcttggaccaatagcttgttattaccaccagagcctcatgtcgttgaactcctagcatctgcaagtcagaaccagagcattgcttcaattatggccaataactttgatgacccgcgcgcatttgctccgtggtggtttgatgcaaatcaggctcaagtattcttagcttcaaaaaacacagcaaaagtggcctaa

SEQ ID NO: 63679 - DNA, 531 bp, Acinetobacter baumannii
atggacacaattgacactttagctttacaagcgattaatgccgaaaacccaagagaaattcgtaatttgcttggtcagtttgcaactggcgttaccgtgattaccactcgtggtaaagatggccggaaaataggtatgacagccaattcattttcatctctgtcgttagatccgccattaattttgtggagcctttcaaaaacggcgccaagtttgcctgattttgtagaagctgaatattttgctattcacatgttggcacaagagcatcatcagctttcgggacattttgctcgaggtgcggaagataaatttgcaggcattgcccatcagcaatgcaatgcaggcgttccaattttgacggatgcactcgcaaccttggtttgccgtaatgtaaatcagtatgaaggcggggatcacctgatttttattggtcaaattgaacaataccaacagcgtcaaggtgagcctttagtattccacgcaggaaaatatcggattgccgctgagcatccagaattagcacattaa

SEQ ID NO: 63680 - DNA, 939 bp, Acinetobacter baumannii
  misc_feature (17)..(26): n is a, c, g, or t
gtgaacagtatacggcnnnnnnnnnnaaatgctttgcgtgatgcgcaccctaaagcgcatggatgtgttcgtgctgaatttcatgtatttaaaaatataccagctcaacttgcaaaaggtatttttattccagataaaaactatgaagcatggattcgtttttcgaatgcttctaatgatgcttctagagcagatattgaaaaagacgcacgtggaatggcaataaaaatcttagatgtatcaggtcagaaaattttagaaaatgaaaaagaagctacaactcaagactttattatgattaatcaccccgtcttttttgtaaatgacgggcaaagatacctttcttttatgaacgatctaaatagccataatatgatcagaaagcttcatatgccgtttgctttaggttttaaaggtaccatgaatgctttaggtgcgcgtaattctaaaatttcaaatccattatatacatggtactggtctatggtgccctatcaattaggattaggtgttgaccgtcaggcggttaaatactccgtaagaaattgctctactgtgtctgcaactctacctgatcaccctagccataattttttacgagatgctttaaaagatacattgcaaaagcaagacgtgtgtatggaatttcttatacagccaagaacttcgactaaaatgctggttgaagatgcaatgaccgagtggaaagaaaatgaagcacctttttatcaagttgcgacgattcatattccaaagcaaagctttgatacacctgaacagaatcaattttgtgaaaatctctcttttacaccgtggcatgctttacctgagcataaaccgcttggcgcaataaatagaatgcgtaaaattatttatgaaaatataagcagagttagacacgatatcaactcagctccccgacaagaacccaaaaactaa

SEQ ID NO: 63681 - DNA, 273 bp, Acinetobacter baumannii
  misc_feature (249)..(258): n is a, c, g, or t
atgtcaaaattaatacagcctatcatttttaaggctttgtttatatttactcctcttctgtttgtatcaataggttgtagtgaaacgctatattcccaaacaatcccatcagtaaagtcttcttcagaaaatatcgactatccagagatcgatacagcattaggagaaaagttacaaccgaatgaggacgtaatagctcatcaaataactcaagttattgagaagtcgattcgtgaacagtatacggcnnnnnnnnnnaaatgctttgcgtga

SEQ ID NO: 63682 - DNA, 384 bp, Acinetobacter baumannii
atgcttcattataccaacggaacatacgctcttgagcggtgcccattaagtaaggtacatgaatctggatacggttttcttgaccaatacggtctaagcgaccaatacgttgttctaaaacgtcagggtttgcaggcaaatcaaataaaattaaatcactcgcaaactggaagttacggccttctgaaccaatttctgaacaaagtaagatttgagcaccgtagctttcttctgcaaagtaagcagccgcttggtcacgctcaagcaaactcataccttcatggaacatggctgtacgaatacctgcatgcaaacgaagcgcactttctaaagactcgacaacaggaccactacgggcaattaaaagaacttttttatgcttaa

SEQ ID NO: 63683 - DNA, 1179 bp, Acinetobacter baumannii
atggttgatcaaccttctaccgcaacaactccacattctaatttagatacaaaaacccgtctaaaatcaattttgggcggttctgccggtaaccttgtcgaatggtacgactggtatgtatatgccgcatttacgctctattttgctcatgcatttttcccaaaaggaagtcaaaccgctcaacttcttcaagctgcagctatttttgcagtgggtttccttatgcgtcccattggcgcatggattatggggatctattctgaccgtaaaggacgtaaagcgggccttacactttccgttactttaatgtgtatcggttcgctactgattgctgttacaccctcctacgaaagtattggtgtatttgctccattgcttttggttattgcacgtttaattcaaggcttaagtgtaggcggtgaatatggcgcaagtgcaacgtatttaagtgaaatggcagaaaaagatcgtcgtggttttttctcaagctttcaatatgtcactttaattgcaggacagcttacagctttatgcgtactacttatcttgcaaatgatactcaccgaagaacaactgcatgactggggatggcgtgttccgtttttcatcggagcccttttagctatcgtggtgttccgtattcgtcgtggcttattggaaactcaatcctttaaaaacgctcaagcagaaacagatcagccgaaatcaggaatgtttgctttatttaaacattaccctaaagaagccttcactgtattattcctaactgctggtggtactttagctttttatacttacaccacctatttacagaaatatttagtgaatacttctggttttaccaagcctgaggctactcaaattaccactttagccttattcatctttatgtgcttacagccattggcaggtgccttatcagatcgaattggccgtaaaccgcttatgatcgccttcggggttacaggtgttttattcacttatattttgtttgatacacttgcaaacacgcataactactggactgctttctggctatgtttaggtggactggttatggtaaccggctacacatcaattaatgctgtagtgaaagctgaacttttccctgcacatattcgagctttaggtgtcgcattaccttatgcaattgctgtagattgtaggataagtttataa

SEQ ID NO: 63684 - DNA, 246 bp, Acinetobacter baumannii; identical to SEQ ID NO: 59301

SEQ ID NO: 63685 - DNA, 249 bp, Acinetobacter baumannii; identical to SEQ ID NO: 44887

SEQ ID NO: 63686 - DNA, 450 bp, Acinetobacter baumannii
atgcgcaagaaatatcaatcagctaagcttaaattttatataggggatgttcgagattttaattctgttttaaatgtaactagaggtgttgattatatttttcatgctgcagcacttaagcaggttccttcttgcgaattttatccaatggaagctgttaaaacaaatgtgttggggacagaaaatttattagaagcagccattcaaaacaatgttacaagggtagtttgcttaagcacagataaagctgtatatcctattaatgcaatgggcatttctaaagccatgatggaaaaagttatggtcgcaaagtcacgtaacctagaaggcttagatacagttatttgtggcactcgttatggcaatgtgatggcttcccgtggttctgtgattccattgtttgttgatcaaatacgtattggtaaatctctgtctcttatacacatctga

SEQ ID NO: 63687 - DNA, 450 bp, Acinetobacter baumannii
ttgccgtgggttacacatgcctatgatttaccgaccgtaaatttaggcatgaccagctttctcgatggtggattacctgcagggcccggctggtatgctcaaacctattttcaaaattatgatagcaataaactggttgatgccaatggacaaaaactcggtttacctaaaacagatttaaattatcacgtactggttgagcagattagttatttatcgaatgtccgagtaaaagataaagccagtctaggcataaattttttaattccttttgtgagcaaaatggacatggatgatggcttgaataatgctgcaattaaagcccaaagtggctttggggacattatgattgggccgtttattcagttcgatccagtcatgggtgcgcaagggccgaagtttgtacatcgttttccttctggtcgattttcagcatcttgctcaaaataa

SEQ ID NO: 63688 - DNA, 555 bp, Acinetobacter baumannii
atgttttcagaactcctaagcctaagatatgaaaatatattaaatactttcgatctcatcattatcgcaatcggttcacctacacaagaacgtatttttcatgattactgtattaagaattcagttgaaactgctgtcataaatacctgggtggaaggttacggaattgggggacatgctgtactagatattcctgattcaaaaggttgtttaagatgtgcatatgttgatccaattgatttttcacgaggcctaggttccaaccttaattttttgaaacctaatcaaaaccttacaaaaaatcttgcgggttgcggaaatgcattcttaccttatagcaacttaagtgcattacaaaccgctcttattacttctaatttagcaatcaagtttttaatgggccaattacacagctcttcaaaagtgagctggaaaggtagtgattttgatgttatccaagctggtttccaggtaactgatcgatatacacagttttcaaaatcattggaaattctccctcttctaaatagtgggtgtgatctttgcaatgattga

SEQ ID NO: 63689 - DNA, 942 bp, Acinetobacter baumannii; identical to SEQ ID NO: 49421

SEQ ID NO: 63690 - DNA, 1206 bp, Acinetobacter baumannii
atgactatgaatccagtacaaatttatcgtgacatctttctgtctatgcaagacagacaggaaagttgtgaccaatttgtaagctggatggaactagatgcagacaaacttgcttctctaaaagctttaaatgcatactcattggctgctggcagccttgatgtaaaagttgaagggaagcaacgtggatcaggcgtagatttagagagaattcaaagcagtcaatttaatagtaaatacatttttgaagttaaattaaataaaactaatattaatttgggacacgatttcattgtttgtgatagctggaatacagttcttaaatacgaacattatataaagaatcctataaagaaaatttttttaacagatgtcgaagattattttgatattgactctagtgatagtaaatataaaaattatcttgccatgggtgaactatattcattcattaaatttttgtctgaggagtctaatgcagacaaagattgtattttttataatcgtagttataagtttaaaattaaagcttgtgaagatgatttaaattatccgattgatactaaaagcttaggtaagttcaaacatcaagatatgcaccgagaggctattattaatctgatgtgcaaagaattaacgtcttttgttaaagacgaaattgaagatgttagatttagctatcttattcgtaacttgaatcccttgattacgaatatcaatcatagttatcaaagctatgtagaggattatacctttgataaggtgagaaaagagtataaagaaaagaaaactgaatacatcaaaaaattgaatgatactttcgattctgtcgctacaaaaatgtttgcaataccagcaggtatttggttcgctacagcccaaatgactaccatgaaaactattagtagttttatatataccaaaaacttcattgtattaatgaccgttttatcaatgatatttattatgattcttaatgtacatgggcaacgtaatacacttaatcaagtgaaagaagagtatttagatatttttgatgaattagaaaaaaaatttgaagatgtagatgcagaaattagaacaataaaaggtgaagtaaatgataagttcgatagagtaatgtcttacatttatgtggcgattattatttgtgttgcattaggtgtgtatacggcataccttttttatcaaagtagtattgtctag

SEQ ID NO: 63691 - DNA, 468 bp, Acinetobacter baumannii
atgcctaagttcgttaaaaagcctgtagaagtcgaagcggttcaatttaagggttcaaccagtgatatggttgatattcagcgttggattaatactggtatttatactgagtctgaaatcaaatcccgtgatattcgctcatttgaattagctacgcttcatggcctacaaacagttaatgctggcgattgggttgttaaagcaaatcaagatgatttctatcccgtagctgcttctgtatttgaattgaactttcgtgaaattcctgatagctggttagagcgtgttgagcttgaacaagctgaactgcagatcaaaacagatgcgttgaataaaacccttaatgttactcataagcctgaatatatttcagaccaacaatgggtgcttatgagtcgccaaaagttccatcaaaaccagtacaacaatattttgaaagaacgcattcaaatagaaaaaagtatttag

SEQ ID NO: 63692 - DNA, 795 bp, Acinetobacter baumannii; identical to SEQ ID NO: 57416

SEQ ID NO: 63693 - DNA, 1119 bp, Acinetobacter baumannii
gtgcatccatacgctcctactttacagcgcgttttattgtttgggctgttttttatcctgatctttttaggatttaacatcctgaagtactttattgtacctgtactttgggctgccattattgcctacatgacttggccgatttatttaagaattcagcatttttttggtgaaaaccgaaataatttaaatgctacagttatgattagcttagtcattttaattgttggcgtgccatttacatgtgctatttttattctacaacatgaaggtcgtaacctttattttgatttacagcgtcaagtcttttcaggtcatttaagcgttcccgattttattcgtaatcttccgtttattggtaaagaaatatctcgcacactcaacgaaattaatacagaccctaatagtactattcagaatattgcagcttgggtacaaagccatttaagttatgggcgtgtgttattaaatgaaattagtaaaaatatcgtcaaactttgttttgcgattttaagtcttttcttcttttatcgtgatggccacacgatcttaacccaagtgagtaaagccttggaaatggtgattgggccacgtattcatcattatctcgacacaatttcagaaaccactcgtgccgttgtgtatggcgtgggtttaactgcaattgctcaagcagtactggctggattaagttatttcgtcgctggtgtacctaacccaatggttctcaccattgcaacgttcttattagccctaattccgtttggtactcctgtttcctacttaggcgttggactatggttgttctctcaaggtcaaaccatggaagctattggcgtcatcttatggggtgtgctgattgtaagtagttcagacaacgtgatccgtccacttgtaatctctggtgcgactcaaattccgtttttattgattatgttcggtgtattgggtggaattgcaagttttggtttagttggtctatttattggccctgttattttagctgttttattagcaatttggcgtgaatggcttcacgagacaattgaccctgaacccatgccaaaaacgaccatgatttatgattcagatgatgatttaccgccatctaaaaactaa

SEQ ID NO: 63694 - DNA, 195 bp, Acinetobacter baumannii
atgaatgctaaagtgaatatcacaaatcgtgcaggggcaagctttcctgtacgtcgtatgaactttgattttaatgatgtgccagaatactggatgaatggttccgctggacttacacattttatgacagcgttatccgcgctatttccggctggtgaaaagttctttattgatagtgtgcgtgccagcaattaa

SEQ ID NO: 63695 - DNA, 1152 bp, Acinetobacter baumannii
atgacatctggttttgaaaccttgaatttacatccgcaacttaaaaaggcgattgatgctttagggtttactcaaatgaccccaattcagcaaaaggttttaaaatatacattagccgggcatgatgcaattgggcgagcacagacaggaacaggtaagactgctgcctttctgattagtgtaattaatgatttgctcaataatccggttcaggagcaacgcttccgtggtgagcctcgtgctttaatcttagcacctactcgtgagttggcattgcagattgaaagtgatgcaaaatctctcacaaaattttctaatttacatctagtgaccctattaggtggtgttgatttcgataagcagaagaagcaacttgatgctaattttgtcgatatcatggttgccacaccagggcgtttaattgattttgtagaacaaaaagaagtttggctcgatcaaattgaatttttagtgattgatgaagctgaccgtttattggatatgggctttattccttcggtaaaacgtattgtgcgttattcaccacgtaaggaacaacgtcaaaccttaatgttctctgcaacatttagttatgatgtcttgaacttggcaagacagtggttatttgaaccagtaactgttgaaattgaacctgaacaaaagaccaataatgatgtcgaacaacgtgtttacgttgtggctaaacaggataaatatcgtcttttacaagatattttacgtgaagagccaattgataaagtcatgatctttgccaatcgccgtgatcaggtacgtcgtctttacgaccatttgaaaaaagatggatacaaagtggggatgctatctggtgaaattgctcaagataaacgtttaaaaatgttggagcagtttaagcaaggcaaacataacatcatgatcgcaaccgatgttgctggtcgtggtattcatgtagacggcgtatcacatgtagtgaattttacattgcctgagcagtctgatgattatgtccatcgtattggtcgtacaggtcgtgcaggggcacaaggagtaagtattagtttcttatctgaagatgatgctttctatttacccgaaattgaaaaagcaattggtaagaaattgcctctaacccgactagatggttattgctaa

SEQ ID NO: 63696 - DNA, 726 bp, Acinetobacter baumannii
atgtctgagtcaagaaataaatttggattacctagaagcataccttcttctataaaacgcgatgtaagaaagagagataattttggctgtattttatgtgctttacctatcattcaatacgaacacgttgatcctttgtattgtgatgctaaagaacataaagtagaaggaatcactttactatgccctacatgtcatacgaaagttacaaatggtctaattagtaaggatttaataaaagaagctatggaatcacctaaagctcaggagaagaaagtagtttccgattccctaatttttactaaaagtcatcccaccattcaaatagggggagcaacatttgaaaaatgttggaccatattaaaatgtaagggagaaaatattttttcaattacacaggaagatggaagatactttattaatgctaaattttgggattcgaagggaaaacaaaatttaactattattaacaatgaatggcaggttcaaactgagaatgtatgggatctggaagttgttgggaatacagtaactataagagaaaaacaaagaaaaccatcattggttttttcattaaccaataataattacttaacaattgaaaaaattgaaatgaatattaaaggtatgaaaattttaggaaataaggatatcttaacgataaattctaatacttatcaattagtcagcgttattgaatgcggaacttgtattcaatttgattaa

SEQ ID NO: 63697 - DNA, 183 bp, Acinetobacter baumannii
atgcgttttgttgaggctggaatattttcaaaatttggaatatgcgtaagttgttcgggttttaacgctgttttatctaaagtcattttaatatcaggttgctcaaaagctgaaggaaatgcatttattgtgacgtttgtggtgtttgttttagcgagtgataaagttgaagatgtcacttga

SEQ ID NO: 63698 - DNA, 1866 bp, Acinetobacter baumannii
atggataatctaaataacgcaaaaaaagataatttttcacggaagaccatattagtaacaggtgcagcaggttttattggcagcagattgatcgttgaacttctgcgtgaaggtcatcaggtgattgctgcgctgcgtaatgccgcaaccaagaaagataagctgttaggtttcattgcaacccaagggctggctgatccatctatatcttttgttgaatatgatttaagtcgcgattttaagctggactctctattatcggacgcccagacaaaaatccatgtaatttatcatctcgcagcatcatttaattggggcattagcaaagctgaagctgagcgtaccaatattaagtcagggctggcgttgattgaatgggctgcaacattgaagcagcttgagcgatttatctggattggcgggtatcgtgtggctgcgccgccgcaagaatcggctgatgagttgtattgcaaacatggtggttatgaggcttcaaaaattctagggcatcaagctttcattgaggcctgtaagcgtttaaatgtgccatggactgcaataaatccggcgacagtcattgatggtttttataattatggcgatatgcaatatattggtattgcggacatgattgataagctctatcagggacgtttactggcattaccaggtggtcgtgacacattcctacctctatgcaatatgcagtatatcgtgagctttttgatccgaacgatgtcttatcctgaaactattgctcaggaatatatgctgcttgatcctgcgacacccaaatttcatcgcctagttcacctagctgctgagcatttgggagttagctcaccacatttacaaatacctaaagttttgctcgagaaattaccagaggtattacttgacggttctaaagagcaactttctttcatttctaccgagcattaccatgttgctggggcagaggcgatggcggcgaagatgggcatcgcagacctgatcagtatcatgccttatttttctcgctggattgatcgcttggtgctgacacgttttggtcgtatgcacgtaacaacacctaattcttttagctatcagaaccgatattggacagaaatctatactaaacagccagttggttcagaaaaagtttctgcattatttttacacggcattccatttgatagtgcatgttggtctccaatcatcaataaaattacttatgatcaggtcgctatgatggacttaccgggacttgggcgttcaggtagttatgaaatgatggaagataataaccctcaatttattgatactgcggcagagcttttggcaccaaatagtgtggtgattgcccactcattaggatgtctttttgcattaaatcttgcaaaggaatatccagataaagttgcacgccttatccttatatcgccttattttgttcaggcacaggctgcaaaaatgtttcagatacaagcgatatctaaactcattttccgttttgtgccgaaagatgtgattgctaaagatttacatccagaggggcaacaaaatctgtcagtgagatatgcgatggattcactacgccgcatgtcaatgtctaagcatattagtgagtacatgcaccacattaatttgccgcagcagcgcgcagcacagacagctttgctttctgagcttcgatctaaaatcgagattattgtgggagagaaagatccaattgttactccaatcagtcctgagattcctgtacatatcatcgctggcgcaggtcataatccacacgttacccatgtagaagcggtttatgattaccttacaccggttctgacaaagtacatcagcactacagcacagcttagtgatgtctga

SEQ ID NO: 63699 - DNA, 642 bp, Acinetobacter baumannii
ttgaatgctgaacgaaatcaagatttaggtttattgaagaatttaccacaatcttctatagtccctgtcgattatataaaaggcaatgaatttatctatgagctggcgccgactttcttaacaggattacaattaacaagtggaggtagtatttcaagtttaggaaagtattctggtgaaattattggagcaataggtggtgcggcagctggttatgtatctggcggtgatgctcaaagtgtagggataggagcagcagtaggggttgtaggagggagagttaatgagaaagtagttggaaaagttgaaagtacacttaaaaagggtggttatgatccattagcaataggaatggcaaaaggagcaactacgattggtatgggtggtgcgagtggtgcagggggaactgtgattaataattatgtcaataatgatcctttaaagaaagatgtacctaaatctgcagttgttggcgcattagtacctgcaatcagtggtgaagcggcagttactgcggcgggtgttggtagtaaaattcaaaaggttgtgagtataaattccgctgtagttggtactgcagcagaaaaaattcaaaaggtagcacctaaaaaagccacactacctgatttttgcatacgatga

SEQ ID NO: 63700 - DNA, 345 bp, Acinetobacter baumannii; identical to SEQ ID NO: 58172

SEQ ID NO: 63701 - DNA, 450 bp, Acinetobacter baumannii
ttggctgacctgattactcaagctaaagatcacattaacaccttaacgcctgcacaacttgcagcagctaaagcccaagaagagctagaaaactggaaacaaagctgtgaggaagcagagcatgcaggtgaccttaatcaattaactgagtcgcttgataaagaacatatgtattaccagaacatgcgccaagcaatgttaatgagggctaaagcattgaattgcacgtttgataagcaacgtggcacttggattagtccccctgaatttaacggcatctcagatcaacaaagagacgaacttcaaaactttattgctgaacgtggcctagacgtaaaaacagtatgtgagcacttaggtatcgatgcccttattcaaattgaagcagcaaaacttaaggcagttaaacaagacattgaaacattagctaaaacggggatgacagcatga

SEQ ID NO: 63702 - DNA, 798 bp, Acinetobacter baumannii
atgttcaaatttattgaggggaataatgcaattattaaaattactgtaaagggatacgaaaaagaattatcacaaagagttgctaatattttagcgaaatctgctttagatatgatttccttgtatttaggcggacttcctgtattttccaagcaaatcttgcatttagaaagaagcttacctacacgaacatatacacttcaaagtaatgggaaatatttaaatggtctagggttccattttggaaaacatgtaagaccaatattcaagaatgaaaaccatcgtaatgaaaatagagaagatttagaggaatttctatgttatttcaaaattatttttgatggattaactgataaaaagaattgtaaatttcctaaactggcaaataaatggatttttgcattgagttggtatgctgaaggagtaagagaaccaaatgatgcaattgctattactaaactggcaagttgtttagatactttaagtcatggaagtaaaaataatggtattaagcagctaatatgtaatttatttaataaagaagataatcaaactttatttaattgtgagggtaataaaacaataagtattcatgagttctctaagaggatttatgaagatgggcgttcaagaatactgcatggtactattgataactttctggaatcttttcacgatgataaagaaagattgataatggtaggtagaataatacttttagaatgtgcggtaagactcagcacatatgagggagatgattcagaacatgcatttaagactatgaaaagaaagaattaa

SEQ ID NO: 63703 - DNA, 204 bp, Acinetobacter baumannii
gtggatgatcatcatttaaaaagaaaagtcggcacgcttgaaatggtcgtagccatgctgctttcagggagtattggtctatttgtgattaagtcaggtcaatcacccgttaatattgtatttttccgttgccttatttcagcattgtgtttaataccgatttgttactactatggtcattttaaaaaaagtatacttcggtaa

SEQ ID NO: 63704 - DNA, 912 bp, Acinetobacter baumannii
atgtcaaaaaatttagcaaccttgattggtttaagtgccatcctaatgtgggcctctatggtaggcttcgtaaaacatattacgaccgcaatcggtccagatgttggcattacgctgatctattctttaagtgctttactcctgctcattatttttagggtgccaaattttaaattaatttctaagaaatatttaattttaggggcaattttatttattgcttatgagctttgcttttcgtttgcacttgcctattcaaagacggcgcaacaagcgattgaagtaagtattgtaaactacctttggccaagcctgactgttttagcttttgttatttttagagagttaaaatttaatgtgtttattattttaggattactcatttcaatttccggtatcatttttattcagacggggaacggagattttagtttagatcgtgttgtcgataattttcatagtaatcctttaagttatattttggcctttataggtgccattatttgggctttttactgtgtgttgaccaagaaaatgggtaaaggacaaaaccctatttctattttctttcttggtgttgccctaaccttatggctaaaattgctctttagcggccaagtgagtttaccttcactcgatttaaatacaattttatctttaatcgttgcttctgctgcaattggtctcggttatgcagcatggaatattggcattattcatggcaacattaccatgctggtggttgcttcttactttaccccaatcatttcatctttacttgccatgctggttttacagacagagctatcaatcagcttttggcaaggtacagccatggtcacggcgggttcacttatctgctggctttcaacaaattgggctgtgattcgttcgtatttcagaataaattaa

SEQ ID NO: 63705 - DNA, 276 bp, Acinetobacter baumannii
gtggtaaaaattgccttattggcattaataaaaccaccacctttaatgttaattccagatgggttggcaataatgacatctgccatttgccctgcaacttccaagttcccctcaaaacgtgaagcggctgatgaatttacttcattgaggatgacacgcgcttcaccagtcgctaaaaatgggtttgccgccactgctcctacggttttagtggtagccccttggcggctgttatttaaaacagcaccttcagccaatacatcaaactgtttatag

SEQ ID NO: 63706 - DNA, 1176 bp, Acinetobacter baumannii
ttggcaaaccgaaaacttaaaataggcattgtagttggagaagtttctggagatacgctcggcgtaaaactcatgcgtagttttcgtgagcagggaatcgatgctgaatttgagggaatcggtggccctcaaatgattgcggaaggttttaacagttattacccaatggaaactctgtctgtgatgggcattgttgaggtattaaaagacttaaaaaaactattcgccgtacgtgatggcttaattaatcaatggactcagcatccagttgatatttttattggtattgatgcaccagactttaacctcagactttcgaaaagtatcaaagaaaagaatcttccaataaaaacagttcaatatgtgagtccatcagtttgggcatggcgccaagggcgagtacatggcatcaaacaaagtatagatttagtactttgcttatttccttttgaaaaagttttttatgaacaatatgaagttccagcggcatttgtaggccatccattagctaaacaattagcgcttgagaaccctattcaaattgctaaacaagaattgggtattgatgaaaatcaaaaacatattgctttgttgcccggtagccgcaaaggtgaagtagaaaggcttcttcctatgctattgggggcagccaatattttgcatacaaaatatccagatattcaatttttaataccggcaattaatgatgcgcgcaaacagcagattgagcagggggttgaacaattagcaccgcagttaaaagcaaaaattcatattttagaaaatacggatagcgaatcgaaaattggtcgtatggtcatgaacgcgagtgacattattgccttagcgtctggaacggcgacattagaagcaatgctcatgcatagaccaatggtcactttctataaactccattggctaacttatttaattgctaaattcttggtgaaaataccttattactctttgccaaatatcatcgcgggtaaaaaagtaattgaagagctgattcaggcagatgcaacacctgaaaatttagcggctgaaatagaaaaactaatgaatgttgaaaccgctcaaattcaagtaatgcaacatttaactatgcataaacagcttatttctggaaatacagaagatccggttcaagccattttgcaatgtttgaatagctaa

SEQ ID NO: 63707 - DNA, 360 bp, Acinetobacter baumannii
atgaatacgctgcctgacttaagccaactgacccatgaacaactgctggaattcaccaggcagttggcgctgcagcatcagtctctagcacaatcaaaccaacaattggatgccaaagttcaacatctttctattctcaatcaaaaatacgagcatgaactggcgctgtttaaaaagcacaaattcgcccaaaagaatgaacacttaacggcaaaacaaatccatctgtgggatgaagcggttgaagaagatattgccgcggttgatctagaactggaacggctaaatgcagataaaaccaatgcagcgacacagaaagccaaaaccaataaacctaaacgtcgaccactgccagattga

SEQ ID NO: 63708 - DNA, 492 bp, Acinetobacter baumannii
atgtcagagatgatgccaattattcattacttaacagtacaggtttgcaaacgggtattcatagagcctaactacggcgtaatgcgttctaatgatccattagttatagatcctgatctatcaatgcagccattatgtttacttggcatctccgtcaatgattttccattaaattacacggaatattatgaaaaaaatgacagtagttgttccctgtcaaaattcctgaagactttttggagccgttactacaagactaatggcccaaatattccattagtttttggaataccagatatcctggttatcgatcatcgtgtgaaggatattattaatcaatcattttatagttggttagactcgaataatattcaatatgagttttctgatagtaagaataaaaaagctattgctaattttcgtcagcatcaacactatccttatattgaatgttactctgagatagacgtcctagatactgatgtgtgctga

SEQ ID NO: 63709 - DNA, 561 bp, Acinetobacter baumannii
atgtctacttgcagttcaacgtcaggaaaacctgaaacgaaagttatcgcatttagcggtgcaaataaaaagataagcgatattcttgacctcgagcacgtcagatctaactcgcttttacaaattcctattgcagctgaattattatcagctggatttccttcaccagcacaagattttattgaaaagtcggtcgatctcaacgaaatgctgatcaccaatgagtactctacgtttattggtaaagtaggctctcgttccatgctaaatgctggtatagatattaacgataagctcataatcgatagaagcttcaatgccaagcatctagatattattgttgctcagctagaaacagactttaccgttaagcggttgatgatcaccaagcaaatgtcagctggtgaaattaatgaaatttttggtccagatgcaaaatctatccctccagtttggcttaaagcagaaaaccaagagcactcacatatttttctaaaacctgaacaggaattgattgtgtggggcgtagtgacttacatcattaaagacgcacgaaaatga

SEQ ID NO: 63710 - DNA, 1290 bp, Acinetobacter baumannii
atgacaaaccgggtatttattcatgttgatataaattcggcatattgttcgatggaagcattttggaaccctaagttaaagggtaaaccatgcgttgtcttaagctctaatgacggaacaatcatcgcgagaagcgctgaagctaaactcttaaaaatcccgatgggtgcgccactctttaaggtccaagacatcatcaataaacataacgttcatgtgctatcgagcaattttgcgctgtatggcgaaatgtcacgccgttttcatggaatattatctggttttgtagatccaagctgttacagcatttacagcattgatgaaggctttatagaatttactcaatttactaaaaactttgatgctactgaaatggcacgggagattcggcatcaagtatataagcttattggcttaacaacgtgcgtgggtgttggtagaacactgactgaaagtaaaatggccaacaaccttgccaaaaagaatccagaattaaatggaatctgtaatttagtgacaatgagcctggtagatgtcgaaagctactatcaaaccatgccagttgatgaaatatggggtgttgggcgaaagtacgctaaaaagcttaatgacatggggattttaagtgtgctggatcttgcaacatccaacccgaatcgaatgcgtgaactcttcaatgtgaatatgcaaagtacgattttagaattgcttggccagtcatgctttgaatttgaaagttcacctaaggcgaaacaacagattgtctcgagcaaatctttcggccagaaaattactgagctctcaattcttcaagaagccgtcagcaaatatacccataatgcattcaatcggcttgttgatgaacaccagctttgcggatctctgattgttttcttgcaatccaacccatttgaccagtcaaaaccgtattacagcaagtcgttaacatacacgtttacccaacctacaaacaatttgatgcaactggttaaagctgccacatcactgattgataaattgtacaaagaggggatagagtttaagaaatgtggcgtgatgttgtgtgaattgataaaagaagaacatcgcacgatcgacctactaactgacgtagagcagcttgaaaaagagcaagcgttaatgacggcgtttcaaagcattcagagtaagtttggcaaggctaaaattgctgctggatcatgtaatctgaaaaatagagattgggaacctaagtcagaacgtcaaagccgtaactattttagtgaggctggtatgattgtcttcaattga

SEQ ID NO: 63711 - DNA, 288 bp, Acinetobacter baumannii
atgaatatgcatacgactcaaaagagtgagagagacaaaatgacaaaacgctgttctggtgatgtgaagtcaccctggttcttcatcgaggaccaaatcccaaacaaagatggcacggcgtttattgtgtgggatgaattcttagaccatgaaattaaacctatccgctggagcgataagatccgtgactatgcttcaggtgaagtcgaatggagtggaagcttcttattttggcgatatgatgatggcacaccagctgaatcaccaagaagctatcagcaatcttaa

SEQ ID NO: 63712 - DNA, 462 bp, Acinetobacter baumannii
atgaataacaaaacaattgccaaaaaaatgattaaccaagttaaatcggttatcactgacccacaagcaaaaagcttgttggctgcttatcacgtagaggcgtcatttacccacttctacgaaacacacagccacatttacttggttggtaaagacattactgcagtcatggccaaacattttccatacttcacgtttaagactcgtgataacaagaaagcccgtcacggtattggcgatggctcaatgtctgattgcttaaacaagcttcgccgtgtgtatcgcttagaaatcaaaaaaacgattagcgagaagtttatcgctgaagctggtgcaccgactttcacaaaaagccaatctgtaagtcctgttgcttatttgattgatgaagttgtgctacaagaaacagcgccgatcgcacgatctgacgttcaaaacagtttccaggatcttttcaattga

SEQ ID NO: 63713 - DNA, 273 bp, Acinetobacter baumannii
atggcaagagaattagcaccctataacgtcactgtaaatgctattgcaccagggattttaccatctgcttttactcttgatgggcgcgatatagaagcttttaacaaaattgcggaaaacgcaattgaagatacacctattaaacgtctgactactcctgaagatgtggcaaataccgcagcatttctagcttcgaatgattcttcatttattaccgctgaggtcatacatgtttgcggtggaggtcaattagctccattcgggcgaagatag

SEQ ID NO: 63714 - DNA, 204 bp, Acinetobacter baumannii
atgaatatacctaaggaattaagtgctcatttaaaagaatgctataaaaatggtgacagaaacttaaaagaatacaatgaaaaggaaataaaaagaaaatttaacctagagttatctaaggaattaagcgcagaccaacttaaagatatgggtgcttatgatgaagtcaatatgtggttcgaacacataaaaacaaatatataa

SEQ ID NO: 63715 - DNA, 897 bp, Acinetobacter baumannii
atggacgtacgtaaacacaaggctagtttttttagcgtagtaattacttttttatgtctcacgctatcattaaatgctaatgcaacagactcagtacttgaagcggttaccaatgctgaaactgaattaggcgctagaattggtctagctgtgcatgatttggaaacgggaaaacgttgggaacataaatctaatgaacgttttcctctaagtagtacctttaaaacacttgcctgtgcaaacgttcttcaaagagttgatctaggtaaagaaagaattgatagagttgtgagattctctgaaagcaatctcgttacatactcacctgtaacagaaaaacatgtgggtaaaaaagggatgtcgctcgcagagctgtgtcaggccacattatcaaccagtgataattcagctgccaattttattctacaagcgattggtggacctaaggctctaacgaaatttttgcgttccattggcgacgatactacgcgccttgatcgctgggaaacagaacttaacgaagcggtacctggagataagcgagacacgacaacaccaattgcaatggtaacgacacttgaaaagttactaattgacgaaacactatctatcaaatctcgtcaacaactagaatcttggcttaaaggtaatgaggttggcgatgcattgtttcgtaaaggcgttccaagtgactggatagtagcagatagaacaggcgctggtggttatgggtcgcgtgctattactgcggtgatgtggcctccaaatcgcaagcctatcgtagccgctctatacattacagagacagacgcctcgtttgaagaaagaaatgctgtcattgcaaaaattggtgagcaaatagcgaagacagtattaatggagaatagccgtaactga

SEQ ID NO: 63716 - DNA, 210 bp, Acinetobacter baumannii
atgcaaattgaatattataaaatgcgtatcgatatggcttttacacctactggatttttcggtggagttggaaattcaatttttcaaagtaaaattgaattctacaatgttattagagaaattaaagatgtggggctgttgaaaaaccctaccttaagacaaaagattgaaatacaaccctccttcgaccggttctcttttgtgctatag

SEQ ID NO: 63717 - DNA, 468 bp, Acinetobacter baumannii
atggattctacagaatacttttggcttactcggaaaaaagaacctaaaactaagtccaaatctagaccactacctaaagctactcaaaaatacttagaggctgaagaagattttactcaagctttggataatctggaaattaagtacgaaaagaaatttcagtttaaatctacaaagcattggcgttttgattttcatttaattgaacatcacatattagttgaaattgctggtggcccttggtcgggtggtcgaaagggtaagctaaaaaacaaagcttggagtcttgatcgttacgatgtggctgaagagatgggttacacagtaattcgcatagaggcagcaccaagatttaagattaatgaatctggtccattacagatccaagctcatttcgctagccaatggcttaaaaatttaaagaggcaaatatttaatggatcagatcagaccatttcctccaactga

SEQ ID NO: 63718 - DNA, 279 bp, Acinetobacter baumannii
atgcgtatcagcatcaaaaaaccactttctgaaaacgctgtgaagttaattcttaaaaaacttatctcgtttggttctttggctaaccagtctcttgaaaactcaattattggaaattatcagggaatttttgagcctcgccaaaatcagattcaggaaaacacacattctcacaacgttcctgatgaaccgggttatttcactcaaatgtacgctgaaagcaatcgttcaaacgtgattgacgttacaccagtgtcgcaagattttggaggcttttga

SEQ ID NO: 63719 - DNA, 1002 bp, Acinetobacter baumannii
atgaaaagaatagcaataattgcagtcgctacatatatggggttggcagtaagtgctgtgcaggcggcgactacatttttaaatgtttcttatgacccaactcgagagttttatcaggaatataatcaggcatttggtaagttctggaaacaacgtaccggacaggatgtggattttaaacaatcccatgggggctcaggaaaacaggctcgcgctgtagcaactggtcttgaggcagatgtggtgaccttagccttagccaatgatattgatgaaattgtaaaagcaggctttatccagccaaactggcaaaaagaattccctaataattctgcaccgtatacctctacagttgtgtttttagtaagaaaaggcaatccaaaaaatattcgtgattggaatgatttaactaaacctggtgttgaaattattacgcctaatccaaaaacgggtggggcaccgcgttggatttatctttctgcatggggatatgctttaaagcagccgggtggaaatgacgctaaagccaaagagctggttaaaaaactttatcacaacgttaaggtgttagattcgggagcgcgaggctcgcttactacatttgctgagcgtggaattggagatgttctactttcttgggaaaatgaagcactattggcaacgaaaggtctcgataaagataaatatgaaattgtttacccatcaatttcaattttggcagaaccatctgttgctattgttgacaaaacagtcgacaaagacggtaaccgtactttggcaaaaggttatctcaactttttatactcacctttaggtcaagagttggctgctaaacactatttccgtcctcgcaaccctcaagttgctgctaaatatgcagcacaattcccaaaaattaaattatttacgatcaatgatgtttttggcggttgggcaaaagctcagaaaacccattttgccaatggagccatctttgatcagatttatgatggaaagcagtag

SEQ ID NO: 63720 - DNA, 303 bp, Acinetobacter baumannii
atgaaaatttacatgacagaagaagatgtgctgaacgcaatcgctggtggtgatgtcgatgctaatgattgtttaaaccaagctgacccaaactttgagaagcgattcaaaagactaaccaaaggtcttgaaaagcttataaaagatattcgtaaaagctttccagatgcaaattactacagtgctaatgacgggcttttactaatgcttggtgagtcgcatagcaatagcggttcgcctcaacaagaactggtggcagccgatgggggcttaaaatccatgcttagtgggggcgacttctaa

SEQ ID NO: 63721 - DNA, 630 bp, Acinetobacter baumannii
atgcatttatatagccggttaccgcttaaaaatactgaggttaaattcattttaagtaatgaaataccttctattcataccacggtaattttgcgatctggcatgcctgttcagctctactgtttacatcctaagccacctagcccaactgaagcaaaagattcaacactgcgtgacgctgagcttttaattgtcggagatcaaattaaagatcttgatgaaagttgtattgtgatgggggatttaaacgacgtagcgtggtcacgaacaacccgtttatttcaacgtattagtgggttactcgatccacgagtggggcggcattttattaatacttttcatgcggactatcctttattgcgctggtcacttgaccatatctttcatagtacagacttcggtttagtaaaaatgcagcgtttatctcatattggatcagaccattttcctgtctatgtcgttttacaaacaggtcgaatatttgaagaaattcacgaggaactagaacaaactcaagccgatgaagaagaagctcaagccgcgatacaagaaggtattgctaaagctgaaaaagaagaaaaaatcgtgactgatgaaattgcacagccttataaagagaaaaatatataa

SEQ ID NO: 63722 - DNA, 219 bp, Acinetobacter baumannii
atgcgtccctgggcgttgggacgcaagaactggctgtttgcaggttcgctgcgcagtggtcagcgagcggcaaacatcatgactttaatccagtcagcaaagctgaatggcttggatccgtatgcctatttaagtgatgtgctgaaaaggttaccgacacacaaagtgacccaaattgaagaattgctgccgcactgctggaaacctaaatcgaattaa

SEQ ID NO: 63723 - DNA, 534 bp, Acinetobacter baumannii
atgttaaaaaaaacgcctcatatcatcttaatgtctttgctcagctctagcctattattgacggcttgtaaaaaagcagatgagccagcaaagactgaacaatctcatacaagttcatctaccgatcaggtcttagaaaaactcaatgaaagaccagtgaagaaattcccagctactgcggatgacactcatgatattgcactactagaagattacgatcaccgctttactgaaatgagtgatgaaatggaaactgagctagaaaaaatgcatgaggcaggtacgctcaccacagaatttgaacaaaaacgtacgcttgataatgtgcgctcagcattgaccatgctaaaagacctcgatttaaaaactgaacaaggtcgttatattcaaggcttactctatcaatattgggaaaaccaagaaaagaactttagtgataagcaggcaagtaaagatgagcaggtcaaacagcttgctgactatttacaagcacaaaatcagttaaagtactggaaagcctcacagcagcattaa

SEQ ID NO: 63724 - DNA, 468 bp, Acinetobacter baumannii
atgtccgtatggctggccatgcttattggtgctggtattggtattattatcacgacgcttattttatcaaatacccgtaatggccgaatcaaggctgaatacgagcaatatattgccgagttggagcttgagcatcaacaagcccttgcccaagcacaaaagagaagtgtaaatacgagccgcgccgtattaaaaggaaaaatggcagaacaatttgcaccagtcttgccggaatttcagtatttgccaagtgatgccaagtttatgggcgacccagttgattatattatttttgatggctataccgattttcgagatggagacggaactgccgatgatattcaaattattttgctggatgtcaaaagtggaggggcacgtttaacaaaagggcagcaagcaattgctcaggcaattaaggaagggaaagttcgttttgaaactttaagaatagattttgaagattaa

SEQ ID NO: 63725 - DNA, 339 bp, Acinetobacter baumannii
ttgaacccgcgtgttaaagttggtgaagttcgtaccgtggtcaactcaatcaataattatggagatgaacaaggtggcttatggtcctggtttaaggtaaatcatgacgctgtgtttgatcgtttaggtaaatcttcggctgggcgtttccctgcaatgtttagtggggcagcatgtacccaacaacaagcggcacagttaaatgacttttttgcaccacgaactaaagaattggtcggggttgaaagaggattgaaacagaccaaagagcgaattcaactctgcgaatctttggtggcaaaacaagatggatcaattgtgcaacagttaaagttgtaa

SEQ ID NO: 63726 - DNA, 336 bp, Acinetobacter baumannii; identical to SEQ ID NO: 53186

SEQ ID NO: 63727 - DNA, 963 bp, Acinetobacter baumannii; identical to SEQ ID NO: 46601

SEQ ID NO: 63728 - DNA, 474 bp, Acinetobacter baumannii
atggacaagatagttgtaaagaaacataatggcggaaccatcgcacaaaacaaacgtgcccgtcatgattattttatcgaagaaaaatttgaagctggcatgtctttactaggctgggaagtaaaatctttacgtgccggtcgtatgagtttgacagaaagttatgtcatttttaaaaatggtgaagcattcttatttggtgctcagattcaaccactcctttctgcatctacacatattgtgccggaagctacacgtacacgaaaattattattatctcgtcgtgaacttgaaaagcttatgggtgcggtgaaccaaaaaggttattcttgcgttccattagcatgttactggaaaggtcatctggttaagcttgaaattgcactcgtgaaaggtaaacaacttcacgataaacgagcgactgaaaaagaacgtgactggcaacgtgataaagcacgtatatttcataagtaa

SEQ ID NO: 63729 - DNA, 417 bp, Acinetobacter baumannii
  misc_feature (398)..(407): n is a, c, g, or t
atgcatcttaattcatcaattgataaaaaaatgacgactttaaacatactatttaagacaacatctttatgtctggcaatggccttattggtaggctgtaatgataacgatgacaatgattcaagcacaccagcaccgcgaagtaaccaaactgtaaatattttagctttcaatgactttcatggaaatttagaaccacctaaacgttacgttgaagcagcgaatccaaatgatgcatctcaaactgtacgtattcctgtcggtggtgtgagttattttgcagatgcaattaagaaacttaaagctcaaaatcccaataatgctgttgtgtcagcaggtgacttaattagtgcctccccacttacttcttcattatttctagatgaacctactattgnnnnnnnnnnctcactttga

SEQ ID NO: 63730 - DNA, 477 bp, Acinetobacter baumannii
atgccatttgtaagaaatttaaaaaaattaggaattaatattaatttacggcaggttgatgcgccgcaatatttagagcgtacacgccgttatgactttgacatgactacgatgaatttgccgcaatctttaaacccgggcaatgaacaggctcagttctggggaagtgcagcagcagttcaaaatggcaactataactacgctggtattcgtaatccggtaattgatgaggtgatttcaaaactggtcactgccaaagaccgtgaacagcaaatcacttatactcatgttcttgaccgattacttcgtgcaggatattaccagatcccgacttatggaaaaggggattattggtatgcgtactggaatatgtatcagcaacctaaagtgaaacctgagctctctgccggtatagagtattggtggagtaatgcaaaccaagctaagaaagttgctcaatatttacatcaacaataa

SEQ ID NO: 63731 - DNA, 2532 bp, Acinetobacter baumannii
atgcggcacacacattttttaatgcctttggcacttgttagcgctatggcagcggtacaacaagcatatgcagctgatgatttcgttgttagagatattcgtgtaaacgggttggtccgtcttacccctgcaaatgtttataccatgttgccaatcaacagtggcgatcgcgttaatgaaccgatgatcgccgaagcaattcgaacattgtatgccactggactttttgatgatattaaagcatcaaaagaaaatgatactttggtttttaatgttattgagcgcccaattatttcaaagcttgaatttaagggtaataaacttattcctaaagaggctttagaacaaggccttaaaaaaatgggtattgctgagggtgaggtttttaagaaatctgctttgcaaaccattgagacagaattagagcaacaatatactcaacaaggccgttacgatgctgatgttacagttgatacagttgctcgtccaaataaccgcgttgaattaaaaattaattttaatgaaggaacgccggcaaaagtctttgatattaatgtaattggtaatactgtttttaaagacagtgaaattaaacaagcatttgcagttaaagaaagtggttgggcttctgtagtcacacgcaatgaccgctatgcacgtgaaaaaatggctgcaagccttgaagctttacgtgccatgtaccttaacaaaggctatattaattttaatattaataattcccaactcaatattagtgaagataaaaagcatatctttattgaggttgctgttgatgaaggtagccaatttaaatttggtcaaactaaattcttaggtgatgcgctttataagcctgaagaattacaagctttaaaaatttataaagatggtgatacctattcacaagaaaaagtaaatgcggttaagcaattacttttacgtaagtatggtaatgcaggttattactttgcagatgtaaatattgtgccgcagattaataatgaaactggcgttgttgacttaaattattacgtgaacccaggtcagcaagttaccgtacgtcgtattaattttactggtaatagcaaaacttctgatgaagtattacgtcgtgaaatgcgtcagatggaaggtgcattagcgagcaatgaaaaaattgacttatctaaagttcgtttagagcgtacaggtttctttaaaacagttgatattaaacctgctcgtattccaaactctccagaccaagttgacttaaacgtaaatgttgaagaacaacattcaggtactactacattagcggtcggttattcgcaaagtggtggtattacgttccaagcaggacttagtcaaactaactttatgggtacaggtaaccgagttgcaattgacttatctcgttctgaaactcaagactattacaacttaagtgttactgacccttactttacaattgatggagtaagccgcggttataatgtctattatcgtaaaacgaagctgaatgatgactataacgttaataactatgtaacggatagtttcggtggtagtttaagttttggttacccaattgacgaaaatcaaagtttaagtgcttcggtgggcgttgataacactaaagtaaccacaggtccttatgtttctacatatgtacgtgattacttattggcaaatggcggtaaggcaactggtaagtcatcttggtgtccaagtggtaagaataaaacagatcctaacacgcaacaaccaatacctgatacatgtgaaggcggttttgaagactataatagtgcttttgagggtgaattttttacctataacttaaacttgggctggtcttataacacattaaacagaccaattttcccaacatctggtatgtctcaccgtgtaggtcttgaaattggtttaccaggtagcgatgttgattatcaaaaagtaacttatgatactcaagcattttttcctatcggcagtaccggctttgtacttcgtggttatggtaagttaggctatggtaatgatttgccattctataaaaacttctatgcgggtggttacggttctgtgcgtggctatgacaacagtaccttgggacctaaatatgcgagtgtaaatctacaagaaactaaacaaaatgatggttcaccggaagaagtgggcggtaatgctctggtccaatttggtacagagttagttttaccaatgccatttaaaggtgactggactcgacaagtacgtcctgttctttttgctgaaggcggtcaggtttttgatactaaatgtaatattgataactctgtttatggcaacaaaggtatgaagattaatggccagaccattacggatgttagaaaatattgtgaagataattatggatttgatttaggtaacttacgttatagtgtgggtgttggtgtaacctggattaccatgattggtccattgtcacttagctatgcattcccgttaaatgataaaccgggtgatgaaacgaaagaaattcagtttgaaattggtcgtactttctaa

SEQ ID NO: 63732 - DNA, 717 bp, Acinetobacter baumannii
atggaaagttggcaagaggatttattatcagcatttttggtggtaaaaaatgaataccagttgtttgagatcgttaaatctaccgcatcaaggctcggatttgactattgcgcttatggtatgcaatcacccttatctattgctgaaccaaaaacaattatgttgaataattatccagaagcatggcagaaacgttatgtggaacggcaatatgtgaagatagatccaactgtgcagcattgtatggtatcacttcaacctcttgtttggtcgagtcaatctgcaaagacacaggcagaaaaagatttttgggaggaagcgcgttcttatggtttaaatgtcggttgggctcagtcaagccgtgattttattgggacccgaggaatgctaacactggcaagatccaacgaccagttatcagaaaaagagcaaaaagcacaatatacgaatatgtactggttaactcaaacagtgcattccagcattgctaaaatagtaaatgatgtagagtttgctaaattcaatctttatttaacgaacagggaaaaagaggcattacgttggactgccgaaggcaaaacgtcagcagaaatagctcagattcttggggtaactgaaagaaccgtaaatttccatctcagtaactccatgcaaaagttaaatgtaaataataaaatttcagcagctattcgagctgtaatgttagggcttttgtag

SEQ ID NO: 63733 - DNA, 717 bp, Acinetobacter baumannii; identical to SEQ ID NO: 63732

SEQ ID NO: 63734 - DNA, 1287 bp, Acinetobacter baumannii; identical to SEQ ID NO: 46539

SEQ ID NO: 63735 - DNA, 213 bp, Acinetobacter baumannii; identical to SEQ ID NO: 46590

SEQ ID NO: 63736 - DNA, 1278 bp, Acinetobacter baumannii; identical to SEQ ID NO: 46556

SEQ ID NO: 63737 - DNA, 912 bp, Acinetobacter baumannii
atgcagtccattagtctcattattcaaatttttcttgtattagcatttggttattttctaggtcctaaactctcactaaatattcggcattttatttttaaaatcctaccttatttttcttatattttactaaccagtgtagctttagaactaacactcgcccttgatcaaattgataatccttctactatacttccacctgctctattaattgcattaaccacttctcttggttctttttttacttgcttattcgcctatacaatttttgataaagaaagtgttaaagggaaaatttcacttcaactttttatgaatgcattaaaaaatattgccaaggcatttctagctttaacaataggcgtgattttaggaattcttcttacccaattacatacccatattccctttaatagttggtatttactattactttttatttttttaatcggaatagaacttgcttttactcattttaatcgcacatggttaagctggaaaattcttattgtacctttggccgcctttataggctcgtgcttagctgggtttctcaactattccttacttggtcatgagtttacacttaatgaaatattagctttgggccaaggctatggttggtattcaatgtcaggtattttatttacacagctacattcagctgagttaggtgggattgccttgctcacagatctatttagagagatagttgcaattttactcatgtataccatgggttggcggtttccacgtccagcaatttcaagtgctggcgctacctcaatggatgtaacattagcaatggtaaaacagtcatgtggtacacattatgtaccacatgccatgatgagcggcttactcttaagtctactcgctccacttttaattactgtgtttttaaacttttaa

SEQ ID NO: 63738 - DNA, 540 bp, Acinetobacter baumannii
ttgctctgggtcaatgaaaagcaccgtgatcagttctggcagcctttatctggttggtggagtcataaaaaaccatttgatatggcacagcattatgagccagcgaatagtatccgccgatatttatgtgggactcagccggttatttctatgagtctgattgaatgcggagtggatattttcctgcatgccgatatgcaaaaaatccgtgagaaatcgttgaaattaactgatttatttattcaattggtacagcaagaatgttctgaattcggatttgagttaattacgcctttaggtcataagcatcgtggtagtcatgttagttatcgtcatgaattcggctatgaaattattcaggcgcttatcgcacgtggtgtgattggtgattatcgggaacctgcagtcttgagatttggtattacacctttgtatctgggctttgaagatatttggaatgcagtacagcacttaaaagaaaccatgctgaatagtgaatggaaaaacaaagagtatttagttcgcggtgaagtgacctga

SEQ ID NO: 63739 - DNA, 738 bp, Acinetobacter baumannii
  misc_feature (683)..(692): n is a, c, g, or t
gtgattactcgtgaacagtgtttgtattgggatcaggaagatgaactcaaaaaatttaaagatgaatttgcattgccagaaggcatcatttatttagatggtaactctttaggtgctagaccaaagaaatctttggctgtcgctcagcatattatttcccaagaatggggagaagatctgatcaatagctggaataaggcagactggtgggggctaccaacacggctgggtgacaaagtcgctaaactgattggtgcggaacaaggtgaagttgttatttcagattcaactacactgaacttatttaaagttttatctgcagcggtaaaaattcaggctgataaattccctgaacacaaaattattgtggcagaaaaagatgcttttccaacagatatttacattattgaaggtttcattgacttaattcaaaagggctatcaggttgaattaattgatggcctagaagacttatctcgtgctttagagaaagatgttgctgtagtggtactttcccatgtgaattaccgcactggttatttttatgatatggcatctattaatgaacaaattcattctaaagatgctttggtgatttgggatttatgtcactcagtcggtgctgttcctatgtaccttaatcaaactgatagtgattttgcgattggttgtacctataaatnnnnnnnnnnatttaaatggtggccctggttctcctgcattgctctgggtcaatga

SEQ ID NO: 63740 - DNA, 336 bp, Acinetobacter baumannii
ttgaaagctgacttaattgaagaaggaagaaagattcatttaagtagttatgatctagcagcattaatgtatcacgttaaagacaatgatctattcgatgcgagtaaaaatgatttacttgtactttatatgacgcaacagcacttcgatgaactttatcgtaataaagagacaaccttaagtttggacactcctgatagcacaaggaaaataattgataaagacgaaaaatttacgtcattattatatttatcttgtgctttggatgatttggtttcttcagtttgtgaaagtcttggtgtctcaaaagaaaatcttagatatctttcggtctga

SEQ ID NO: 63741 - DNA, 672 bp, Acinetobacter baumannii
atgactttaagattaagtgtcgctgcgatgggtttattactcagcggttcagtattttcagcagttacaattacagcgccagaggaaatcgtaatccttgcggtgaatggtcaggaagtcaactctggattattccgttcttctaaaaataattataaagtcgatgctggtgagacaagcctaagtgtacgttatcaagaatattttgagcatttaagtggcgaacacgatattgttaagtcaggagtggttaccattcaaactccagagctcaaagatggtcaaacttataagcttgcaatggtagatgctccaaaacaatttgaacaagccaaaaaatatgctgagcaacctacagtggctttatataattcaaataatgagttaattgttcaacaaactggtgccaataatgaggcaagaccgtggtttgcatcgggattgctaggtaaggttactgatttcacgactaaatcatctaaacaacaacctgacgctgtgtatgctgctgcaaaacctaccacgactcaagctaatgcgcctgttgcaacaactatgcctgctactggtgtagcacaaactaatgatcagcgtttggcagaaatttggaaaaaatcttctaaagcagagcgtcaaaagtttatggcttggttagctgagcagtcgaattaa

SEQ ID NO: 63742 - DNA, 825 bp, Acinetobacter baumannii
atgagaatactaataggttttgtatttagcttcttttgtttgattattcatgctggacaaatagattgggctgttgcaaaaacttcatttccgagtgatcaaagtattggtgatactgggcatgaaaagacacctaatggttatgtagatttaatgagtggtaatctaatttatgatactcctgaagtaatattaaaaggtgatagggggttagattttacactttctaagtcttacggaaaagtgaatagtggctttcgtgccatgggtaactgggaattggaagttcctagactagtaatgaatacgggaccatctactattctaaaaggagatatagatggaaatggaatttgtgaggccaacggagatgcaacaaacaattcctctgggcgacctagttttacagcatccttattaaatacttcatttaaaaataaaattgaagaatcatatgtaaaccaagtaaatttaaacttagcgaatcaaactttaaattcaattgtctacttacttggacagtttggaactgcaacaggggattcgaatgcccagtataataatcaacaggctcaatctgctctatcgaagttgcaagctcagctttacgatgcatttaaaacaaatgtaaatgcaatttctattagtagtgccgaggcaagtaccgaaaaaagtaaatataaacaaagtttaattaatactttgcaaacagggcaagtgaaaattcaggttaatggtatatccttgacaactggtaatattagttctgtgttagatgatttagcagacttagggaatccagttacacgctcattaacgggataa

SEQ ID NO: 63743 - DNA, 279 bp, Acinetobacter baumannii
atgcattactacggcgatgtcgaattgggtaatgtcattcagcaaactcaggtgttaaaaccttggtggatgatgccgttccaactgttttgctttaactttggttcaacgcatgccatccaccattttgtggtgaaagaaccattctacattcgccaaatgacggcaccggttgcccataaagtcatgcgtgatatgggagtacggtttaacgatgttggaacctttaaaagagcaaatcgttggaacataaatgatttatcagagtcaaaaagttaa

SEQ ID NO: 63744 - DNA, 405 bp, Acinetobacter baumannii
ttggtacagcctccatatcaattattttcccagctttctgtaaatcaggctgagcagaagattattgatgatgctttaaaaaatcgaattattgaatttgaatctggtagtgcagtattaactgaagctgggcaaaaaattcttgatgaaatggctgttgctttaaataaagtgggcgggaaaaaagtcaaaattgtggggcataccgatagttctggtgatgcgaccaaaaacttaaaactcagccaagatcgagctttagcagttaaaaattatttaattagtaagaatattcctgctgatcatttatctaccgaaggtttaggttcatctaagcctgtagcggacaatacttctgcggaaggtagaaagaaaaaccgccgaattgagttcaccgttttatag

SEQ ID NO: 63745 - DNA, 795 bp, Acinetobacter baumannii
atgacacaatccttacatcctgccgctcaaaaaggcttcagctctgctgctgagctttatcagcaagttagaccaaattatcccgtagaaatagtaagttggctacaagatcggctccaaatccatgaaaattctactgttatcgatcttggatcgggtactggcaaattcttaccttacttaaaacagacacatgccaatattattgcggtagagccaattggcgagatgttacaacagcttcagcaagcctatcctgatattaaaactatacaagcctttagccacaatattccggtaaatgaccaacaaattgatactgtcatttgtgcccaatcttttcattggtttgacaacatagaaacattgaccgaaatctatcgagtattaaaacctcaaggacatttaggacttgtttggaaccagcgcgatgaaggtacagattgggtaaaagccttagcggattttttactaccactcgaaggtgatacacctcgttaccatagtgaaaggtggaaaaaggtttttgaagagcaaaatttatttacttttgacaatttaaatactttttcgcaatcgcagcatggtactgtcgaacaagtggtgagtaagcggttactttcaacaagttttattgcagcaatgactgaaaaagatcaactacagctcaaagctcagtttgaaaaaattgtttatgattttactgggttaggcccacaagatcagattgattttccatatgtcacatatgcatatcattttcaaaaaagtacgtcgtcaaatcatagagaatag

SEQ ID NO: 63746 - DNA, 336 bp, Acinetobacter baumannii; identical to SEQ ID NO: 53186

SEQ ID NO: 63747 - DNA, 927 bp, Acinetobacter baumannii; identical to SEQ ID NO: 59193

SEQ ID NO: 63748 - DNA, 699 bp, Acinetobacter baumannii
atgggaggagcgagtgcaaacgccagtgctcctgagttgcctaaagctaaacctatgcagggagcattggagctactgcggagttatggtggagataacttcttcaagcaaaatagttataaagtcattgattcattaggtaagcaaattacgggcaaactcgatggaaatggttttgcacaagtaacaggtattgcacccggaccagctaaagtagtttttgagaaggataatacaagtgcatggctacaaagcagtgattttaaacgtaattatacgtgggctgaaccagtcaaaagtgttcaaggattaatgaaaaatgccctagaagcagtggggcaaaatacgatgtctcagttgcaaaataatcttctttcaacggataaaaatagtttcaaaaatttaggtaagaatactttagataatttagctggccaaacagtagcccagattaaaaatcaggtaactaatactgcccttaatactgtttcaaaacaacttaatctcaatttatctgccgatcaaatgaaaagtcttggtcaaatggcgacgaatccaagtcaatctcttgaaatgcttaaagagcagggcggagattttttgagtgatcaaatgaccgcaaaattatttaagaccacaaatcaagagtcacctattcagcagggcgatttagatacttttgtacggtcaaaaaagtag

SEQ ID NO: 63749 - DNA, 240 bp, Acinetobacter baumannii
ttggttttaaaacgaacagaaaaaaatacctactcacatgctgatgaaaaaaatttacgtatcattggcgctattctaaatgttcttgatcaaaacccttcaagaaaaattaatcagtcctttatagctgcgcagatcgaagagatgactaaaaatactgaggcaggaatgtcatcctcatctttaacgaaagtttttgctgatgccaataaagctataaaacctttcttaaaaaaatag

SEQ ID NO: 63750 - DNA, 147 bp, Acinetobacter baumannii
atggaagtagagtctttggaaaaacgatcagatactaacgctagaacgaaagctgcagaattattaggtaaacgatatatgatgtggacagacaagcaacaaattgaaacaactgcgacggtacagttcaatgacgatatcgattaa

SEQ ID NO: 63751 - DNA, 180 bp, Acinetobacter baumannii
atggcaacagataaacaagttgaatacgtttgtagtttgcaaggacaaacatcacttaccgattatagtcgtaaagaaataaaagctatgacgcataaagaagtaagcaatttaataagtgaattacaagatgacatattatataacgagttaatgagttacggattacctaatcaataa

SEQ ID NO: 63752 - DNA, 795 bp, Acinetobacter baumannii; identical to SEQ ID NO: 63745

SEQ ID NO: 63753 - DNA, 1230 bp, Acinetobacter baumannii
atgaaaaatattcaaacgacagcgttgaaccgtacaacgttgatgtttcctttagctttagtgctatttgaatttgcggtttatattggtaatgacctgattcagccagccatgttggcaattactgaagatttcggtgtaagtgcaacttgggcgccgtcttcaatgtcattttatttattaggtggtgcatctgttgcatggttactaggacctttatcagatcgattaggccgtaaaaaagtacttttgtctggtgttttattttttgccttgtgctgttttttaattttattaacgcgacaaattgaacactttctgacattacgttttttacaaggtattgggttaagtgtaatttcagcagtgggatatgccgcaattcaggaaaattttgccgagcgtgatgcgattaaagtcatggcacttatggcaaatatctcattgcttgcgcctttgctaggacctgtacttggagctttcttaattgattatgtttcatggcactggggtttcgtggcaattgctttacttgcactgctgagttgggttggcttaaagaaacaaatgcctagtcataaggtgagtgtaaccaaacagccttttagttatctttttgatgactttaaaaaggtatttagcaatcggcagttccttgggttaacgttggccttaccgcttgtgggtatgccgcttatgctttggattgcattatcgccaattattttggtcgatgaactgaagctaacgagtgtgcaatatggcttagcacagttcccggtatttttaggtttaattgttggtaacattgttttaattaaaattattgaccgtttagctttaggtaaaactgtcttaattggcttaccgattatgcttactggtacgctaattttaatattaggtgttgtctggcaagcctatttaattccttgcttgttaataggtatgacactcatttgttttggtgaaggaattagcttctcagtgctgtaccgttttgcgctcatgtcatctgaagtgtcaaaaggaactgtagctgctgctgtttcgatgctattgatgacgagtttctttgcaatgattgagcttgtacgctatctctacactcaatttcatttatgggcttttgtcttatctgcttttgcatttattgccttgtggtttactcaaccacgtttagctttaaaacgagaaatgcaggaaagagttgcacaagacttacattaa

SEQ ID NO: 63754 - DNA, 369 bp, Acinetobacter baumannii
atgcaacgtttatttttaatttctgcactttgtgctggacttatgacgggttgtgcaaccacaagtaaattaattccttttgtgggctcagaaaccccaatgcaacaagtacttaaaacgcaacccgagattgtaaaagagcataacaatacttcagttcagcaggtatttaaccgagtagaatctccaacagtttctcgtattactgttatacaaaccggtttaatggatgactctgtctcagcaattcggacggaatatttatttaaattggttgatgaaaagtggcaattgcaaaataagcaaaagagctaccaatgtgcgagaggaaaaggttctaaaggtttccaaacgcagctttgttcttaa

SEQ ID NO: 63755 - DNA, 1410 bp, Acinetobacter baumannii
atgaatgctccagtcgctttaacacctgagttactcacccaattaacagcaatcgtcggtgaaaaccgtattaaaaccgatgctgatagtctcgaaaactggggtaaagatcataccaagcattttaatccgaacccatcggtcatcgtttttccatcaacgactgaacaagttcaggaagttgtgaagcttgcaaaccagtttaatatcgcaattacaccgtcaggtggacgtactggactttctgctggtgctgtagcaaccaatggtgaaattgtcattagcatggacaaaatgaaccagattcttgagttcttcccggcagaccgtatggttcgtgtacaagctggtgttgtgactgagcaattgcaaaattatgcagaagagcagggtatgtactatccggttgactttgcgtcagcgggttctagtcagattggcggtaatatcggtactaatgctggtggtattaaagtcattaaatatggcatgacgcgtaactgggtactcggtttaactgtagtgacgggtaagggcgacattttacgtttaaacaaaggcatgattaaaaatgcaactggatatgcattacagcatttgtttattggtggtgaaggtacattaggtttagtgactgaagcagaaattaaacttgagcgtcaaccacaaaatctacaagttttagttttaggtgtgcctgattttgatgcagtaatgcctgtgttacatgctttccaaaaagatatcgacttaactgcatttgagttctttggtgagcttgcaatgcaaaaagtactcgaccgtggtcatgttcaacgtccatttgaaactcaatgtcctttctatgtattgcttgagtttgaagcaccatacgaaccgattattgacaaagcaatggagattttcgagcactgtatggaacaaggttgggtacttgatggtgtaatgagccagagtcttgatcaagtagagagcttgtggcgtttacgcgaagatatttctgaatcaatcgcgccgtttattccatataaaaacgatatttcagtattaattactcacgtacctgcatttattcgtgagattgatgcaattgttcaagaaaactatcctgactttgaaatttgctggttcggccatatcggcgacggtaacttgcacttaaatattttaaaacctgaaaacttaaccaaagatgagttctttgcgaagtgtcaggtcgtgaataaatatgtatttgataccgttaaaaaatacgatggttcaatctctgccgagcatggcgtaggtatgacgaaaaagccatatttggaatattcgcgctcagctgaagaaatcgaatatatgaaagctttgaaaaaagtatttgacccgaatggcattatgaatccgggtaaattattcgatctttaa

SEQ ID NO: 63756 - DNA, 1233 bp, Acinetobacter baumannii
atgagccaacatctttcactacctaaagataaaatccgtttccttttgttagaaggcgttcaccaaaacgcagtcgatactttaaacgctgcgggttataccaacattgactatcgcaaaactgctcttgaaggcgaagcgcttaaagaagcaattaaagatgctcactttattggtattcgttcgcgtacccaattgactgaagaagttttcgaagctgcaaataaattgatcgcagtaggttgtttctgtatcggaacaaaccaagtagatcttaaagcagcgatggcacgtggtattcctgtatttaacgcaccgtattcaaatacgcgttcggttgcagagctcgtacttgctgaaactattcttcttcttcgccgtgttcctgaaaagtcagcggcttgtcatcgtggtggttgggacaaatctgctgtgggttcttttgaaactcgtggcaaaactttaggtattgtgggttacggttccatcggttctcaactttcagttcttgctgaaagtatgggtatgcatgtcatttattatgatgcagtaactaaattaccaatgggtaatgctcgccaagttggttctttagatgaacttttagcaactgctgatgttgtgactttgcatgtaccggatgttccgtctacacgtaacttcttcactaaagaacaatttgcaaaaatgaaagaaggcgcgatcttcttaaatgctgcacgtggtacatgcgtagtaatcgaagatttagctgatgcaatcaaatctggtcaccttgcaggtgcggcagttgacgtattcccgaaagaaccaaaagcaaatggtgaagagttccaatctccacttcgtggtttagacaacgtgatcttgactcctcacgttggtggttcaacgatggaagctcaagcaaacatcggtttagaagtagcagagaaatttgttgcttactctgataagggtatgacactttctgcagtaaacttcccagaaatcgcgttgccattgacagcgggtcaacaccgtttactacatatccacaaaaacgtaccgggtgtattgtctaaaatcaacaacttgtttgctgaacaaggcatcaacatttctggtcagtcacttatgactaaaggcgacatcggttaccttgtaatggacgtagatgcttctgcttctcaagaagctttagatatgttgcatgaagttgaaggcacaattcgcgtacgcgtattgttctaa

SEQ ID NO: 63757 - DNA, 885 bp, Acinetobacter baumannii
atgtccagttcaagccagaaatcccagcttcatgctttgggctttcttattcttgccatgttaagtgtccaaagtagcgcatccttagctaaagtcctgtttcagaactttcctgtactgactgtttctgcaatgcgtttatgtattggggcatttattttggctttcatttttcagatctggaaaattaattttagtcaggtccgatggaaagctattttgagctatggctttgctcttgctggcatgaatgctcttttctatttatcgcttgaacgtttacccattggtattgcggttgcatttgaatttattggtccactcagtgtggccctttaccatgctaaacaaaaatatgattttgtctgggtcactttcgcaattattggtctcattttattatttccttttaaccaagcacatagtttggactggatcggagtcctatttgcgatgagtgcgggtgcttgttgggccctatatattattgcagggcaaaagccttctggtatctcaggtaaccatacagtttgtttgggcatgactgtaggtgcttgtatacttttacctattacttttttctcaggctcgattgggcaagttatagaattaccatactttttttattttattggtctcgccgttttagccagtgcacttccattctctttagaaatgttagctctacgcaatttaacacctttaagttttggaacattgatgagcctagagccagctgttgctgcactttccggttttatcttcttaggtgaatacctgttatggaatcaatggttggcactcgccactattattactgcttctgtgggttgtaccataaccacccaaagagcccgacaacaacgtgaaaaaacagtaagttaa

SEQ ID NO: 63758 - DNA, 861 bp, Acinetobacter baumannii
atgcaaaatcttccaattattgctgtgctctatatgattttgtcgatggtttcgtatcaaatcagcgcttcatttgccaagcaacttatcgcagctttagatccgcttaccgttactattttaagactatgttttgcagcagtgattgttgccgttatgttccgttcttggaaaatctggtctcgtttaccttatttaaaatggcgtgatttattaatgtattgcgcatctttagggttaatgaatatcttattttacacatctcttgggaaattgccccaagggattgcggtaggtctagaatttattggtccattaggcctagccctagtttctatcaaacaaaagagcgaatatatctgggtagcttttgccatgctgggtattgcactcatggtaccttggcaagatccaactcaacaccacttttcttacgtaggtgcagcctgtgctttaggcgcagggctttgttgggcattctatatttattttggtcaaaaagttgtaactcaaaatataggaatgcatgccttaaccatagggattaccgtatctgccctcgccttattaccaattggtatttggtataatggcccagcattacttgatacacagtactggggtaaagccttacttattgcagttttagcgactgctattccctatgcactcgacctaatggcactcaaacaacttaataaattaacttatggcaccctaacaagtttagcgccagcattggcagcattaacaggtttcttattacttcacgaagaaatcagcatgctgcaatgggtggctttagcttgcgtaatgctagcttcaattggggttactttaagaagtaaaacagcatcatag

SEQ ID NO: 63759 - DNA, 444 bp, Acinetobacter baumannii
atgaatattttcgaagcattaagagaaagccacgaaaatcaacgcaacctttctgaacaattaatccagacacatggtttaaccgaagaacgaaaagaattatttgatgcattaaaaaacgaactttatgctcactcagttgccgaagaccgttatttatatatccctttaatgtttgatgatgtcggtttggatattacgagacatgctttatctgaacatcatgaaatggatgagttggtcgagcaactcgaaaaaacggatatgagtagcccaagttggttggcaaccgctaaacagttgagcgaaaaagtccatcaccacttaaaagaagaagagcataagttttttcagcaagccggtaaaattcttaaagacagtgaaaaagaaacgctaggcaataaatatttaaaggaatataaaaagtataaaaaacagcaataa

SEQ ID NO: 63760 - DNA, 777 bp, Acinetobacter baumannii
atgggcatggaatgggatgttatccttagtttgatcttttttgcgtttactgcgggagcaattgatgctgctgttggtggcggcggactcatccagattcccgggatcatgagcacttttcctaacatgtcgactgctacggtgattggtaccaataaagtctcatccatttttggtacggcatcggcagcttatacatttgctaaaaaagtaaagttgcaatggaagcttttagccgttattgccatttgtgctttgattagttctttcgcaggtgcagcttgtttgtcgcttatccctcaatcggtattgcgtccttttgttttcgtgatgttgattgtgattgcgatttataccctagttaaaaagaacttcggacaggttcataccgagcaaaaaattactacgaaaatgctcgttttagctggtatcggtagtctggcgattggcttttatgacggtattttcggaccgggtactggtagtttctttatctttttcttcattcgttttttacaagtcgattttttacatgcttcggcgttgtcaaaaatcggtaattttatgactaacttagctgcgctgagtttcctcatcccaactgggcacgctattttacatattggtttaatgatggcagcggctaacgtgctaggttctattgttggggtgcgtaccgcgcttaaatacggtagtggttttgtacgtattatctttttaattttggtgagtatcctgatttgccgtttgggatatcaaatgtttgttacaggttaa

SEQ ID NO: 63761 - DNA, 906 bp, Acinetobacter baumannii; identical to SEQ ID NO: 53815

SEQ ID NO: 63762 - DNA, 975 bp, Acinetobacter baumannii
atgaaaaggaacttaatatttttctgtgctgcaatactctcaggactgagtgtttcagcaacccatgccacaaatgcagagcaagtcaaaagctcattcgtctattcaacttatgcacaaaccaaatatccattggtttttaaccatggtatggcgggttttaaccgagttggaacagatacgcttggtctggactactggtatcagattcttcctgatcttgcgcgtaacggaggaaatgtctgggcaacaagagtttcaccgtttaactcaactgaagttcgtggagaacaacttgcccaacaagtagaagaaattattgccatcaccggaaagcctaaagtcaacttgatcggacatagccacgggggaccaacaattcgctatgtcgctgggatcatgcctgaaaaagtcgcttcgcttactactattggtgcacctcacaaaggatcgccaatggcagatgtcatcctgaatgttgagggtactcctctatccggactggcaacattagtaaactggttttccgcagcaattacttgggcaggaggtctagacccaaatagttatccgcatgactccttagcaggtgcccacagtttatcgactcaaggctctgcacagtttaattctcaatttccaatgggtgttcctaccacgtcttgtggtgagggtgcttaccaggagaaaggcatttatatgtattcattctctggtaataaagcgctgacgaacccattagatccatttgatatagcattgacaggaagtagtctagtggttgacccatttggggataatgatgggcttgtgtctcgatgcagtgccaaatttggtaaaactattcgtgacgactataactggaatcatttagatgaagtcaatcaggtcatgggaatacgttctatttttgcagcagaccctgtatcggtttaccgtcaacatgctaaccgtttaaaacttcaaggattataa

SEQ ID NO: 63763 - DNA, 369 bp, Acinetobacter baumannii
atgagtggtaaacatcctttagttcaagctattgaaaattcacagttaaaaactgaccttcctgaatttgctcctggtgacacagtagttgttcaagttaaagtaaaagaaggtgaccgtgaacgtcttcaggcatttgaaggtgttgtaatcgctaagaaaaaccgtggtttgaactctgcgttcacagtacgtaaaatttctagcggtgttggtgttgagcgtgtattccaaactcactcgccagttgttgctaaaatcgaagtgaaacgtcgtggtgacgttcgtcgtgctaaactttactacctccgtgacttgtctggtaaagctgcacgtattcgtgaaaaattaccagctcgtaaagcgtaa

SEQ ID NO: 63764 - DNA, 549 bp, Acinetobacter baumannii; identical to SEQ ID NO: 61684

SEQ ID NO: 63765 - DNA, 252 bp, Acinetobacter baumannii; identical to SEQ ID NO: 61685

SEQ ID NO: 63766 - DNA, 426 bp, Acinetobacter baumannii; identical to SEQ ID NO: 53822

SEQ ID NO: 63767 - DNA, 483 bp, Acinetobacter baumannii; identical to SEQ ID NO: 53823

SEQ ID NO: 63768 - DNA, 819 bp, Acinetobacter baumannii
atgacccatttaaattataaaaatatcaaaggtcgatctaaggaaacgggtgccacacttattgttgtacttattattttattgattgttatttctgtcggggttttggcgataagagtagcgattgtttctctaaaagttgcaactaatagccaagttggccaattaaactttcaatcttcagatactccgttagagcttattgtacagatgaacccaaccacattgacaaatattaccaatgtgattggagcagcactgaaagcacatgaaagtaaccctggtgcggaatataacttttgctataaaccaacttctacatctgtaagttttgctcaaactcggggagcaagtttgcttcgggctggcagcgccaataatgctgtggttgaagacggtggagtagcaggtttctgcgatttaacaagtgactatgggagtaatcgtcaagcggtagttactcaagttgctgtcagtatcccaaccgatgccatggctgatattccgggttcaaatctacctcgggacataaatctttccgaaggaacccaacttcctaaaagcatgctatctacgcaacgtattcgggttattacaacagcgtttttacctgcttatgcctcaaattctttagaaactctgcaatctgattgcttaagtacgagttccgcaaaaattagtgacaactttgatagtgcattaacggataagcaaactctagctgattgtttggcaaaccataacgtaccttttagtactcaagttcaagaatttaactataccaataagctgactgaaatcacggcaccaggttcataa

SEQ ID NO: 63769 - DNA, 1002 bp, Acinetobacter baumannii; identical to SEQ ID NO: 61612

SEQ ID NO: 63770 - DNA, 555 bp, Acinetobacter baumannii; identical to SEQ ID NO: 61613

SEQ ID NO: 63771 - DNA, 474 bp, Acinetobacter baumannii; identical to SEQ ID NO: 53799

SEQ ID NO: 63772 - DNA, 951 bp, Acinetobacter baumannii; identical to SEQ ID NO: 61615

SEQ ID NO: 63773 - DNA, 630 bp, Acinetobacter baumannii; identical to SEQ ID NO: 46366

SEQ ID NO: 63774 - DNA, 279 bp, Acinetobacter baumannii; identical to SEQ ID NO: 43507

SEQ ID NO: 63775 - DNA, 2106 bp, Acinetobacter baumannii
atgccaggcgaagaggtcagccaagccaagcaacagctcaaattaattatcgacccttacttatcggtaagtgaagtcgaaaaagtgcttgctgcctgcgattttggagatctggcacacactggtattacccgtaaaagtggagaaccttatattctgcatcctatcgcggttagctgtattttagcgaatatgcgtctggatcctgaaacattaatggctgcacttttacatgatgtcattgaagacactcaatatacaaaagacgatattattgagcgatttggacaaacagttgcagagcttgttgatggcgtaaccaaactaagccagtcgagcgataaagaatataataaagctgcttcttttagaaaaattctacaagctactttgcaggatccacgtgtcattattattaaactagctgatcgctaccacaatatgaccacattgggcgccttacgtcccgataaacgtgctcgtattgctcaagaaacctttgatattttcgtaccgatggcaagattagtcggcatgaatgaaatggccgataaccttgaaaatttatgttatcaaaatctcgatttagatatgtttgataacgttcaaaatgcgttgcttcaaaccaaaccagagcgatgtaaataccaaagtatctgggaacaaaatcttgcggagcttctccacaattatcatattcaaggtcgaattaaaaagaaaaataataatattgagctcttacgccatttcgtaaaaaatgaaatggatttacaagaacttactcatagccatgcctttgaaatcgttttgcaatccattgcagactgcgatcgtttagtagcagcattaaaagaaaattttcaagtcatccaatatcaagatcatatccgccggccattaccaggtggtaatcagtcattaatgatcaagcttaagggtgaaaaaaccaccttatcgctcactattcaaactgagttgatgcgtaaagctgcacgtttcggtgtagtactcggcgaaaatgctccacaaacttgccgctctgccattcaagcttccatgcagaacctaaatacactcattgatggtgaatgcgctaaaacgacttttaatgacttacttgattatttacatcaagaaaaaatttgggtttacacaccacatggccagttacatgaattaccacagggcgccacagtagttgattttgcctattcagctagtcttttcttaggcaaccatgcggtaggtgcaaaagttgatggtgaaattaagccactttctacaccattagttagtgggcaggttattgagattattactgacgttttagcaacgccaaatccagattggctgagcttcattaacactcaaaaagctcgtcgtgctttacagcacgtactcaaagaccaagatattgaagaacaacgtttagtgggtgcccaagcactttcacgagctttaaaactctttaatcgttctattaacgacctttcagatgcagattggttagatcttttacaatggcgtcatattgataataaagatgcattatttgagcaaattgctgttggagatttacttcctcaacttgtagctaaccatttgtttgcaaatgacaagcatcctcgagcagaaaattcagatcgactaattcaaggtactgaaggcattgatgttaaatatgcccactgttgtaatcctattttaggcgacccaattcaaggccatttaacacgacgtggtttaattgtgcaccgtattcgttgtcataatttgcttcatgaacaacatttacacccagaaaatattatgccgcttcaatggaaagcagatgacgtagatgatgtacgctttactgcttaccttgcgatttacatggcaatgaatgatgagcaggtatcagacctcatttaccaatgtcgtaaaaataatgctggggtagaaatggtacattccaacgaacagcgtactttcgtcaatattgtagtaaacaaccgtaaacatattgcaaaagtaattcgtgatttacgaatgcactatggcttcccacgtattgagcgtctagacgcccctgctccacaaatggaaatttccaaagtcagctaa

SEQ ID NO: 63776 - DNA, 384 bp, Acinetobacter baumannii
atgtcccgtcaagtcattcatactgaaaatgcccctgctgccatcggcacatattctcaagccattttagtaggtaacacactatatttatcagggcaaattggtttagatccttacagtatggaacttgtagacggtattgaagctcaaatccgccgtgtttttgataaccttaaagcagtatgtgaagctgcaggcggcacacttgcagatattgcaaagctcaatatttttcttactgatttatctaatttccaactcgttaaccaaattatgggcgaatattttgctcaaccatacccagctcgtgctgcacttggtgtagcaagcctgcctaaaggggctttagttgaaatggatggaattgttattattaatcagtaa

SEQ ID NO: 63777 - DNA, 195 bp, Acinetobacter baumannii; identical to SEQ ID NO: 61619

SEQ ID NO: 63778 - DNA, 465 bp, Acinetobacter baumannii
atgaaaggcaatcgtgatgttattaatcagctcaaccaagtgctgtatcatcatttaactgcaattaatcaatactttttacactctcgtatgtttaatgattggggaattgaacaactcggttctgccgaatataaagaatcaattcgccaaatgaagcatgctgataaaattattgagcgtatcttatttttagaaggtctccctaatcttcaacacttaggtaaattgtatatcggtcaacatacagaagaagttctgcaatgcgacatccgtaaagtaaaagaaaatattgaagcaattcagaaagcggtcgctttagccgaaaccgaacaagactatgtaacgcgtgatttggtacaagaaatcttagaaaaagaggaagaatattgggattggttagatactcaaattgatcttattggcagtgttggtatcgaaaattatattcaaagccaaatgtaa

SEQ ID NO: 63779 - DNA, 1629 bp, Acinetobacter baumannii
atgcaagtattctttctgttcctcgcagccatcctgttgggttttgcgtggctatcaccatttcactataacccttgggtaatgttttctagtgaaatgagtacttttgcggcaggtttaagtgtcttagcttcacttttttatcaaaatattaaaattccacgtgcacaattattgctattgccatttattttagttccagtggtgcagtgggctttgggtctagtttttgattttagtacagctttgttaagttcactttacttattaggcttctggtttatggttgtggcgggttataacttgtcactagatcaacaaaagcgagatcaaatttttacaggctttagtttattactgattattgtatcaattgcgaccagctttattgcgatatgccaatggttaaatattgagtctcattttgtgcatatgttgcatttaattggtaaccgtccttacggcaactttggtcaacctaacaatatggcaacctttctgattatggggctattaggttgtctatttttatatgaaaagaataaagcaacagtttggttacttttcccttcagcactcattatcttgtttacgatcgctttaagccaatcaagaacgtcttgggtcgtttttccatttttacttatctattggatagttaaactatttggaaaacaaaaaagatttggttttattcaagggttcttgtggtgcgctggtttttttgtaatagctggcgtgattctgccatttgctactagtttaattgaagcatggttaagcactgatgtaacccaagcaagtagtttagttgaaagagcaagctctggatatttacgttttaatatctggacccaaatgctacttgctgtacagcagcatccttggttagggtatggttggaaccaaaccagtgtggcgcaaatgtcagcctatgctctttttccaacaactgagtggacgaccagtgcccataatattttattagatctcatcatctggaacggtattccaataggtatagtcattattgcttactttgcatgttggttcctttggctaaaccagcaggctaaagaaactatctcaattattgcaattatgatggtgtgtaccgtactcattcatgccatgttagagtttcctcaacgctacgcttacttcttacttacttgtggtttcttattaggcataattcaggcacagacacctgtactcaaagatattgtactcaacaagcaggttcttcgtttaatttggggaataagtttaatacttctgctagcaatttggcgtgactataatgtctatgtcacaaatagtaatttgttgtttaagaataaacagccaaatgctgaggttttgggaagtaatcagatttttgttttaacgcagtttgagcagcgtctaaaatggattgagatgaagcctgaaactactttatctgatgctgatttagcagtgtggggtaattttgtgaagaataaagcgacgccttataacttgcgtaaatatgcccagctacttgcctataatggaaaagtagaacaggccgagcagcaaatatttattttgcagcatctttatcgacagcaaataactttggcagagttgttaaaagataaataa

SEQ ID NO: 63780 - DNA, 486 bp, Acinetobacter baumannii; identical to SEQ ID NO: 50433

SEQ ID NO: 63781 - DNA, 561 bp, Acinetobacter baumannii
atggtaacaacatcagaaacaacccaaattattactcagccaaaaattgaggaatctgtagagcccagtttaaaacgttggtttaagcatttttgttatttaccagcaagtagcagatatttctccaaacaagacaaacaagttattgctgaggctgtacaacaagcagagcatggacacgttggcgaaatacaggttgtcatagaaggccatatcccatgttcacaagcgtatagacaaaatacccgtttaagagcccagcaattatttgcagaactgggtgtttgggatacagagctcaatagtggtgtattgctctatttaaatttgtgtgaacgtacagtagaaatcatctttgatcgtgggattaggaatgcaactactgaacaaatatggcagcagatttgtaagtcgattgtagagcagcttcaacaaaagcaatatcagaaagctgtagttacaggagttcagcaaattggagaagtgatgtcacgcttttacgatgaaaatatgccagatcaattaaatgaaataggtaatgcacctattattattaattaa

SEQ ID NO: 63782 - DNA, 1083 bp, Acinetobacter baumannii
atgagaaatactatattgcttcagtctaagcaaattagggtattcgttattaccttaattgttctctgctgtggtgttctgtttcagaatgcggcttggagtgagaataatattgccactgctaccgatgaaacggatacggtagtggcaggcaaaattattcaacagcagcaagctcaagcatctaagcctcaaataaattctcaggcagcttcgagtgtcacacctcaaacgcaagttgcaaatgatatggctgatggtgaatcaattcgcggtttaccaacattaaatcaaccggtcattgatcaagctaacgttttgagtgaaaccgaaaaacaacagcttagccagaaaatcttaaatctgtaccagcaaggtaaagcacaaataggtattgtgattgtaccaactacaggtcaagaagatatttttgattatgctttgcgagtaggtgaaaaatggcaactcggttcgagtaaacgagataatggcttacttatcgcagttgcaattaatgaccatagaatacagattctaactggatacggtttagaaggggtattacctgatattgttgcaagtcgaattattcgaaatcaaattaccccttattttaaacaagcccaatatgctcaaggactaaatgcaggacttgatgaaattggaagaattttaaatttagatccggaagttgctcagcaagctgctcaagatttaaaagaacgccaacatcaagctgccgaagaacaacaagccaaacaaacaacgcttacaatggctttatttattcttgttgctggggttgtgggatcatttattgtcggtcgaccacttagcgcgtcaacagcaggagttgcggcagcggtagctggtttcgtaaatggtgctggcatagtaatgagtttactactaggttttggtattttctttttactcataacttcaattgctcaattgattttacaggctattctgagtggagctggtggcggtggacgcggaggaggctttggcggtggtggcggaggctacggcggcggtggtggacgttttggcggtggaggtgcttcaggctcatggtaa

SEQ ID NO: 63783 - DNA, 591 bp, Acinetobacter baumannii
atgaaaacgtttaaacaacttgctatcgcgacaacacttgccagtaccctattattttcaggctgtggctataatactttacaggttaaagatgaagctgtaacagcggcttggtctgaagtacaaaaccaatatcaacgtcgtgccgatctagttccaaatttggtaaatgttgtaaaaggttatgctaaacatgaagaacaggttttaacagaagttacccaagcacgtgccaatgttgcaggcttgaaggttgataaagaagtattagaagatccagcattacttgaaaaatatcaacaggcacaaagccagttaactggggcattatctcgacttattgccgtttcagaaaattacccagatttaaaagccaatacccaattccaagaattgcaagttcagcttgagggaacagaaaaccgaattgctgttgcccgtaatcgttatattacaactgttcaggactataacgcttatgttcgtcagttcccacaagcagtaacagcaaaagtgattggcatgcatcctaaagccaatttctctgcagaagcatctgctcagcaggctccaaaagtttcttttgattaa

SEQ ID NO: 63784 - DNA, 888 bp, Acinetobacter baumannii
atgaatatcgcaggtatgacggcagaaaaatcatatttaaatcgtcgaaaagcgttgggtattactgtgcgtcgccttgagtttaatcctcaagctatcaaacgctattattttgcaaattcgcctttaatgtctcattttttaactgcactctcttcaacatttcccgtaggagaacagttttttgtaaatagcgtgcgtaatgtacgtgacaaagtttccaaccctcaattgcaggcacaaattgcagcttttattgggcaagaagcaatgcattcgaaagcacatggagagttcaatgaggcttggcgtcgtgatgactataatctggatcgctttcagaactggttgaatgagcgtgacaagtatttaagaacaatttctcctaagctgcagctagcactgacatgtgcatttgaacattttacggctttgctggggggatatattttacagcatccagaacttctaaaaactttggatcaagatgcgctaaagctttgggtttggcatgctatagaagaaattgagcatcgttcagttgcattcgatgtctatcaacaggtatatggtgatgaccgtattcgtcgtttactcatgcggagtgtcactacagggtttgcaagtcttgctttttatgggacaacgcgtttattttggcaagataaatggaagagcttgcctaaaatcggaggtaacttatttgggctatatttgcttgctaaaatgcttatacagctaactcctgaatattttgcttattacaaaaaggacttccacccgagtcaaaaagattatagtcatatggtcgattattggaaaagttatttggctgatgaatatcaaatgacaagtttccaagaggaaaaaaatccaagaccaagctaa

SEQ ID NO: 63785 - DNA, 1422 bp, Acinetobacter baumannii
atggcagaacgcctaaataatgactttcaatttctggatgtaccacgtcaagatccagagaaaaaagatattactgtccgcaaagcagagtttgtggaaatttataaaccttttacttcggaaactgtaaccaatcagacgcaccgttgtttaggttgtggtaacccatattgcgaatggaaatgtcctgtacataactacattccaaactggctaaaactcattgctgaaggccaaattttccaggctgctgagctttgccatcaaacaaatactttacctgaggtatgtggtcgtgtatgtccgcaggaccgtttgtgtgaaggtgcttgtaccttaaatgatggctttggtgcagtaaccattggtaatgctgaaaaatatatcaatgacacggcttttgctttgggttggcgcccagatatgtcacatgtgaagtggacaggtaaaaaagttgcaatcattggtgcgggcccagcaggcctaggctgtgccgacattttagctcgtggcggtgttaaaccggtggtatttgacaagcgtcctgagattggtggcttactaacatttggtattccagaattcaaaatggaaaaagatgtgatgaagcgccgccgtgaaattttcactgggatgggcattgaattccgcttaaatactgaaattggtaaagacgtcacgattgatgaattacttgctgaatatgatgcagtattcatggggatgggaacttatacctacatgaaaggtggtttccctggtgaagatcttgacggtgtttatgatgcgcttgatttcttaatctctaacgtgaaccgctgtcagggatgggaaaaggacccaagtgaatacattagcatggatggtaagaaagttattgttcttggtggtggtgataccgcaatggactgtaaccgtacttcattacgtcaaggtgcccacgatgtaacatgtgcataccgccgtgatgaaagtaatatgccgggttctgcacgtgaagtaaaaaatgcgtatgaagaaggcgtaaagttcttatttaaccgtcaaccaatcgagattgttggtgaaaatggcaaagtgacaggcgtaaaagtggtaacgacacaaatgggtgaaccagatagtcgtggccgccgtagccctgagccaattccgggttctgaagaagttttacctgctgatgcagttttgctagcgttcggtttccgtccaagccctgctgactggtttggtagtgtgaatattaatcttgatggttctggtcgtgttgttgcacctgaacagcaggaatttaaattccagacttcaaacccaaaaatctttgctggtggtgatatggtacgtggttcagaccttgtagttacagcaatctgggaaggtcgccaagctgctgaaggtattttagattaccttggtgtttaa

SEQ ID NO: 63786 - DNA, 4482 bp, Acinetobacter baumannii
atgcacatgccatcgcctaatactgtagctcccgctcaaggtttatatcagcctgatgagtttaaggataactgtggttttggactgattgcccatatgaagggtgaatcaagtcatcatctagtagaaaccgcgattcacagtttaagttgcatgacgcaccgtggtggtattgccgcagatggcaagacgggagatggttgcggcttattattggcgatgccaaagcaatttttccgtgatgaagcaaaaaaactgagtgatattacactgagtgaaatttttgcagtgggtacggtatttttaaatattgatccagcattagcacagcattctaaaaatattttaacgaaagaaattgagtcagaaggtttacgtgtacttgcttggcgtatcgttccaacaaacaacgatgcattgggtgaaatcgcgcttcaatctttacctgcttttgagcaagtcatcgtcaactgcccaatgggcgtaactgaggttgaatttaaccgtaagttattcttggcgcgtcgccgtgcggaacaacaactccaaaatgatccgttattttacgtgactacgctttgctcgacagttattagctataaaggcttaatgatgcctgcggcgattgccgagttttatacagacttggcagatgagcgtttaaaatcacatatcgtggtattccaccaacgtttctctacaaatacattacctcgttggccattagctcagccattccgttatcttgcgcataatggtgaaatcaacacaattacagcaaaccgtaactgggcattagcgcgtactcctaaatttgaaaacccattattgccgggtttgactgagcttaacccgattgtaaaccgtacaggttcggactcttcaagtttagataatatgcttgagattctggtgggcggtggtatggatttattccgtgctttacgtatgctcgtgccaccagcttggcagaacgttgaaactttagatgcagacttgcgtgcattttatgagttcaactcaaaacatatggaagcttgggatggtccggcaggcctcgttattcaagatggtcgtcatgcgatttgtatgcttgaccgtaatggtttacgtccagcgcgttgggtaattaccaaaaatgattacattaccttggcatctgaaattggtgtttggggctatgagccagaagatgtggtatcaaaaggtcgtgtaggtcctggtcaaatcttggttgtagacacccttacaggtaaagtgcttgatactaaagatgttagcaatcacttgaaaaacatgcgtccgtaccgtgagtggttgcgtgaccatgcgattcgcttaaatgcaaacccggaacttgaagaacaacttgttgataaaggtttaactggcgatgtattaaaagcggctcaaaaaatgtttatggtgacatttgaagagcgcgatcagttgttacgtccaatcgctgagagcggtcaggaagctgttggttctatgggtgacgatacaccaatggctgtattgtctcgtcaagtacgtcatgtgaccgattacttccgtcaacagtttgcacaggtgacaaacccaccaattgacccattacgtgagtcaattgttatgtcacttgaaacctgtttgggtcgtgagcagaacgtattcgaacaaggccctgagcatgctgatcgtatcatcatctctagcccggttttatcaaattcaaaaatgcagcaaattcgtagcattgaacgtgcgggttatgaggcggttgatattgatctgaactatgctgaaaccgaaggtttacaagctgcgattactcgtatttgtgaagaatctgcacaagcggttcgtgatggtaagaccttaattgttttaactgataaaaacattcgtcaaggttatttacctgcaaatgctgcgcttgcaacaggtgcggtacaccatcacctcataaaaactggtttgcgtactgatgcaaacattatggttgaaaccggttttgcacgtgatccacatcaatttgcggtgttactcggttttggtgctactgccatttatccataccttgcatatgatgtaatcaatgatttgattgctaaaggtgagcttttaggtgatccaatccatgcacaggcaaacttccgtaaaggtatcgagaaaggcttattaaaagttctttcaaaaatgggtatctcgacagtagcttcttaccgtggtggtcagttatttgaagcagttggtttatcttctgaagttgtagatcaatgtttcttaggtgttcctagtcgtatccaaggtgcaacatttgttgatcttgaaaatgaccagaaaaagttagcggctacagcttggtctaaccgtaaaccaattgatcaaggtggtttgctgaaattcgtatttggtaaagaataccacgcgtttaatccagacgtgattaactcgctacataaggcagttcgttctggcaaatacgaagactttaaagaatatgccgagttagtgaataaccgtccgatcgcgactattcgtgacctgtttaagttaaaaacaaccaatccaattccggttgagcaagttgaatcggttgaagctatcttgcctcgtttcgactcggcagggatgtctttaggtgcactttctccagaagcccatgaagcaattgcaattgccatgaataccattggtggtcgttcaaactctggtgagggtggtgaagatcctgtgcgttacggcacaattcgtaactccaaaatcaagcaaattgcatctggtcgttttggtgtaacacctgcttacttaacttctgctgaagtcttgcaaattaaagttgctcaaggtgcaaaaccgggtgaaggtggtcagttgccaggtggtaaagtgaatggcttgattgcacgtttacgttactctgttccgggtgtgacacttatttcacctccaccgcatcatgacatttactcaattgaagatttgtcgcaactgatttttgacttgaaacaagttaacccgaaagccatggtatctgtgaagttagtatctgagccgggtgtaggtacaattgctgcaggtgttgctaaagcatatgcagactttattaccatttcaggttatgacggtggtactgctgcgtctccgctttcatcaattcaccatgcaggttcgccatgggagcttggcttgagtgaagcgcatcaggcacttcgtgtaaatgacttgcgtggcaaagtacgtgtacaaactgacggtggtttaaagactggtcttgatgttattaaggcggctattttaggtgctgaaagtttcggttttggttctacaccaatgatcgcattaggttgtaaatacctacgtatttgccacttaaacaactgtgcgaccggtgttgcgactcaacaagatcatttacgtcaagagcactatattggcgaaccacaaatgctcattaatttcttccactttattgcagaagaaactcgtgaatggttggcagctcttggtgtagcttcacttaaagacttgattggccgtgtagatttacttgaagtcttaccgggtgaaacagagaaacatgctcatcttgatttaagtgcattattaacttctcatcctgctgctgaaggtaaagcacagtattgtgaagtagaaggtaatgcaccgtttgacaagggcgtattggctgaaagaatggtcgaagaaatgcttcctgcaatcgagtcaagcgctggtggtcaattcaattttaatgtcgtgaactgtgaccgttcaattggtgcacgtgtatcgggtgagattgctcgtcgctatggcaacttgggtatggaagcacatccggttgtaatgaacctaacaggtactgctggtcagtcacttggtgtttggaatgctggtggtttgcacatccgtcttgaaggtgatgcaaatgactatgtaggtaaaggtatggctggtggtcgtatttcgatcttcccaccaaaaggttcacctttccagacacaaaatacagcaattattggtaatacttgtttgtatggtgcaactggcggtaagttatttgctgcaggtacagcaggtgagcgtttcgcggttcgtaactctggtgcgtttgctgttattgaaggtgcaggtgatcactgctgtgaatatatgactggtggtgttgtgactgtgcttggaaaagtgggtcataacttcggtgcaggtatgacaggcggttttgcttacgtgcttgacctcgataatgactttgtagattactacaaccacgagttaattgacttaacccgtatttcaacagaatctatggaagatcataaagaattcttattgcgtattattgacgagcacatcaaggaaacaggtagtgcttgggcttacaaaatccgcaatgagtttgacttctacagccgtaaattctggcttgtgaaaccaaaagctgctaacttgcaatcgcttttgaaaactacacaagctgacccacaataa

SEQ ID NO: 63787 - DNA, 876 bp, Acinetobacter baumannii
atgactgtatcacgtacactttggcagaatgttcaacaatatatctggttggttggtggtattgtctgcttattccttgcttttattttttgggtcataactgataataaaaaactggttgaggttgaaaagtcagctgattccgatgcacccgtacaaattcagccagagaaagttgcaaccactcctaacttaggtgctttagctgacgaggttcgtccactggatttaacaacgcgaactgtggcgtcaggtgaacatgagcctgagtttcgtggcacaaaatttattaatgaaaataaaaaacaatggacgcttgagttattcagagcttctgatgaggacatcattaaaaactttttaaaaagtcgtactgatcgtaataagtttatttatttccgcttaagcggagaacaacaagcagaacaatatgtgttggcttacggaacattcaaacgttcagaagatgcggttcagcaattaacacagattaatttgcagttacctgattcagttaaacctcagccacagcagttctcaagttatgccccactggtaaatgatttgggggcagatgagatgaaaggtggcaataatcagttatatgaagttagattgcgtccagcggctttgcctagaattgatgaatctttattaatgtctgctccagcgagtggtaccctaaacactcagccaaaacctcctagtactaactcggctacaaaaactactattgtacgtcgtgatgcggcaggaaatgtggttgatgtacaacaatcgaattctaatattgatcagccaaataaacctgcacagacacggattaatgagaatcaaccaaaaaatgctacaaatgagggcacaagagggaactaa

SEQ ID NO: 63788 - DNA, 1083 bp, Acinetobacter baumannii
atgcaaactttacatgttgaattaggcgaacgccgttatcctattttcattggtagccaacttgacccgaaacaattactagagccttatattcatggtcaacaggtcatgattgtgagtaatgttacggttgcacctttatacttaagccactatcaggaagctttggaaagtctaggtaaaacggttgcgacctgtattttacctgatggcgaaaagtataaagatattcagcatttaaacttaatttttgatgcattgcttgaagctggttttaaccgtgattgtacggttttagctttaggtggtggtgtcattggtgatatggctggttttgcttctgcttgtttccaacgtggcgtttactttgtacaggttcctacgaccttactttcacaagtagattcaagtgttggtggaaaaacaggaattaatcatccgcttggcaagaatatgttaggtgcttttcagcaaccacaagttgttttagctgacatggcacaattgaatacattgccagaacgtgagctttcggccggtttagccgaagtaattaaatatgcacttttgggtgatgaagatttcctggtttggcttgaagaaaatatggatggcctagttgcaagagatgctgaccttttagcagaggctgtttatcgttcatgtgctcacaaagcccgcattgttgccaatgatgagaaagagcaaggtgaacgtgctttacttaacttaggtcatacttttggtcatgcgattgagtcatatctaggttatggaacttggttgcatggtgaagctgtagcaactggaatggttatggcggcagatttatcacaacgtttgggttggatctcaaatgaagatgtggcacgtacaaaaaaaatcattcaacgtgcaaatttgccgatatcatgtccacaaattccattggatgatttccttggatatatggctcatgacaaaaaagttcttaatgggcaattacgtttggtgttgttaaaacaactcggacaagctgtaattaccaaagactttgatgttgaacttatgaaacaagctattttggcgaatcaacacggataa

SEQ ID NO: 63789 - DNA, 570 bp, Acinetobacter baumannii
atgaaagcaattgaaataggtggcgccttgccaagcaaagcgtttgaaaccctaccaaatatttatttggtagggcccatgggggcaggaaaaacaaccgttggacgtcatttagcagaactattagggcgtgaatttttagatagtgatcatgaaattgagcgcaagacaggggccactattccctggatttttgaaaaagaaggagaagtcggcttccgtacgcgtgaaactgtcgttttaaatgagcttacttcacgtaaggcattagtgcttgccacaggtggcggtgctattactcaggcgcctaatcgggagtttttaaagcaacgtggaatcgttgtttatctatatactcctgtcgaattacaactacaaagaacctatcgcgataaaaatagacctttattacaagttgaaaaccctgaacaaaaattgcgggatttattaaagatcagagatcctctgtatcgtgaagttgcacactatacgattgaaacgaatcaaggtgctgcacgtgatcttgcccaaaagattttgcaacttattctatcgaacaagttaaaatag

SEQ ID NO: 63790 - DNA, 2166 bp, Acinetobacter baumannii
atgaatcacgtattccgtcagttttctatgggggctgtagctattgcgattatgcaggctgcatctgcacaggtcagcatgaccaacattgtaccaatgcaaattgcaggtcagggcacagaaattagagtcatgtttaatggcttgccaccacaaccacaagcttaccaacttgaaaatccttcacgtttaatccttgattttgataaggcacagcaaggtttaaaacaatctaaaattagtgttgcaactaatgaggcaagttctgtagatgttacttcagatgaccagcgctcacgtttaactgtaaacctaaaagatgctggagcatttacaacacgagtcgaaggcaatactttcattttaaaaattaattctgctcaaacaagtaataagccgctacctgtggtctcagcacaaccacagggagtttcaaatattggctttcagcgtggtagtcagggagaaggcctggttgttgtagatcttttaggaagtaatacgcctgtagatgttcagcagcagggtagtaaagtcgttataagaacaataggtacaaaaatcccgacacatttagcgcgtcgcttaaatgtaaatgattttgcaaccccggtttcaagtatcgatgcttataatgataaaggggttggtgtaataactatccagtcctctggtagctatgaatatatggcctatcaggcggagaataagctcacgatcagtttgaaacgtccccaagataaaaatgttacctctttatataaaacgccaaattattcaggaaataaactttcattagacttccaagatattgaagtacgtcgtgtgttgcaattacttgctgattttacaggcatcaatatggtagctgccgatagtgtacaaggtaatatcacactacgtttaaaagatgtaccttgggatcaggctcttgatattattttaaaaactaaaaatcttgataaacgccgtaatggcaatgtgatttggattgctccagttgcagaattgattaaagcggaagaagaagaagcgaaagctgttgcacaaagtgtcaaacttgcacccttacagactgagtatattcaactgaagtatgctaaagctggcgatattatgggtctcattacacaaggctcaaataatagtaatggcttacaacatacttctggtggagggacctcaacttcaaccaatttaaatactggagttgatagtctaggcaataatgtgggtagtttgcttagcccgcgtggcactattactcaagatgaccgaactaatactcttattattaacgatactgctcagtcaattgatcaaattcgtaaaatgattgacttgcttgatgtgcaagttaaacaagttatggttgaagcacgtattgtgagagcctctacgtcatttaccaaagaacttggtgtgaagtggggtattctgtcgcaaggtattaccaataacaacaatttgctggttggcggtagtgaaacaactttatggaatttacgcgaacctaaaaaagatgaaactacaggtgggtataaatatacgattgagcgcccagataacttaaacgtggatttaggagtttctaatcctgcaggaagtattgcttttggcttgattagtatgtctgactttatgttagatcttgaattgtctgctttacaagcggatggttatggtgaggttatttctacccctaaagtcatgactgccgataaacaaacagcgaaagttgcaactggtcaacaagttccatatcaatctacaactaactctgcagcaggttcaactgctacaacatcttttaaagatgctttgctgagtttaaatgtgacaccaagtattacacctgatggcaagattcaaatgaagttggatatttctaaggattctgtagcgggtgcggctccaaatggagagttgattttaaataaaaataatatcaacaccaatgtattggtagataatggcgaaactgtcattttgggtggtgtttttgagcaaacaactatgaattcacaaaccaaagttcctttctttggtgatattcctgttgttgggcgtttatttagaaaagatgtaaagtctgatgataaacaagagttgctgattttcgttacaccacgaattgttaatgacactttagcgagaaatcattaa

SEQ ID NO: 63791 - DNA, 528 bp, Acinetobacter baumannii
atgaaaattaagcaaattactctttatgttttggcgtgtgctgtgcttgtcggttgtgattcaagaattgatgcagtaaatcaggaaatggccaatattcgtaatcagccgccactccctattgaaccagcaccgatttttactcctgtaccacaatttaattacgctgctcatcaattaaaaagcccatttatgccaagttctctagctgccgagctcaagattatggcggggaaacgggtttatccgaatttctcacgtgcgccgcaaccactcgaaagttatgcacttgaagctttaaatatgaaagggagcatgcgtaataatcgagggcagatattggccctgatccagacaccggatcagcagattgaacgggtacaagtgggtaactatatgggcatgaatcagggccgtattacccatattagtccaacccagattgatctggttgaaatcgtaccagatggtcgagaaggctatgtcgaaagaccaagaacattggtcttgattgggcctgcaccctaa

SEQ ID NO: 63792 - DNA, 741 bp, Acinetobacter baumannii
atgagtcaagacgaacttcaagaattgtcattagaacaattatctgcaaagaaaaagaaatttaatctcgataaattccttcagcaatttaatacgctggatatgaacaactacggtagttggccaatatctgtaaaaattacgtgttggatttttattttctttgctgtgttagctttggggtatttcattgttattcaaccgaaattacaagctattgataatgctcaagctcaggaaagcaatttattaaacgaatttcgtgaaaaagactcgaaattacgtaacctgcaacagtatcaggtgcaacttcaagagatgcaggcaaatttcaaccagcaactagagcagttaccaaaagaaactgagattccgagtttagttgaagatatcaacttaacaggagtgaactctggattgaaatttaaaaatattcgcttggaagatgaagtaaagcaggaaatttttattgagcaaccaattgccatagaagcgaccggggactatcacgcatttggagcttttgtaagtagcatcgctgctttgcctcgtattgtaaccatgcacgattttactgttgatgtatcgccagctaaagataacaagtctgatattcctgtgctgaactattccattaaagcaaaaacataccgatacgtaggggcaacagatacatcggagcaaacaggcaaagctccagcagcatctgcttcaacgaacactactgttcagccgaaatag

SEQ ID NO: 63793 - DNA, 642 bp, Acinetobacter baumannii
atggcaacaattaatttactgccttggcgcgaagagctgagggagcaacgaaaaaaacaatttataacgttatgttttggggtggttgttttggggattacaaccgtatttgggggatggttttattttgaccataaattagatgatcaagagcaagcgaatcagctcattatgagcacaaatcagaaccttgatcagcaattaaaaacattaaacggcttacaggaacagcgtgatgccattattgaacgcatgaagttgattcaaggtttgcagagtcaacgtccagtagtggtaagacttgttgatgagttagttcgagtcacaccatcagctatgtatttaacgaaatttagccgaaccggagataagtttacgattgaaggtaaagctgagagtccaaatacagtagccgaactactccgtaatcttgaagcatctccttggtatcgtaatgcttttatgaactctttcttggctaatgaagagaaaaaagataaggctgcaagttctcttcttcctagggtggaagaccactatggtagttttgttgtgactgtcgatttgggggaaatgggcgtgaccacaacggatgattctgctaagccatctacaggtgaaagtgtgggggccgctaaatga

SEQ ID NO: 63794 - DNA, 1059 bp, Acinetobacter baumannii
gtgctcaggttatatcgtaaacctaataaggggttaatgggtgtcgatattagttcgacttctgttaagttgttagagctctctgtcaagaacggtaaatattgggtagaaagctatgctttgatgcctttacccgaaaacagtgtagttgaaaaaaatatcttaaatccagaagcagttgcagaggctttggaacgggcgatgaatttagcaaatccccaaaccactcatgctgcaattgctgttccgacatcgacggttattcataaaactatcgaaatggatgcagatatgagcgatgacgaacgcgaagttcagattcgtgtagatgcggagcagtatataccgttccctttagatgaggtgagccttgattttgaggttttgccggatcgtcttgcgaatccaaatcgtgtaaatgtactcttggtcgccacaagaacagaaaacgttgaaacacgcgttgaagtgcttgaattggcagatttaaatcctaaattggctgatgtcgaaagttacgcggttgagcgcgcttttagcgtgtttgctgatagcttaccgatgggtgcaaataccatagggattttagatatcggccataccatgacgacattatctgtcatgcaaaatggcaagattatttatacacgagagcaggtctttggtggcaagcaacttacgcttgaaattcaaagtcgttatggcttgtctttagaagaagcaagccgagcgaaaaaagatcgctctttaccagatgattatgaaattgaagtgctagacccatttctagatgcggtagttcagcaggcggcccgttcactacaatttttcttttcttcatcccaatttaacgaaatagaccatattttgctagctggtggaaatgcgaatattccaggccttgccaagcttttgcagcaaaaattaggttaccgtgtcacgattgccaacccgtttttacaaatgggcttttctcctcaagtcgacgttcaaaaaattgaaaatgatgcttcatctttaatggtggcatgtggcttggctttaaggagttttgattaa

SEQ ID NO: 63795 - DNA, 2556 bp, Acinetobacter baumannii
atgaaaaagctatccagtttgggcttcgtgcgtccaatttttttgatcattattattatcttagtctcacttccgatgggattctatggcatgtatctctatattgccccaacgcttccggaaatgagttcactaaaaaaagcaccgcttttaaaaccattgcaagtctatacagccgataatcaactcattgctgaatacggtggtaaactttctattccggttgaatacaaacaaattcctcctaattttattcatgcatttctagcagcagaagattcttctttctttgaacatagcggcattagttttaaaggtttaggccgtgctttgagtgaaagtgttacgggttctgatgtacaaactggtggctcaaccatcacgatgcaggtcgcaaagaactattatttaagtccagaaagaacattaaaacgcaaactaacagaaatctttttggctagaaaaattgagcaaaacttatctaaagaagacatcttaagcctctatgtaaataagattttcttaggtaaaaacgcttacggtatcgcagcggctgcaaagatttactacaacaaaagcattaatgagctcagcattgcccaaatggccatgattgccggcttgcctaaagcaccatctaaatataatccagttgttaaccctgagcgtgcacttgaacgtcgcaactggattttaggccgaatgcttcaacttggttatatttctcaagcggaatatcaaaaggccgttgcagagccaatcaatttgaatatgcccaaccgtgacctaaataatattcacccctacgcaggtgaaatggtccgctcagagcttgtaaaacattttggtgaacaagcaattgattctggttataaagtctacacaacaattaatgcgaaacgccaagcgattgcggaaaaagctgtgcaggacggtcttgaagcttatgaccgtcgtcatggctggcgtggtgcagaagcacatgataagccattaagcgaatttagagcatatgccaacacttatccagcgcaagtcaccaaggtaaatagcagctcttttgaagcattaatgcaagatggctcaacagtaaccgtgcaatggtccggcatgtcatgggcccgtccctatcgcaatgcaaatagcgtaggtgtagcgccttctcgtgcatctcaaattgttaaagttaaagatattgttcgtttacgcccaaatgaagctaaaactgcgtggtcactagttcaagtaccaaaagttcaaggtcagctcattgcaattaacccaaacgatggctcaattgaagcaattgtaggtggttataatttctatcaatcaaaatttaaccgtgctttacaaggctggcgtcagccaggttctaccatcaaaccattcctctatgctttagcattagaacgtggcatgacaccttatagtatggtgaatgatagccctattacgattggcaagtggacaccgaagaactctgatggtcgctacctaggcatgatcccgttacgccgtgctttgtatttgtctcgtaatacggtttcagtaagacttttacaaactgtaggaattgaacgtactcgccaattattcatggattttggtttacaagaggatcaaattccacgtaactacaccattgctttaggtacgcctcaagtattaccaattcaaatggcaactggttatgcaacatttgcaaacggtggttaccgtgttcaaccgcattttattcagcgtattgaagatgcatacggtaaagtcatttacgaagccaaaccagaatatgcatgtattccatgtattaacgctcctgagacaactgatgatacacaggtaactactccagatgatcaagttgttgaagtcacaaataaagagctagagcagaaagaaaaggcaaccaaacaacttaaccttaaacagacggacaaaaataacagtcaatatcgtcaagctcagcgcattttaaaatcaagctctgcttatgacatggcaaatatcttacgtgacgtaattgagcatggtacaggtcgtgctgcactcaagattggccgtagtgatttaggaggtaaaacaggtacgactaacgatgcaaaagatgcatggtttgcaggttttaatggcaagttagtaactgtaacatgggttggttttgaccagccgactacacttggtcgccgtgagtatggtggtattgctgcattaccgatctggattaactttatgggacaagcattgcaaggtacaccagctgcttgggttcgtttagaaaaagatgctcaggcacctatttctcgcgataagcaagaagtcacaactgaagtaggcgataagaaaacctatcgtgctgcccctccattagcacgtccactctatcgtcctgcaccaccgcaacctaaaaccaccaataatgacttcgatgacttacctggtgaggaaattgtgattccttccaagacaacacctccagcgatgaaaccttcgcaaggggcagcgccgaagcgtgaaaaagatgaattagaaaacttgattaatcaaattgagtaa

SEQ ID NO: 63796 - DNA, 825 bp, Acinetobacter baumannii
gtgactacgcaaaatttaatgtgccctgtatgtcatcaacgacttgagctggtaagcaaaacatggcggtgtgaacagggccatagctatgacattgcaaagcaaggttatgtgaacttacatgttgtacagcacaaacatagtaaaaatccgggagatactcctgagtctgtagatgcgcgccgtgcttttttacaaggtggctattatcaacctttacagcaagcagtagttcatttgctgaaagatcttaaagctaaaatggtacttgatattggctgtggcgagggctattacaccagcgcaatgcaacaggtcgttgaacagtgtataggtgtagatattgcaaaaaatgcagtacaacgcgcagcaaagttaaatgacaaagtgacatgggtggttggtacaggagcaactttacctgtcatcgatcaaagcatggatgtgtgtacgagtctttttagcccgattccccaaacggaaattctgcgtgttttaaaagatgatggttatttaattgttgtgactccggcaaccgatcatttgtatgcgatgcgtgaggcgttgtttgaacaggttaatcctcacacaccacagaaatttgttgaacaactacaagatttatttgagttgaaagaacagcaagttattgatgctcctttagtacttgaccagcaagctttaaaaaatcttattgctatgactccctatgcttataaggcatctccagaacgtcgtatgcaactagaacagaaagcacacttacaagtgaccgcatcttttcaaatttatctttttcaaaagcgtaataaaaaagccatctaa

SEQ ID NO: 63797 - DNA, 333 bp, Acinetobacter baumannii; identical to SEQ ID NO: 61637

SEQ ID NO: 63798 - DNA, 1119 bp, Acinetobacter baumannii; identical to SEQ ID NO: 61638

SEQ ID NO: 63799 - DNA, 1401 bp, Acinetobacter baumannii
atgcatacttcaaccaccagtaccgtgcctttggaaccgtggacagctcaacaattacaacaggcaacacagggttactggcataaagaccagatccctcaaactgaaattaaacgtattttgactgactcgcgtcatgcagaaagtggggatgcctttttagcactaaaaggtgaacgtttcgacgcgcataattttgtcgcgcaagtggctgcaaatggttgccaagtcgctattgtcgagcggcctatagatgcagaaattgctcagcttgtcgttgccgatacccgtttggctttagggcaacttggtgcgtatcgccgtgaacaaaatgctcaattgaaagtaattgctttaacgggtagtagtggtaaaaccaccaccaaagaaatgctaggaagtattttgtctcgtttagcacctacattgattacccgaggcaatttaaataatgaccttggcgtgccgatgatgttgcttgagcttcgaaaggagcatcagtatgcggtgatggaacttggtgcaaatcatcaaggtgaaattgattacacatcaaaacttgttcaaccgcatgttgctggcattttaaatattggaactgctcatttgggtgagttcggcgggcgtgatggcatttgccgtgctaaatcagaaatctatcgtcatattttacctcagggcgttgctattgttccgcaacaagatgactttaccgctgagattcgtgaagcagccaaaagccatcaaatcatgagctttggtgctggtggtgatgtctttgctacagagattgaattgttgccacaatctgccaatttccagttacatacgcctcaaggttcaagttttgtaagactgccatttgcgggtgagcacaatgtgcaaaacgcaactgcagcagtagcatttgctttggcgttaggtgttagcttggaagatatcgtaaaaggtctagagcaagcacaaggtgcaaaaggtcgtttgaattttattcaaaaagcgcctcatttatttattgatgatacttataacgccaatccaacatctatgcgtgctgcggcacaagtattacttcagcaaaatggcattaaagtcatggtgatgggggatattggggagttaggtgatagcagttggcaagaacatcacgatttaggtcgcgatcttgctgagcttcctttagaccatattattgcagttgggcagtttgcctcagcagctcttgaaggcgcaggtcttcattctactaaattgaaagcatttcagactcaaactgaggcgcttccatttttaatcaatctaatccaaacacatcaaccccagtccatgagtttcctgtttaaaggttctcgctttactcatatggaaacgttgatggctgatttgatggagaaactttaa

SEQ ID NO: 63800 - DNA, 1500 bp, Acinetobacter baumannii
atgactgtttcttttcaagaaattcatccaatcgaaattgatgctcaatggcctcaacagccatttcacggctttagtttagatagtcgtaaagttgaaacggaccaaatttttattgctttgacaagttatagccagcctgaaaaaacgcgtacatttgctgaagcggctttagcaaatggagcgttggctgtcattagcgaaaccgaattaggtgtagcaaatgaatgggtatgccctgatgtgcgtcagcgcatgggagagtggcaaaaacgttatttgcaacaggctgatgtagtaaaacctttacggattatagctgtaacaggcacaaatggtaaaacaacaatttctcgtttaattgctgagttaattagttcacaacagcagcgctgtgcagtgatggggacaacagggaatggtattttacctaacttaacgccttctacgcatactaccctcgacgctctacagttacaaaatgcgctacatgactatgctaaacagggagcaacttttgcttctttagaagcaagttcacatggtcttgaacaggggcgattaaatggttgcgatattgaaattgctgtttatagcaacttaagtcgtgaccatctggattatcacggcactttagaagcttatgcagaagcgaaggcgcgtttatttcagtttaattcgttaaaagtcgctgttattaatttagatgatgcgcatgctgacttgatgattaagtctgcccaaaataatccagcacaacctaaaattttgacttattcactaactcaaaatacagctgattattacattaccgatttaagctatagcttggcgggcgcaacttttaatttagtaagtcagcaaggttcatttgcggtagaaagcccattattaggtcatttcaatgttgaaaatttaattgccgcactcatcgctgctgagcaagctagtttcgatttacaggcattggttaattttgttcctaaactaattggtgcgccaggccgaatgcaagttattcgtgatgatgagcgattatttgtagtggattatgcgcatacaccagatgcattgattcaagtgcttaaaacattaaagcgtcatgtttcgaatcagctttgggcggtgtttggatgtggtggtgaccgtgaccgtggtaagcgtccactcatgactcaagcagctttggatggcgcaaatcctgttattctgacttcagataatccaagaacagaagaccctgaacaaatttttgctgacatgaagcaaggaattgatttttcagggcatcgtatgcatgaaattcatgaccgccgtgaagcaattaaatttgttgcagagcaagctcaagctggtgacattgtagtgattgccggcaaaggacatgaaaattatcaagaaattaatggtgtgcgtcactggtttgatgatgtggttgaagtgcgttccgcgattgatgcccaacatcatacggtagatgctgcttaccctgcacaatag

SEQ ID NO: 63801 - DNA, 1833 bp, Acinetobacter baumannii
atggtagataagcgaacaaagcaaacacgaaaaaaacagcagtctatttcggaaaaaccaagtcttgcctttgatatgtggcggttttatctgctctgggcggtagtgctactgtgttttgtggtattaattgcacgtgcattttatgttcaagtcattaataaagactttttgcaaaataaggccaatgccaatattttgcgtactgaacgtatagaggctatgcgtggagtgattagtgatcgccacggtgtacctttagcgattagtagtccaatcatgaaaattgtgattgatccgcgtgattattttgagaccaagcatttatatgatcaaattacggctgaactaaaacaagatccaaacaaccgtaaattaaaacgccaattgccagataaaaatttaaatcttgatgaacttgccgacgtggtgggtgttgatcgtgctgatcttaaaaaacagatgaatgcgcgtccgcgttctcgctatcttgttttgaaaaaagaagtacctcctcagcaagctgacctcattatgaaaggtaatttccaaggggtgtatgcagaaaaaacttataaacgttattacccgcaacctcagccaaatgcccaaattattggtttgaccaatagtgaaggtcaaggtatcgaaggcttggaaatgcagttgaataagcaactgtcaggtgtagacggtgagcaaaaaattattcgcgataagcgtggtaaccgtttaaaagtttctgaggtaattcgtgagggcgaacctggtgaaaatatcactttaagtatcgactcacgtttgcagtacattatgtaccgtgaattaacggctgcaggtgtggctaacaatgcgcgttcagcaacggcgattgcagttgatgttaaaacgggtgaaattctggcaatgaccagttggccatcttataacccgaatgataagaatggcttatcaaataaagatgctatgcgtaaccgtggtgcgatcgatatgttcgagccaggttcaaccatgaaaccttttactatttctgcagctttagaaactggtcaatatacgccaaatacgattgtaaatacctctcctggctcaatgcgtttaggctggcatactattcgtgatacccataactatggggctttgaccgtaagtggtgtcattattaagtcttcaaacgtgggttctgcaaaaattgcattatcacttccgaaagaaactttgccgagcttctttaatcgtgttggttttggtaagcgttctgcagtaaggttccctggggaaagttcaggtctggttttacctgttaataaattaaactcttctcaaatcgggaccatggcatatggttatggcttaaacgcgacaatccttcaattggctcaaggttatgccatgcttgcaaatcatggtgtcaaaatgccattaagcttgcataaactagatcagccacctaaaggtgagcaagttttaaatccgaaaattgccgatcaagttttgttaatgcttgagcaagtgactatgccgggtggtactgcaaaacaagccaatattcctggttatagggtaggtggtaaaacaggtactgcacataaattgcgtgcagatggtaaaggatattcaaataatgagtatcgtgccttatttgcgggtgtcgcaccaattagtgatccacgtttagccgttattgtagtggtggaaaacccacaaggtcgctattacggtggtttggttgccgctccagtttttgctcgtattatgcaagagtcgttgcgcttaatgaatgtgccgcttgataagccacttaatactccagaaaatcctattcgcaggtaa

SEQ ID NO: 63802 - DNA, 333 bp, Acinetobacter baumannii; identical to SEQ ID NO: 61642

SEQ ID NO: 63803 - DNA, 924 bp, Acinetobacter baumannii
atgtcgcatatttctgtcttactttttgagaccgttgaaagcttattggcagatcgcacaactggggtgtatatcgatgcaacctttggacgaggtgggcatacgcgcttgttattgtcgaaactcgatgaaaacgcccgagtatatgcttttgataaagaccctcaagctctggaagttgcgactgctttagcacaagaagatccaagatttacgattattcatgcaagttttgctgatattaaggaaaaaatgcaggaaattggggtgcaaagtgtcgatggaattatggcagacttaggtgtgtcctctcctcaactcgaccaggctgaacgcggctttagctttatgcaagatggcccgttagatatgcgtatggataactctaaggggttgacggctgccgaatggttacttgaggttgaagaggaagatttggcaaatatcatttatcaatatggtgaagaacgatatagtcgccgtattgctagagcaattaaacaggccggaaaattggatactacggcgcaattggctgaaatagtaaaaacagcccatccaaaatgggaaaagcataaacatccggcgacacgtacgtttcaggcaatccgtattgctattaacaaagaactagatgatattgaagtatttttaccgcaagctgtagacttacttaaaccaaaagggcgtttgtctgtgatcagcttccattcgcttgaagatcggttgatcaaacagtttattcaaaaagaatcaactctagcagaagattctggttgggggatgcctcaacagcaggttgatacgagaagattaaagaaaatttcacgggttcgtgcgagtgaagaagaagtaaaagcgaatccacgttcacgtagtgcatggcttcgggttgctgaacgcttggaacaaaaaggcgcgtaa

SEQ ID NO: 63804 - DNA, 1323 bp, Acinetobacter baumannii
atgatgaaacaagatgaatccctgatgacatcacgtcggtttgtaccgatgttttttacccagttttttggcgcattaaatgacaatgtttataagcaagctttattgttagtcattacttatggttggattcagcaacaatctgcaccagtaagcacactcaataatttagcagcattgttgtttattttgccatatttctttttttcagcaactgccggacaaattgctgataagtatgaacgctcacaacttgtccgtggcataaaaattttagaaatcattattatgctcatcggttctgccggttttttattggggcatttatggttgcttcttttagccctattcttgatgggcacacattcaactttctttggtcccattaaatatgccattttgccagaaatcttaaaaccacatgaactcatgtctggcaatgccctgtttcagtctggtacatccatggctatcttattcggaatgatcttgggtggtgccgtaattgcatcatcagatggaaacttattgtggattagtattactgtagtagcgattgcttgcataggttatttattcagccgtttcatcttgccacaaaaagttgccgcacctgatttagatattgactggaactttatccgtacaagttttcaaactatcaaatatgccaaaagcttaccattagtgtttacaattttgttaggtaattcatggtactggttttatggagcgacttatttaactcaaattccgcagttgactcagcaaaaccttcatgcatcggaaaatgtggttagcctattactcactttcttttcagtcggtattggtgtgggttctcttctttgccgcaaaattggtggttcagaaattaatattaaaatggtgccaatcggtgcagttggccttactgtttttgcgctctaccttgcagccagtctggcttttgtacctgaaagaactggagcattactgactttaaaagatgtttttacccaaggctgggtttactaccatgtcatgattgctgtgactttattgggtattagtggcggtttttatattgttcctctatatgccatgatgcaggcttactcaccacgctcacatcgtgcccgagtggttgcagcaaataacatcttaaatgccgtttttatggtttcttctgcaattttctcaatcttaatcttaagtgttttaaaaattgatattaaaatactatttattattacagctgtacttagtgcaatctttagtatatggcttcttgcccgactaaaaccaatgcttgccacagcacatctttctttggaggactaa

SEQ ID NO: 63805 - DNA, 3426 bp, Acinetobacter baumannii; identical to SEQ ID NO: 46628

SEQ ID NO: 63806 - DNA, 336 bp, Acinetobacter baumannii; identical to SEQ ID NO: 53186

SEQ ID NO: 63807 - DNA, 1146 bp, Acinetobacter baumannii
gtgctttatcaccagtccattctcaagaatggccataccacctatctagataatcagcagctattaaatcgaaatgtcactaaaaactttagtgtatttggcctagaaaaatataactggaacgactttactttcgaactaggtgctcgtatagaaaagcagaaagttagtatggattatgatatagaaaaaattaaagattcaatgaaaccttggcctaataaatataacagtccttatgtagaaaaaaataataaaatcagggctcaaaatttaaaatctattttagaagctgttcaacctaacaaagaaacagctttttcttatgcaggtacagtccactggagatttgctccaaattatatcttatcattaacaggtacacatcaagaaagattacctaatgcacaagaaatgtatactcatggtatgcatctcgctactaattcttttgaaataggtaaccgctttctaagaaaagagaaatccaataatttagaaatcagtctggcctataaggatgatttacttgattatcaaatcagtacttactattatgattttgataactatatatatttacagacactcaatgaagttttaggaactacaaaagttagagatcagcatacactacgtattaatcattatagccagtctgctgctaatttttatggattagagggcaacatagggtatcaatttaattctgtttatcacggctctctttttggagattatgtgaaaggccgtttaacaaatttacctgatgctgtaattgcatacgatatctggaatagagaaccgactttagctccccaaaaggatcgttacactcctagattacctcctgctcgtttgggtacacgactaaaagctgattttgatgaatcgcttaaaggtgaaatagaatattatcgagtctttaaacaagataatatttctaaatttgagcaggttacatcaggttataatatgcttaatatgactttagcatataaaaataagctatctcacacagaatatgatttattctttaaagcgaataatttacttgatcagaaagtctatgcccatgaaacatttttgccatatattccccaaattggaagaaattttagtttaggcttaaatcttaatttctag

SEQ ID NO: 63808 - DNA, 1398 bp, Acinetobacter baumannii
atgaaatcggttgttttaatttttgcctctttggcagtgaatattgcgtattcagcagaaacaaatccatctattcaaaactactggtccattgcagaacaaaaaaaattagaccaagacattacatggcaaaggcttatgtatgccaataaaaatcagaaaagtgaggtcacttatgctggctattttctatcagaaaatggaaaaaataatttaaaagaagaactgaaagcagacatctcggcattatttatacctacgcaagataaccagtcaattcgctgtaaatttccggcacgcagtcagtggcttatacagcaattaggcattcaagaaaatgtattgccgcaagtaaaatgttcagaatttgaaaactggattgggcagattaagccttacaaagcgaccctaatttacgccacagattttatgggtaatccaagctcaatgtttgggcataccttattgcgtctagatcctaaagatcaacagcagttaaatctcgtttcttatgccgtaaactatgcagcaactgtggcaggcaatgacaactggtcatatgcatggaaaggcttagcagggcagtatccgggtgaatactcacttatgccttactatcgtaaggtaaaagaatatggtgattttgagagccgtgatttgtgggaatatgagttaaatctatctccagaagaaacgcggtttttggtgagtcatatttgggaaatgcaacatgtaagcttcccttattactttgtgagtgataactgtgcatatcggttattgggcttagtcgatttagttaaacctgaatctcatctacaagaaaagtttaactacgcttctattccaatggaaaccattaaagcgatgcaacaacagggactcaccaaagctcctgtgtatcgacctgctttagaaactcaattattggcccaagctcaccagcatggcgcatctttagctaaagttgctcatcagttagcaatgaagccaattaaagagtcttcggaaacacttaaatcatttagcccatcagatcaggccaaaattcttgagatggcttatgatgatttatatctacagtttattggtcgcaaagttgaagaaagctttgctcagccacagcttagacagcttttagcactacgaagtcagattgatttagacaaacagcgccaagaacctaaaagaccatcaaccgagccgactcaaggccataatgcacgtaatgtctcgctaaaactgggcgaggtgcaaggtgacaagtttatcgagataggtcataggcaggcttatcatgacttaatagatccacagggcggataccgtgccggtactcaattattatttttaaatggtaatgcacagtggcgagatgaccatttaaaactccgctga

SEQ ID NO: 63809 - DNA, 1293 bp, Acinetobacter baumannii
atgacaaatatgatcaataaagcccaagggttgggtttatcgctgatcacaaaactagctggaagcgatgtacttgatcaactcaaactacgtaaatttcttgaaaggtctctttaccaaggttcaaaagctggttttagagcattaagtcagactcagaaagcatttaaacctaagcaaattccccaacaacgcctgcctcaacagaagaaaaacctatttgatttaagcctaactgaagaacaacaaatgacttcagaggcaatgtctcaatttgctcaagaagttttattgggattagctcatgatgctgatcagacagctcaatttccagaaagcctttggcaatatgtagaagatttaggattaaactattacgctcttccagaagcactaggtggtgtcgccgctgaacaaaatattgtaagtaacttattgattgctgaaaaactagctgaaggtgattttagtcttacagcagggctcttaagtacgtttagtgttattaatgccattacacgttggggttctactgaagttcagtcaatgtatttaccttgctttgcagaagactccgacattaccgccactttcgctgtacaagaagctactccagcatttaacccttatgttttaaaaacaaaagcttctcttgaaaatgatcaatattttatagagggcgaaaaaacattggtcattttaggagatttggctgatgtgttcttggtgagtgctgactttaatggcaaaccagatgtatttgtagtacaagcgggcgataccatttctattaaaagtactcctgctatgggtctcaaagcagcagagacagctactttaaaattcagtcatacacctgctctacgactaggtgcaacagattttgattacaccgcctttttagatttaggcaacttaatgtggtgtgcaatggctgtaggaacctgtgaagcagtaaaagcctactgtattaaatatgctaatgagcgaactgctttcggagaaccaatttcacatcgtcaaagtgtcgcattcatgatcgcagatatggcaattgaaattgatgctatgcgcatgctaattctaaatgccgcaagtcttgccgaagcaggtaaacctttccatcgtgaagcatatttagctcgtcttctttgcgcagaaaaatccatgaaaataggaacagatggcgtacaaattttaggtggtcatgggtttacaaaagaacaccctgttgaacgttggtatcgtgatttacgcgcaaccgcaattttacattctggcctacatgcttaa

SEQ ID NO: 63810 - DNA, 1110 bp, Acinetobacter baumannii; identical to SEQ ID NO: 48679

SEQ ID NO: 63811 - DNA, 207 bp, Acinetobacter baumannii
gtgttatgcgtgagtattgtatttgtattagggtattgggcatatttagatacccaaaataaaagacatcaagagctcatgaggatcattcaagaagctgaaaaaaatttacagaccatcgaacgtaatcctaaccgtgttagtcatagcaatttagcttcatataatttgcaaaaatatatcagtgataaaaaagtttttttctaa

SEQ ID NO: 63812 - DNA, 1320 bp, Acinetobacter baumannii
atggcggcgcccaattcttcggcagggtggttagagcgtttatttaagttaagcgacaataaaaccacgtttcgaacagaagttcttgctggtgtaactacatttttaacaatgtgctacatcatcattgtcaatccactcattttatctgaaaccggcatggatcatggcgccgtattcgttgcgacctgtttggcagcagcaatcggttgcttagtgatgggtattattgctaattatccaatcgccttggcacccggtatggggcttaatgcttattttacctattcggtttgtatgggcatgggagtgccatggcagacagctttagcagctgtttttgtttcaggtgtggtattccttgcaattagtttctttaaaattcgtgaggcgattgtcaatgcaatcccgatgtcgcttaaatttgcgataggtggtggtattggtttattccttgcgcttattgcgttaaaaaatgccggaattattgtcgcaaaccaagcaacgttggtcggtttgggcgatattaaacaacctactgtattattagctttatttggctttttacttatcgtaattttgcatcagcttaaagtccgtggtgcaatcattattagtattttagttgttacagcaattgccacagctttaggtctaaatgaatttaagggtgtggttggtgaaattccttcaattgtgccaacattcatgcaaatggactttgaagggttgtttaccgcaagtatggttggtgtcatcttcgtattctttattgttgacttgtttgacagtacaggtactttggttggcgtttcacaccgtgccggccttttacaagatggtaaattgccacgtttgaaaaaagcgctatttgctgactctactgcaatcgttgctggtgctgcattaggtacctcatcaactacgccatatattgaatcggcttcaggtgtagcagcaggtggacgtacaggtttaaccgcggtagttgtcgctttcttatttatttgctgtttattcttggcacctcttgctcaatctgtgccaggttttgcaacagcacccgctttattgttcattggtgtattgatgatccaagggatcactcacatcgattgggatgatattacagaagctgtaccagcctttttaacgattgtatttatgccatttgcatactcaattgcagatggtattgcaatgggctttatcagctatgcattagttaaattatttacgggtaaggcaaaaactgttccatacatggtgtggattattgctgccctttgggtatttaaatttatcgcctttggcggttaa

SEQ ID NO: 63813 - DNA, 999 bp, Acinetobacter baumannii
atgaatcaagtcgagctgattcaggccttaccaaaagccgagttgcatgtgcatattgaagggacctttgaacctgaattaatgtttgccattgcacagcgtaatcagattcagattccttacaaatctgttgaagaagtaaagcaagcttataactttcataatcttcaatcatttttagatatttactatgctggtgcaaatgttcttgttcatgagcaagatttttacgatttagcatgggcatattttgaaaagtgtgcagaagatcgtgtcgttcatacagaaatgttcttcgatccgcaaactcatactgaccgtggtattgcttttgcaacggtgatcaatgggcttaaacgtgcatgtgctgacgcaaaagccaaatttggtatcagttctcagctgatcatgtgtttcttacgtcatttaagcgaagaagctgcatttgaaacgctcgagcaagctttaccgtttaaacaagatattatcgctgtaggacttgattcaagtgaagtaggccatccaccagctaaatttgaacgtgtttttgctaaagcacgtgaagaaggcttcttaatcgtggctcacgcaggtgaggaaggtccacctgaatatgtgtgggaggctttagagttgctcaaagtaaaccgtattgaccacggcgtgcgttctgaagaagacgaacaactaatggctcgtttaattaatgaaaaaatgccattaacggtttgtcctttaagtaacttaaagctatgtgttgttaaggatatgaaagatcacaatatccgccgtcttttacaaaaaggcgtacacgtgactgttaactcagatgatccttcatatttcggtggttatatgaatgataatttctttgccattcaacaggcattagatttaaccaatgatgagttgaagcaactcgcaattaactcttttgaagcctctttcatttcagatgaagagaaacaaaagtggatttcagaaatccagaaaatctaa

SEQ ID NO: 63814 - DNA, 558 bp, Acinetobacter baumannii
atgcctgcctcaacctctcaatactacacccgtactgcacagattctgcattgggtcatggccatcatttttatcactgcttgggtgattggtttctatagtggaaattttctaagttatgacgttgatggcagctttaaaggcgatgtcattacgctacataagaatatcgccaccaccattatcttcctcgtggtcattcgtctgctttggcgttacacccatcctgccccacaattgcctgacacgatgtcaccaacaatgaaaactttagctcacatcggacatttattactgtatgtgattttagtcgctttaccagtcactggctgtttatttagctggagtgctggtcaccctgctccggttttatatttatttgaaattccacgcctggtgcaagataaccctgagttattagccattgttaagccattacatatttatatttcatggtttgcaggtttacttattgctggacatgtacttgcagctttaaaacatcactttgtagataaagacaatgttttaaacagtatgaccaaacaacctaaataa

SEQ ID NO: 63815 - DNA, 768 bp, Acinetobacter baumannii
atgattcaacctaacccaaataaatccattaatagttttgtttttgattgtcctgtttgcaatgttaaacatactacttttgatgttaaaggctgggggaatcctgttaaaggtccaaatgaagagctactatttcagctattttcagtatgccgtgcttgtaaaatggctacttgtataactgccactgtaaatgaagcgtatgtaaaatcattttcactaaacttagggatgcgtagtaatgaagaaaatcccgttatacctataatgcaaaaaattcttactgaacaagagcgtgatcttagaatgtttttcagtgagtttagatttattccagtgattcctaacaaagctctggcacctgaacatttaccatcggatttagaaaagattttcaatgaggcttctaagtgtcttgcaattggttgttttaatgcttctgcagcaatgtttcgattatgccttgatattattactaagcatatagtaaaggaaaatgaaagtttgcaacctacaagagatgataagaaatctatccataatcgtttaacttggatatttaataataaaattttaaatgcagggttggaagagttatcacgctgtattaaagatgatggtaatgatggtgcccatgatgggaatataggaaaagaagaagcagatgatttatttgatttcacttatgaacttttagagcaagtttatacccaacctgaaagaattcgattagcaactacaagaagattagaaagacgtaaatcgtaa

SEQ ID NO: 63816 - DNA, 303 bp, Acinetobacter baumannii
  misc_feature (275)..(284): n is a, c, g, or t
atgaaaaaaatcgtaatcactaacgaaaagggtgggattggcaaaacctctgttgctgttcatttggcacattactgttatgagcgcggtatgcgtgttctatttgtagacatggataaacaaggtaatagtggtttctcacttagtaaagttgcggttgagattaaagatacccatagtctatttgcggatatccaaaactttgaaactttagataaatattttgttctttttaaaggtaataagagtttaaaatcactttttgatcctacagnnnnnnnnnnctacagaacaagagtttaa

SEQ ID NO: 63817 - DNA, 186 bp, Acinetobacter baumannii
atgacttcagaaaaaaaggtttggccgttaggaaccaatcacactgattctgagggaacgccgtggaagcgtgacgagcagaacaattggtggttttggcaagaaaactttggctggtcacgttatgtaggtccagtgaaccaagctttcttagatttacgatttgaggtagggactgaacagtga

SEQ ID NO: 63818 - DNA, 1869 bp, Acinetobacter baumannii
atggctcaacaaacaatcgttattgaagtacccggcactccaattagtgagcttgaaccgacttcaagtgtttcaccaaatgatgttttgccagttgttcagggtgatcaaaccaaaaaggcacctttagaacaggtggcagatttggttaagtctggattgggtacggctgcattaaaaaatgaatctgattttgccacaccagctgccgtcgctgaagcaagtcaagcaagtcaaatgcgtgatgatgctcaaaacgagcgtattgataatgtagaacatgggcttgtgtcaatcggtagcggtgcagatgcttctttcagtacttacgctgagatgattgcttatgtacccccaaaagctaacgtttccgtacgaaataatgatccggatccagcattgcgtggtgtttatatttggacaggcacacagtatgtttctggttatgatcctcttgatgaagcaaaaagatttgcactagaggtatctgaagaaaaagccaaagaagaagtctctaaagtatcagaacaaacaacaagccaagaaaatgctgtagaagttaaagacaaatatggaaatatgcttttccgtattgatgtgagctctttagtatatgttgaaggttttaaagaatctttacaatctattcttaaagacttgttaagcaaaggtacatttatttttttggatgaaaatggtggcaatgtattaaatgtcaaagatgtgaataataatttagcattgtgtttagataaaaataatgaattatttttatctggattggaccaatcagtacagtctcttttaaaaaatatcggaaaaaataataaagaatattcatgcccactcactacatcttcaacagcagatctatattcaatagaagctctaacgagtttaaactatctgaaaataaacgattttgaagtctgtccaattccacgtggtttagtaccccagcaatatcacattggtaaagattgggttaataatatttttgcccctatatctacaaatgctctaaaaattgctgcatataatgatcgtggtactaaaacaaatttagtacaggattctggagtagttcatcctaacttaatcttatttgataagcctcttgcaggttttaagtattggcttgcgataaatccttacactaataccaatgaggactatgagcttccatatatttatggttcaaattctgaaaatttagataattgggagcttattgagtcctttccacaaccatttgataccgacccattgacgaataaagatgatgaattaatcgaatcaacatctggacatttatctgatagctttttcacatacgatacaagtaatggaacattatatttctgttggagaaaacttctatactttaaagatggaagagatcgcagtttagcaaagtgttcattgttagcaagtaaaacgaatgacggaataaactggtctgggaaatttgaaatttatccagaatttacgaacattaataaaaatattttggcatcacctgcgatgatttttaatcctatcgatgggcttttctatctctaccatatcgatgattctgtaaacggaagaattactttacagaaaacagcaaatttggaaaatccaaattggtctgatcctatttacccatctggttttgatgcaatcactccatatcatatggaaataaaatgggttggcgatgcatttgtaatgcttattcatgaagaagttaatgatcaaatacattttgcaatttcttatgatggcttcaattttcaattggggaaaagtgttttagttggtgagacttcactttataaatcgtcattgggtcggtatcaaatggttgtggaaaggactcaataa

SEQ ID NO: 63819 - DNA, 441 bp, Acinetobacter baumannii
  misc_feature (419)..(428): n is a, c, g, or t
atggatactaaaaagaaaggcgatatttttgaaaactttgtttttaactacgtttcagctctaatccaaaaaggttatatggggcttaatccaagtcacactaaaatttacaagcaaaagaaatattattcaaaggatcgagaggactacattatctttgatgtagctattgaagttttcttatttgatcaaaaggaaccatatttagtaatcctaattgaatgtaaaaattatgaaaaaaacgttcctgtggacgatattgaagagttttcaaccaaagttagtcaagtcggaaaacattatacaaaggctatctgcattactaaaaatggctttcagaaaggagcattaaatgttgcaaaaaatagaaagatagggctgtggagaattacagctaatgataatcatgaagttatatnnnnnnnnnnaagttatatttaa

SEQ ID NO: 63820 - DNA, 201 bp, Acinetobacter baumannii
atgcttttagatacaactttttggttagattcgccacgcattactgtattggtattttcagaagatacctcatacattgcccaacataatgtcactgcactaactgcaactatacctattcttttcataaatattcctattaagttaagtatgaaattcttagaaagtagtgttaaagtaaaatttattattaatatttaa

SEQ ID NO: 63821 - DNA, 285 bp, Acinetobacter baumannii
atgcaattaacatttaacaaacgctcaattttgccagacgtctacaagaaggacgacaaagtttatttcagtacaactttgttcacaccagtacgttacaacatcaaatttggtcaaggtcttatgccgattgatcaaatgaaagctgtacttgatgactgtgctgagaatgcacaagaggtcgagattgaattcacagagtcacaaggtcgttttggttctgagttaacaatcttttcagttaagccattaccaaagaaaaacccaatggaatcaaaggcttaa

SEQ ID NO: 63822 - DNA, 1227 bp, Acinetobacter baumannii
gtgcttgatcatcttcgtttagctatccctgtcataccaacccatgttcgttgtgttgacggcaaacaccattattttaatggtgatatccgtgatttcggtttgcccgcagcgactcgacatgttggtagggcagatgatggttctacgactactggtgatctttaccatccttatgaatcgcttccgagcgattacacggatatggcaatgaagttctatgcaaatacgatgaatacatttccgtatgttgaaattaaagcttcacctttgaaactcttgcagggtcataacgtttacggttttgaaagtattcatcttggtgcaactgaaatgcttggcatgttagccgatgcttatcctgaattattaccaatcttagattttgaaaatatcgaggttttacacctagatacaacgtattttgtacgtttaccgcatcagaatatggtgcaaccagttcttgattatatgtctaatatttctgttggccatcgtaaggctaaacaggtcaagtacgacaactatattacgtggggcaatgaagatggacgttatatccgccctaaagcctatggcaaatttgaagaagttaaatctcagttaagtaagatccagaagcaagccgataaaggttgtatgcgctctaaagcgttagttttagctatgcatgatgctcttaagttttctaatgcctgtttacgttttgaagctcgtatttgtaagacatatctaaccaagaatggttatccaagtaatttgtggaaattgatcgacttacagcgagatcaaccaagtttattagccaaattatggcatgtagcgtttgacccgatttttggcgcattaaagggtgagaatatgaatttttctgatgatggtgaaatcttagaattacttcgtgcaaatctttttactattactaaatctggtaaaaaaagtacgactaaggcagataatgcctttaaattctactgcttacttagacagatgggctgggagtcagttaaagccatctataaggaaagtaccttttacgacaatgttaaagctcttactagcgttaaaaatattgatcgtggtcacttacagaacctacataaaaataaaaacgggaaagttattccgtttacacgtcttattgaaatcaagtttgagcagcagcttccacctgattatcaaataccagtttccaagtatgccgataaattcggtttagtagcctag

SEQ ID NO: 63823 - DNA, 204 bp, Acinetobacter baumannii
atggcaaagacatttagatttactgatgaagaagaaaatgcacttaatgaagtagcattaaagttgaatagagacttggtaaaagctggaaaaaagccgttgcgagatactgagatattccacgaaattattaagcaaacccttttagaaggctttatagaagtaactagagatgggacagtaaaagtcgaaacaaaaaaataa

SEQ ID NO: 63824 - DNA, 252 bp, Acinetobacter baumannii
ttgcatgtattgatttgggcatggcattgggcagagccttttgacacacgaattaactggtccaaagcaaaagcttatgccttaactgaaaaccagttaattaaaaaacatcaggcggttatgcaatttaaaacacaacttgaagccgatgagagcacaggaaattccgccgttttatcctcaagtgcgattagccgtcttttaatgccttatgaggtatatctgagtgattcattctcgtgtgtattttga

SEQ ID NO: 63825 - DNA, 1410 bp, Acinetobacter baumannii; identical to SEQ ID NO: 49088

SEQ ID NO: 63826 - DNA, 2148 bp, Acinetobacter baumannii
gtgcttatttttcatggaaaacctgttcatggagctatcttcgatatggatgggacaatgtttgacactgagcgattacggtttcaaacattgcaacaggcatctcaagaactcattgggcaggagttttcacacgaatatttaatgcaatgtttggggttaagtgcgactacagcggaaaagcttgcacaacgtttatacggagtagatgttccatatagggaaattcgaaaacgtgccgatgagatggaactagaacatattcgaaaacacggcgtacctattaaaaaaggtttggttcaagttctagagcgtttaagaaaatctggtttaagaatggctgtggctacttcaagccgtagagcaattgccgaagaatatttaattaatgcaaatgtttataaattttttgatgtcattacttgtggggatgaagtagaacaagggaagccacatccagaaatctttttaaaagcggctagtcaacttcatttagacgctaaccagtgtcttatgtttgaagattcggaaaatggtttaacttcagcgcatacatcgaaaggcctaacaattttattaaaagatattaaagaaccaaatgatgaaatgttagataaagcgcatttttattatgatcagatgtatgacttcttaacagatcttgaccagtttattcctgttatggatatgccagagatacaggaaccttttccgcaaagtctgaatcagcttacggttggaatacatggtttcggtgctattggcggtggttatatagcgcagatcttgtcgcattgggatggttatacgaaaccaaaacgtataattgcgtcaacaagaaatagtcttttccgcgaagctgtaaatgcgtttggaacctatagtattcgctatgggcaattttcttatgatgaacgtattgagaatatgaccattgttgattctgacaatgaacaacaaatgttagagatgtatactcattcaagtttgattgcattatgtttgcctgagcaagcgatcgaacctgaatcaaagataattgcaaaagggttatatgcgcgttttaattcgcaacttgaaacatgtatagaacctttaacctttctaattattttaaataaggttggtgcgaaatatttggttatgaagcatcttaaagaagctctactagagttaaccaacgatgaagatgtaaccgagcatattttaaaagagcattacttttgcgacaccgttgtaaaccgtatggtttcaaaactttctaatcagaatttatatcgtcaacttcgtattaagcataattttcttgaacagcatttagaagatgtggagcaagaagaccaaatcgaaattgaagactgtaataaactaactccagatcaactaaatcaggcttctatctatgttgataacatgcgccgtaatttccagccgggacatatcttacaaagcatggatttaatcttgttccatagtgaaactgatatgccaatctatgtagagaaaggcagtcctttacttgaaaagttgcgtcaggtggtattggttgaccaaattactgacattcaactcattaaaaatcgtttatggaatggtgtacatgcgatgcttgcttggtatgcatctttaatgggttatgaatctattggtattgccatgggtgatcatttagttaaagcatttgcagagaacttaattgcagaagtgaagcagggacttgcaattgtattacctaactatgcaaaagatctggatcgaatgtcacaaagttttctagactcatgtgaatatgcatttaaagatccttgtcaacgcgtagctagagatccactacgcaaactcactcataatgaacgtgtcatggcatcaattgcagtgaatatttgtcatgatttgccttataaaaatttattaaaaggtgctgctttaggttatgcctatgcgattcaattcttagaagttgaagagactaaagcagttgaacatttgcagcaacaaattcagaacctagacttgagtacaactcaaagaagacagcttgaagctgagttggttcaacttatccaatatttgttttctgaacaaggtaaacaacctttggacattaagtcgaacaataccaaaactacaccaactcaatatatttga

SEQ ID NO: 63827 - DNA, 177 bp, Acinetobacter baumannii; identical to SEQ ID NO: 48891

SEQ ID NO: 63828 - DNA, 501 bp, Acinetobacter baumannii
gtgtatcgacctgctttagaaactcaattattggcccaagctcaccagcatggcgcatctttagctaaagttgctcatcagttagcaatgaagccaattaaagagtcttcggaaacacttaaatcatttagcccatcagatcaggccaaaattcttgagatggcttatgatgatttatatctacagtttattggtcgcaaagttgaagaaagctttgctcagccacagcttagacagcttttagcactacgaagtcagattgatttagacaaacagcgccaagaacctaaaagaccatcaaccgagccgactcaaggccataatgcacgtaatgtctcgctaaaactgggcgaggtgcaaggtgacaagtttatcgagataggtcataggcaggcttatcatgacttaatagatccacagggcggataccgtgccggtactcaattattatttttaaatggtaatgcacagtggcgagatgaccatttaaaactccgctga

SEQ ID NO: 63829 - DNA, 435 bp, Acinetobacter baumannii
atggtaacaaataattttgaaaattctctaaattctagtttgaattcggaagaaagcattaatcaacaatttactcaatttgtagataagtattttagtttttctaaagctttagctgttagtcaagaaactccaacagctatattaactgtgggtactcatgattcaggtaaagacgtaatcgttgcacaagcacaagatgaattaaataaaaaaggtggttcaattttaattgaccaatcaatttttaaagttgcggatccgcaacaagataaagaccattcaattcatcaattgatttctactattagtaatgaaaaatataatttgcttttaaatcatgaatttaaaaatgaaaatgttttaaatgatattactgaatcgcttaagagtaaaaattatacgattgaaatcctgtctcttatacacatctga

SEQ ID NO: 63830 - DNA, 828 bp, Acinetobacter baumannii
atgtgtataagagacagaatcattaaagagaatagtctcgataatgagttaccagatagtatttctgatgaagaagccgaacgtttaaaagccgacttaaagcgtttaaatgctgatcctgaatgggcaggtgaagatggtttacgttaccaagcattctttgaacgtatcaataaggctctagagggggattctgatgcagtagtttgggcacgtgaatggatttctgatctagatgaccaggctttggctcaacagcaagcagaattagaagcaaaaaaactttgtgatgccgaaaatgaagctaaacaaaaaagagatgaagaagtattagcagcacgtacagctggtatagctgaaaacaaaatgatgcaagcatggttagacactttggaaaatcctgaagattctaacaacatagactttatggcttgggtttcagatcgccgtggtgaattcttaaaaaactggaatggtgccgaaggttcaccagaatatttaacagcattttatgaatattcaagagcatgggcagatgaacatttagcggatcgcctcagaaataaagagccagcccaaaattcagataatgaagaatttaaagaactaaatgctccgacagaagttgaagatcttcagcctagtacgacaaatgatgaaggtaatcaactttaccgttcagtaattgaagggcaggttaaagttaatcttgagttattagagcaaattcgagatgaagcagaaaaagacttaaatgatccacttcttattccagcggtgacagagctcttgaatcaagtacaaaaaatggaagcggagaatatctaa

SEQ ID NO: 63831 - DNA, 603 bp, Acinetobacter baumannii
atgggctggacaggtaaacatactttactcattcataaaaagtcaggttcattctttgtcttaggtgaactatttacatcacttgacttaccttttgatgaacctgctacttctcactgcggttcttgtagtgcgtgtattgatatttgcccgacacaagcgattgtcgaaccttatatgttagatgctagacgctgtatcgcttatctcaccatcgaatataaaggaatcattgcagaagaattacgtgcaggcattggtaaccggatatttggttgtgatgactgccaattaatttgcccgtggaatagttttgctaaaacaacgtctattcccgatttcaatcctagacatggtttagataatattagtctgcttgatatttggcagtgggacgaagctacttttttagccaatacagaaggcagcccaatacgacgtacaggttatcaatccttcaaacgtaatatcgctatcggtttagggaacgcaccgtactcaaaagaaattgtagatcagctaaacaaaggcaaaagtttacatgacgaaatcgtcaatgtgcatattgattgggcaattgaacagcaacttaatcaactttag

SEQ ID NO: 63832 - DNA, 225 bp, Acinetobacter baumannii
atggctaagcgtgtggacgagggtattcagctcatcgtgggtcggcgctttgacccgatggaagcgctgtttaccatggccgtcttcggtgtaaatcccgtcgagaaacagcatgtggtagtgtacattcagattcagcgcggagccaaagcgttggatgagcgttaccgatccactttgtgccgtagccttggtaaaacccgctttcttaatcagatgggttga

SEQ ID NO: 63833 - DNA, 1110 bp, Acinetobacter baumannii; identical to SEQ ID NO: 57626

SEQ ID NO: 63834 - DNA, 147 bp, Acinetobacter baumannii; identical to SEQ ID NO: 48436

SEQ ID NO: 63835 - DNA, 780 bp, Acinetobacter baumannii
ttgaaagagcacggtattcctgttgttaaagatttacctaatgttggacaaaattatcaagatcatattgaaatgtcccttatttataagcttaaaggtgctttcagttatgacaaatataaaaaattacagtggcaagctgtagcgggacttcaatttttgttatttaatgctggacctgcgacatcaaatattattgaaacaggtgcattctggtggagttctcaagggaaaacgttaccagatctacaattatttttcttagcaggtgcagggattgaagaaggtaaagatggggttcctggtggtaatggttgtacgatcagtattacacaaacacgcccagaatctgtaggctatattaaactacaaagttctgacccatataaacagcctttaattgttcccaactatattacatcgccaaatgatttaaaaactttagcggatggagctaaattggtgcaagacataatgtcccaagaggcttttaaagattatgttgaagcaagtcatgttccagaaaaaccactaaaaactcaggaagattttgaaaatttcgttcgtaaggaggcttatcctggtcttcatccttgtggcacatgtcgaataggggaagatgaaactacctcagttgtagatcctgaattgaaagttcatggcgtcgaagggctacgagttgcagatgcatcggttatgcctaatgtaatctcaggaaatttaaatgctgtaacgattatgattggtgaaaaagctgcagatttaatcttaaatggttaa

SEQ ID NO: 63836 - DNA, 531 bp, Acinetobacter baumannii
atgcggaccatctgccaacactggaagtgtattgtctgcaagcgtccaagtaccgtcaccattgttcactgctgggtaatccacgccatccacagtcactacaactgtcgcagtaggatcatcaatcgtaccggtcaatgcaggagttgtatcgttagtcgatacatccgcgaaagttactaccggtgctacaaggtcaacgataaagccgtctgtaccgtcaagtacatcgcctgtacccaagttacctgcaacatctgtgtagctgccatcagccacggcaatgcttggtgctgtgcctgtaccatccggtgtgaacactgctgtccaggtgatgttgtccgttgtagtcaggccagtcaatgtaccgcctacaaccgtgatgtcacttacatcaaagcctgcaactgcctcactgaacgtgaaggtaatgttggcatcttcacctgccgcaagtgcaaggtcatctgtcgtgatcgcaagtgttggtgctgtcgcatcaacagtcactgtacctgttaccggagttga

SEQ ID NO: 63837 - DNA, 921 bp, Acinetobacter baumannii
atgcctcaggtcattgagattaaacgtgagattattttatctgctggtgccttgcatactccacacatcctgatgctttcaggtattggtgacaaagcccatttgaaagaacatggaattgaatgtgttgctgacttacctggcgtaggccaaggacttaaagaccatgtggctgcgccggttcaataccgtgcaacccaaaatgtttcgattgccaaagaactcaccttgtttggtaaagcaaagctgggtgcccagtggcagttctttaagaaaggtttgggtgcaactaacttctttgaagtgggtgcatttattcgaactcgagatgacattaaagtgcctaacgttcagtttgagttcattccattattaggtgaattccagcacggtagcgtccaactggaaaatggcttccagtatttctttagtcttatgcgtccgacgagtaccggccgagtatggttaggaagtgccgatccgtttgcagcaccgaaattccgatttaactttttaagtacagaagaagacagacgtgatgccattgatgcggttaaggcaatccgtaatgttgtatcacaaaaggcatgggatcacttacgtggtgaagaggttacaccgggaccgaatgtacagacagatgaagaaattctggcaatgctaagagacaatgcaggtaccaactatcatccgtgctgtacatgccgtatggggcacgatgaaatgagtgtggttgatgagtttggccgtgttcataccttagacaatgtgcggattgtggatgcatcgatcatgcctgagatcccgagtggtaatttgaatgcaccgatcattatgatggccgaaaaaatggccgatattgttaaaggagttaagcctttgacactgaatcaacctgtagattattacaaaccgaattga

SEQ ID NO: 63838 - DNA, 921 bp, Acinetobacter baumannii
atgcctcaggtcattgagattaaacgtgagattattttatctgccggtgccttgcatactccacacatcctgatgctttcaggtattggtgacaaagcccatttgaaagaacatggaattgaatgtgttgctgacttacctggcgtaggccaaggacttaaagaccatgtggctgcgccggttcaataccgtgcaacccaaaatgtttcgattgccaaagaactcaccttgtttggtaaagcaaagctgggcgctcagtggcagttctttaagaaaggtttgggtgcaactaacttctttgaagtgggtgcatttattcgaactcgagatgacattaaagtgcctaacgttcagtttgagttcattccattattaggtgaattccagcacggtagcgtccaactggaaaatggcttccagtacttctttagccttatgcgtccgacgagtaccggccgagtatggttaggaagtgccgatccgtttgcagcaccgaaattccgatttaacttcttaagcacagaagaagacagacgtgatgccattgatgcggttaaggcaatccgtaatgttgtatcacaaaaggcatgggatcacttacgtggtgaagaggttacaccgggaccgaatgtacagacagatgaagaaattctggcaatgctaagagacaatgcaggtaccaactatcatccgtgctgtacatgccgtatggggcacgatgaaatgagtgtggttgatgagtttggtcgtgttcacaccttagacaatgtgcggattgtggatgcatcgatcatgcctgagatcccgagtggtaatttgaatgcaccgatcattatgatggccgaaaaaatggccgatattgttaaaggagttaagcctttgacactgaatcaacctgtagattattacaaaccgaattga

SEQ ID NO: 63839 - DNA, 507 bp, Acinetobacter baumannii
atgccggttattgaaataagaatggataagccaaaagatgatgactcatatttattccctttaaaggcacggacaaattcatataaaaatggatttgctcgatttggttctaatcgtagtggtggaaaacgtaaacacgcaggttgtgatctgtatgcaccaacaggaactgaaattagagcgatggctgatggaaaagtccgtgtagtaaaaggtttttattctggtactgatgtaattgaaattgtacataaaaaacatattatacgctatggcgaggttctggcaggaaagtccttagtaaaagttggagatgatgtaaaacgcgggcaaactattggctatgtcggtaaactcacagtacaagttccaagtatgatgttacatttggagatgtattctaatcctaaagatactagtccattaacagttcgtggcaataatgcctatcaacgacgctctgatctaatagatcctactacttttttagataattcaacattatga

SEQ ID NO: 63840 - DNA, 660 bp, Acinetobacter baumannii
atgaaaattgaaacctgtaaagcaaataacccactgtatcaagcctttcttgaagcgggtgtacaggcaggttatgaacgtgtagatgaccataatggttacaagcaagaaggcgttcatattacccaacgtaatatccataaaggtttacgctggaatacatcacgtgcttatatccatgaaaataaggatatcagccgtttgcatgtgtgtgacaagtcacaagtgacccgtattgagttcgataagaagaaagctgtacgtatccatttccattggcatggtatgcctcaggtcattgagattaaacgtgagattattttatctgctggtgccttgcatactccacacatcctgatgctttcaggtattggtgacaaagcccatttgaaagaacatggaattgaatgtgttgctgacttacctggcgtaggccaaggacttaaagaccatgtggctgcgccggttcaataccgtgcaacccaaaatgtttcgattgccaaagaactcaccttgtttggtaaagcaaagctgggtgcccagtggcagttctttaagaaaggtttgggtgcaactaacttctttgaagtgggtgcattattcgaactcgagatgacattaaagtgcctaacgttcagtttgagttcattccattattag

SEQ ID NO: 63841 - DNA, 501 bp, Acinetobacter baumannii
atggaattaacccataatacaactttagccaaatatagttcactagttgtggaagtggagtcagcaaaggaagctggttttaaaagccttgaactatctgcaaagaaggttgcggattatctagatgctggttttacagagtctgaccttaaaactttacttaaaggcttaactatttcaggaatgggatatttagttaatatagaaagacaggggcttgaacgggaagatttaattactgatgcccgaaaaatatttagtcttgcccaaaaaagtggtgcaaagggtgttcaggttttgagtggacctcttgacgtaaatgctgttattagtcattccgaacaaaaacaatttaatggttataaaggcctgttaggtctagaaattgatgagatcatagaaaaaacagcacaaaatttatcgatcttggcagatgtagctcaagagtatggtttagtaatttatctagaagctctggcatggaccccgctcaaaacctga

SEQ ID NO: 63842 - DNA, 195 bp, Acinetobacter baumannii
atgaaagatctgttcccatctaatatatatgtattagttgctttaatggtgatgagctttatcttatgtactttttcattattgaaaaataataaagataagcatgtttcatttattaaagagttctttcggcacattggtatacaaagtggagcaataattatcatatttggtttactttcaagaattttataa

SEQ ID NO: 63843 - DNA, 138 bp, Acinetobacter baumannii
atggatagttttacacttactctatatctttcaagttttttattgttgcaatcactgagttttctttttaaggatgactttgaagaatttgatacttctttaattggtttaagtttaatagacctcttgcgaaagtaa

SEQ ID NO: 63844 - DNA, 204 bp, Acinetobacter baumannii; identical to SEQ ID NO: 59027

SEQ ID NO: 63845 - DNA, 666 bp, Acinetobacter baumannii
atggtaagaaatcaagatcagcttttcagagatcatgacaagcttcttcgtcatttggcacaccggaatattagccgacttacctcagtcggctattgcattgacgttgaagagctgtatgccattttctgtgaagttttcgtggtatcgattcagacttgggatgaaagcaaaggcaaattaacgacttatttaactactgcttgcctcaacatggtatcgagattactgaaaaaataccatttgggcgataacagaacggaatacgagtccgacattttgcatcgtatgggtgatggtgaagatgactgtgattatgacgtttttgttgatcaccagagccaaaatattttaggcccatatgagttgatgcagactcttacagaagaaatgcagcagctttcaccgttcgcaaaaattttactcaaattcaccttaaatccgcctgatttcattgaaagagagttgttggcacaagaagccaaatatcagctttccctcaatacgcctgagaaaaatgaatcgcggggaccacgacgtcgcaaattgaatctaagttttgtggctaattgcatcatgaaaacagccgaaacaaacaaagaaaaacgattcattcgtgacgctgtgaaagaagttgaagaagccgttacgcgcgttgctgtctaa

SEQ ID NO: 63846 - DNA, 306 bp, Acinetobacter baumannii; identical to SEQ ID NO: 54617

SEQ ID NO: 63847 - DNA, 372 bp, Acinetobacter baumannii; identical to SEQ ID NO: 58557

SEQ ID NO: 63848 - DNA, 306 bp, Acinetobacter baumannii; identical to SEQ ID NO: 54617

SEQ ID NO: 63849 - DNA, 207 bp, Acinetobacter baumannii
gtgcgatattccttgggacatgcggatttaagcattgatgccacggtagcggatgaagaattagcggctttgttgcaagtcgaaatcggaactccggtattacgggtcgaacgtttgactcatgatgcaaatggtcaaccgattgactatgaatatctctatttctcaggcgataccttccagtaccgtttacgtattcatcgttaa

SEQ ID NO: 63850 - DNA, 210 bp, Acinetobacter baumannii
atggacaatgcagccttccataaacgacaagatatacaagatctattagcccaacatgggcatcaaatactttggttaccaccgtatagtcctgaccttaatcctattgaaaaaatgtgggcatgggtgaaagcaaaaaggaaaaagtggttggttaactcaatagataagctttttagtcgtttttttaacgagtgtatgggtaattaa

SEQ ID NO: 63851 - DNA, 210 bp, Acinetobacter baumannii
atgcctgactatacatccttctttctaaactctagtagtggtgtagtgccattggaatgtgtagaaataactcatcccgactttgctgcgccattccgattcgtgaaaaacgatactgaaggtgtgacagtaaagcatgattcagcagggcctgatatttcatataattatcaacctatgtccattcaacgctcaaagatggacctttga

SEQ ID NO: 63852 - DNA, 498 bp, Acinetobacter baumannii
atgaaaaagattattttactgataacaatgattctcttccctatagtaagttttgctaaagggactgcatatggcaatactgattgggggatgactccagcacaagtgcttgaggcagagaagggaaaggcagtagagattaagccagagcaatattttaaatcttttgggaaagtcaggattaatgatttaaatattgcatcaggaacttatacagcaaatttcttatttgatgaaaatgatcgtctaatacagacgaatgtggttagtaatgaacagaataatagagcaattgctgcatcacaatttaatgagttacatagactgttaacacaaaaatatggtgagccggttttcaaatcactgaataagataacttggaaaactaaagaaactacaattgagctttcacatacatatattccaaattctattgttagaacatctattaggtatgtcccaaacactaagatagaacaagatacttctaacctttaa

SEQ ID NO: 63853 - DNA, 372 bp, Acinetobacter baumannii
atgtcgcaatcagaattgatcagattccctgcaaggcttctgccaaaagtacatgaagacctagttgcatattccgagcaacaaggtgaatctataaatacatgtattaatgaattgcttaagttcggtctatattatgctttgaaggggaacaaagaatctcttgacgagttcatgcctgaccaagaaagcaatttattgaaaataattcaaattatagataagtatttgcttgaagttgcagtggatgaatatgcggctaataatagcgaagtatacctagaattcattggaaatcagttcaaaaaccttaaagatacagagcgcaagatattatccgatgttgcttatgctttagctaataagaagtga

SEQ ID NO: 63854 - DNA, 363 bp, Acinetobacter baumannii
atgaatccaattacagataatgcataccttatttttgcgtgcaagcgggtgagcgatggcgacctagaggcggatttcattattgacggcattgtttatgttgttgtggcagcatcaaaggctaacatacttaaccttgctgaaaagcaggaagaaatagaggttaaattcccaaaacataaaatcatcgtgacacagcgaccattgttcaacttaattgaaacactggatcagcttgagcaattggaagctgcaatgattgcagatggcgatctgattgataacaagcctactggtcgaatcgttgatgcatttgattggaataaaaagcatgacggagcaagacagcgcggtcactgctaa

SEQ ID NO: 63855 - DNA, 552 bp, Acinetobacter baumannii
atgaatatggtagcgcaaccgcagactgtattttttcacaatactcaattatcaattgtcgaatacaacaaccagccttatgtgccaatgaaattggttgtcgaaggtatgggtttggattggaaaagccaataccgaaagattgctaagaagtttaaaacctgcatggtcaaaatgaccattcagctatttggtgatagtcaaagccgcgaagtggttatgttgccactcagaaagctaccagcttggctttattcagtagagcccaacaaagtaaaaccagaacttcgagataccgtcatcaaataccaagaagaatgtgatgatgtgctctggaaccactggacgggtaaattgaatgctagacacaaagcttttgatgagctaaatgcaattgatatggatgaaaaaatctcaaaggcaaaagccacgctacacagccatggattacatctacgcaaagccgaaaagaaaaccaataagcagaagcgtcaagactggattaataagaataccctattgcttaattttggtgaggagggtctagcatga

SEQ ID NO: 63856 - DNA, 210 bp, Acinetobacter baumannii; identical to SEQ ID NO: 63850

SEQ ID NO: 63857 - DNA, 198 bp, Acinetobacter baumannii
atggagattgatccaagaatacgggccaaagagttcatggccctactctctgtcggtaaaaccaagttttacaagatgatcaagagaggtgaaattgctgaaccaattcgactaagtgagaaggatgttttttggtatgcatcctatgtaaaagataaagtcgaagaacataaaaattctgctatagtagccgcttaa

SEQ ID NO: 63858 - DNA, 1206 bp, Acinetobacter baumannii
atgtcaaacataaaattaaccgacgcaaagattaagaccttaaagcctcaagagaaagtttatcgccttttagatgcggatcgtctttatatagaggtgcgtccaactggggttaaagtttggcgattgaaatatgttttaaacggaaaagaatcatcaatgagccttggcgagtacccttctgtaactttggcggatgctcgtcaattaaaagatgaagttagggcgaaattagctaaaggaattgatccggtcgattctcgcaaaaaagaacgtcaggcaatgcaggggaaagttgccaatacatttgacattgttgcaaaggaatattttgaacagaggttaaataataagtcagatatttataagacaagttttatcacatctttaaagaaagatatttctcccgtaattgggaagaaggatgtaaaggatgtcactgcagctgacgtacttaaaataattcaaaatactgtcaaacgtgtaagcaaacagaagaacttcggaacaggagaaaccacagcgattcagaatagaaagtttgtgggcgcagtgatgcgttatgctatcgcaacccttcgagctgaaaatgatcctacttatgcagttcgcgatgtaattgaacgtcctaagattaaccacgccaaacctttagaccgtgatgaaagaaggactatcagaactaatattgacaactacaatggttcagagactgttcaaaatgcaggatacatcctactgtattccatgcttcgatctgttgaaattagaaaaatggaatggccatgggttgattttgataagcgtttagttgagttccctagagaagtcatgaagaagtacagacttcatgttttgcctatgtctgaccaagtttatgaagttcttaaaaaacagtataaaaactcaggaaataaaaaatatgttttccctgctatttataagcctgatggcatgttagataagtcaactctaaacagaatgcttaagtatattggcttgaatgatgttactgctcacgactttagagcaacagcttctaccctcctctatgaaaaaggttatgaagaagcttggattgaaagacaacttgctcatgctgaatccaacaaaacaaaggcatcttatgaccattcacagcacttggatgctaggcggaaaatgatgcaagactgggcagatattgttgatagttggaaagactaa

SEQ ID NO: 63859 - DNA, 210 bp, Acinetobacter baumannii; identical to SEQ ID NO: 63850

SEQ ID NO: 63860 - DNA, 840 bp, Acinetobacter baumannii; identical to SEQ ID NO: 45719

SEQ ID NO: 63861 - DNA, 651 bp, Acinetobacter baumannii
ttgcatgtcacctcacttttactaggcattgtagtaagcgtagctttcttttacatagaatttcgtcaacgtcgtcaagccgcacaacatggtattgacaatagttcgatgactctatttatagtaaaaaatctaattttaagtattgtaattattgcattttcttacttacttgctctatatcaaggtatgccaacagttctaattattatgggtgttctagttgcgctttatacctttattatgaatagaacaactatcggccgtcgtatctatgcagttggaggtaatgcaaaagcagcaaaactttcaggcattaatactgagcgtgtaattttcttttcttttgtgaatatgggtgtattagctgcctttgctggacttatttttgccgcacgtttaaatagtgccactccatcaggtggatatggctttgaattagatgtaattgctgcttgttttattgggggagcttctgcttctggtggtgttggtaaagttttcgctgtggtaatcggtgcatttatcatgggcgttatgaacaatggtatgtctattatgggcattggtgttgattatcaacaggttattaaaggtctagttttattaggtgcggtactgatcgatgtctatacaaagaataaaggttaa

SEQ ID NO: 63862 - DNA, 255 bp, Acinetobacter baumannii
atggtgattgtatctggtcaaattgatctttcagttggttcggtagttggatttattggtgctttggctgcgactttaatggtcacacgaggtatgccatttataccagctatgcttatttgtattttggttggagcagcaatcggtgctattcaaggatattgggtagcttattggaaagtaccttcatttattgtcactttagctgggatgcttgtttttagaggattaacactgatttctcttgatggataa

SEQ ID NO: 63863 - DNA, 516 bp, Acinetobacter baumannii
atgcagtggagttataggtttgtaagtggtgtattagtacttgccagtattattggcatgactttcgcgctatatcttgaacatgttgtggggcttgaaccatgcccactctgcatttttcagcgcgtgggtttgatgacaatgggcatagtggcgttgattgcatttgtacacaatccaatttctaatgcgatgaatcgctgttatgccatgctgactacattaggaattttatggtccgtcggggttgctgcacgtcatgtatggattcaaaccttacctcctgatcaaattccgagttgtggacctggcttgaattacctaatagacacattacccctaaaaacaataatgcaacaagtccttcagggatcaggcgagtgtgctgccattgattggactttttggggactagcgctcccagtatggtctttaatattctttagttttttactgttaatttgtttatggcagatcttccgtgcttatcctatgccaaataattacagtaaataa

SEQ ID NO: 63864 - DNA, 210 bp, Acinetobacter baumannii; identical to SEQ ID NO: 63850

SEQ ID NO: 63865 - DNA, 306 bp, Acinetobacter baumannii; identical to SEQ ID NO: 54617

SEQ ID NO: 63866 - DNA, 597 bp, Acinetobacter baumannii
atgggcggagtgattagccgcttgctagtaagcgatgcagatgtttctgatttagccatgcaaaaaatgaatgaagcacagttaaagcgtttaaaagaaaatccggttattcgtgagcgttttcagttcaaagatttgccctattttaagcgggttgtttttgtttcggcgccgcatcatggtactgactatgctgaccgatggtttacacaaattgctcgccgtattattcgcttacctgccgacttttttattgccgttgaaatgagagatgagaaaaataccaaactcagaaaaggcttaattgaaaatggagcaagtaatttaagtcgttcttccaactttatgaagctcacccaagccattcaaccctcgtccaacgtggtctatcactcaattatgggcaacataaatggtacgacagataagtcaaaaatgagcgatgggattgtgccgtatcaaagttcacatttgggtggggagcagtcggagctgattattaaaggtgggcattcgattcaaactagccctgaggcaattttagaattacgccgtattttacgattacattttaagcagtcgcagccttcaaaatag

SEQ ID NO: 63867 - DNA, 291 bp, Acinetobacter baumannii
atgggagcacataaatacattattactgttgagtctgatattccccctcaaattcttctaggtcaaaaccttggtggcgcaatcgtcaccaagcttgaacaagaaaagttagagcttgtaagtgctgctgaattggcaaaggtatataacttgagcgttactaccatccgagagaagcttgtctcaatcaaccaaggcacgggcgggaaacacatgtacgatcctgagcgagcacgacaaatactaacaaaaaaagatgcaaacaaacgtggtagaaagagagctaattag

SEQ ID NO: 63868 - DNA, 258 bp, Acinetobacter baumannii
atgaaacacatagttgaatttacacattatggctggtttggtatctgcccagtaatgttttcagaacttgaaagtggttcaccaattattgagccacgatttaaacttgtttggctcatgatgttgagtgagtttctaattgatctctacatcaacttcaaagttcagcgtgatgctgaatatgagccgatgtatccaatgttaattaaaggcgagtacaagaagcctaaacgcgttgagtttgaaattaaagaatag

SEQ ID NO: 63869 - DNA, 618 bp, Acinetobacter baumannii
atgaaaaatcttctccctccgaatagtactgaacttgaaaagaaaattgctgaagttttagcggaaaattcagagcttcccgttgatataaaaagtttagttacgctacagaatgtaccgagtcaattcttaccgcatattgcatgggaaaaaagtgttgatcgttggcagcaaaattggacagatgatttcaaaatcaaccaaataaaaacggcttttgatttacataaatataagggtaccaattatgcactccgaagactttttgagtcatttggcttctcattaacgatttatgaatggtggcaagaatcaccaaaaaatgagccgggtacatttcaaattacgatcgatacactcaatcaagagttatcagaagaaacaatcaatacgttacttcaactttttgatgatgcccgtcccttaaccagacactgtcgaaatatacaaatcaatgttcctccaaattttggtcaacttcatgcacttgcaggatgctacagcggcgatgaaacgaccatattcccagaagtcaaagatgcagtaattgcagcgacacctgtttgggccttctacgaacatcaacatacagaaatctatccttttggagctcaataa

SEQ ID NO: 63870 - DNA, 900 bp, Acinetobacter baumannii
atgagtgttgattttagccaactcaccccacctcaagcagttgaagaactagattttgaaactatctttcaggaacgcaaagaaaggttgatttcactatatcctgaaaataaaaagaatcagattagaaaagtgctggatcgcgaaagtgaacccttgactaaacttttacaagaaaatgcttatagagaattgatcctcagatctcgaattaattcccaatataaagcttcattacttgcttatgcggagggatctgatcttgatgcaaaagctgctgactatggagttactcgactacttatttcaccagaagatttaaatacaacccctccaatcccagcagtatatgaatcagatgatgatttacgttttagaacaagtatggcttttgatggcttgtccgttgcaggaccaacctcagcatatgaatttttcgctttgagcgcagatggtcgagttgctgatgcctacgcgttctcaccatatccagctgaagcaaatgtggtgatattgcaacgtaactcaagtaatggagcagcatcacctgaacttattcatattgtagatacttacctttctgatgaaaagagacgtcctacagctgaccgtttaacagttcaatctgctgagattattgagtatgaaattattgcaaaattgcatcataacaatttgcctgaaacagatcctctaattgaagaggctactcaaaatattaaaacctattcaacaacaccaagacgcataggattaagtgtccatttatcggcattatttaaagccatgcatgtctctggggttgaatatgtagaaattataagccctagccaagatattcttgtgagcgcaactcaagctgctttctgcaagggcattaatattacggttgcggggtga

SEQ ID NO: 63871 - DNA, 1011 bp, Acinetobacter baumannii
atgcgtaatgaaacacgtgctaagtacaataaagttatgattgagttagctaaactcaataatgttgaagacgtttcaaaaaaatttactgtttcgccttcagttcaacaaaagcttgaagatcgtattcagcaatcttctgaattcttgaaaaaaattaatattcacgtagtactggaacaatcagcagaagcgattggacttggaatcaatcgtcctatcgcatcacgtacaaatactaatacgaaagatcgtcagccaattgatccaactggtcttgataatcgtgtttatttctgtcgtaaaacggattttgatacagcaattaaatatcaaaaactggatcaatgggcaaaattcaaagatttctatcctcgtttccgtggcgtgatcgtaaaacgtcaggctttagaccgcatcatgattggctttaatggtactagcattgcagctgatactgacattgttgctaatccaaaacttcaagatgtcaataaaggctggctgcaaaaaatgcgcgaagaaaatgaatcgcgtgtgatgaaatcaggtgctgtacaaaacaaaattaccatcgggaaaacaggtgattacaaaaacctagatgcattggttatgaatatcgttgatgaaatgattgacgaagttcatcaagagaacccagatctagtcgtattgtgtaaccgaaaaaccgtttctgataagtacttcccgctggtaaacaaagatcaggaaaataccgaaaaacttgcagcagatatcattatctctcaaaagcgtatgggtaaccttccagtttattcagtaccgtttttccctgaaggcatcatccttgtaacgaccttcgataacttatcgatttatgttcaagaaggttcacgtcgtcgtacagtcattgataatccaaaacgtgatcaaatcgaaaactttgaatcatcgaatgaagattattacatcgaagatcttggtcttgcttgtatggctgaaaatatcgaaattctgccggagtaa

SEQ ID NO: 63872 - DNA, 270 bp, Acinetobacter baumannii
gtgtgttcagcggacgcttacagaggacatgctggtttagtgtttcaaatgaaatatgaaaaagatctagaacaattcatatctgatttgatgtatttacttccgctttacgaaggttcatatcctcaagaagtttttcagagtctactcgtcacacaagtattcttattccggcattcaaatacaaagggattaactgaaggagaatcaactctattgaatgcgctaaggaaactaggaattgggaaaattgtatttaaaaatagttag

SEQ ID NO: 63873 - DNA, 264 bp, Acinetobacter baumannii
atgttttcatggatgaaaaaaacctttattgctgttatgtgtgctgtaatgcttacttcggcttggtctaaagcagtttcacttaaaactatgcatgctcttgatgacaacgagttaagtaaaattacagatcatgaccacccagataataccccgctttcccacacccataaccatgtagaaaagaaaaaggtacctgaaaatttaactaaagaaagtaatcttcaaaatttaaaacttgtacaaaaccctcggcccaagtga

SEQ ID NO: 63874 - DNA, 999 bp, Acinetobacter baumannii
atgaaagccgtatcgtatgttataaataaccatgatgattttaaaaattcattggtagatattgaaaaagcaaagcctacgcttaaggagcgtgatgtactggtaaaagttcaggcaatctctgtgaatccagttgataccaaagtgagaaaaaattcgtctgaagcaaataatcgtattttaggttgggatgccgttggggaaattatcgaagttggctcaaaagttacctcgtttaaagtaggagattctgtttggtatgctggcgatttaacccgagatggtagtaatgctgagtttcaagcagtcgatgaacgaattatcagtcttaaaccaattacagtatctaatgcagaagcagcagcattgccattaactgcaataacggcatgggaaatgctttttgatcggtttcaaatttcagaaacagaagttggcagtattttaattattggtggtgcaggcggtgtaggatcaatcgctatccaactcctaaaagcaaaaacaaatctgacggttatagcaactgcttcgcgtgaagaaacgaaatcttgggtggaatcacttggtgccgaccatgtcattgatcatagcaaagatttaaatgcacaaatcgagacactaggcattgcaaaaccaaaatacgtattctctacaaatcatacagaaacatatatcaaccaaatagtttctctgattgcaccacaaggcaagcttggattgatcgatgatccacaaacatttgatattatgccgtttaagactaaatctatttctatccattgggagttgatgttcacccgttcaatgtatgaaaccgatgatattgaaaagcaaggtgatctattgcaacaggttgcccaattagttgaccagcaaaaaattagaagtaccctcaaccaaaatctaggcaaaattaacgctgcaaacttggagaaggcgcataagttacttgaatcaggcaagtcaaaaggcaaaattgtactagaaaacttctaa

SEQ ID NO: 63875 - DNA, 1821 bp, Acinetobacter baumannii
gtgcatactgacaggccaaaacacgctgataatcaacctgtgagttacgattcaggtgtgaatttgattagcaacgaagatattttccgtctcttgaaaaaaagacatgaccacagatgggcaagctataaaggttgtggcaacgagatttatgagggcattttttacgaaacaatatgtctattggaaaatctggaacgtcagcttggtttggtttacaacagagcctatcctacacgggatgattttttgattgcgctagaacatggtgatcaacaaagattaaatcagatcataaagttctatgaagagttgcgtgttgagcgtgacctaattaaatatgcgcagcaaacgcacttttttagtaagaatgtacaagcctatattgcgtaccttaagaggtatcctgattctcatttttggaaaaagggggatgagtggcaagttaaaacatttccccatgaagctctttttgatttcttcgagatatatttgggtagattacatgtagggcagactgagccaacaacttcgactatggggctggtaatagaaaatccgtctgagtcagatgaaataagccaacaacaaaaacttgctgaatcggaaaatattgaaaagactgatcgcgtagcagtagcacctcttactgaaacgttaactcaggatgtgtataagcaatttgatgaagggctaagacaatttaacgagtttctagcaagacacaagtctttacgtgtgatgtgttttgagatcaccttgacgccacaagaggctacatttgggggaaagtggcgtgctttggataggaagcgaaacgaattatcaggctgttttaacctattgatagaaaggtatgggttgcttgctaagtattcgcgtattgagatgggaatcaattcaagccttgttttgcagtgggtactattgtttataggtcatgatcctttggatacaggaagggtgcgagctagtattcaacaagaattagaattacagatggctggtcattcttattggaatactcagccatttaaagttggtgtacaagatttggggtgtttgtttcattcattggattctggatacaaagatgtcattaaggcgcgttctaagtcagaaagaaaggcatttgaatattgggtacttggctacttatattgtgttgattatttccttaagcctaatctcttatgcatagctgatagcccttatgtggataggcattatgaatattctgttttttttagagaaggaccttctgttaataatcagagtgtcaatcatcggagacatcagaccaaaacggacattgaaggaatttatgattttattgatttggacttcagtgctgaaagtaagcagatttggaaaaacaataacttaccgaaacatgccaaggacgacttaaagttgttagcattactttattcacaatataaaaagaagatgcctatagagtggagagagaaagagaactttgtacagttattagtatctattgaacatttcatgcggttgattcagcataacccagtgcaggttcttattgatacatacctatcacaaacccacattgagaaattcccattgaaaagtttgtcccagcaggcaaagcaatatttgcatattggacagcagttaacgcaatttgatcttagtttaaaagaacaaatagcagatctggcttttgttggatggcgagtaagactttttctacaactattcatagagaatctatggggttttcaaatcaatagggatggaatagctgattttgaaccgtaccgggtttgtcggagacttttttatttaagttaa

SEQ ID NO: 63876 - DNA, 213 bp, Acinetobacter baumannii
atgagtgaatttaattctattgaagttgagttgaagctctctattggcttcgctgtaggtaagcgtcaagaaaaggttttactgagtgactacatctcagaagatgaatggaaagctctaggcttctttgaaaagcaaagatttgtggaagaagaaatcttagaagaatgggctaatgggtacattgacaaaagcgccgaggtgttggagtga

SEQ ID NO: 63877 - DNA, 300 bp, Acinetobacter baumannii
atgaattcagaaggtgtgttcagcggacgcttacacgccacgcaacaaagcatgagtcgtaaaagcaactgttgggataatgctgttgctgaatccttttttagcagcttaaagaaggaaagagttaagaaaaggatttataaaacacgagaaatggctcgtgcggatgtgtttgattatatcgagatgttttacaatcgggtcagaaggcattccgcaaacggctggttaagcccagaagcctttgaacagaaatattttaagaatttagagggatttgttgtccacgatactgtctag

SEQ ID NO: 63878 - DNA, 1425 bp, Acinetobacter baumannii
atgccaattgacacggtgatagtgatgagtattgcgaatctgaaacgtcgtcttgacgaaaaaataagtgtattttctgactcaactcatatacagaccaaatttgttaagcctcagcgtttaatgaaaagattgtccattcttgagcataaatttggtgatcttgaaaatgtacaaccattagaagaaaaaattatcaaatcagttctaaaacttgaacagcacgggtttgatgggatgactaaacgagataggaaaaatttggcttggtctctcagtaaaaaactgcccaattatgaagaaaaaattttattcacacctgtaggtgtaagattaattgattacttcaaccaattgggaattgaccaactccagtttgtttattttccactgttgtatagttattttgcttttgagcaacatgaactagaaaacttagctagtaagtggattcagttaagaaaaatactagatgaaaataaatcttcgatatttaaagcttcaactcggcctaaaaaatggatgacgactcttatagataattcagaggttttaaccacagaacctacgaaaaaatttgtacgtgaatttttacaagataatgatgaaaacagagttgctaatcaattagaaagtttaagaatagcttcggttagttggttttgggatgatttgattcgatctgcaattaagtcgatcaagacaatgaaagaagatgagtattttcaaattatcccacgttttttagtattgcttgaaaaaaataaaatatatgcgacggatattttagccgcgcttctagaacggtatgctagtacctctcagagagagaaagtacatgaggtattaaaacatctagcattggatcaatggggtaatcctcagaatgaatcatcagcgggatggaataacgtaaatgctgataccaaaaaaatggtgattcagtggtttgtaagggcagatttagaagcattctttacgctatttagtcgaacggctgatgtaaatcgctttaattactggattaaatatattgataagatttctttttctcaaatttttcttggaccagcggcattatattctagtcaaatagaacataaaaactttagagaagttaataaagggcggttgaaacgacttattggatcaactcaaactaataatgcatttatgctaaaaattgacaatgtatatgttattgatttttcagatacgggaaatgcctgttatattgttgataaaataccgtataaagaaaatagtagagatgtacatcgcgatactttgaaaccttggaagcatttattaaaattaagtcatacttcaggttggcaaacacgatttgatgaaaaactagctgaattgggaatcttttccagtcaagcaaataattctaattcaagatataaaaggcattattaa

SEQ ID NO: 63879 - DNA, 3249 bp, Acinetobacter baumannii
atgagtctagacgccacccgtgaaagtattttccagaacgacatcattcagcagatgctggctcagggctggcaactcggtacgccacaaggctacaaccgtgaaaccgccttgtatgagcaggacgtactagattttgtgcaacaaacccaagcacaagattggcagaagtttcagcgcatctttccaaatgataccgaacggcattttctcgatgcggtagtcgctcagctgaagaaagccgacatcaatgccaccgatgaacagtcacggacctatggcactttaggtgtgctgcgtcacggagtgaaaacccgcagcgcacgatttttcctctgtcagtttaaaccagaacatgcactgaatcccgataccctagccaattacaaaaagaacatctgccgcattgtgccagagttggtctatagcccgtatgctacggctgccgagttacaggacatgggcaaacaggccaagaaatggcgtattgacttggtattgtttattaacggctttcctgttgctactctggaactcaagtccgagtttaaacaggcggtacagaatgccatgttgcagtacaaacgcacccgcttgccgaaagatccagaaaccaacaagcctgaacccttgctgatgtttaagcgtggcgcattggtacactttgccgtgagtcaatacgaagtctatatggcgacccaattggccggagaagatactttcttcctgccgttcaataaaggcacgcatgacggtggcgcaggcaatgatgtgccagaagaccagaatcactacgccaccgcctatctgtggaatgaagtcctcacaccggacaatatgctgaatatcattggacgttttgtccatctgcaaattgaagaaaaagaagactgggaaggacgcaagtacaaaaaagaactgctgatcttcccacgttaccatcagtggaatgtggtcaccaaactgatcaatgccgccttagaggaaggcacgggacacaaatacctgattcagcatagcgccggctcaggcaagtccaactcgattgcctggacagcacatcagctgtcgaccctgtacgatcaacacaatcagaaactgtttgattcagtgattgtggtcacggatcgtaccattctggatgcccagctacaggacaccatctaccagtttgaacatgccgatggggtagtcggacgcatcaataacaaagaaggcgatggctccaaatcggaaaaactggccaaggcactggaaacctcacagccgattatcattgtgaccatccagactttcccctttgtgctgcgtgcgattgaaaacagtaccaatctgaaacagcgacgttatgcggtgattgccgatgaagcgcattcttcacaaagcggctctacggcacgacaactgaaagaagtgttgatgctggaagagcgcgaagaggatgctgaactgtcttcggaagatattctggatgcggtggtggctgcacgtaagggcagtaataacctcagttactatgcctttaccgcgacaccgaaagacaaaaccctgcaactgtttggccgtgtacccaatcctgagctaccgccatccaagcaaaacaagccagaagcttttcatgtctactccatgcgtcaagccattgaagaaggctttattctggatgtgctgaaaaactacaccaactataaagtggtgtataagctcaaacaaaaaattgaagaagccgacaaacaggtcgatgccaaaaaagccaagatcagactgaatcagtgggtgcgcctgcatgaccacaacatttcccagaaagtgaaagtcattgtcgaacattttaaaaataacgtgatgggcttattgggtgggcaggctaaagccatggtggtgaccagttcacgtaaagaagcggtgcgctacaagttggcctttgacaaatacgtggcggatcagggctacaagtctattcaggctatggtcgcattctcgggtgaggttgagtttaatgacaaggataccgacagcagtggtttagtcgggcagacctttaatgaacgcaacatgaacccgggactgaaagggcgggaattgcgtaaggcctttgacagtgatgactatcaggtgatgctagtggccaacaagttccagactggctttgaccaaccgaaactgtgtgccatgtacgtagacaagaaacttggcggtgttgaatgcgtacagaccttatcacgcctgaaccgcacctatccaggtaaggcggaatctggcacctttgtattggatttctttaacgatcctgaagacattcttggggccttccagccttactaccaaaccgcagaactggctgatgtatcgaatccggatcagatctttgacttgtttgaaaagctgaaagccagcaagattttcttgtggacggaagtcgagcagtttgtagaagccttctttaccaagaacaaatccaatgctgcgatcagtaacatttgcaagcctgcggttgaacgctggcagaaacgttatagtcaggccatcgaagcctataacaccaccagagacatgctggaacgctgcaagaaaaccaatgatgcggtgctgattgccaatgccgacaatgcctttaaagaggccaagcttgaaaaagacaagctggaaatctttaaaaaagacttgggaagctttactcgtttttacgagtttatgtcgcagatcgtggactacgatgacaaagaactggaaaaacttagtctgtatgcgcgtaacctgcgtccattgctgcgtgaaaccgcaacgaaagacgatgaggtagatctaagtaatgtcagtatgagccattaccgcttgtccaagatccgtcagcaagacatcaagctgaaagaagatgccgaagattttaagctggaaccgggcaatgacctcggtgcagccaagccacgcgataagaaagaagaattcctgtcacagatcattgagcgtctgaatgatgtctttatcaccgataacctgactgataaagatatgctcaactatgcctatacggtacgtgacaagctggcggaaaatgagattgtgatgaagcagattgccaataatacccgtgaacaggcaatgctgggagatttcccgaaagccatggatgatgccattcttggcagtagtgcggcacatcaggaacagatgatgcagttgctgtctgatccggcgagggccagcatctttgcacgggtgatttttgatatgttgagcagtcgatag

SEQ ID NO: 63880 - DNA, 915 bp, Acinetobacter baumannii
atgggaacacaattaaatttgaataccgatacggtaggtgacataaaagttgctttgcctaaatcccaaagtgatatttataaaattattgaatttctcgaccacgaaactaccaaaatcgatcatctgattgaaaaacaacaacaactgattgaactgctgaaagaaaaacgtcaggcggtgattagccatgccgtgaccaaaggactcgatccgaatgtcctgatgaaagattcgggtgtggagtggttggggaaagtgccggagcattgggctgtaagtaagttgtcttatgttgcacatggttttaatggagatagaggaagcaactatccatcaggacaagattttgtagatgagggtattccctttatttcttcaagtgaattaattcattcaaaagtagatcctgtttatgcatcaaaaatcacaaaagagaaatacaattcacttggtggattaaaaataaaagttggggatattatctattgcttaagggggagtgtaggtaaaaatggtttatgtgagtttaatgaaggaaccattgcatcttcgttaatgggaattagatgtttttccttgagtccgtattatttattacttttactaaattcaacagtggaatttcaacaaaggtcaaactttactacaggctcagtttctgcgaatttgtctgcagaaaatgtaatgagttataagtttgctttgcctcctataaaagaacaaattgagatagctaataatttgaaaaaagtttttgaaaaatatgacaagttaatcttgaaagcggaatccgcaattcaactcatgcaagaacgccgaaccgccttaatctcagccgcagtgactggaaaaatcgatgtccgcaactggcaagcgccaacggttggggcacacacggagttaagcgcatga

SEQ ID NO: 63881 - DNA, 363 bp, Acinetobacter baumannii
atggctaaatattctcaagaatttaaacttgaggttgtccaatattacttatctggttttggcagacaccaagtaagtcataaatttggaatacatcatagcgatgttgctaaatgggtagccaattataataatcatggtgctgagggtctgagcaggaaaaacacaaatactgtatatactcctgaatttaaatttaaagttattcagtctgttcttgaacaaggtttatctgtacgtgaagctacaaatcaatttaatctgaaatcacacacacagttattaagttggttgctccaatacgaagaacacggtatagatgaaccgtaccgggtttgtcggagacttttttatttaagttaa

SEQ ID NO: 63882 - DNA, 330 bp, Acinetobacter baumannii
  misc_feature (305)..(314): n is a, c, g, or t
atgaatcttaaaattgaaaacccgcccgtaactttacgagagctgtgtttagacaaagtgcgtaatgccattattacgggctatttcccttcaggaaaaagactggttgaaagaaccttatgtgaagaacttggcgtgagccgttctgtagttcgcgaagtgattcgttatttggaagcagaaggtttagtcgagattttgccaaataaaggccctatcgtttcgctacttaactgggacatcgcttcacaaatttatgaaattcgtcgcattgcgccaatcttaagcgagcatttaaccaagcnnnnnnnnnnattcgtcttttgttag

SEQ ID NO: 63883 - DNA, 2976 bp, Acinetobacter baumannii
atgaatgcaacattacctttatttgcaacagagcaaactaaacaatttcattttgaaggtaatttacagcatcaacaagatgctgtaagtagcgttctagcagttttggaaaatgtgaaatttacttgccctaatcagcaaatggctttagtaagtaatcctttagcacctaaaaataagcaactggaattatcagactatggaaatgctattgaagctgtgcaaaaacataatggaattgtaggacaaatagttaaacctgaaagcaatgttctcgatatctcaatggaaacaggcacaggtaaaacttacacctatactaaaatgatgtttgagcttaacaagcatcttgatctgtttaaatttgttgtcgtcgtacctacacttcccattaaggctggtacagtaaattttttaaagtctcaagcatcacaagagcattttgctactaattaccaaaataagtctatttgttgtcatattgtcgaaagtcagccaaccaagaagtcaaacaaaaaattaatgcctcagagtattttagattttgttcaagcgcctaatgatggtcagtcgatccatgtacttgtaattaatgcagggatgttagtaaattcaaaagcactttctgaatcctatgatcgttttgtatttgatcaatataatgttccttatgatgctattgcttcaattgctcctttaattatcatcgatgagcctcatcgctttacacaagctaataaagcatggacaaacattcaaaagttaggtgggcaatttattgttcgctatggtgctacttttaatgatgattactataaccttatttatcaattaacagctgtagatgcttttaaccaagatttagttaaaggtgtagtcgcatatattgaagaatttaaaggtgcaaaagatacttctattaaactcattgaaattgatactagtaacaaaaaaaaagaagaagccatctttcaagtcaaacgaggtaaatttattgagaagattcctttacttaaaaatgagtctttaagtaaggtcaatcagaactttggtaacttaactattgataacttaaataaaactacagtggttttatctaatggattagagcttaaaaaacatgatgtaattgatccatattcctacaatgaaactttgcaggaaaagatgattcgtaaagcaattactaatcattttgaaatagaaaaagatttaatgactcgcccatcagctcgcattaaaccattaagccttttctttattgataatattgaaagttatcgtgggaaagatggagaagaaggccacttagctttatttattgaagctgaaatcaaacagcatgtcactcgtcttttaaaaactgaaaagcatgaagcttatctagaatatttagaaaaaactctgaaggatatttctaaatcgcacggtggttatttctctcaagataactctgagaaagatgaaaaaattgagaaagagattgaggagattctgcatgataaagaatctttattaagtttagataatcctcgtcgtttcattttttcaaaatggacattgcgtgaaggttgggacaacccaaatgtattccagatttgtaaattgcgatctagtgggggtaaaacaagtaagctacaggaggtgggtcgtggtttacgtttaccagtaaatgaatttatgcaacgggtgaagaatgaaaatttccaattacattactatgttgattttacagaaaaagactttgtaaaagagttgatcgaggatataaatagcaaatctgtagttgaatttgatgaaactaaactgactaatgagcttattgctcagattctggataaatattcaaatcatttcaatgatgaggaatctttacttgaacatttagatgaactcgatgtaattaagcgtaataatgacttcaaagaagggggtttagaaaaattaaaacaagtgtttccattggtctttgttcaaggtctaaaagcaaataaagtacgtaatgctggagatacaaagcagaaagcaactatgcgtcttgccaagtatgctgagcttaaagaaatgtgggaaacccttaaccgtaaagttattttggaatacaaaattgaatcagaacaacaattccatgctttgctaaaaggttattttgaggcgaatttggatagctttaaaaaaacaggaagtttcactaaaaaacataccttaattattaaaaataatttagcctcgcaacaggttgagcattcgattcaagaagacattttacctattcaaactatgacctatggtgaatttcttcatgagcttgcaatctcactgaaggtcaaccgtaatacacttcatcaagtttttcttgagttattgcaaagtgatgaaaagcatttagatataaaccaatatttaagtcaaagcacaattcgctctattcgtagtggttttaatgattatttgctaaaacaatcatttcacagctatcaaattggcttaacagatgtttctaatactgtacaccctactgtattcaccaatgaagaaggtgaaccattagctgagatagatagtgctaacttagggcgaatgactgaagctttaaatattgcagataattatctatttaatgaacttttctatgattcccctttggaaaaagaaaacatctgtgaaaaagtttctgaagtgtcagtatttacaaagattcctaaaaactcaattcgcattccaatagctggaggtggaacgtactcacctgactttgcttatattgttgaatatgaaagtggaaagaaaacgttgaatttgctgattgaaacgaaagataaagcaaaccacaccttatctgaagaggagcaacgtaaaattagtcatgctgaacttctatttaaaaatgtaagagcagatattgaggttaaatttaagactcaatttgaaagttcgcaaatagttgaaattattcagcaggtaattggaaaataa

SEQ ID NO: 63884 - DNA, 1977 bp, Acinetobacter baumannii
atgaaaactgaacaaaccctacccactgagaaaataactgcgaacagtcagcaacttgctgttttaaagaataatttccctcagttttttgataaacagggtaagtttattgtttcaaaattacaggaggttttgcaagcagatggtgttgatgttagtcatgaaagttatagcctgaattggttgggtaagtcatatgctcgagttttagccaatgagccagtcagaacaatgctatctgaagacattgagcataatgaacaagagcaaaataagaatagccataatttattgattcagggtgataatcttgaagttttgaagcatctaaaaggtgcatatataaataaaattaaaatgatttatattgaccctccatataatacaggggcagatggatttacatatcaagacgatcgtaattttacacctgaacaatttgctgagcttgcaagtctagacttagacgaggctaaaagagttttagatttcactcaaagtaatgctaatagccatagtgcttggctgacgtttatgtatcctcgtctttacattgcaaaacagttattaaaagatgatggtgtgattcttatatcgattgatgataatgagcaagcccaacttaaaattttatgtgatgaagtttttggagagcaaaacttcataggtaatattgtttggaaaaatgcaactgataataatccaactaatatcgctacagagcatgaatatttattagcttatgcatttgataaatcgaaactagaaagtatttggaaatcacctatttctaccacaaaaaataacttagttgagttgggtaaaagtattctagcaaatagtgctaatctggaagaagctaagaaaacatatacaaaatggtttcgtgagcataaacatgagttaggtactcttgatcgatataaatatattgatgaggatgggatatatacaggaagtcaaagtgttcataacccaggcaaagagggttatagatatgacgtagtacatcctgtcactaaaaagccatgtaaagaacctttaaatggctatcgttttcctaaaagtaccatggacaaactattagcttcaggaaaaattttatttgggcaaaatgaagaaaaaatcattgagctaaaagtctatgctgaagattacgttgataaattatcaagtctaattgaattagatggtcgattaggaacttattcaattacttcattattaggtaatgggaaaatttttactaatgcaaagcctgttgaattattgagcaagcttttatcttatattggatcatccgaggattattatctagatttctttagtggttctggatcttttgctgaagcaatcatgcagttaaattacgaagatgctaaaaatagaaagttcatttgtgtgcaaattcctgaattaattgatccaagtaaagaagcttataaagcaggctatcgaacaatttttgaaattaccatagatcgtattattaaagcaggtgaaaagctagctcaagatcatcctgaaagtcaatttaaacatggattcaaagtttttaaaacatgtgaaaactttttaccgttatctagttatagagatttaaaacaactaacgttatctcagttagatgagtcatctgttacagctggttttgatgaagctcaacttcaagatattttaacaacatggaaaggcttagataaaattttattatctgaaaatctcaaatctatcatgcttgataattatatcgcttacggctttgggcatattttgtatctagtgaataaaggttttaatacaaatgctttaaaagaattgattcaaaaacttgatgatgagcatgaattccaaatttctaaattggtcatcttcggtcatcattttgatagtaaatctcaacgtgaaatcgatgaagcaatgaaaaactataacaataaaaagtcgattcctgttgatgtggtggtgagatactaa

SEQ ID NO: 63885 - DNA, 1314 bp, Acinetobacter baumannii; identical to SEQ ID NO: 50523

SEQ ID NO: 63886 - DNA, 387 bp, Acinetobacter baumannii
atgcgatttggcttattctgtatttttatcattttatgtatttgctcattattgctcggggctgaacaaatacagtggtctaccttattttctttttctcatgagagttggctcactcttacagccagccgtattcctcgtttgattaccattgtactcaccggtatcggtttggcggtatgtggtgtcatcttgcagcatattgtgcgtaacaagtttgttgaaccggaaacatcgggcggtttagatgctgccaaactgggaattttagtgtcattaactttagttccggtaaccagcacgctgagcaagatgatatttgcgatcatttttttgttttattgccagcttaatttatatcgcaattattcgccggatccgttttag

SEQ ID NO: 63887 - DNA, 369 bp, Acinetobacter baumannii
atgttggaacaattttccaaatcgccctctctcctttcggttactgattacgaagaacatatctggatgttgcaattacaacagcctgaacaagttaaacgacgttttaatctatggaaacttaatcaaggtttagacattcaactgctcattaaagcaattcaagacattattaaaactacacctgacttaaatgttcgctatacatttagtgacgaaggtgatttatacaagtatccatttgatgatcattcggcttgtctagaagtaaaaaaaagcaatgcagaacacgtatttgagcaggtcgccaccttaaaagcgcaagcatggaatgcagaatttcatccccattttttacaagtctcatag

SEQ ID NO: 63888 - DNA, 210 bp, Acinetobacter baumannii; identical to SEQ ID NO: 63850

SEQ ID NO: 63889 - DNA, 210 bp, Acinetobacter baumannii; identical to SEQ ID NO: 63850

SEQ ID NO: 63890 - DNA, 1677 bp, Acinetobacter baumannii
atgaagtacaaagctcttttatctagtctttctattgctttatttagcttatctttagctggatgtaacgataatgattcacaagaaactgcggtaagtacaccaaagcagccgaatattttattcattatggccgatgacttaggctattcagatttaggagcttttggtggtgaaattcataccccgaacattgatagtttagcgcaagaaggccgaattttaactgactatcacactgcacctacatgttcgcctactcgttcacaactcatttctggtactgatcaccacttggctggtataggtgctatggcagagcttacccctgatcatttaaaaggacagcctggctacgaaggctatttaaatgaacgctcactatcgattgctcaggtgctcaaagataatggttatcgaacttatattagcggtaaatggcatttgggattaacacctgaaaccaatgcacatgctaaaggttttgatcattcatttaccttattacaaggtttagaccaccactttaaacaagctccaagtgcgtttaagcgaaattcaacctataccgaagatgggcaaattattcctatttcagcattgcctgatgactttttctcgaccaattattttaccgacaaattgctgagctacttagagtcaggcaaaaatagtggcaaaccattttttgcctatgcagcctatacagcaccccactggcctatacaagcgccagcagaataccgtgaaaaatatcgtggcgtttatgacgttggttacgatgctatccgtaacgcccgtattgcacgccaaaaacagcttggaattattccagtaaattttgaggctgccgaaccaattgcaactcaaaatgcaccacaaaaatatggtaagtggaatgagttaacagctgaacaaaaagcgcttgaagcacgcaaaatggaaatctacgcaggcatggtagaaaatcttgatgccaatgtaggccgaattattcaatatctcaaacaaaataatctttatgacaacactttaattttctttgtttctgacaatggcgcagaaggttttgttcgcggaagctatggcagtgaatcaggctttgataattctgtagcaaatgtaggtacccctacttcttatcattacattggtccacgttgggccgaggtcagtgcagcacctttccatttatggaaagatacagctggtgaaggtgcaactaccgctcctgctattgtgaaattaccaaaccaaaagaaagctgaagaaaccaatcatagctttgcatcggtactcgacgtttttccaacgttattagattatgctcatattccagtacctcaagggcaatataaaggtcgaaccattaatacgccaagcggttattcttggaagtctgtacttgaaaataaatcacaaacgatacgccctgccaatttcagttttgccgatgaattgcatggtagtaaatatgcaaaacaaggcgaatggaaaattgcacttcaaggtcgccctgaattaggaacaggttcttgggagctctataacattgccactgatcgtggagaaaatcataatgttgcgcaactttaccctgcaaaagttcaagagctattagcggtttatcaaaaatacactgaacaaaatggcgtacaggaatataacgccaaatga

SEQ ID NO: 63891 - DNA, 723 bp, Acinetobacter baumannii
gtggctaatattgatataaatatgattgagcaattttttagagttgctcaaaaatttcacgaaaaagagatgtctttagcggactgtcttttaaccctagaaagacaaggagtagatacgaaatctgcatctgggtatatttatgtttattcaaatttagtgagtggaaaattattcactagaaccatcaatgcaatggctactgaatactttttaacagaaatttttaaaactaaaggtctaaatgtactaaataatgctttattatctttatccttacatattgattattatgaaaataaaacaaataccaatgtgaaaaaagggcgtgaaattttatccaaatatactgatctttacggtatccaaagttcagattattttggtgaaaattttgatgatggtaagttttttgaaggtgcgttaaagaaggttcaggttaatttgtatgagcgtaattcattcgctagacaaaaatgtattgaatatcatggtacagcttgtaaggtctgtgattttaatttttcgaacgtgtacggagaattaggtaaaaacttcattcatgttcatcatgttattgaaatatctacaataaaaaaagaatatgaaattgactataaaacagacctaatgcctgtttgtccgaactgtcatgcaatgctccataaaaaaaatccagcatattctattgatgaattaaagagaattattaataaaaaatag

SEQ ID NO: 63892 - DNA, 843 bp, Acinetobacter baumannii
gtggtttggaatagagatacagcgtggaaacaattttctattttatcgagagataatttagaaaaattgggatgtaaatcaagtttgcaggacaacagtattggaattgtagtgtcacattcatgtgacattgcaaattcttcagaagtagaaccctatatagaagttgtaataggtacgcttttaactgactcgagtaatgggtcttttactcatggaaaaaataatcgaaaattacatctgactttagatcataactctaaaggctatcaaaccttagaattaattattacaacaaagttttacattgcaaaagaaagtatcttggaattagacatacaaccagatgattgcattgggttaaagagtaatacataccgtactattcttcgctggttaactatccgatacgatcgcgctgcatttcctgatagttttaatgcattgatgggaaaaaagtataaattacacgataaaattaaaaaaatactgaccaaggaatcaacagatgaaatcagaggattactgctcaaatataaagaaagcgaaaaaagtgccaatgtttttcattatgacttagccattttagtcctctatgacacttctaaagatcccacagctgctgaaaaaatagccaaaatagtttgttctaagattacagaaaagtttgaagctatacctgttcaaacacaagttgatgataatcaagatagtattcatttgaaatacgctattgctattgctgactcatcgttaacctatcaacagtatgaaactcttatacggtgggaaccaggtgatgatttaagcatggcggaagaaggctcccccctaaatatttaa

SEQ ID NO: 63893 - DNA, 591 bp, Acinetobacter baumannii
atgaatcatccatatcagtttgcttatagtcacactaatacaaattattccgtagtacagaatgatttacccgatgatgagtccgaagaaaggtttttaataaaactgtatgctgttattttattgttgggcagtacattatcgtacggtggtagctggcttacgagatcatcttcgtctacagcatatcaagttaactatattaatgatcaatctcaagttattgatcatacgaatgatattgctcagaaatttaaaacaatcaaacaagtttttaatttatcaattgtagagcaagccaaattattcgatgtatctagacaaagtatttataagtggattaaaggagaggctcaaataaagtcttataatttaacgctattaaatgaactagaaaaggctgctttactccttcttaaaacaaactacagcagtattttgtttacggaaaaagtaattttaaatggccttacaattacagaacttgtaaaagaaacccaagatggtgaaaaagcagtatctttattggttgatatattagatagagaagagaaagaaaagagtttattaaaatcattgcttgatttttaa

SEQ ID NO: 63894 - DNA, 741 bp, Acinetobacter baumannii
atgaaaacttcagatcctatcttctttgcaattgcgcagataagatttaatgaaattaattatgagaaggttatttcaagtcttaaagaaaattttagacagctaggatatattgatctaaaagaaatcgaacaaagacaaatagatataaatataagcaatggtatccctgtaccaaatgaaactaaaactaaggttttaacagctacagatttgagtggatatgaaggatttatttttaataatagatctttaacaattcatacaactaactatgtctcttttgacaaattattgatggctttactcgatgctatcgaaactttgaaggaacaagtcgtactgattgagcgcttaggctatagaacactaaatgcatttaaagaggctgaaaaaaacctttctgctcaaattcagccgcaatttttaggtatgtatggagaacaaaataatttccaacacaactataatgagagcctatgcatatctaataatataactactctttcaagagtaattattcaaaatagtgcaatagcattcccaccagatgtacaaggtgatattttaaaaactccagaagttatagacaatttaccatgcttacacgcaatggtagatacagattcatcttggtcaggtcgagaaaaatatgactacacatttgtaaaagaaatatttgaaaatatacacgatgacctaaaattaaaattaaacaacgttgttgtagaaaaattatga

SEQ ID NO: 63895 - DNA, 546 bp, Acinetobacter baumannii
atgaaaaaactatccgtttcagagttagcaaaactatatgggttttccagacaagcaatatatgctcatataaataaaggaaatttatcaaaaggagcagatggcttaattgatttctcagaagctttaagagtatttggcgaaccacaaaagaaagggagtggtgtcaatcaaagtcaatcaattgacagccaaaagttaacagaaattgacttactcaaacgtcaagttgaattgcttgagaagcaattaaatcaagcgcaacttagagaaagccagtctttagaacgagaatctttctatcaagagcaaattgaggcaatgcaacgtctattagaagctccaaagactaatatgactacgtttaccgatcagaaacctagccaagatatagcaacggatcctcggtcagaacctgagctgaaacatgacggattgactactccagagcagagggaaaataagcggattccagtaccggagcacattgaacaggaaccggaaaaaagaggcttttggagccgtttttttagaccctatgattaa

SEQ ID NO: 63896 - DNA, 930 bp, Acinetobacter baumannii
atgaaaacagaactaatagttaaagataatgccttaattaatgccagttataaccttgatctagtggagcaacggttaattcttctagcgattcttgaagcaagggagtcgggtaaaggaataaatgctaatgatcctctaacagttcatgctgaaagttatatcaatcaatttggtgttcatcgaaatacggcttatcaagcattaaaagatgcttgtgatgatctattcgcaagacaatttagttatcaaagccttagtgaaaaaggaaatgttattaatcacaaatcaagatgggtgagtgaggttgcttatattgataatgaggctgttgttagacttatctttgctcccgctattgtgcctttaattactagactagaagaacaatttacaaagtatgaaatacaacaaataagcaatttaacaagtgcttatgccgttcgtttatatgaaatattaattgcatggcgtagtaccggaaaaacgcctctcataaccctgtacgacttcagacaaaaaataggggtactcgatactgaatacaaacgaatgtatgattttaaaaaatatgtcttagacattgcattaaaacaagtcaatgaacataccgatattactgtcaaagttgaacagcataagacgggcagatcaattacaggcttttcatttagctttaatcaaaaaaagtcggctactcaatctgtcggatctaaaagagattcaaatacattagacctcttttcaacaatgacagataaacaacgtcacctattcgccaataagctctccgaacttcctgagatgagtaaatattcacaaggtacagaaagctatgaacaattcgctgtacgtatagctgatatgttgcaagattctgagagagtaaaagaattcactccattacttagaaaagttggctttcaatga

SEQ ID NO: 63897 - DNA, 1827 bp, Acinetobacter baumannii; identical to SEQ ID NO: 54538

SEQ ID NO: 63898 - DNA, 771 bp, Acinetobacter baumannii
atgaatagattttctttaaaagttgcaatcgttacaggtggtggttctggtatcggtaaagaagttgcaacacgcctcgttcaagaaggcgcaaaagttgttattacaggccgtgatgaagaaaaattaattaaagcagctcaagaaattgatgctacaggtcaaaatatcagcttcttcgcgggtgatattgctcttccagcgacatcagcacaacttgtggaatacacaactgagaagtttggtggtgttgacatccttattaacaatgcaggtgtattcgcaccaaaaccattcctcgacgttactgaaagtgaatatgactggttccttgacaccatcttaaaaggtaagtttttcatggcgcaagctgcggctaaagctatgaataaacgtggtggtggtgcaattgttcaaactggttctttatgggcattacaagcagtaagtgctacaccatcatcagcgtattctgcagcaaatgctggtgtgcatgcgcttactcataatttagcaattgaacttgcttcatcaaatatccgtatcaataccgtagcaccagctgttgtagaaactcctgtttacaacacgtttatgtctgatgaccaagtgaaagaaacacttccaacatttaactcgttccatccgctaggtcgtaatggacagcctgctgatgttgctgaagcgatcctcttccttgcttcaaccaatgcatcatggattacaggaacaattctccctgtcgatggtggtgtaactgctggacactaa

SEQ ID NO: 63899 - DNA, 915 bp, Acinetobacter baumannii
atgaaaacgccagtctatctcaacgcattaagagcatttgaagcaagtgctcgacatcaaagcttttcggctgcggctgaagaactcaatgtcacacctgctgctatcggccaactcgttcgtagtttggaagagtggctgggcgtatctttattccatcgaaatacaggtggtaaggctcgacttgtggcaactgaaattgccttaattgcattgcctgatatccgtgcgggcttcgatcggctgagtattggtttggataagttaaaaacgaattcctctacaggcgtacttactgttgcgattagtccagcatttgcagctaaatggttattaccgagaattgataaattccaagcaatgtaccctgatacagatgtcagacttgatacaaatttgaaacctgtagactttatttcaaatggaattgatatcggggtgagatatggtcgagggaattgggctgggttaaaagctgaaaagcttatggatgaggaagtatttcctgtatgttcaccctctttttatcaagtatttcaacagcaactacaatcacctgaaagcttactgaatcttccattgatccatgatttatcaatggataattcttctgactttacaacgtgggatacatggttgcactttaatcagattaccgaagagcatactgaacgaggtatgaaaattaataattctgcatccgtcttgcaagctgcaattgatggtcgtggaattgcccttgctcgaagtgttatggcgcatgatgatctcaaaacagggcgcctaatgcgtttgtatccagaaatgaaatgtacttcagttctagcgtactacattgtttatcgtgacgaatgccatacacttcctaaattattagcatttcgggattggttaattcaagaagcaaggtcttaa

SEQ ID NO: 63900 - DNA, 1359 bp, Acinetobacter baumannii
atgggtgtgataatgtcaaaacgacacataaaactttgtgcttttgtaccactaacttctcagcatgcaggtggttggcgtcaccctaaggcaagcccagaaaagcatgtaagtatagattatgcaattgagctagccaaaacagcagagaaagggtttttcgatgcttatttcttggcagatagtttatctattcgaggggattggggaacagcaacaacaaacgactggggattgggtgataaagatacaggatttgaacccgttacattatttgcagcccttgctgcggtcacgaagaatattggatttgtagctacagcatcaacgacttatgaacatccctatttattagcacgaaaatatgcatcattggatcatctttctaaaggaagagcggcttggaatgttgtaacgactgcttctccagaagtggctcgtaactttggttttaagaaacatcctgatccagaaactcggtatgaaatagcgcatgagtttatagaagttacccaaaaattatgggattcatgggaggatgatgcatttctctatgaaaaagataatggccaatttttcgatccaaataagtttcatgaacctaaacatacaggccaatttttcgatgttcaaggtgcactgaatataccaaggcctccacaaggttaccctgtaattgttcaagctggtcagtctgaaagtggtcgggaattggcatcaaaatatgctgagttaatctttacagctcagcaaaaccttaatgatgcacaagcattctatcgtgatataaaaacacggttaagcaaatatgcacgtcatccagatgatattaaaatcatgcccggaatatcagtttttgtagccaagacaacggaagaggctcaagaaaaatatgatcttctgaatagtttggttcatccaaatgttggattgagtttgttatcgggattgtcaggcggtattaacttagagcaatataatttggatgatccatttcctgagctccttgaaaatgaaataaacttttcaagccgtcaacaaatgatgatagatattgcaagaaagcatcagtttacgattcgccaattatttgaatatattgcttcagcccgtgggcattggacgattattggtactccagaacatgtcgttgatcaattacaagagtggtttgaaaatgaagctgctgatggttttaatgttttgcctccttcaacacctgaaggtttgaatgactttgtagagttaatcattcccgaattacaacgcagaggcttattccgtacagcttatgaaggggagaccttacgtgaaaacctaggactaaaacgaccaaggaaccaatacgtagttgattaa

SEQ ID NO: 63901 - DNA, 921 bp, Acinetobacter baumannii
atgaattttcaacaactcagaattattcgagaagcagctcgacaaaaccttaacttatctagaacagctctagctctaaatacatctcaatctggtctaagtaaacacataaaagacttagaggacgaattaggtatacaactattacatcgtaaaggtaaaagaattttaggcttaacagaaccagccaaagagttactcagcattgctgagaggatgttaacagatgtcaaaaacattcagaatttggcggacaatattagtcaagcaaatgtaggatctttaacgattgcaacaacccatgcccaagcaagatatgtgttaccgacgattattcaagaatttactcaacaatttccaaaagtacggctaaagttactacaagttacaccacaagaaattagcgagagggtaatctcgggacaggcggatattgccatagcaacagatttcattgacgaaaaagatagcttaaaactacttcctttttatgaatggaaacattgtattgtcaccccagctcaacacccgctccttgaacacactgatattacattagatatcttatctggttaccctattattgcttaccatgacggaatcagtgctcgctctcaaattaatctcgtttttgaaaaagtagaaattactccgaatattgtaatgtctgcattagatgcggatgtcatcaaaacctatatcgaaacaggtttaggtatcagtattttgagtgaaaaagcctttgaagcaacacaagaccttaatttacgtggcataccgacagatctttttggtagctataaagtaaagattgcgattcgaaaagactatttattacgggactatggctattcatttatctcattatgttctaaagacattgatattgaggctttaaaacagaggatcattaatttttaa

SEQ ID NO: 63902 - DNA, 564 bp, Acinetobacter baumannii
ttggcaacattcaatgctttaaaaaaatctggcgctcaagctggcgatctagttgcaattcaaggtatcggtggcctaggtcacttagcacttcaatatgccaataaaatgggatttaaagttaccgcaataggacgtggagaagatattgcatgttatgtaaaaaaacttggtgcccatatctatattgataccaatattcaagatgctatcgccgaattgcagaaactaggtggtgccaaactcattttaacaacggttggcaattcctcagttgtatctcctttaatcgctggattagagcctaaaggaaaactcattctattgggtgcaggaaaagatcctctttcactatcttctggaaaattagtcgttggagagcatattgttcaaggttcccttacaggaacaccttacgactctgaaaaaacgctcgattttagcctgttagcaaatatccgtcctgaaatagaaactgtgtcattagaaggtgttaatgatgcgttacaacgtttaaaagcaggagatgttaagtttagatttgtcatccaaatgaatgcttaa

SEQ ID NO: 63903 - DNA, 903 bp, Acinetobacter baumannii
atgcactttattccacatggttttgatctaaatctactcttagtattcgatgctttatatcgatatagaagtgtgtcaaaggctgcggaagcaatttatcttagcccgtccgcgtttagtcatgcattgaatcgattgagaagtgtatttgacgattcattgtttgtacgtatgggtggggaaatggtagcaacaaaaagagcagaaaatattgcaccagttgtttcagaaagtttaaagagtttatcacttcacctttttaagcaacatgaatttgacccatcaatgagtgatgatgaattgatcatcgcaactactgattacacctctttttgtgtactgccttcacttatgaaaaaactaaagagtagtgccccaaatatcaaattaaaggtgatttttcaaagcatggaaacatctattcaaaatctgattttgggtaaaactgatctgattgtgggctattcagaacaagaagagatgaaatcatcattaattgatgtatcaccatgttttacagataaatatgttgttgttgtatcaaaggggctataccgtgaaatgacattaacgaattatattgaggcagatcatataaaaattagtgcttggaacgagcatgatggcgttattgatgagtcactgaaagcacagggtgttaatcgcaaaatctctttggaattgcctaatatgttaattgcaccatatatgatgcaatctactaacctgatgatcacacttcctagcagagctgttgaaatgctgaaagacatacatgaactcgatatttttagtcttcctataacggtgcctgaatacagtgttaacgtctattcattagaacagagtaagttgaaggctcctcaaacatggttaaagagccaaattctttcaatcttttag

SEQ ID NO: 63904 - DNA, 1194 bp, Acinetobacter baumannii
atgttcagcaatgcaatgtaccgccaagttttaattttggcgagttctcaatccctttttcaaactgtctccgtgatggtgatgaccattggtggcttagcaggtgcaaatattgcgaatagccctactttagcaacattacccattgcatcgatgttcctaggtacagcattgatgatgtttcccgcatcaatgctaatggcacatattggcagaagaaaaggtttcctttgtggtgctttgctcggtgttttaggtggaatcattgctgcaattggtatttattatcactccctctttactctcgcattcgggacagcctgtgtgggtgcctatcaatcattcgctcaattttatcgatttgctgcaagtgaggttgccgatgataacttccgatctaaagcaatttcatttgtgatggcaggtggtattgttgcagcccttataggaccaactctagctcgcttaggtggtgcattatttagcggctttgaatatattggctcgttcttaattattacaattgtttcgttaattgcgatcggaattttatctgggctagaaattccagatcaaatcgaaatcaaaacagactttaatgcaggacggccttggctacaaattgttttccaaccgacctatctcgttgcattgtttggttctgttacaggttatggaatcatgattctagggatgacagcgacaccgatcgctatgcagcactcacatcatgagcttggtgcaattacaacagttattcaactgcatgtattaggtatgtttttaccatctttctttacaggaaatctaatcgctcgttttggttcatccaaagtgatgtttactggcgttttgttctttgcttgttatattgcgattgccatttcaggactacatttatcgtcctttattgtttctttaatcctccttggcattggctggaatttcctattcattggcagtaccgctcttctcactcaaacctataccgttgaagaaaaggcaaaagctcaagcaatcaatgatatgactgttttcattgtaggactggcctgttcatttagtgctggtgcattgcttgattttgtcggttggaagacgttgaaccttatattaataccatggctcgtgttcacaggtctttctctcatttggcttcagcaaaaaaaatataagaatgtaaagataaactga

SEQ ID NO: 63905 - DNA, 1224 bp, Acinetobacter baumannii
atggatagtcaacatcatcgtttttttgcaatacatgcaattgcaatcattacttttgcacaactttttggtacttcactttggtttagtgccaatagtgcggttttagacttgattcgtgaatggcatatttctgtttcggacattggctggctaacgaattcagtacaagcgggctttatcattggcacatttattattgcctttactggtatcgctgatcgcttcaaagccagttcaatttttgcaatctctgcattagtcggtgctttttttaatttatgttttgcatggtttgcaaatggtttgactgaaggaatgatctatcgcttttttgttggaatttgcatggccggtgtttatcccattggaatgaaattggttgttcaatgggctccagataaagctgggcaagttttagcaaaactggtcgcaatgctcacactgggtacgtctctaccctatgcattaaatggtttatcagctgatctaccttggcaatttgtgatcacattttcgtcattccttgcactcactgcggcattgcttgtatttaaattaggtgacaaacaacaatcctcgactcctaaaatccctgcaaatcagaagtccaaagaaagtgcttttgaagtatttaaaaacccttcttttagagcggctgcatttggatattttggtcatatgtgggagctctatgccttctggaccattattcctttattcattgcaaagtcaggtatccctgaaaaattaggctttaacaatcttgccttgctcaccttttttgttatggcatggggagcaatcggttgtttattcggtgggtatctttctaaacgtattggaagtgccaaaacagcaattggagcattatttatctccgggttcagttgccttgtatttgtactgggttggcgaattttacctgaatggttactgctatttgttctcactgtttggggagcatcagtgatcgcagactctcctcaattctctgcactctcagcagaagcctgtcctcccaaaaaattaggtgctgccctatcaattcaaaattccttcggatttgcaatcacaattgtttctattggaatcaccacctatatgtttgacctgatcggcctagattcagcatgggtattaattataggtcctattctcggtattgctggctttttctattcaaaccgatattccccccttaacaaaaagtttctcgcttaa

SEQ ID NO: 63906 - DNA, 1089 bp, Acinetobacter baumannii
atgagtagctatcaatacatcatcattggtggcggtgtaagtgggctctatgctgcttatttactcgaacaacgtggtattaccgattaccttctcattgaagcgaatgatgtactcggtggtcgtttgaaatccatgccgattaatgaagatgaagcttttgatctaggtgcaacttggttttggccaaatgaacaaacacaactctcaaatgtaattcatgacttcggcttaaccactttcgaccaataccaaatcggtgaaatgctcatagatagatcactattaatccctccacaacgttggaaacaacattcacctgaatctaaaagagttaaaggtggaatgaaagcactgattgataaggttgtatcgaaattagatcagacccatattttactttcacatcaggtcgttgaactggcccaagaaggtgaacatacaaaagtacatgttaaatgccctaatcatgaaattaaagtgttttcttctcagcagattttagtcgcaatacctccacgtttagcagtatcaaccatccaatttactccagaacttccagtggcgttcaaagaaaagtggctaaataccgcaacatggatggctccacatgcgaagtatattgcagtatatgaccatcctttctggcgggatcaaaaattatcaggtagtgcacatagttcagtaggaccattagctgaaatacatgatgcatcctcagcagagggttcggcagccctatttggattcattggattacctgcacatgcacgtaaaaccattaaagatgtagagctaactcagcattgccgtaatcagcttgttcgattatttggaagccaagctgcaacacctaaatcagagtttataaaagattgggcaaaagattcattgattgcaactgaagatgatcaatcacctgctatgggacatccctatcctccaatgaagtcacctgacaaaagtatttggcaaaacaaaattatcggaatatcaagtgagttttcacccagttattcgggttatttagcaggtgcaattgaggcagcaacattaggtattcaaaccctattctcaaaaatgcagtaa

SEQ ID NO: 63907 - DNA, 363 bp, Acinetobacter baumannii
atgtcacaagcagatagtcaatccgttcggattaacaccaacctagacgaagcttggcatactacatctctagacgccaaagaaggtgtttatgaatattgcccactatttcaaaatgacaatgaaaaagttgaattacgtaaactgtgcaacaaacaggttatcaatacctattccaatgtgttgactgaaatttttgtgcttgccggcatggtaaaagtgaatgatcaacttgtcgcaaaagatggttggattcgcttacctaaaggttcagaaaatcaaattgttgcacaagaagatcaaacaaagctttatctaaaaacaatgaaaattatcaccaatctggaaagtgagaatatttaa

SEQ ID NO: 63908 - DNA, 252 bp, Acinetobacter baumannii
atgttgattcattcagatttttctaaaccagtaatccttaattctgatcaatatgattgggttccttcacctcaacatggtgtagagcgtgtaatgttagatcggattggtgcagaaaaagcccgagctacaagtattgttcgatatgctcaatcatcttcttttcccagtcatcaacatccccaaggtgaagaaattttagtgctttcaggcaccttctctgaacaaggagttgattatccagcgggttag

SEQ ID NO: 63909 - DNA, 342 bp, Acinetobacter baumannii
atgcaagattggaataattaccgtgattcgttaattggtcgtgttggcgattatgcaaaaatagcacctgatgtcatgcgtgcactgagtgccattgatgtcggtgtgagtaaaatgggccaccttgatgccaaaacacatgaaatgattgcattagctgttgccgtaactacacgttgtgatggatgtattgcagtacatgcgaaaaaagccattgacttaggcgtaactcgtgaagaaattgcagaagcactttctgtagcaatttcattaaatgcaggtgcagcattaacttacactgcacgcgttctagaagcggtagatacgctaccaaatcaataa

SEQ ID NO: 63910 - DNA, 246 bp, Acinetobacter baumannii
atgagttatctatttttgtcgtgtacagagcaaaacttcaaaggtccgtttttagacacgattaagggtgcagagtctaaacaactccttattcgtgaagaagatgttcaagtgttacatggctttaaaactttagaagatgctcaaaattatcttagcagtgaattattcactcaagatgttgtgacttctttacagccacttttcgaagatgctccagacattcgcatctatcaagttgcttaa

SEQ ID NO: 63911 - DNA, 1803 bp, Acinetobacter baumannii
atgccacaatacaaagcgcccttacgtgatatgcaattcgttttgcatgaattattaaatgctgaagaacactatgcaaaattacctgactttcaaggtaacgtaagccgtgaattggttgatcaatatttagaagctgcggcagacttctgtgaaaatgaactttctcctttaaaccaagttggcgaccgtgaaggttgtacttggaatgatggtgttgtaactacaccaacaggctttaaagaagcttatcaaaaatacatcgaacttggcttcccgtctttatcagcagaagaacaatacggtggtcaaggtttacctaactctttaggtatcgcaatttcagaaatggtaggtagctctaactgggcatggggtatgtaccctggtttgtctcacggtgcagtacgtacattagaacatcacggttctgaagagcaaaaaaatacttacttaccaaaccttgtttcaggtgtttggacaggtacgatgtgtttaactgaatctcatgcaggttcagacttaggtattatccgtactaaagcagaaccaaatgcagatggtagctatgcaatctctggcgagaaaatctttatctctgctggtgaacacgacatggctgaaaacattatccatatcgttcttgctcgtctaccaggcgcaccaaaagggactaaagggatttcgttatttatcgttcctaagttcaacgtcaatgcagacggaactctaggcgaacgtaatgccgtacgttgtggttcaattgaacacaaaatgggtattcacggtaacgcgacttgtgtcattaactttgaccaagcaaaaggttatttaattggccctgaaaaccgtggtttgaactgtatgttcacctttatgaacacagcacgtattggtactgcggttcaaggtttatctgcatctgagtcttctttccaaggtgctttaacttacgcgaaagaacgtttagctatgcgttcactttctggtcctaaagctccagaaaaagaagcagatccaattatcgttcaccctgccgttcgtaacatgcttttaactcaaaaagcatttgctgaaggtggtcgtgcacttgtttacttacttgctcaatatgcagatatcgttgaaaaaggcgaaactgaagaagagcgtaagtttgctgacaacatcttgtctttattgactccaattgcaaaagcattcttaactgaaacaggttctgaatctgctaagcacggtgttcaagtgttcggtggtcatggcttcatttctgagcatggcatggagcaaatcgtacgtgatacacgtattgcttgtttgtatgaaggtacaactgaaattcaggcacttgatttgttaggccgtaaagttttacaaactcaaggtgcaatgcttcgtgatttcactaagattgttcacaagtttgtagaagcaaataaagacaatgctgccatgaaagaatttgttgagccacttgctgcgctgaacaaagaatggggcgacctcactatgcaaatcggtatgcgtgcaatgcaaaatccggatgaagtgggtgcagcggctgtagattacctctacttctctggttacgttactttagcttatctatgggctcgtatggcgcttgtagcacaagagaaattagctgcgggtacaaccgatgttgatttctacaatgcgaaagtaactactgctcgcttctacttcaagaaaattttaccgcgtgtacgctctcatgtagatgttatcgcaggtggtttagacccattgatggcattagatgctgaacatttcgctttctaa

SEQ ID NO: 63912 - DNA, 621 bp, Acinetobacter baumannii
atgtcaaattgcccgaaaaaatatattgtcgcttttgatcagggaacaacaagctcaagagcaattgttttagatcatgatgcgaacgttgtcagtattgctcaaagagaatttacccagatttaccctcagccaggttgggttgagcatgatcctatggaaatttgggcaactcaaagtgctgtatgggtcgaagcattggctcaagctggcatcaagagtgaacaagttgcggcaattggaattacaaaccagcgggaaaccaccattgtctgggacaaaaaaacaggaagacctatttacaatgcgattgtttggcaaagccgacaaacaaccgaaatatgcaatcaattgtataaagcaggttggcaagaatatatccgtaagaccaccggtttagtcattgatccatatttctcggccacaaaaattaaatggattttggatcatgttgaaggcagccgtgagcgtgctgagcggggagagttattattcggtacggtggacacttggctcatttggaaactaactaatggggccgtccatgtcactgattttaccaatgcatctcgaaccatgctgtttgatatcgaaaagcttgagtgggatgaaaagctttaa

SEQ ID NO: 63913 - DNA, 210 bp, Acinetobacter baumannii; identical to SEQ ID NO: 63850

SEQ ID NO: 63914 - DNA, 1140 bp, Acinetobacter baumannii
gtgaatgggcaaattgcgatttcaatttcaggcaaatcaagaaccagtgtgacaggatgtcattttgaattcattgataatgcctacaaagtcactgaggtagtagatcatcaccagggtaatatcttttcgcttaatactattactctatgtggtattggcgcaaatattgagaaccggggggaatacacttctataactggaaacaattttgatcagtgtttaacagccattcggatccgtggtggaaatacaaatgttacgggtgggatcatatctgataatggcactgctatcgaaattgtcggcggttctaatgatgctcatggtcgaattactggcgtcctgattaatcataatgccactgctgtgaaaatagattcaccaacggttccagaattccatatatcggactgttcgttctattacggtaatatccatcttaaaaatgctaagggaatttattttaaagactgtacatttagtacaaatactatgttttttgagaacgctattgataacttctttcaagattgtgttttctataacaagccaactattaaccaccgttacaacaatacccaatccaaaacccattttattgattgtattgttcatggagaagcaggaactagctcaggtcatatgaatggtgggtacgtttctgcttttaagactagtcccactaccacaattgcagcaaatacagactatgttgtgttatttaaccaagttacgaatgccatgccttttgatataggttatacatttgaacagttttataaccctagtacgggattaatcagtaacttgaaccaagcaaataatccaaataatggcttttattgtactttcgatttatcaatcgctgcagggtttagcaatgccgttgttcctgaatgggataagttacatgttttcattattaatgcagctggagacatagttgctatctgtaatagctcaaatcaaaaaactggagctggaagtctttggaaacaattcagttttaatggacgtttaagtcgaggcacaaactactatgtgaaagtggttaatgagtcgcaatttgacactatggttttctttgaccaacctggttcgaatgtgcgtactagaatgtctattgccgatatttaa

SEQ ID NO: 63915 - DNA, 552 bp, Acinetobacter baumannii
atgggcttttttatttctaaaatttcagaggttgttatggctttaaaagtcggaattattaaaagctcggacgtatcaaaatggtgtgaatacaagggggttgatggcgaagtacaggcagagttcaaagtccgtggtatcgcctataaaccttttcaggtagcaattgaacgagccggaaatcagatttcatccaaaggctatgatgtgatggtcaaagatgaaaatgccaagctttaccatgaattgttaatggatgcgtgtgctgcccacttaattgaagactggaaaggtgtggtatttgccgaaatcgtagacggtaaaacggttgaatctgaaaagccatatacacctgagaatgcctcaaagcttcttaatcttggtgatattggtatttcaatctggctattcattaaagaacaggctcagaggattcaggaagaagccgacaaggataaggctttaattctgggaaagtcgtcgagctctacaaataccaaaaaacgtatgcgtcgaaaacgccgcatgaaatcgaacaaatcaagttcttag

SEQ ID NO: 63916 - DNA, 354 bp, Acinetobacter baumannii
atgagcaattttgtttttaagcgtggtgacacattcaacttgaacttgcagctggttgatatggatgaaaccctgcagtatccaccggatgatgttcgccgtgcaattgatctaaccggttacacctttacttcacagattaaagctttggctgatggagcagctgtagctaccttgacttgtgctgcattaaatcaaagtacacagaagggatggctgaatattaaatctagtgcaagcactgcaacttggcctttagggctgtgtcagatggatattaaagctgtagttagtggtactacgcagcacactgaaactttgactttccaagtgattgacggggtaacagcataa

SEQ ID NO: 63917 - DNA, 369 bp, Acinetobacter baumannii
atggggtggaaggggaaaaagccgactagttttagtcttgatgtgtctaaagcagcagaagcacatgtaaagaatattgtcatggataccgtgcaatccttagttaatttaagtcctgttgatactggagcataccgtgcttcacatattgtttcggttggatccgctgattacggtgtacgtgaacctgaaacaaacgccgtgcaggatgcagctattcaagccgtgaagtttaagttgggcaatttagtttatatccagaacaaccagccttatgcagagcgcttagaaaatgggtggtctgatcaagcaccacaaggaatttacaacaccacctttacctttatttctcagaagtatggcggctaa

SEQ ID NO: 63918 - DNA, 210 bp, Acinetobacter baumannii; identical to SEQ ID NO: 63850

SEQ ID NO: 63919 - DNA, 930 bp, Acinetobacter baumannii
atgacagaaattgagttttataaagttcatgatatatctctggaagaggaagactcatatgagcagcttggaacaaaaagtaagttctggtattttgaacgtgatacaaatgaaagtattcttttcaaaagcacaaagaccaaagaaggtgccagacttggtgaagattggtcagaaaaggttgcttgtgaacttgcagagttaattgatttaccacatgctcactatgaattagcaatatataacagtgaaaggggagttatttctcctaatttcattaatggaaaagatcaacagcttttagctggtaatttgctattgagaaattatttggatgttaaggatgttaaccctaacattcaatatattgatcatgtccataacattatgatcaatatgattaagttaaaaccaattggatctaaaattctttctaatatagagtctgctagtgagttctttgtaggctatcttatgtttgatgtattaatctcaaatcaagataggcacaatgaaaattggggaatgatcacttcaataactggtaatcacctggctccaagttacgatcatggcgcaagtcttgctagaaatgaaagcgatgaagaacgaaataatcgcttagagactagagataatggacggaagattccagtgtatgtcaaaagagctttatctcaatttcataaccctttaaacaataagcggcttaagttattagatgcttttcaattgtatgggttaaaagaaaaagatgcagcattagcatggctcaatcttttggaagagaaagttacagatgattcagttgggttaataatacaaaaagtacctccaactttaatgtctgaaatcgcaaaaaagtttactgtccaattaatcctttgcaatagggataatttattggaattgagaaacaaatttttatga

SEQ ID NO: 63920 - DNA, 486 bp, Acinetobacter baumannii
atgaaaagtgtatatgttatgtggcaagatatggcagacacaagaatgtggcatcctgtagcgaaactaacacagcagtcagaaaatgactatttgtttaattatacaaaaggcgccactcataaatctttttcttgtttccctaatatggaagatagaaacaaagtgtatagatctgaaacgctttttactttttttaaaaatcgtttaattcctgaaagccgaccagaacacgatagtttatttgaatggactggcctttcagctaattctaaagattatatccaattgttagctatctctggtggtgaaaaaaagacagatcattttagaattgtaaatattccacaaaacgaaaatggtttctataaaactaagttctttgttagtggagtgaatcatttaactgatcgtgaaaagattcacacagaaagcttaaaagatggtgatcgtttggattttgaatttctgcataaaaatctttaa

SEQ ID NO: 63921 - DNA, 306 bp, Acinetobacter baumannii; identical to SEQ ID NO: 54617

SEQ ID NO: 63922 - DNA, 2487 bp, Acinetobacter baumannii
ttgtattggttttataatgatttgactatacctgcaggaaccttacaacaaaagaattctgaactggttgttcagattcaatcaaaagtcatccatcctcttggatttggtgatttagttattgctaataaaaatggttcccctatttttctaaaacaagtagcaaccgttgaagatactcaagcagaactgcaatcaagtgctttttataatggaagaacagcggtttctgtcgatattttaaaaagttccgatgctaatgtaattcaggttgttgacaagacctatcagaccttagagaagctaaaagctcaaatgcctgcgggtttgaattataaagttgtcgctgacagctctaaaggtattcgtgcttcaattaaagacgttgttcgtaccattattgaaggagcagtcttagcagttttaattgttttactatttttaggttctttccgctctacagttattacaggtttaaccttaccgattaccctacttggcacattaacattcatctgggcgtttgggtttagcattaacatgatgacactgttggccctgtcactgagtattggtctattaattgatgatgcgattgtggttcgggaaaacattgtcagacatacagagctcggcaaagaccatgtcaccgcggctttagatggtactaaagaaattgggttagcagtacttgcaaccacactcaccattgtggcggtatttttaccagttgcctttatgggaggcttaattgggcgtttcttctatcaatttggggtaactgtaagtacggctgttcttatttccatgttcatcagctttacactcgacccaatgctttccgcacactggaaagatcctgtaaagaaaaaagaaagtcgactgcaacgtttctttaactatatttctaatctattagatgacctaacgcacatctatgaaaagcttttaaagcttgccttacgctttcgtttcatcacggtcattattgcaattgtttcattggttgtggcattaggcttatcaaaaatgatcggaaccgaatttgtacctacaccagataaaggtgaaattcgtattcagttcgaaacccctgttgattcttctttagaatatacccaagcaaaattacatcaagttgatcagattattaggcaattccctgatgtcgtttctacttatggagtggttaacagtgaagtcgactccggtaaaaaccatgcaggtttaggagtcaccctaaaaccaaaacaagaacgtagcgcagacctgacaacactcaacaatgagttccgtgatcatttacaaagtgtagctggcatccgagtgacttcagtcgctgctgctcaagactcagtgtctggtggtcaaaagccaatcatgatttctattaaaggatctgatctaaatgaactacaaaaaatctcggatcgtttcatggctgaaatggaaaaaattgatggtgtggtcgatttagaaagctctttaaaagaacctaaaccgactttaggtgtacatgttaaccgtgtactggccagtgatttaggtttatctgtttctcaaattgcgaatgcgattcgaccactcattgcaggtgacaatgtcacaacatgggaagatcgtgacggcgaaacttatgatgtgaatatccgtttaaatgaaaataaacgtgtgcttccccaagatgtacagaacctatatctcaactcgaataaaaccaatgcaaatgggcaaaatattttagttccattaagcgccgtagccacaacccaagaaaaacttggagcttcgcaaattaaccgacgtgaccttgaacgtgaagttttaattgaagcaaatacttcaggacgtccaagtggggatatcggtcaagatatcgataaaatgcaaaaagcattcaaattgccagctggttatacctttgatactcaaggggcaaatgccgatatggctgaatctgcgggttatgcgttaacggcaattaccctttcgattgtatttatttatattgtgttgggttctcagtttaatagttttattcaccctgctgcgattatggcatctttaccattgtccctgattggtgtcttcctggccttattcttatttaggagtaccttaaatctattttcaattattggcattattatgctgatggggctggtaaccaaaaacgcgattttgcttatcgactttattaaaaaagcgatggaagatgggataagtcgttatgatgctattttacaagcaggcaaaacccgtttacgcccaatcttgatgactacaagtgcgatggtaatgggtatggttccattagctctaggtctaggtgaaggtggtgaacaaagtgcaccaatggctcatgctgtaattgggggtgtcattacctctaccttattgactcttgtggttgtccccgtcattttcacttatctggatgacttgaaaaactttatgctgcgtcaaacccgacgattcatgtcataa

SEQ ID NO: 63923 - DNA, 252 bp, Acinetobacter baumannii
atgtcatacgccgacagaacaccgatggcaaaattctttgatgcgctggcttttgaaagtgggcgagtcaaagtaaccgacaaatcggataaaaacggcgccaatcgttctattcattttcaattaagttgtggttttgctaaatttgaaaagaacggtcaacattttgaatttacctttaatcatcaaaaacaagtaattgatcaagcctgttttgaagccatcttagagaaattagcaattaaacattaa

SEQ ID NO: 63924 - DNA, 366 bp, Acinetobacter baumannii
atgccaccaattattactgtttatagagccgtacagagcgtttcatccgacatggggcaattagccattattgacgctgaccagccttatttagccgaaatagttataggtgatgccgatccatctatgtatacctatatcagccaagacacaggcttgagactacaaactacaatgaatctaggggcaataacttatacgcctgagttcatagaggctttaataggggcggtgtctcttatcagtgatggttattctaattatcatgagggtgaagcaggtgaacggtttttcgaccttacctcttacatccacattgatactcataccaacaagctttattacaaagatttcacacctgcataa

SEQ ID NO: 63925 - DNA, 210 bp, Acinetobacter baumannii; identical to SEQ ID NO: 63850

SEQ ID NO: 63926 - DNA, 321 bp, Acinetobacter baumannii
atgttatttattgaaaccagcatctttaccaagcaaattaaagaccttgtatctgatgaggaatatcgtcaacttcaggaagatcttttggtacagcctgatagaggtgatctaatcaagaatggcggtggtattcgcaaagtacgttgtgctcaaggtaacaaaggaaaaagtggtggtattcgggtgatttattattgggtcaccgaggatgatcagatatttttcttattggcttatccaaaatcagtgaaagataatttaacagataaggaaacagccattctgcgccaactcgtgaaggagcaatttcatggataa

SEQ ID NO: 63927 - DNA, 273 bp, Acinetobacter baumannii
atggataacaacttatttgatgacttggttgcttcaatcaaagaagctggagctatcaaacgtaaagaagttaaagcaagtcgagttacagaactcgaactaccagatattaaagaagtacgtgaaaaaacaggcttgagccaaaatgagtttgctgcacgtctgcatattagtcctcgtaccctgcaaaattgggaacaaggtcgacgctatccaactggaccagcagctacattaattcgaattttagatgctcatccaagccttatttga

SEQ ID NO: 63928 - DNA, 879 bp, Acinetobacter baumannii
atggagtctttagaagtagaacaagatctagttagtattgagtatgtacctaaatctggtagatctaaagggaatatgacgactgtttattacaaaggtagaaattgtgaccaaatagcatggttaagtgatatagcctataaaaaaggtaatagattagtcaaactatctaaacttggaacgtattgggacggttttcctcttaataatttaacaaaagagggaggggtaagatttccgaatggcaaaaaaccagaagcgttgatacagcgagtcttagagctctgtacacagcaaaatgatctagttttagatagctttttgggctcaggaacaactactgctgttgctcacaaaatggggcgccgatatataggtattgaaatgggatcacaagcaaatacacatgtaatcccacgtcttagaaatgttattggcggtgaagaaggaggtatttctaaatctgtaaattggaaaggtggtggcggttttagcttctttagcttaggtagtcccgtatttgatgatcaaggatttttaaatgccgatgtgaaatttaaagaccttgcaagctatgtttggtggcttgaaacaaaaacagctctaaatcaaacggagagctttgataatccatatttaggcacacatgatggggttgcttactatcttctctataacggcattttaggtgatagacgtccgaatggcggtaatgtattaaccctatctgttttaaattacttaaatgaatgtcatgcacatgaaggtaaacgagtcgttataggcgaagcatcacgacttggagatgcccgacttgaagctctagacattgagtttaaacaaattccatactcgctttatggcaaccaaactcagtaa

SEQ ID NO: 63929 - DNA, 2043 bp, Acinetobacter baumannii
atgactacacttaattatacggtaaggtttcaaaaaaccgttttagcaagtttaattggtctttttataagccaatcgagttttgctcttgaagaactttctgatgctggtttgagtgaaactactggtgaaggtattgctattttacctcaaaatacttatatggtatttcgtggagcaggagcgaatgaaaccaccaaccaaattttaactgaccgtactaaagatacaggctatatcaattatgtacctgttgggccgttaagtatgacggctgcagataccaataaaaatggtacgattgattcgggtgaccgtgcagtaggtaaagctgatatttttctttatggtttagctctttctaaatctgataacgatacaaatacccgtctcgcttctaccgaggcagcagcggccatctcgagttggggtacggctgttaatccgtggatttttaaagttgcgacagaaaattctgtgccgaatttcagtgcgacaaattgtagtggtgcagctgatccaacttgccaagtaacctatttagctttagaagcgcctttatatgaagtagggacaagagatactgctgggcttgatgcctataaacttaaattaggtttatggtcagatatttttgttcgaaatccaaataaaataaatggtgcgacagatcaatttaattatggtgactctaatggtttgatcggtacgagtactgatgcaagccgtgcgaatcgtttacgtttgcaagctatttggaataactttagtttaaacggtagtcgtctacagctcttccaaactttaggtggtgcaacatctgctggtggaatgagtcccttttataatgatacgttaggtttcgctggtgttattcgtttaaacagtggcgatgcttctaatttaagggcaacaattactgcaaatactccaacatctacagtagggccatgggtaaaccgttatagtacccaatatacaggagcgcctagcaataattcccctagttccgattggttatatcgtattcgtagtcaaacgactactattacttcaacaggttcatggactgcgccaactgacagtacaatgaataatgtattgcgtttgagtactcgtgaatctggtactggtcaggggaatttaattactccagctattaatggagggcttgcaccaacctttgatgcaaacgaaggtttatatctttataacccgaatattaatcttgtattagggtctttatatcaacctctagttttaagttcagatggtaaaaactttagtttggaactagcgcgtattccgaataaacctgaaatttataagaaaatttatactgattatactggtaatgatagtagttatctcggctctacctgtaatgtttaccaatgtggaaagaatgtaactttaggaggaagaacttatcaaggttcgagtgcaacacatagtagtatctcaattggttctactgtttataatgcaaccacaaatactctagaggcatttaaaggaaataatactcaagatgctgtaggtatttcttttggaaaactaccgacagggactattgctgctgcaacacaaactagaaacttttatcaattacaaaatcaagaacgtcgtagtggtagctatagttgtggatttttaaacttaagcacttgttatgatacttggcaatatcgtacggcaacaggctggacaggaaatgctggttcaggcttaaaattcgattcccaaggagcaaactgggcgaatattgatagtactgcttattataatccaacaaccaatacgacaggttataccactactgatgccgggaatggtgctcaatttgttgtaccaaatggtacgcctttacctgatgcactgtataacaatgcacgttggtatacgactacaccaaatgcagatataaacacgtataaattatcgggtgcacagattagctcttcagttagtaataacatgggttcagctgttattgatggtgttttaattcagcatttaaaactgacaactaagggtctctaa

SEQ ID NO: 63930 - DNA, 1062 bp, Acinetobacter baumannii
atgctagatggaaaacctttaaaagatgagaagcttcaaaaatattttggaagtctttttgatgagcagcatgaatactatcaaaagcagtctttaaaagcccaagaagccctatctgtaaagctttcagagcaaattattaagacagagaaagaagcagaagcccatagaaatgcagtaaaacagataaaaaaattagaaaaaaagattgataaaatgcttgatgaattttctcaaattattgagtttaaagaactttttccaaatgactacaaggaaatagaacaaagtttaaaagatcgaatacaagatcataaaaatcaattgattagaaaaagggaagaggatgcacgatttgaagcgcaattaagggcgcaacgtgaacagttagcaaaagagcaagagaggcaacaggcaatagaatttaggaagacactagaaagtgatcgtaaaatgcaaatagaggctgatagagcgcatttacgagataaagttggtgaatgtactactgaacctgaaaaactggcttatagcgcaatacagcgcaaattagagggtgttattagagagggggctaactacactgttttgcttgataataatgagcctacaactaacccatatgccgagatacttaggctaatgggtgatagagaagtatatgattttaaaaagaaattagaaattatattaaatcaatgtgcagattctaagagtaaagattatgacgatacttttagaagttggggaacaagaccaagttactatgataattttgattcatctgcaaaatatattgttgcaattcaaagcattatagatgatcaagtgcaagaggggggtgtattggcttatgaaaaagcgaatgaagtaaaacgtgctttaagtgatgtattggttggtaagtgtaaaaatgaatatgacgtacttttgattgatgagaagtcgaaagaaaggcagcgtcaatacaatgaatctcttgaattatctaataaaaatcaattagataatagtttgtattttgaagaggaaaagaaaaagggcaatgattttgagatgtag

SEQ ID NO: 63931 - DNA, 1335 bp, Acinetobacter baumannii
atgggcttgagcatgctaaacaatctaaacgatcaaaacctaccttcctctactaacagcgctctagcgtcatttggtggcgttactgcattcaaaaaaagtcgccttgggacaatcgtcaaattatgttccaccgttgattctaaagagaaaaatttagctcttgaaaaggctcgtgaatatagaaaacgaaatattaagctaaaagatagagcaggggagattctctatatcccaaaccaaaagaaacaagctccagtatgtagctgtgggaaatgtcgtattgatggcagcgcccctgtaggtgtggattacaaccaaaaaacaggaatggctagttatacaaatttgcagtattgcggttctgtttgggtgtgtcctgactgtagttataaaattagccaggaacggaaaaaagaattagccgaagcgatgaaaggctgtgttgataagggtttgcatgtggcaatgcttacattgactgtgcctcactatcttggtgatgacctccgagcattgcttaaaaaaatgagtaaggcgaagcattctttatggtcgaatagaaatagccgtgaatacattgcagaccaattcccaatgattgggcatatcacagctacagaagtgaaatatagtgatagcaatggtttccacccccactaccatatcctgtgttttttagataagcagtatcaaaaagaagatttagagattatcgaaaatgaactttatgagttctgggctgagaagtgtgtcaaagctggacttggtaagcctaatcgtaggaatggtatagatttaaaaatgggttctaacaatgctgatacccttgctgattatattgctaagtggggaattgcagaggaaatgactcaagcacatttgaagattggtaaaaataatttgcagtctttaacgatgtgggaagtccttgagcttgcccaaatggaagcaagtacaacagataaatattcacatatatttaaaacctatgccgttgctttcaaaggaagaaagcaacttcattggtcaaagggtttaaagaaattattagaatgtccggttaaggatgacgaggaaattgcaaatacaaatactgaagaagatccgactgaagttgttcatgctctttttcttagtcctcaagatttttgggcaatctgttatcacaaaaaacgtgccgagtttcttgaactcgttgaatccgattttgctaaaaatgggattcagaccgatctaaaatccgtaagggattttttgatcaggcttaaaaacgcaaggcgtttttcagggggtcaagggggaaatctccccctctgcgagcggacaatttga

SEQ ID NO: 63932 - DNA, 489 bp, Acinetobacter baumannii
atgcacattaaacggattggattaatggttgcatctgtactttttacattggtagcatgttctcaacagccaaaaacttatgaggattgcatacttgataatataaaagatgcggattcaaaactcgctgcaaatgatatacgtaatgcttgctttgataagttttcacctgaaagtatcgcaaaggaaaattcatttgaattgtcaccagaacaacgacacaagatagatggtaggggatatttatcagatggtaatactagatataatatcagtatatataacgggaatgaggaagtttctattacggaaatggatgttgttgtaattgataatataactaaaagtgaaaaaatatataaggttgatgaaataattaagccattatctacaaaagaggtaagtttttcaataattccaattaataatgatcattcgtggggggtggaaagaggaagaggggctaatagtgaagctttaccaaattaa

SEQ ID NO: 63933 - DNA, 210 bp, Acinetobacter baumannii; identical to SEQ ID NO: 63850

SEQ ID NO: 63934 - DNA, 627 bp, Acinetobacter baumannii
atgaatcagctttatgatcaggcccaagactggactaaacctgtacaacttgatattcacgataaacggctggcaggacactacaaacaagtctcagagtttcttttgagttattgggtccaaaatgtaaatgcacgtaatgaatatttaagagaattaaaagctgcgaaatgggatacgtttttaaatgttgaccgtttagatcatgataaaaaacaaaaatatgctgaaaccgaaaaaatgctagccgatgttcgcagagcttcagataagtatcaatccgaatatgaaaaaattcataaaaccttcttggcaaaaattcaggaactgtctgttgataaagagatgagacaaatcctcgaaataaaattaggagctcagcaaaaagccgatcaggaccatgcaatttttatgattgagctacaaattttagataaagcagaagaaatgtttaagcttttaaaaacttatccatggcaaaagaaagatcagatgatacttttccatgaaaatgctcaggtcaaaaagtttaatgcactgtatcaagacgttttaaaacttaatgcaaaaattgaaaaaattaagaaaaagaatgtagctgccttggaaggggagttaaaagaatag

SEQ ID NO: 63935 - DNA, 135 bp, Acinetobacter baumannii
atgcgccgagttttgattgcaattgcaagtctggttgttattacgagtattgttttttttacctatcaacatataaaacagcagcaagccaaggatagcagtcaaatgtttgatgtggtaatgactaaaaaatga

SEQ ID NO: 63936 - DNA, 507 bp, Acinetobacter baumannii
atggtggcttggattcctaagttttatcttgatgctggatatagccaatatgaggccagttacgctattggaatattcttaatattacagacatttactagcctctttttccctttaagtctacgagtacttaaaatcaagattcgaggtgcattattcttctttaccggtttgacaattatcagtgctttattcttattattcatatcacagattcaatggtgggctgtaattagcttaggcattgctacaggaggattatttcctatagcccttattttacctattgagttcgcctctagtactcaattagcaacacggctaagtggaataacccagtcctttggatacttattggctgggatcatgccatgggttggtggaattataatagataaatttggttctatggtgggtctaacttctctaaccatgctcatggctttaggtttaggaattacttcatatcatatgaaatatatgttcagtcaatattctaatgtatga

SEQ ID NO: 63937 - DNA, 1875 bp, Acinetobacter baumannii
atgtacttacaaaccataaaaataaataattttcgtatttttcaaaattttgaacttgagtttaataaggggctaaaccttctaataggtgaaaatgactctggcaaaacggctcttattgatgcgatcagacttgtgctagatacaaactcatcagagtggacaaaatttatacttactgatttccatgatgggaaaaatactctcaatattcaattgaaatttgcagatcttagtattgatgaccaaagcattttcccagagcacatcacatatatcaaaaatacgcaaaaccaatctgaagcatttttatacgtaaatctaaccgcatcgatcaaacaattaaccaacaaagttgggcaatttattcaaacagatataaattctggacaaaaagctgaaggagctaccctagagaaagcagcgcgcatgtatctttctacaacgtatttaaaacctttacgtgatgttgagggagaattatcagcaggtcgcacatcacgattatctcaaatcctagcaagccacgaatccttaggcaaaaatgaagtaaatgtcgaaaggctaattcgtacaatgattagtgcgaatcaaacaataaaagacgacgatgctattataaacacaaaagggcaaattcaaggtcttctagataaaatcacattcaaagataaaaaatttaatccgtctttaaatatgataggtagcaaagcattagaagaattaaatgagacagaaaggcatgctcttttccgaatcattttagaaagattatcattaggtctagatcaagtaggtagatctcatggtcttggatatagcaatttactattcatggcaacagaactaatgttgctatctcagagttctggtgaatttccattacttctcatagaagaaccagaagctcatttgcatccacaacttcaaatgaagttccttaaatatttaactgaagatcaaccaaatctacaatgcatattatctactcatagtccccactttgcctcaaaagctccattaggaaatcttattatcatgaataatggagctgcttttcctttacgacagggatctacattactcgattctgatgactatccatttttagcaaaatttttagatgttagtaaagcaaatatgttttttgctaaaggtattttaatcgtagaaggtgatggagagaacattcttttacctactatcgcagaacttctagatcgacctttagaagattatggtgtttccttggttaatgttggcaatctcgcctataaacgctatgcaaaaatctatcgtagaaatagtgcaactccaacacttccaataaaagtcgcatgtattacagatttagatatttggccaatgaaagctgaagcgagagatgataaccctatcggttttaaaaagaaaaaacatcctaatcaagctactggagcaaaaggaaatttaagatattggcaagattattatgatacacccgaaaaaatggaaaaccatcgcaatatgaaaaaaggaattgatggtgataatgttaaaacatttgtatctaatgactggacttttgaatattgcctttgtaagtatggattagctgagtcagtttatgaatcaataaaagcagatactgcccctgtattttcatcactacccacagatattgaagaaaaagcaattagtatatataagttgatcgaaaacaaaggttcaggaaaaacagaggcaaactataaattagtggatttattaaaaagaaaatataaaaataaaccatcagaactccgagcacttctcccatcatatattgtagaagcaattgcatatgtaacagaacctttcctagaatcaactgcaactggaggtaatcatgtttaa

SEQ ID NO: 63938 - DNA, 1203 bp, Acinetobacter baumannii
atgcttgaattcttttctcgattaagcttagtcactaaaattattatcgccattattttagggataggcgtcgcactattatttccaaccgttacgccgtacttaagcttgtttggtgaactatttattaaagcattaaaatcggttgctcctattttagtctttgtactggttctctcatctattgccaacttccaagttggtcatagtgcaaatttacgcccagtattactactctatgtagtaggtatgttattagctgcttttagtgctgtgatcgctagcttatcttttcctagtacgctttatctcaacactgtttctcataataatttgcaagcgcctggtagtctcgctgatatattaaaaaatctgcttttaagttttattgcaaaccctgttcaagcaatcagtgaagcgaactttattggtattcttgcgtgggcaattggtctcggcttagcaatgcgccatagctcggatacgaccaaacaagtaatgcaggatgtttcacatgctgtaagcgctattattcataaagtcattgcgtttgcacctgttggtattttcggtctagttgcagtaacttttgcagatgctggactagcaacacttgaaagttatgcacaattacttgctgttctattaggaacaatgctgtttgttgctctagtgattaacccaattctggtaggtttaacaattcgcggtaatccctacccattagtatttaaatgcttaaaagaaagtggtatcacagcgttctttacacgcagctcagcagctaatattcctgtaaaccttgatttagctgaacgtttaggcgtaaatccttcaactgcgagcgtttcaattcctttaggtgctactgttaacatggctggtgcagcagttacgattactgtacttactttagcaactgtgcatacgttaggaattcatgttgatttggcaacaatgattattttatctgttgtagctacaatatcagcatgtggtgcatctggtgttgcaggtggttccctacttctaattccagtcgcatgtagcttatttggtatttcatcagaaattgcaatgcaagttgttgcagtgggtatgattattagtgtattacaagattcaacagaaacggcgcttaactcatctaccgatgttttatttacagccgcagttgatattcgctcaagacaaaactcatag

SEQ ID NO: 63939 - DNA, 210 bp, Acinetobacter baumannii; identical to SEQ ID NO: 63850

SEQ ID NO: 63940 - DNA, 1071 bp, Acinetobacter baumannii
atgacagtatttaatcaaaaaattcaaacattgctagataaggggcaaggtcctgctgctcgagcacttgataggttacctcgactagctcaagagtctctcgctaaaattttaggatactcttatcaatatccagatctcgattcatttacgaaatgcatgatggctgtgcaaattaaacaggggagagtgggatttattggttcagacccaattgaatcaagaagagcatttgatgcacaaatgcaggccatacgccaaaaaccaactgatattgagttagtagaagatattcgcttacccctacaaagcggaactatctttgctaggcattatcatcctgcccctaataaaaaactgcccttaatcgtgttttatcatggaggtggttttgttgtaggtggtttagatactcatgatgaggtttgtcgcttattagcaaaatatgcaaaagtacaagtgctcagtatcgactaccctttagcacctgaagtttcaccacaacatttaattcaatcgtgtgaagatgcattagcttgggtttatcaaaaccgcagacaattaaaaatattaaaaagtagaattgctgtcgcaggggatagcgctggcggaaatattagtactgttgtggcgcaaagatcagtaaataaagcttatgctccgcaggcacaattattgatttatcctacagtcgacttcaaaagcagacatccttcattctatgcttataatgaagggctagtcttaacaaatactgatattgactatgtcacacagtattatgcaacgcatcataatgtagaacttgatgatccaataatttcaccgacctatggcaatctaaagaaaaacccgcccgcttttgtgattacagcggggcatgatgtcttacatgatgaagctaaaatatatagtcataagttaagacaaaatggtgtgaaaatgcattatgaagaatttccggatcagacccatggctttattaacctgactccgatttctagaaaagcaaaacgttatacgatcgaaattagtaaaaactttagaaagttttgggataaaaacagttaa

SEQ ID NO: 63941 - DNA, 1065 bp, Acinetobacter baumannii
ttgactctccgacaaacccggtacggttcaacccgtacagattctcttaatctttattggcgaccacgcacagtcagagataccaataatctattatttcatattacccattacactgattttctgacttcacaggatgaacattcaacaattcgtataaatccatttcgcaaagccacaagttatgaagagcgtctaaattggtgcgcttattatcataaacaagcaaatgtctttctaaatcatttaactaaaagagatttatcacagcagcaagttcgtttggttggatcgttcaatgaagacctgattgattttgaatatgcagttcgtttccctgaagatcaaattgaaagattgatttacttagggttcgaaaaaaatggtaaatatgactataaatcgcaagcgattacgatgttgatgaattacggtgggcttaggaaaagtgaaatttttcatatttacacttcagatatcacattaaacccaaaccgtcctcaagaagctcttgttcgtgtttatcatcctgaattaggtctagctccagaccctcatttcaaaaatagacgtgaatttcttttatccaaaacatcattgaagcctagaaataactatccatttaccgaacgtttatatgcaggatggaagtccccattacttacatctaaacaaggttactttgaggttgtatttaaccctcctgaaaaagctaaagatttcttattaatttgggcaaactatctcaaatatcagcgtgcagagccgctgaaaagtaatccacatccttttgcatttacaaataatttaggtcagcctgaaactataaaaaactttcaacgcctgcataaacgtgcagtagagcgtatcgggctaatttgcaaaaaatctcttggtacgactgagcatggtcatcgtcatgcatatggatttcgtgcgcgtcaggctggtttaaatcaagtcgaaattcaaaaagctatgcatcataaaagcccaacatcatgtcttgtttatatcaaaccaacaattgaagaagtccaagaaaagttgagagcgattaaatga

SEQ ID NO: 63942 - DNA, 1722 bp, Acinetobacter baumannii
ttggcagcgcattggacgacagcaggtggtgacgatgctttaaaccagactgttccattctgctattctccaaacgttctatttcattcttctcatgacctcaggcatactgcggtcatgaatacgctgcctgacttaagccaactgacccatgaacaactgctggaattcaccagacagttggcaatgcagcatcagtctctggcagaatcaaatcaagagttagaaaaatcaaaccagcaattggatgccaaagttcaacatctttctattctcactcaaaaatacgagcatgaactggcgctgtttaaaaagcacaaattcgcccaaaagaatgaacacttaacggcaaaacaaatccatctgtgggatgaagcggttgaagaagatattgccgcggttgatctagaactggagcggctgaatgcagataaaaccgatgcagtgacacacaaagccacagtcaataaacctaaacgtcgaccactgccagatcatctacacaccatccgtattgagcatgaacctgcatcaacccaatgtgcttgtggatgccaactccggcgtatcggcgaagatgtcagtgaaaaactgcatttcagaccggcacagttctataaggaacagcatatccgtggcaaatgggtctgtgatcagtgcgacaccctgactcagcaagcgatgccagcctatgtgattgataaaggcattgcttcacctgaactgctcagccatgtgctggtatcgaagtatgccgatcatttgccgctgtaccgtcagcgcctgatctatcagcgggcgggcattgatctgtccagatccacgttatctgactggattggtcgctgcggtgtagaactggaacctctggccaatgccttaaaacaggtgatgctgcaacagcgggtgatccatgccgatgaaacgccggtcaccattatgcggatgggtgagaatgagaaaaaaccgaagaaaggttatgtctgggcctatgccaccacacagtacaatccagttcaggcagtgatctatgactttcaggatagccgttcaggtcagcatgcagaagagttcctgaatggctggcagggccatctggtctgtgatgattacagtggttataaagcacgctttaaatcaggcgatgtcattgaggtgggctgcatggcacatgcacgtcgtaaatttcatgaactgcatgtgaccgggaaaagtcagatcgctgaacaggcattagtgctgattcagaaactgtatgccatagaagcagaactcaggaaaaagaccgatagtacagcagaacaccgccgcgaataccgacaacagcacagccaaccggtgatgcaacaactgtatgaatggctcaaccaacattatctgacggtgccatcgagttctccaaccgccaaggccatcaattacagttttaagcgttggccagctttaagccgctatctggatgatggcaatctacccattgacaataactgggcagagaactcaatgcgcccctgggccttgggacgaaagaactggctatttgcaggttcgctgcgcagtggtcaacgagcagccaatatcatgactttaatccagtcagcaaagctgaatgggctggatccgtatgcctatttaagtgatgtgctgaaaaagctaccgacacataaagtgacccaaatagaagaattactgccacatcgctggaaatccaactcaaattaa

SEQ ID NO: 63943 - DNA, 1572 bp, Acinetobacter baumannii
atgttgagttcatttgatgatgttgggttttcacaattattaaacttagagactacaaatcagaattacaaagttctccttttcgctaataaattctatggaaagctatatctggctaatgatggggcttttgactggagagagttaggagagggagaaattggtgatcaaacccgagagggattaaaaaagtttactcgaagccgtagacttttttttataactgctgaggaaaaagatctttcaaaggttcaacctaattttagtcaagcacaattaatatccaaaatttctttattggataattggttaaatgaatccaaagatttaactacagggcggaaaggtgaggtttcagaagctactaaatttaaagttgcatgttctgctgcttggagatgtcagtttgagggttgtggtgaagatcttagacaacatttaacaccaagtatgagtggtaattatagttattttgcacatattgttgcttcttcaaaagaaggacctcgtggaaatgagcagtcagaagctttggctgatgatcctagtaatatcatgttgttatgtgataagtgccatcgcttaattgatcgaatagcaccaaatgaatatgatgcagatagattaagaaatatgcttcaaaaaaatattcaagaagtcaatcgcttattggaatgcttaaaaatgccaaacgctgaaatgatagtgattggaggtgcgattgaaggtcaggctttccgttttgatccaaaagtagcagaagaagccatgtggttgagaaacattaaaagccctaacccagcagaatattttgtcaacaatgctttatattttagttcatccaataacaataattattgggctaatgcttttcatcttttgaaaagtactgatttatcaaggttaaaaagttttttacgagggcctggacgtgatggacaattgagatctttagcaatatttgctttacatggatcatcaatcctagtgctgagtggaagattgataggcgattctagtcctgtccatctttttcaatttcatcgccaacaaatagaaggtaaaggtcgacaatgggcttggcctgatggggatgaacccttatcggacaaatttaagattaatattcttaaagaacctatcccaacagattctgaaatggtgctacaaattaatttaacagctaaagttccacctgaagatctacctgtaaatatttttgagaacaatactttcaaatttccaacagtggaattaacagcggatagttgtaattttagtgttattagccacccaaaagatttagagcttttggggagtgcgatagatagtatctatcgcaaaatacaagatgaatggcgtatcagaaaagttcacctatttattattgcacctactacagcatgtatacgtattgggcaaaaaatgcaagcacgacatcattctgatttcattctttatgaacgaaaaccaagtatcggaggtattcgcggaagctttgaggctacaattaaaattagttcaactaaagttactttagtttcaaatagtgagcaactcgaaatagattaa

SEQ ID NO: 63944 - DNA, 363 bp, Acinetobacter baumannii
atgaacagcttaataacgagatatttacataatctggggtcgtggcacgaagtagcaatgacaatcttcaaacttagtattgcaatagggggcttgtgcttagtagcatatcttttaacaattcgttacatcccttcggaaattagtttcagtgatacgtttatttttttactgattttgtctgcatcttttactgtttatgttggggtaggcgttatcctatttttatttggcacttccttagttcccattacatatattgttttaagtgtagtcgataagtatttaccacccctagcaataagccctgaaaattcagggctttttatcagtaccaatttttcaatagatgacttagagtaa

SEQ ID NO: 63945 - DNA, 210 bp, Acinetobacter baumannii
atgcgcgattttttaacacctactcaggcagttgaagttttgaaagacgcttttaaggatattggttgtgagacggagttagatgattttgataactggattcttctaacaattactgattgctctacatacaaaattactcgtagaatcttctcccaacgtaagaaattagaggaaaaaattgcattccttaaaagaagcctagaatag

SEQ ID NO: 63946 - DNA, 363 bp, Acinetobacter baumannii
atgctaagtatgagacttgacgttttacaagctgcgaggcagttggcaactgcttattataatgttccaaaagctgagttctcgatgatacagaatcatcgagacggctctatccttgttgagattagcgcaaagactcgattggatacctctcctatcgttcatattcgatacgatgctgaaggcacaaatatcactgtaaaagttccacccgcttacaatgctgttactcaacttgatgcagatgattgggtgtttttctcggagtggataaaccgtctttacacagaagatgagtttgtcaaagcaaaccgagacttttggattcgaaaaggtcgaattgataccaataaactattctag

SEQ ID NO: 63947 - DNA, 1692 bp, Acinetobacter baumannii
atggtactgatttcagcgattactgcatcattgaaatatcaccatattggcttgcgtaatccagcaacaaaaatagattacaaagtgtattctctatttatgttgattggtaatgcgctactaagcttctcggtcattagccagtatcgttcagtcattaattccggggtaacacctacttatgaaacagtaacaatttactggatatggatgattctttttgttgttctgaccttaattagtctgtatcaactatttgtttcacctccaccaaaacgtgaaggcggtaatataggtttagccttactttctgtacctttatatgcctatatggcactaattacaggtattgtatttacgttctttatggattatccaatggggcaagggatttaccttggtttattggttgagttctcgggtatcttcttaaatcttgccttatttatttgggcgggtatgttactcacgcaaacccgtgttatggacttgttcttaaatgtacttcgtccatggaacttggcgccagaaaccttaacttggttaattctgattgctgctgctgtaccgactgcttataccggtgcttcggggattttcgttatcgcggctggtgcgattatttataaggaagtttggaacgcaggcgctcgccgtcaatatgcattagctgtatctgcaatgtctggctccctaggggtggttgtacgtccatgtctcttggtcgttctaattgcgatgttggatagtcgtcatgttacatctgatgaattattcggacatggtatttatgtcttctggctaacagcgtttattttcttgggtgtatctcttttattggctgaagaaaagttccgtgtgaactcgccaaaagtggcactaccaggtatggcacgagctttcgtaccggttattccatatatcttaattactgtagttgtccttgcattttataaatatgcattagatacaggaatgaatgaatttactgcaccagtgattctgccactcgtgcttattgcgatgattctgtacgataaaatggttatgcctaaagaggcaccagctttaaatattcatgaggcgattgttcgtgagcatgaaaagaaatcaccgttcttacagactcatgatccgcatagttcacaattccgtcttggttttggtggtgcattacgttttgcgacatcagaaacagtgggacatatcggtgccttaattattttgatggcattgtctgcaagtgtaggcggcttaattgaacgctctgaagtggtcgaattattaccaactcatttaggcagtatctatatatcactggcatgtattgcactgttacttgcaattattggtatgtgtacagatccatttggtgccgtaattttagtggcagcaactattgctcctgtagcttacgaaaatggtattcatccaattcacttctggatgattgtattggtcgcattcgaatttggttatgtaacgccgccagttgccttgaaccatctattaacgcggttatccgttggtgatgatgaggtgaatgctgccgatgcagaagccaaagagaagtacacaagtttctactaccgatatgaacgttggttattaccaattattgtcttgttctcatcattggtattggtaacttatgcaccactaatactgaaactatttggttggtacaagtaa

SEQ ID NO: 63948 - DNA, 453 bp, Acinetobacter baumannii
atgcttgcccaattcgatgttaatttagttgttttattagttttacttatctgcggtttactaagtcaaaatgcagctgtaaccatcgcagcaggtattttaatcgtcataaaaatcacgccattaaatcaattttttccttatattcaggcccatagcctaaacttaggcatacttattctaacaattggcgtactcacccctattgcaagtggcaagcttagtggagagagtattttaaaatcctttattagttttaaatctttagtcgctattgcaattggtctgctcgtcgcgtggctaggtggtcgtggtgtaaaacttatgtcgagccaacctgatgttgtggcaggcttacttattggtacggttgcaggtgtagcgttactccgtggtgtacctgttggcccgttgattgcagcaggtctattatctttgtttataggtaaataa

SEQ ID NO: 63949 - DNA, 762 bp, Acinetobacter baumannii
gtgcaacaaagccctaaacagccagttggttcagaaaaagtttctgcattatttttacacggcattccatttgatagtgcatgttggtctccaatcatcaataaaattacttatgatcaggtcgctatgatggacttaccgggacttgggcgttcaggtagttatgaaatgatggaagataataaccatcaatttattgatactacggcagagcttttggcaccaaatagtgtagtgattgcccactcattaggatgtctttttgcattaaatcttgcaaagaaatatccagataaagttgcacgccttatccttatatcgccttattttgttcaggcacaggctgcaaaaatgtttcagatacaagcgatatctaaactcattttccgttttgtgccgaaagatgtgattgctaaagatttacatccagaggggcaacaaaatctgtcagtgagatatgcgatggattcactacgccgcatgtcagtgtctaagcatattagtgagtacatgcaccacattaatttgccgcagcagcgcgcagcacagacagctttgctttctgagcttcgatctaaaatcgagattattgtgggagagaaagatccaattgttactccaatcagtccagatatcccggtacatatcatcgctggagcaggtcataatccacacgttacccatgtagaagcggtttatgattaccttacaccagttctgacaaagtacatcagcactacagcacagcttagtgatgtctga

SEQ ID NO: 63950 - DNA, 336 bp, Acinetobacter baumannii; identical to SEQ ID NO: 54574

SEQ ID NO: 63951 - DNA, 1164 bp, Acinetobacter baumannii
atgcgtaaacaacgattattgaatgacatacaaaaaatactggcacttaacttatcaatcgctgcaagcttttggggactcaatactcaagcatttgctcatggtggaaaggccgacatggtctcactttatcaaaacatgagtgagcaaggcgctaaagttgtcaaagacgattttaccaatacgtatacaattaccaaaggctctatggtggttagagccaagccaaactcaaatcaggttttagtgaatggcaaacctttaaaactcagcgtgcctttattaattaaagatggtaaacctgttattggaaaagatttttttaacgaagtcttccagtctgggttagatcaaacctttaaaattgaaaatacgtttcatccactcaatagcttaaattccgatgaaattaaaaagacatttgatgtgattaaccactcgaaatacgcctataaaaatatgcgttttgccgagttaaagcttaaagaacctgaaaaagccaaagtatgggattactttattaatcataaagattttaaagaagatcgtattgcctcatttattttattaaagggcaatcaagcgattgaaggtgaagttaatcttaatactcaacaagtcacaaaatggaatgtacttaaagatactcacggtatggttttgcttgataattttgaagccgtacagcgcgtaattgagacgagtaaagaatatcaagatgcgttacgcaaacgcggcattaccgatgtgaagaaagtgatcgctactccgctaactgttggatattttggcggtaaagatggtctggataaacaactcaatatattaaaagtcgttgcttacctcgatgttggggatggtaactattgggcgcatccaattgaaaatttagttgctgtagtcgatttagataaagaaaaaattattaagattgaagaaggtgcgatcattcctgtgccaatggcaaatcgaccttatatgtcgaataagcccgtagcaagtaagctaaaaccactcaatattactgaacctgagggcaaaaactttagcattactggtcaaaccatacattgggggaactggtgtttgcatgtggcgttagattctcgtgttggcttacagctttcaacagtgactggctttgttgcacaaacctatctctaa

SEQ ID NO: 63952 - DNA, 1077 bp, Acinetobacter baumannii
gtggtttatgtcgcacttcaagttttactctgcccaactacagcgtgggtgccaactctagcccaaatcacctacgcatgtggcttactctttttaatgccattaggggacataatagaaaagcgcaagctgctatttatctttatgttattggcttcaagtggattaattattagcggtttttcgcacaatatttatcttttactgcttggcactatcattactggtttattttccagcgcagctcaacttttgttaccacttgctgcaagtctggttccaattcaacaaagcagccgtgtcgtaggctttttactgagtggactgatgatgggggttttactcgcccgctccctttctggactgatgtctacactttttgcatggaatattatttatctggttagtggttttctgttacttgtgattgcctttattttgcatcgtaatatcgggttatttccaccgactaaatctgaaaactatgtaaaaactattcgctctttaccgcagatttttattcaaaatcatcggttaagaaccagaacttatattggtggttttacatttgcatgtgtgagtttaacctttaccaccatgtcgttgcttctggctccagcgccctatttttttagcgactttaccattggccttttcggttttgttggcgtgttaggaactttcgttgctaatttttcaggcaaatttattgaccaaggctatatccataaaatttcaatttattgcggcattggccttatattaagttgggttctgtttttacttttaccctaccatttcgccttttatattattgccttactcattctctacgcttctctttctgctgtacatgtcaccaatcaaagtattgtatttaaacttaatcaagaattacgttcgcggtttaacgcgatttatatgacaggttactttgctggaggcgctttaggcacaacggcaggaagttatgcttggaaacacttcggatggacgggcgtctgtattttaggcttaatttttgccgtcttatgtctttattattgtgtgcttgatgcaaaaaatcagcacaattaa

SEQ ID NO: 63953 - DNA, 1338 bp, Acinetobacter baumannii
ttgtttgctttagttgccaaaaaaaatggaaatgaggatggcgttgctggagcaaattgggctgttgctaaattagcagaatcaactaaagacgttatccaatttcatgtggatgcagaccctggcagtagaacacactatctgaaacaggcttggggagcctacggagcagcatacggaagccaactttttgaaattggtatttttgagcatgctaatgaccacgaaatcccaatattaagtcaaattggtcttcaactttccgaggccttaatacaagagcaatctagtgttttagagcaattctggaaatgcatcgaacaaggctcagtcaacatactcgatttagcaatgtttgcatccttgttgccctcgcatattaacaaggatagtactgagcgacggatgtatcatcaaatactttttcctgatgatgacactagctccgaaggggcattgaaacgtaaaaaaaccttaaatctgattcttataattgctgatcagaagaaaaaacccataagcgcaaatgacattcgatgggcactttactcctcgtacatttccgaagataaagaactgatcctgcctgcacatttaattgagcatcaaaagttttggtgggtttatcacgctagtgatctatcgcatatttgtttcgaaacactactaaaatatacgcttgatttgttggagagccatagaagtggaatctccctaaaagcgctaattgctgaggtcgttgaaaatataatatcccaaatgaaaactgaaaaagtagatcatcaaacttgggatgagtttctgaacacgcttaatctagctaaaaacgcttcctcacgaaaagaggatagcattacggaattaaatctttcgaatcagattatgagttctagtcgacttttagaaaattataaggctaaggatgcattggatgcactgcgacttttagcaatcctccaccttcggataaaggacttagaggaaagcgatagagaacattttgctggtccaaactattcggctattcgctcaatatggacggagacacatttcatgaatgagattcgccatcttgaactccctaaatttcttagtcgtttacttgaggagagaatcgtacgtaggcacattgaagtagcaatgcgtaagttgggaacccaaggtgattacacgtttttaattgagtcggagaatggattaatacgacttagggctaaagataagcctatctacactaccccacgactaggatcagcactttcgtttttaaaagatatacatttggttggtgatgaaggcttgactgacattggaaaacaactagtagtgttctcatga

SEQ ID NO: 63954 - DNA, 1077 bp, Acinetobacter baumannii
atgaagaatattactgaaaaatcactttttgatgtctttacccagcatcaagcttatctctaccgagcatcatcgcgatcggtaaatgaactttataagttttttaatagtgaaacgatggttatgcttgatcggttaagcaatttaatgaaagagctgaatgaaactgagaagtttgctcttgctggtggagagtatacaactcagcatctaaaaaacatccaacttgttatttcgaactggtttaattcaattaatactgttttaccggaaatgtttactcattcggcaactgctttggctatatatgagtcaaactatatggccaaactatttggtaaggttattaaagatttagagggagagcagctttatcagtcaataaaacgagtgcctttggctggaggtgccttggttgatgaatccttagctcaaattggtgaaaatgcccttcaacgcattgaatatgctattcgggatggtatgaataccggaatgacgcctcagcaaatcatcaaacgtattactggtacaaaacgccttaagtacgaagatggattgctcaacagtaccaaaatcgatattgaaagaattattagaacgctacgtagccatatatcaaatcaggtctatttatataacttcaaaaattttaattttgaatatgtaaggttcgtgagtgttttagatggcaggacttctaaaatctgtgcagccgttgatggttctatttggaaactgaatgactcggcgaaaagagtgccacctttgcatccgaattgccgaagtattctggttcctgtcagtaaggatggaaggcttattgggaaccgatctttcgttatggatgaaagaaaagtacgagatattcctaaagatgagcggactcagttaatgggccaaatagatgcaaatatttccttcaaagagttttttaatctgaccgataattttttccaaaaagaatggttaggccataaacgttataagttatataaagaagggcaatttgattttgataaattttttgatccaaaggggggggggagactttgcgataatatacttttgagctaa

SEQ ID NO: 63955 - DNA, 333 bp, Acinetobacter baumannii
  misc_feature (6)..(15): n is a, c, g, or t
atgagnnnnnnnnnngagttacaacaaagctttcaaactcaatccattaattttagcgtttcagatgagcaacgtaaaaaagttgagaatgaattgatggtagaagcgtctaaaaactttcaacagcgtgctcaaatgttgactcaagcatggaataaaagccaatattctttggtcactctaaacctgaacacgaataattattttcctcaacctgtaatgcgtgccagcctagctaagttcgctgctgctgaagcggcaccagctcaagacatggctgctggtgagtctaaaattactgtaaatgcaaacggttcaatccagtttaaataa

SEQ ID NO: 63956 - DNA, 336 bp, Acinetobacter baumannii
atgatccgtatcgatgaaatctggttgtctacccagcccatggacatgcgagcaggaatggatacggccatggctcaggtggtgagagcctttggctacatcaaaccgcattgtgcttacctgttctgtaataaacgtggccatcgcatgaaagtactggtgcatgatggactggggatctggctgtgtgcccggcggctggaacagggcaaatttcactgggctaaagttcaccagggtgaaagcgtagccctcagcccggaacagttacaggcactgatccagggtttgccctggcagcgcattggacaacagcaggtagtgacgatgctctaa

SEQ ID NO: 63957 - DNA, 210 bp, Acinetobacter baumannii; identical to SEQ ID NO: 63850

SEQ ID NO: 63958 - DNA, 1335 bp, Acinetobacter baumannii
atgctgatcactatgtctgacaaagaaattcaacgtcttgctgttctgcaagacgttcgagatcaacgtattacacaagtccgtgctgctgaaatcctcaatctttcaacccgtcaaattacccggttattacagaagctcaatcaagatggtgtttcaggtatggcgcatgccagtcgtggtcaacctggccatcgtcgccatgatgatttattaaaatcaaaatgtctttccattatttctgaacatctgctgggatttggacccaccttggcccatgagaagctcagcagcatatttgacctgaatatcccggtagaaacgcttcggcgctggatgactgcaaatgacctctggattccgcgatccaagcgccttaaacgtccatatcagccacgttataatcgggattgcttcggtgagctgatccagattgatggctcatatcatgactggttcgaaggacgcgctgctaagtgctgtttattggtgtatatcgatgatgccactggaaagctgttacatctgcgcttctgtgaggcggaaacgaccttcgactatatgctttcaacccgagcctacattgaacaatacggtaagcctctggccttttatagcgataaacattcggtcttccgagtgaaccagaaatcgagccaggacagcaagatcacgcaatttggccggattctgaatgagttaaacattgatattatctttgccaactcaccacaggccaaaggtcgcgtagaacgcgcgaatagaacccttcaagaccgtctgatcaaagagatgcgtctggaaggcatcagttcaattgctgaagccaatgcctggctaccctgctttattgagcatttcaaccagaagttcaccaagtgtgcgagaaacccaaagaacttgcatcgatctttaacggaatctgatgttgagctggaggatatattcacctggcaggaaccgcgtaaggtcacgaagaacctaaccatcacgtatgacaagtgtatttatctgcttgaaccgatagagctgaatcataagcttgttgggcaatacatttcatttctggagtacccggatggcactgtggccatcatgcatgaaggccgaaagctcaactacagcatctttaataaattggctgggctacagcaaaatgagattgttgagaataaacggttaggtgcagttctggcacatattcaacagcagcatgaagaattggaaaaacagaataaatgttcaagaacaaataaaaatatgccaagccgtaaagctcagaaagttgttattgaacaaagaaagttaaatcctgtgcttgactcttgtggttaa

SEQ ID NO: 63959 - DNA, 1113 bp, Acinetobacter baumannii
atgaaaataaaattatcgaaaatagtaatagccagctcattattgatatttgcaaatatgagttatgcagagggagtaaaacggttttctgtctcggcaggttggttacatgtaatgcctcaaggtaaagctaatccatttaatatcaatacaagcgttaaaaatggaacagttgctaaagtgggaagtatttcaccgaccagtttcttaaactccgttgatcctaatgctacagaggtagatgtaggcggtgaaccttttaatcaaaaagagtttcttgaactcgctttaaatgatgactttttaaaagggcttctacttgatgaagaaggcaatataaaacctgaggtagcaggtgaggcaacgattcaagggttagagcagtggcatcaaaatgatgccggccttgaagtagatgacacagacacattagggcttatgtttaactattatctcaatgacaatgtgtctttacaatttattggaggcattccccctaaagtcgatattaaaggtcaaggtgaaatcttagctccattaagcggtgtcgcgttgtcaccacatgaattagttaaaattctttttccgaacggcattaccttaggtcaagcagtcccgattactaacttaggcaataaacctaaagcagctagtgttcgtgcttggacccctgcaattgaagcacaatatcaatttgggaagagtggggtgaacaagtttagaccttatttaggtgtggggttaatgtatgctcattttaatgatattaagctaaatgacgaaattcgttctgacctgatctctgcaggtcatatgattcaaaatgtgttagatggtaaggctggggctgccttggatcgtaaagagtcgagtggaaatatggtggttaaagtagatgcagatgatgcgattgcacctatatttactgccggctttacttatgattttaatgattcttggtatacggttgcctcagtatcttatgcaaaactaaataatcgaacaaaaattgatgtcattaaccaaaatacgggcgctcgcttaattcatgggtcaactaaagttgatattgatccgatcattacatatttaggggtgggctacagattttaa

SEQ ID NO: 63960 - DNA, 534 bp, Acinetobacter baumannii
gtgtataagagacagattaattatctattgagtactgatgatgactcaaactatggacgtggaactagtatcttcgatagaactcgtaatcgctttttaaatttaattgttagaaaacaatgtccggtagatgttcacttaactgatggttcattaaagtttatttttcaaataggtaatgcctctatacgttttttaaaagatgattttgaaaaacctaaaaagaaaaaattcctcatgcaacaaatacaaagttttagcctatttcctttagatgatcaccaaccacatttttggcgattcattctaaatgaacctaaaactcttgatgatgaaccacttgttgtatttgctggctataacttagtaaatgatgttgttgcatattgggattcaaatagtattactgatatcaaccatattcatttggttgagccagaaacccccgcatctgtcgagttaggctccccattggtcgaagatcttgatatcgaagataaagatgatgaagattccatagctataaataattaa

SEQ ID NO: 63961 - DNA, 1170 bp, Acinetobacter baumannii
ttggaaattggtggggcagggctgaacgcctatggttttgaattcggtaatttaacggggctgaactcggctacacgcggttattttgacagtggaaatatttatctaaatcttgctgatacaaaaactttattaatgccaaataacgcaacgttaaatgcaattcgtttaggatccggcactttaaccactgctgccgattatcaacataatattcatcgtgatacggtgactaatccatttagcttaattcttgccatgcgtggtgcagagtttcaggcattttcaagacgaggtcgttttaccaccagtgcaaatgtcgctgctgctaatcaatttgcagataatggtttaaataaccagtggggtttggcattacccttttataatttaaatgcgaatgccgctgtctatggtgtagatgcgcctgcaaatggtgcttattactatacaaaagatgccaacggtaaaccgattcaaaatttagttgcaacatctggtacaacttcacgtttaggttttggtatagctgtaggaacgacaggtcgagatgcaggcggtactaaaacaacttcaattttattaattgatggttctccaaatgctaataatgcgggcaaccctaccgattattatatggggttacgtaatattgatatgttcctcaaaggcaatggcactattggtttagaaaatggcagtttaaatatcggtttaaaagatatgttacttgctttatcaaccgaaattgcggcaggttatttaccgggagctaaatataaaacttgtccggcaactgggtcttgtacttcgccaatcgataactttgccaaaaataatgatgtcttatttggtttaaaactacgtttaggcggcgatcttaatttatcgatagtgccgaatagttcaattgcagatggtagtgctttaactgtactcggcgattttacaatgcctgcgacagcaactggaaatactgtacaaattagtgacccgattgatggttctgcaattggttttgacaatattactggaaagctagcgtttaataccgctttagttgtgggcaaagataccgcaagtggtttaggtaaagttggcgtaaataccgcggtttattttaaccctgataagagtattgacggcgcattacgtgtgaaagatatgtaa

SEQ ID NO: 63962 - DNA, 702 bp, Acinetobacter baumannii
atggcttttccacatcatacagagcatcatgccattcaacgctcaggttggctaagagcctcagtattaggcgctaatgatggcattatttcagtgactagcttaattatgggaatggctgcaagtggggcaagctcacatactctatttatcacttgtgttgctggactcatttcaggcgcaacctcaatggctgccggagaatatatttcggttaaatctcaagaagatattgaaaaatcagatttagctattgaggcaaaagaattaaaaaaataccctcaaaaagaattggatgaattaactcaaatctatatttctaggggactttcaaaagaactagcaaaggaggtggctattcagcttacgactcatgatgctttgggtgcacatgcccgagatgaaatcggtattcatgaaaatacggcggcaaacccaattcaagcagcactctcctcagcagcatcattttcatttggggcatttttccccatgcttgccattttgtttagcccagagcatttaattatgccaagtgtgcttattacaggtatcgcggcattagcaattttaggtgccctttcgagttattttgcaggtacgtctaaaatcaaaggtagtttacgtattaccttatggggtattttagcgatggctttttcaagctggattggttccttatttaatgtcactcctttataa

SEQ ID NO: 63963 - DNA, 336 bp, Acinetobacter baumannii
atgtcagagaatgttggtttcgcaggtcaaattggcccagaacatgtgggtcaagttgtagaaaaaggctttaaatctattattaataaccgtcctgacatggaaggtggtccagaacaaccaaccagtgctcaaattgaagaagcagcacgccaagctggtctagattatgtttatcagcctgttgtagctggccaaattactgaacttgatgttcgtacttttgcaaatcactataatgaacttccaaaaccggttctcatgttctgccgtactggaaaccgttcaaacaatctttatcaattagccaaacaaatggatttgttagacgattaa

SEQ ID NO: 63964 - DNA, 294 bp, Acinetobacter baumannii
atggctaaacgcttcaatcctgaatttaaacagcaagcaattgattatgcactttcaaactcacacgagcctatcgctgcaatcgtccagaaattaggtgtgggttattcaaccttagaaaaatggattcgtgaagccaatccagtgggttcaagcaaacgtcaactttcaccagaacaacagcggatcttggaattagagaaagaagtcaaacagctcagggaagccaatgacatcttaaaaaaagcgcatgtgtactttctaacagatcatgccaagaaaagtacacggtaa

SEQ ID NO: 63965 - DNA, 1251 bp, Acinetobacter baumannii
atggctctagtcctcttatttttcaagtcaatttcttatccgcgattcgggttaaaatataaccgtaaagaaattaccgaagcctctatgttggcccgattagtaagttcgtggagttctgtaacgccaattgaatgggttgattcaggccaaaccaatctaaatcctgaaacgaactttattattgaagtgattcgttcggcaagcccactcaaaggaggagccttagtacaaattgctaaaccggctgaaggtgtaccgacgctatctattacttatcacactccacaagagcttaccgctgccattaacgggctaattaatccaacttatgtgcaacagcttgatacgggtagcgctatttttccaactacaatctcagcaccagcttgggcgcaatttaaaaaaattgatacgcttgcagatctaggtattcaggattttcgactaaatcatgccgaaaagaatttatttcttgattttccggcagtatggcaacctactgatattctgcaagggcaaatcgcacttcgtattcaaagtggactattacaaggttcaaatattacagcatggattgatggaggacttgcaggaagtatgaaaacggcggatctcgcatccgaccctgtaaaccgacagttcaacatctttgccaaggaaatttcaaatacaaccaactttagcttgaaacttgaaaactcggttattgccaattctcaatgtttacccaatgctcacggctcactttgggttgataccgccaaatcaacggtaaaacttccccataaacttaaaaatggtgttgctgctctttcaatgaccttagccaccaagccaacgattgcaattgatgaccaatcaggggcattaaatattgccattattttaggacaagtcgctaaaaacatgctgctgacacaggcaccaatgccagtgaacctagtacgcttctctccgacttccccacaagcagtgaatgtgagagtgaacaaagagatttatcagcaacaagtcttaatgcatcaaaatattatttatgcacccgcagcagcgaatggctttatcgtaagttataacaataaccgcttcgatgtaattacagactctgaaaacggtgcacaaacctttatgcatttatggggaaaaatacagcataaaatcccaaataatgtgactaaaatgctggtttctgaaaacggcaatatttatgttcttcaaaaattggtggtgtttcaaaaagtatgctga

SEQ ID NO: 63966 - DNA, 210 bp, Acinetobacter baumannii; identical to SEQ ID NO: 63850

SEQ ID NO: 63967 - DNA, 1137 bp, Acinetobacter baumannii
atgcttcactcactccccatattagattctcagaagttaaacattgttgacaaagcaagaagtagtagatttacgtggagaggacaattttcacctgaattaattgaatatttattagaaaccctatttgttgaggcaaccacaatttatgatccattttgtggaagtggaacagtattgtttgaatcatctttattagggaaaaaatcaattggatctgaaattaacccagcagcttggtgtctaagttcaacgattcatcttaatcaactatctaaagcagagcagaatcaattaattgagaagatacgtttgtctctagcaaataaaagcgaagaagagatcatatctactgttagatcagaaaaagatgaataccttaaaattgctttgacggcaatactattgttgggtacagggaataacaattatctggatttgaataaaatacaaaagtctcaaaagagttttatttcatttattcaaacacttgatggattcacagctaaagctaatagctatcttgaagattgtcgaaaaacaagaataccagatgattttgtagacggcgttatcacctctcccccatacattaatgtttttaattatcatcaaaattatcgaccaattatggaaaaacttgggtggtttccactcgatgcagcaaagtctgaaattggcgcaaatcgaaaatttagacaaaatagatttctgactgtaattcaatatgctcaagatctaggacaaaccttagatgaattggctcgtgttatgaaatttcatagtctaggggtaatgattgtcgggcgagagtcaagggtacttggggaatcctttgacaattcaaagattcttgaacatcttcttgactcacattcttctttcacttttatttctagcattgaacgtgtttttaagaacaagtttggacaagagatttatgaagatttaattattttcaaaaaaacagcttcttatgaacggttagatttgaaaaactctactgaaattggtatagctttcctcaaagctaaagtacctttatcaaaatctgagaatgttgagcttttattacaagcaatctctaaaggagagtgcttacaaccatcacctttatttaatatccaatcattatga

SEQ ID NO: 63968 - DNA, 849 bp, Acinetobacter baumannii
gtgcaacaaagccacttcaaatcagtagatatttaccgtaatagcagtatattggagcaaattcttaaaaaggaaatttttgtggaaagtaaagttcagcagcagtatttagcaattcatagccaactaaatataggagatataattttagtcacaggctcaaaaaaaccatcgaaatggctggttaacgctcaaaaactttattataaaaaagcccaaagtagccatgtgatgatacatataggggatggagttattattcacgctacgacagtaaaaggagttcacttctcgcctttattagaagagctaaatgattgtgaaacaacatggagagtcttacgaaataagagtttagctgatatagatgaaaataatttattgagatcttctttgaagttttttaatcaaaaatataatataaaatttctagaagtacctgaagaaggtgctgatataaataatacggaaagttctttttgttctgagcttgcaagtaagttttttgaaagtttagatattaggattgctgatcatttagaaagaaaagtctttccttgtaattttgaccaattttttgattcaatttccagtaattcagattggatagatgtaactgaaatatataaagaaattattacgttaccatgtcaagatgaatatttaatctcttgtaaagcagctattgcccatatgtctttaatgctaatgaaaagacaatatctagctccttggcgtgagtttagctatagctttattgccgattttgcaaaacaaaccggcaatcaacagttgagtaagttaagtgatgaaatgcgagataagttaaagaatagtgatatacgctga

SEQ ID NO: 63969 - DNA, 708 bp, Acinetobacter baumannii
atgaagtcaccaaaaaatgatcatattagaataatacctagagcaactgaacgtattaataccactacagacactaaccagcctaatccccctttacctcaattaggtagcggtgacattaacgtttccacaaatcaaggcggtcgacgtccgccttctgattatgaattcttagaagatgactttgaatggattgatggcggtccagctaatgaattaagtaaatacaaatatgtaaaacagactaaacgaccaaaacgaaagaagaaatatatagaaacacagactataggaactggagcccctgacaattcaccagaagtattaaatggccaaatagttccttcaacaaatcaatcgacagagtttcaggcctccgaggatggtagaattattggattatggaaagcttgtgtaaaagccatggatttcaatccagatttaatacaacaagttcactattacacatttgaaaagggatttaactattccgaactcccgatgctgatcggtttttttacagagtctgaagtgcaggttcacaagacttggtgctatgcaaattcactaaaaactcagatacgaggtgcattaattatcagattaactgtatcgcaattagaacctgtttatatttttgatatacagcccgctacatatacgtctacggtagaaggtgaaactcttataaaagaaagaggacagtaa

SEQ ID NO: 63970 - DNA, 651 bp, Acinetobacter baumannii
atggatagtgctagtcaggagccaataccgttatatggtgattatataaatcataatccgttgagagctacgattaagttattgaaacgacatcgtgatgaatgggctatatctacaaaaaatgaggatgttagaccaatttctgcaattattacaaccttagcagcacaagcatatgaaaaagttgtagaagaatcgctatttcaagcactacgaccaattgaagctatgataaagattgttgattatatgccacgatttatttctaataatgatgagggatatgctgttttgaacccaaaagatgcaggggaaaattttgctgaaaaatggaatcgtcctaatggagaaggggtaaattatattcgagcatttcataattggcatatacatgcattagaaagtattaaacttggtttaaatgatttaaagagtagtaatgctgttgaagatgcaatcatggaacgatttggtcttaatagagcctttattaaagagttgattaatgagactccaagaaaatggactttaccaggtcgcagtgcgaatacaacgcttaattctttgagcctagccacttttgctggtatttcaacaagtgctgctgtagcttctcaagaaataattaaaccggtagatcgtcttggctga

SEQ ID NO: 63971 - DNA, 612 bp, Acinetobacter baumannii
atgaattcagaaggtgtgttcagcggacgcttacatttaaatcagatgcttacatatttatgcaacaaagcccttcaagtagaagaatatgaatcgtccttaagaaaaaaagtgaacaagaaaaataatggaacttattatgatgtaatggctctatgcttttgtcttattactttatccttattttccattggattaggtcttatatttaaaaatcaatttctgttaattattgcacttacatttcttttattagctgaaatttcactatttctgagtacggtgatagatatttttaaatcacgtaaaagtattttcttattttttaagcaaccctcaaaaatcctattacagaatttagaattcagtacacgatctaaaattaaattttcgcacaaattaattaactttgaaattaaggatttagaatttataaaacgagaaataatattagagaaagatcattttgataaaagaacttcaatcataacagggaccattgataaaattggaatttttcctactattttagccacactcctccttattctcacacagatgagtaatacaaacgtccaaatttttttaaatctaaatctgatgtgggtatag

SEQ ID NO: 63972 - DNA, 279 bp, Acinetobacter baumannii
atgggattcagcggacgcttacacaaaggtgaagcgacaagatttttattagagctaaatagaacagctttggtagagaggcggcaagaacgtctagataaaattagactgatagtgaaggagttaaataacacaggtttaccaatagtcgctagaaaagctatttatcaggacttaattgagaacgaggcttctcatgagagtgagtatacttctatggttaagctcgcgattaggtgttttgatgcaagtattccaactgaagtaaaagctgcataa

SEQ ID NO: 63973 - DNA, 261 bp, Acinetobacter baumannii
atgacaccgatcaatacacggcttacagcgattgatgaggttattattttgagacaagctaaacgtttatcttcttccattagagaaaatttttctacagtagcaggacgaagagcttatgcttcacaatatgaaaagtttttagatgaaaacccattaagtataaacagctttaaaagactagttgcacaccttaatgaagcttttcctgagtcattagaaattgatcaaaccgcagtacttaatcgaggttacttttaa

SEQ ID NO: 63974 - DNA, 1014 bp, Acinetobacter baumannii
atgagtaatgttgatcagcgtccaattattttgacaggcgaccgcccaaccggacaacttcacctcgggcattttgtcggttctttgcgttctcgtgtaggtctacaggatagccatcatcaacatctcttattagcagatgcacaagcgttaacagacaatgccgataacccagataaagtgcgccgtaacattttagaagttgctctagactatttagcggtaggcattgatccaactaaaaccacaatttgtgtacagtcatgcttgcctgcactgaatgagcttacaatgttatatcttaactttgtaactgtagctcgattggaacgtaacccaaccatcaaatctgaaattcaaatgcgtggttttgaacgtgatattcctgctggtttcctttgctaccctgtagcacaggcagctgatattacggcttttaaagcgactgtagtaccagtaggcgaagatcaaattccaatgattgagcaaactaacgaaatcgtgcgtcgtgtaaaccgtcaaattggtcaagaccttttacctgaatgtaaagcattgctttctaatatggctcgtttacctggttttgatggtaaagcgaaaatgtctaagtcattaggcaataccattgttttaaatgcttctgacaaagacatcaaaaaagctgtaaatgcgatgtataccgatccaaatcatcttcgcatcgaagatccgggtcaagttgaaggaaacattgtatttacttatttagatgcatttgatccaaataaagaagaagttgaagagctaaaagcacactaccgccgtggtggtcttggtgatggtacagttaaaaaacgtcttgaaggtgtactaaaagaattaattacacctatacgtgaacgtcgagaagaacttgctaaagatcctgactacattatggatgttttacgccaaggtactgataaatgtcgaatcattacccagcagactttggacgaagttaaagatggcttaggcttatttaagttctaa

SEQ ID NO: 63975 - DNA, 210 bp, Acinetobacter baumannii; identical to SEQ ID NO: 63850

SEQ ID NO: 63976 - DNA, 336 bp, Acinetobacter baumannii; identical to SEQ ID NO: 54574

SEQ ID NO: 63977 - DNA, 240 bp, Acinetobacter baumannii
atggccttagtattgtgcccagaatgtaaaaaagaaataagtgatcaagcaaatacttgtcctcactgtggttttcctatagaaaaaattagaaatccatttcttaacacgaataaaacaggaacaactcctccacctcttcctgatatacaaaaccatcaaagcatctcctccatcaactcacaggaagagcctttgatgtgtgctgaaaaaacaggaggttttaacttggtaaactaa

SEQ ID NO: 63978 - DNA, 300 bp, Acinetobacter baumannii; identical to SEQ ID NO: 44684

SEQ ID NO: 63979 - DNA, 891 bp, Acinetobacter baumannii
atgatgaaaaagtcattattttgtatgacagctgccttatttgctctgccaacagtcacttccgccgcttccccatattttagtttaaaagatggtgatggtttcaaacgtttttcagtctcagctggttggctccatgctatgcctcaaggctcaggaaaccctgtcaatatcaatactagcgttgcagaaggtacaaaatctaaagttggagatgtatctacaaaagccgttttagacgcaatcgatcaaagtaaaccttcaggacaattttggcatagcactattagccttcttgataagtttacagacactcttccctcatcacttgcgggtacagcagaaattaatggtctttctcaatgggaacaacaaggttctggcttagaagctgctgatgttgataccgttggtcttatgtttaactacaactttacggataatttatctttagaaattaaaggtggtattccccctaaagtagatattaatggaaaaggtaatatttacgctcccctctctggaaaagcaactccactaaaagatggatctgtgattggaggaatcatcggagatggtattgccaaagcgggtggagatattcctttaaagcaagacattcatattactgatctttctcagggcggtaaggctgcgaccgcacgtgcatggttaccagctgttgagctacattatcaatttggtaaaacaggtgtaaataagttccgtccttatatcggagctggcgtgatgtatgcatactttaatgatttaaaaatgaattccggtattgaagccgatttaattcaagcgggtcacatgatccagaatatccatgataataaagcaggtgcagcattagatcgtaaaacatggcagagtaaaacttga

SEQ ID NO: 63980 - DNA, 210 bp, Acinetobacter baumannii; identical to SEQ ID NO: 63850

SEQ ID NO: 63981 - DNA, 210 bp, Acinetobacter baumannii; identical to SEQ ID NO: 63850

SEQ ID NO: 63982 - DNA, 210 bp, Acinetobacter baumannii; identical to SEQ ID NO: 63850

SEQ ID NO: 63983 - DNA, 336 bp, Acinetobacter baumannii
atgatccgcattgatgaaatctggctttctacccaacctctggatatgcgagcaggaatggatacggccatggctcaggtggtgagagcctttggctacatcaaaccgcattgtgcttacctgttctgtaataaacgtggccatcgcatgaaagtactggtgcatgatggactggggatctggctgtgtgcccggcggctggaacagggcaaatttcactgggctaaagttcaccagggtgaaagcgtagccctcagcccggaacagttacaggcactgatccagggtttgccctggcagcgcattggacaacggcaggtagtgacgatgctctaa

SEQ ID NO: 63984 - DNA, 336 bp, Acinetobacter baumannii; identical to SEQ ID NO: 63956

SEQ ID NO: 63985 - DNA, 570 bp, Acinetobacter baumannii
atgaaaaataaaaatatagggtgctggctgttacttgccagtagttcaagtgtttgcgcgatgcaacctttggatgatcaaagtcttgcagctgcgacgggtcaaaatggtctaactttaggtattcaggctgatcaagttaaatttaatcaagtcgccttgattgatacgaacggtattgcagctacgtcttataacagtaaagcaggtcttgtcattgcaggaaactctactaatccggttcctagcatagagtttattaaagctgctgtatctacaaatccttcttttaatattgcaatcgataccgatgctggtggtggaaatccttttttaaatttagctgtcacgatggggagtgacgtaaatggtattcggcttttaccattttcagtttatttagccccaagtacatctttatctagcccatccgattacgcactaacgagctatgcaccaaaatcaatttttagttcgggcacaacggtgggcgaattcaaacatgaggtgcgacagtttgaaaagtcttatgataatcaacaagctgagcaaatttctctaatggtgtaa

SEQ ID NO: 63986 - DNA, 336 bp, Acinetobacter baumannii; identical to SEQ ID NO: 54574

SEQ ID NO: 63987 - DNA, 249 bp, Acinetobacter baumannii
atggaactcatacgtaaaactgtgcttcatgtagaaaccacttatgtagatggcggtaaagaagcagcaaagcctttaaaaatggtggcagcagcagcggtaattaaaaatccgtgggcagggcaaggttatgtagaaaacctaacaccagaaattcgtcgcattgcgccaatcttaagcgagcatttaaccaagctcattcttgatgaaagagatggatccgtaaatttgaacaactcctataagtga

SEQ ID NO: 63988 - DNA, 249 bp, Acinetobacter baumannii; identical to SEQ ID NO: 63987

SEQ ID NO: 63989 - DNA, 567 bp, Acinetobacter baumannii
atgataaataaaaatttagcagcggaaggtttgcgtggtatagcatgtataatagtagttctatcacacctttcattaactttcttccctcaacttcacaactatttttcacaagaaaactttccttcaagtgattttttagcatcaatgcataattcaccttttttattctttatttctggcactggtgctgtttatattttctttatattaagtggatatgttttaacagcagcaaacttaaatgcaaaaaatccaaaaatcaaactaaaaacatcaataataaagcgctatcctcggcttgctatacctgcattatgttcatgtattatttcttatttaatttttcatatttctattgatttatctaaaactacaaattggtttagccaacttataccgcaaaatattagttttttaaatagcatctactcaagtttaattactccatttatatttgcagagtctaaatacaatacggtgctttggacgatgaaaaatgaattaataggctctttaattatattttatctagggtgtgttgacacttttagcttaaaaaaatag

SEQ ID NO: 63990 - DNA, 288 bp, Acinetobacter baumannii
atgatgcagtttaaggaaggaaaattagcacctgaatacactgcaaaatcactttcgaaaactcagaaagatttacagaaacagacagttgctttaaagaaagatatcgctgcttataatcagcaagctgcagacttaaataaaaaggttactcactttaaccagattaatgatgaattcaatcaatcattaaatcagtttaagcaaaatgcccaagctgatgtatttaagaaaggtatttataacggtaaacaaatcatgatctatgaattaatgtggttccgttaa

SEQ ID NO: 63991 - DNA, 558 bp, Acinetobacter baumannii
atgccaaattattttgtcgaaattgtatattttttgattgatttttcattttatattcttataatacgttttttttcaaatctcccccctttgattatgcgtttaacttctttgttattaggcatggcctttgctttttctaattttcaggctaatgctaatcttgcgactcccctacacacccaagttcagcaaaaaaattttcaacatttgacatataaaattgctgaagttgaccctcgttttggtttaagtcaagagcaattgatccagattacacagcaagctgctgatatttggaaagaaggtacaggtaaaaattactttacttatgacccaaatgcaaagttagaaattcgtcttgtatacgatgacagccaaaatcgttcagcagagcgtcaaaaaatcgcttctcagttcaaacaagaccaacaacgtgtaattgatgagcaacaacaaattaaacagttgaagcaaaatttaagtcaaactcaatcggatcttgaaaataaaaaacagatcttaaatgagaatttaagaattttgatcaacagatga

SEQ ID NO: 63992 - DNA, 657 bp, Acinetobacter baumannii
ttggacaatcaacaagctactcaaaatgaaagaaaaaatagtataaatgagctattaaagcagcaggaagaatggagagagaaaaataaagctattcttttatttaaacaacaaattgatcatgaaacctctcttttgaataaagaaaaagagaatctcaagtataaattcgaactatatcaaaaagatgtatctctttttaatcaaggaaactatgggcaatttactcaaagcagtttaaacaaacgccaagctgagttaagccagctttcgttagaattacaaacaaagttttctcaacatagcaataaaatagaaatgcttaatagacaaattaagcaaataaatcaacaacaaagcttgcttaatcaatctattgagaaatttaatttgagcacgacttctggctcaaaaacttttcataaaggcttgtttagtcaaaaccaaattcagatttatggctttacttcattcgatgatctgctcctaacacttgctcatgagtttggacatgcattaggtttaaaacacaccgatgatcctaaatctttgatgtaccctcttttaagagagcaggatattcataacttcaaattaacaaattcagatttagatctattggctacattatatggttcaaatgacgaaaatcattaa

SEQ ID NO: 63993 - DNA, 675 bp, Acinetobacter baumannii
atgaaaaaaaaatacaatgttcgatctcaggcaacccccaagattggcaaaacaattcttaaattaagcacccttagtttaagcatgatgtatcttaccatggcacaagcagcagaaaccgaacaatcaagtaccgatgaaaaaccaacaaaagtcgtaaaagttgccgttacaggttcttcaattaaaggggttgcggcacaaagtgcttccccgattaccattattaaaggcgaagatctcgcaaatgctggcgttactacagttgaagaagcattaacccgtgtaagttcaaatcaggcaggtttttcaactgaccagaatgtgggtgccagtaataccgatggttctactgctaaccttcggggtttaggtagcgataaaacactcgttttacttaatggacgacgcctcgcagcgaacccttttggtacttccaccgtaaacctaaatattattcctttagcaatgattgatcgtattgaagttttacgtgatggtgcctcagcagtttatggtgccgatgctgttgcaggggttattaatttcattacaaaaaaaacatatcaaggtgtaggtattagcgcaggtttattacaaccagaacacaaaggtggtgataaacaagatatttctatctttggtggctacggagaggtggttccacttgtttga

SEQ ID NO: 63994 - DNA, 669 bp, Acinetobacter baumannii
atggctggtatattcgttactttatatacagcgcataatcatccgaattatgtcaaaaaccttatagttttaggtagcccaatcgatagctatgcttctggttatattggaaaactctaccgaaccataaacaacactattgcccgcaataaaaagcttcaggaacgtatttactcaggtttaccgaagcgtttgattcatactccgggcattttaaactccttaggctttaaaattcttgaccctaaaggctggttcgatggtcatattcaattacttaagaaccttaatgaccttcagttcgtacaagaacatgccacattaagcagttttttaaacaatatgattgattatccgggaggtattaatcaggacatgttatttaatgtttggctgcaaaatccattaagacaaggttctattcagttaaaagataaaaaaatcgaattaaaaaatatcgactgttcactcttagttggagctggtcgtagtgatcaattagtgacggcagatgcagctcagccattaagtcagttaaccagtagccaagatgttacatttactcttattcctggcggtcatttaggtctaatgtcaagccaagcaagtgcgcaggaattctggccaaagctagcaacatggctgagtgagcgttcaacaaaaatctaa

SEQ ID NO: 63995 - DNA, 429 bp, Acinetobacter baumannii
atgaggtatggcaaaaacatcgataacgggcgagcccaagtatatggctttcttaatttaaaccgcgatactcaatcacaaggtggggtccgacctgaaattattgatgaaaatgcagccactttaggggtgggggcaaattatcaaccgtggacttccattcctgtgcgagcctatgtcgaagttggtggaagttatgacttgattgatagaaatagaaagcgatttcgtgagagtgttgtaggcggtgtaacgggttatcaagaatggtattcacaatcaaactgcgatcattcactttgtttagataattattttactgacttatatggcaatgtcgcgacttattcgagagaggactataacgttattggggacttacgcttacgcacagagagatggatccgtaaatttgaacaactcctataa

SEQ ID NO: 63996 - DNA, 210 bp, Acinetobacter baumannii; identical to SEQ ID NO: 63850

SEQ ID NO: 63997 - DNA, 729 bp, Acinetobacter baumannii
atgaaaagaataggtatagttgcagttagtgcagcgacattatgttgggcaatgtatgaggtatcttctgataataccaatacagcaccgcgtagcgaatctaatcaaaaagtagcatctaaaaacatttcatccactacaaggaatgaaaaattagcgcctcaaatgcttttggcccaaacaaattctcttaattcttctaccccagtctgtaaatataattttaacgcgactcaggaagattttgatctctggaataatgaatatcctgattttcctataaaaatattcccatcgataattggtcaaaaatttggttttaaagtggaacctaggccagaaagtgagtatggctacgtagattatgttgctacaagtaaaataaatagtccgaattcgattaatgaaattggtgatttaacaatacctcacacaggtattattgtatttgaaatggaacttaaaattccaacatcaactcttgggagttcatcacttggaaattctacttattactcctctagcattggatttagtggcgtaacaaataatggttatacgattagatccaactattggtttgatatgggggggtatgatccagattttggcgagaatcctgctagattaaactattatgtagcttatcgacttagtgataatagtgggcctaacaatccatattataaaggtcaaaacatgacaaataactcaaatgaataccaatga

SEQ ID NO: 63998 - DNA, 240 bp, Acinetobacter baumannii
  misc_feature (8)..(17): n is a, c, g, or t
atgaaagnnnnnnnnnngaaagatgaagaattaagaaaattatacactatcgaaggtttcctaaattatatgcatttaccgaatacttttagggaaggttggtcgccaagttatagccttcattttgaggagttaggtattggtgaagatgaacaagcgcatgtttatataagtctaaatggaaaaataaaaaagtcgaaatgtgaatttattcaggataaagggcgaattcaaacatga

SEQ ID NO: 63999 - DNA, 153 bp, Acinetobacter baumannii
atgactaaactaaatgatttaattgcaaagcgtaccattgatagtcaagagcgtataaaaaaaatatctgaagcggcaatttctaaaattttaaaagctgaacagtttcatcaacgcaaatctaaactaaagaattttctcaacgatgattag

SEQ ID NO: 64000 - DNA, 210 bp, Acinetobacter baumannii; identical to SEQ ID NO: 63850

SEQ ID NO: 64001 - DNA, 699 bp, Acinetobacter baumannii
gtgatctatgactttcaggatagtcgttcaggtcagcatgctgaagcgttcctgaatggctggcagggtcatctggtctgtgacgattacagtggttataaagcacgctttaaatcaggccaggtcattgaggtgggctgcatggcgcatgcacgtcgtaaattccatgagctacatgtgactgggaaaagtcagatcgctgaacaggcattactgatgattcagaaactgtatgccatagaagcagaactcaggaaaaagaccgatagtacagcagaacaccgccgcgaataccgacaacagcacagccaaccggtgatgcaacaactgtatgaatggctcaaccaacatgatctgacggtgccatcgagttctccaaccgccaaggcgatcaattacagtctgaagcgttggccagccttaagccgctatctggatgatggcaatctacccattgacaataactgggcagagaactcaatgcgtccctgggcattgggccgtaagaactggttgtttgcaggttcgctgcgcagtggacagcgagcggcaaatatcatgactttaatccagtcagcaaagctgaatggcttggatccgtatgcctatttaagtgatgtgctgaaaaagctaccgacacataaagtgacccagattgaagagttactgccacactgctggaaacctaaatcgaattaa

SEQ ID NO: 64002 - DNA, 699 bp, Acinetobacter baumannii
gtgatctatgactttcaggatagccgttcaggtcagcatgcagaagagttcctgaatggctggcagggccatctggtctgtgatgattacagtggttataaagcacgctttaaatcaggccaggtcattgaggtgggctgcatggcgcatgcacgtcgtaaattccatgagctacatgtgactgggaaaagtcagatcgctgaacaggcattactgatgattcagaaactgtatgcgatagaagcagaactcaggaaaaagaccgatagtacagcagaacaccgccgcgaataccgacaacagcacagccaaccggtgatgcaacaactgtatgaatggctcaaccaacattatctgacggtgccatcgagttctccaaccgccaaggccatcaattacagttttaagcgttggccagctttaagccgctatctggatgatggcaatctacccattgacaataactgggcagagaactcaatgcgtccctgggcattgggccgtaagaactggttgtttgcaggttcgctgcgcagtggacagcgagcggcaaatatcatgactttaatccagtcagcaaagctgaatggcttggatccgtatgcctatttaagtgatgtgctgaaaaagctaccgacacataaagtgacccaaatagaagaattactgccacatcgctggaaatccaactcaaattaa

SEQ ID NO: 64003 - DNA, 330 bp, Acinetobacter baumannii
atgatttctgtactcattgatcaagatatagtgaaggctggtactaatgtgagtggagaggcttggcgttattatgatcttggacatggtttgtgttcttatgatttttttgagcaatgtccacatcgtatggcttgcgctaaatgttcattttatgtgcctaaagaatcatcaaaagcacaaactattgaagctaaaagtaatttaatgagaatgctacaagaaattccattaactgatacggaacgagctgcggttgaggatggagtgcaagctatggataagctaataaaagaattgaaaaaagtacctacaccagataaaagttaa

SEQ ID NO: 64004 - DNA, 489 bp, Acinetobacter baumannii
gtgtgtttagtttaccaagttaaaacctcctgttttttcagcacacatcattcaattttctacacccctgtaggatttgaattaattcctgatgaatctgaatgggagttttttgatgctatagaagaagttacaatgataggatgtccaaacggactatctgatagtgtaaataatcttccgattataaggcaaggtgttacagcaactagcccaagcttcccttacaatggaaaacaagaatttatggtagatatggcatgttttcccggctcttcgggatctcctatttttttatataataaaaatggttattttgacggtaaaagcaaaagttatataatgggagctgctagattaaggcttttaggtattttgtattcgggtcctttaatatctaatactggtcaaataactttaaatacttcgtttaagtttgacgttgcatcaatgatgcacttaggtaatgcaaggcagagtaaaacttga

SEQ ID NO: 64005 - DNA, 294 bp, Acinetobacter baumannii
gtgattggtgaattcaaccaaacccgcgttcgttattatgcagctacagaaaagagctttagagaaccattagtatttgtggcacctttagctattaatatggcgatttatgatttatatccatatcgttctcttatcaaatacttccaaaatgcaggttttgacgtataccttgtcgattgggggcgtttgggctttaaagatagacatcttaactttttatcatttattgaagattttattcctaaagctatagagcttgttcgcacacattcaggcagtgatcaaatttga

SEQ ID NO: 64006 - DNA, 210 bp, Acinetobacter baumannii; identical to SEQ ID NO: 63850

SEQ ID NO: 64007 - DNA, 456 bp, Acinetobacter baumannii
atggataatgcaaacatagaaacacaagcagaagagcaaggagaaaaaaataaatcaaaatcaaaaagttctagaaaatctgcattagattttagaaagtatactaaacaaatctggttggcaggtttgggtgctttttcacgtgccgaagaagaagggaacaaactatttgactcattagtcaaagtaggggaagagttagaatctaaaacaggtgatttagcagatacaactgttggtaaagtaaccgaaaaagcaaaagagtcggtttctgatacaaaagacaaggtcgagaaaattttagatacgagtgtaaaccactctttaaatagaattggcttggtcactccgaaggatttacagcacattgaacaactcctagttcaactgcatataaaggtagatgctttaattgaagaaaatcagagattgaaggcagaattgaatgaaaagtaa

SEQ ID NO: 64008 - DNA, 228 bp, Acinetobacter baumannii
gtgaaactagaagcgacagatacatttgcacctatcgttaccgtaggagcaacttatgattttaatccgaacttgtttgctgtaggctcagtttcttattcgaaaatgaatagcgaagcaaaaatttacgtgactgatcaaaatacaggtaaagaattaattcaggcaaatagcaaaattgatattgacccgcttattacctatttaggtgtgggttaccgattctaa

SEQ ID NO: 64009 - DNA, 402 bp, Acinetobacter baumannii
atggcatccttaattcataatactttatcaagtaattacacattagttattgggcgaatagttttatcttcattctttttaatcgctggtatttttggtgtgtttaactttgatactgttgttaatgaaatgattggagcaaatttaccacttcctgaattatttgcttttgcaactatagccattcaacttataggatcaattctacttatttcaaattttgcagggcttacatggttgggtgcaggaatactagccattttcactttactttgtattcctattggacatcctttttggaaattagctgaaccacaaagaactcaggatttccaaattgtattagaacatattgctttaagtggagggcttctattagcagcaatagccaccaaaaaataa

SEQ ID NO: 64010 - DNA, 336 bp, Acinetobacter baumannii; identical to SEQ ID NO: 54574

SEQ ID NO: 64011 - DNA, 453 bp, Acinetobacter baumannii
atgaaagttcaagttaaattgctcgatccgcgtttaggtaaagagtggcctttaccttcatatgcaacagcagggtcagcaggtttagatttacgtgcctgtttagatgaagcaattgagattgaaccaggccaaactgttttggttaaaacaggtatggcaatttatattcatgatgtgaattttgctggtttaattctaccgcgttcaggtttaggccataaacacggtatcgtgcttggcaacttagttggtttgattgattcggattatcaaggtgagttgatggtttcagtgtggaaccgtggtcaaaccaccttccgtttagaaccgggtgagcgtttagcacagtatgttttagttccagtagttcaggctgaatttgagcaagtagaggaatttgaagaaactttacgtggcgcaggcggttttggtcacactggtaaacaataa

SEQ ID NO: 64012 - DNA, 264 bp, Acinetobacter baumannii
ttgattcctcttcctggatgtggtgatggctttattccaggaggattgattggaattagttcaatagcaaatttgatggcacaaactaccattgatacgctgactggaaaaattaacaaagaaacatggatcagtagtatcggtgatattgaaaaaataatagataccaatggaatatataatggtccaaatattccttctggttgtaaacagatggtgatttcaagagattggccattaatggaagattttaatgaatcataa

SEQ ID NO: 64013 - DNA, 435 bp, Acinetobacter baumannii
atgttccagatttttaatctaaatggcttatcaaatattccagagtatcttagctacgatggacataccccatctgcacaaagcaatgatgagaagtgtgaacaaaataaaatttctattgaaattaataacaaaaatatagaaatggaagctgctaccatacacagcattaaaggggaaacccatgctgcaaccctagtagttgaaacaacatttggaagatcacatgatatttcaaaagtattcacttaccttgtaaatcaacaacctccaaaaccaacatcacagacaattaagttcatgaagcaaatctatgtcgctatgactcgccctagacaccttgtttgtttagcagtacataaaaaaaacattaaccagcaccttgctttggctgaacacaaaggttggaaaatagttgatcttactgtgacttaa

SEQ ID NO: 64014 - DNA, 210 bp, Acinetobacter baumannii; identical to SEQ ID NO: 63850

SEQ ID NO: 64015 - DNA, 153 bp, Acinetobacter baumannii; identical to SEQ ID NO: 63999

SEQ ID NO: 64016 - DNA, 174 bp, Acinetobacter baumannii
atgaaattctggcaacgactcttcacagcatttttacaaagatttcatttgatacgttttttcggtcgtaatcgatcttttaaagagctacatcaatctagttatgctcaagaaattagcaaaaatttatctaagcgtttgcttaatgcatcaagggctctacccagacattaa

SEQ ID NO: 64017 - DNA, 195 bp, Acinetobacter baumannii
gtgccaaagcctaagataaaaaaagtcaaaaatgctctgaatgatagagacaaaacccaagaacagctactagaagaacttgcatatctacgagctgagaacgcttatttaaaaaagcggagagccttgattcagaagcagaaagaacaggaacaagccgaacagcaacggttacaagattcatttctgaattaa

SEQ ID NO: 64018 - DNA, 336 bp, Acinetobacter baumannii
atgatccgcattgatgaaatctggctttctacccaacctctggatatgcgagcagggatggatattgtcatggctcaggtggtgagagcctttggctacatcaaaccgcattgtgcttacctgttctgtaataaacgtggccatcgcatgaaagtgctggtacatgatggactgggcatctggctgtgtgcccggcggctggaacagggaaaattccactgggcgcaggttcaccagggtgaaagcatggcgatcagtccggaacagttacaggcactgatccagggtttaccttggcagcgcattggacgacagcaggtggtgacgatgctctaa

SEQ ID NO: 64019 - DNA, 189 bp, Acinetobacter baumannii
atgcaaactctttcaaattggaatatcaaagcaaaggctggaactttagcaggtacaaaacagtattcacctgatctaaacgctctactcgaagaaaataaaaaactcaaacaacagctcaaaatagctgaaatggaacgtgaatttttaaaaaaggcagcagcgtactttgctaaagaaagtcagtaa

SEQ ID NO: 64020 - DNA, 279 bp, Acinetobacter baumannii
atggatattgtcatggctcaggtggtgagagcctttggctacatcaaaccgcattgtgcttacctgttctgtaataaacgtggccatcgcatgaaagtgctggtacatgatggactggggatctggctgtgtgcccggcggctggaacagggcaaatttcactgggctaaagttcaccagggtgaaagcgtagccctcagcccggaacagttacaggcactgatccagggtttgccctggcagcgcattggacaacagcaggtagtgacgatgctctaa

SEQ ID NO: 64021 - DNA, 204 bp, Acinetobacter baumannii
atgttaatttcaaatcctactcgtaaaggagacggtacacactggtctcattggataggagataaaacatctgaagctgcaagatttgcttatgttgcatcttcaagaccgaagtatgttttagtgtggtgcgttaaaaagttaaaacctctagaaaaaacagaattagaaagtttgggatttgaaattttggatataaaataa

SEQ ID NO: 64022 - DNA, 282 bp, Acinetobacter baumannii
atggcttacgttaagaaaatttatgtaaattacaaagattgttctactcaaaccaccttagtcttgccttgcctcttgactgagaaaggaatcatcatttctcatttgcgctatttggcttggtttaattcaaaaagtgaatcatggaaagaaagatcttgttatgcacttaaacttttattgaagtatataaattcagttccacaaattgagaatgctactaaattactgaaagctttcaccgaggcattaatcacaggcacaattgacccaacaacctga

SEQ ID NO: 64023 - DNA, 195 bp, Acinetobacter baumannii
atgaatggtttaattaggcaatatttacctaaagggattgatttaaatcaggcagatcagcattatttaaatcaagttgccatgtcactgaatactcgtcctagaaaggcgttagattggcttacaccattagagaaatttgctcagcttgttgattatcataagacttttcaaactgtcgcacctcatgtttga

SEQ ID NO: 64024 - DNA, 192 bp, Acinetobacter baumannii
atgttagtaggagtaggatctaatggtgcagagcaagataaggcaataaatgcaggtttattcggtagtggtgagcgatcattccctggcttagcatcaattaagcgaatccatttggatacaagatttgtattcaatccatgttgcaaagcgaccgaagcaattgaaacgtccggtgctttacaagcctga

SEQ ID NO: 64025 - DNA, 192 bp, Acinetobacter baumannii; identical to SEQ ID NO: 64024

SEQ ID NO: 64026 - DNA, 207 bp, Acinetobacter baumannii
atgcggtttgatgtagccaaaggctctcaccacctgagccatggccgtatccattcctgctcgcatgtccatgggctgggtagacaaccagatttcatcgatacggatcatgttgcaagtgccttgagtaattctgctaaagcagatatttctgatacttgccatttcaagccaatttctgcttttgagtggggtaaagtaatttga

SEQ ID NO: 64027 - DNA, 207 bp, Acinetobacter baumannii
atgcggtttgatgtagccaaaggctctcaccacctgagccatggccgtatccattcctgctcgcatgtccatgggctgggtagacaaccagatttcatcgatacggatcatgttgccagtgccttgagtaattctgctaaagcagatatttttgatacttgccatttcaagccaatttctgcttttgagtggggtaaagtaatttga

SEQ ID NO: 64028 - DNA, 1344 bp, Acinetobacter baumannii
atgggtagcattacatcttattgcgtcaaagttataaaagataactttaaattaataacatggctgcaaatcttcattatagccattacacctaactttattttttatcagactgctaacgcaacaactgtctctgctgagggttggtctgttactaagcgtttagtgcaaggtgcaacgacattctatgatggggcaaaaaacgtagttttaaatggtaagaactatgcagctacgggaactgctgcaattactccaactgctagtcaagtcagtaagatgattgtgagaactggtgctgttttggccgttgatttagctattaaagctttgattggttctgttgattacgtaatggaccctgcgaacaaccgtgttaagtactttgtgactggtgatcctgcgaaccctcaagacccatctgttcaatattattatcaaacaggtgcatttggagttactaaatacttttcttcaaattccgctgctgctaatgatcaatgtacgagaaatgcgcagggtaatggctggatacttgtttcagtaactccgtattcttgggcgactgatgaaacgggtatgagagatgcaaaatgtgttattaagcgctcagcgactgatgctaatgagactttcaactggagttatatacgtgttttaaatcctgcatataatcctgctgcacctaatccaaatacgcaagaaaaatatttaccttatgatgctgtagcttctcaaattattagtgatgcaacttcagaaaatgcagactctaaagcatacgtttcatctgttgctgatactgcacttgaagatgaacaaagacaaattgttcctgcatctgatgtcacacagcaacttaacaactcacaagcgattcctaccaatggtactggaacaggtactgcaactcctactactggaacgggtacaggtgatccgactgcacaaccacagccttatgatataacaatcaatttcccgattttttgtaactgggcgccaactatctgtcaggctgctcaagcaggcattaattatgtagcttcatacactaaagacgttgatgcattaaaaaaagaatatggagataacccaaagtttgatgataaaccgcttgaatttgataaagaccctgcaactccagatactacaatatcatttggtggtggttgtccggcacctttgaacgccccttattcttttatgggaatttctggttctattgagattccgtttactccattttgcaaaattgcagaagtttctaaacctgtaattattgcagtttcggcctattttgctgctcttattattggcggaattagaagtggggatgcttga

SEQ ID NO: 64029 - DNA, 519 bp, Acinetobacter baumannii; identical to SEQ ID NO: 61241

SEQ ID NO: 64030 - DNA, 441 bp, Acinetobacter baumannii
atggttgatatcgtgaatagtaaagttcgctcacaaatgatggcgagagtcaaaagttgcgatacaaagcctgagatacaaattcggcatatgttacatcgtatgggttttcgttaccgcttacatgttagtcacctaccaggtaagccagatatagtctttcctagatatcgtgctgtaatacaagttaatggttgtttttggcatgcacatggatgtgcaaagtcaaaattaccaaaaacaagagtggagttttggcgagaaaaaatcggaaaaaataaagaacgagataaaatgaatattgagaaattgatcattcaaggctggcgagtattggtttggtgggaatgtaatacaaaaaactctgaaaaatttaagatttctttggaaaaagctgctgaatggttgcttagtaatgagccgtatatggaaatagattaa

SEQ ID NO: 64031 - DNA, 507 bp, Acinetobacter baumannii
atgaatattacaattcgagatgaacaacccgaagatattaaaaatatcgaagcgttgacgaaagccgcattcttaaatgaagagcattctagccacactgaacaatttattgtgaatagccttcgtaaacataaacaacttacgatttctttggttgctacagaagatgacttaattataggtcatgtggctatttcaccagttacaatcacgtcaggtgaaactggttggtatggcctaggccctatttcggtatgtccaaagaaacaaggaattggcattggttctcttttaatgaatgcagctcttcaaaagttaaaagaattaggcggaaaaggttgcgttctattaggtgatccaaattattacagacgatttggttttaaatcttaccctgatttaaatttacctgatgtacctaatgaatactttcaagctctaagtttcagcaatcatattccctcaggtgaagttacttaccatgatgcttttatggcaactgaataa

SEQ ID NO: 64032 - DNA, 258 bp, Acinetobacter baumannii
atgaatctttcaaagttcgaacaacgaactctccatgtccttgctaaaggcggacatattaaataccaacgtgacgcatcaggcacagtctatttcgttgaatgctacacacgagaaggtttcgtgctatctgattgttctttagaagtatttaaaaagctaaaagcaaaacgtttaatcaagtctaaaaatagccaaccttatcaaattacattgttaggactccagacggtccgccctcaactagacaatcgttga

SEQ ID NO: 64033 - DNA, 264 bp, Acinetobacter baumannii
atgaaatcatggtctcctcagcactataaaattgaaggcaaaaaaaataagattgataaagaaattattgatagtgcattagaacatgctaaaagaattagatctaaaaataatattaatcctatattcactttaagacacctttcatatttagctaacgtcgaatatagtttccttcgttcaatagtttatagagatttagaagattattgggatttagaagaacctctatatcgctattttcaaataagaaaaaaaaaatga

SEQ ID NO: 64034 - DNA, 138 bp, Acinetobacter baumannii
atgtcccgcactgattttctacaaaatgatggcattattaagcttattacatgggatgggggggtgaagataacagcagaaccagaatgggctgagttatgcaagagacagcaagctcttagatcaaatactcaatga

SEQ ID NO: 64035 - DNA, 588 bp, Acinetobacter baumannii
atggaggttgcacaagatctaagacttagtggcacactaatacaactttctgtggtgggtaaaacaactgctgattttttagaagaaaaaataaaggaattagcagctgatacatctctatctgatagagaagctgagcataagttgagagcgtttttaggcctgcgcttgaatagtagtgggtactcttggaggacagaagagttctttaattgtaaggaggtctttaacttagggctatgtgagagagtccccgaaattgataataaaaccgatgtagagaaacggattgatattatgaaatgccatatggtacgggtggcagggaactcatatgaaaaatatgaacaagtagagggattgtatttttcaaaccgggtagaagctccaaaactttgggataaattagaaaacgatttgtatgatgatgatacttttactggactatgtggaacaaaactgggtgaagtaaagagagataatgcagcgaaggatccagtaaggaatgcgattaaaaatgatagaggtaaactacgtaaaatatataaggataagaaggggataccgactaggaaatataataagtaa

SEQ ID NO: 64036 - DNA, 219 bp, Acinetobacter baumannii
atgaatgagtcaatccaaccactacgtatttcttttaacgacgcatgccaagctttaggtttatccagagatggactttctaaattaatgaaacgtgatacagcgcttgcagcctgtgcgatgaaagatggtacatctagacagtcttatgtgtatttccattatgccaaattgcaggcatgggcaaatgcaaaggcttcatctggtatggaggcttaa

SEQ ID NO: 64037 - DNA, 630 bp, Acinetobacter baumannii
atgagtaatcaatataaaagccatgatgaggctctaaaggctttcaatgtacagcaggatagtttttatgagagattctctgaaaccgttcactctggagtacgtaaagcttttgctattctaactaaacaacagtgtcttccatgtgatgagtgtaatgcagtattacatgaccagataaaatctcgtgctgtacgtattgctccagaggaacaaccacttgttatagcagtttttgagatgctattacctgcaatacgcaatgcatgtaccaatgctgacaaagttatctatcctattaagcatctacgtatgacagataagggacagtgtgagcttgcttctatctatgccgctacttttgtagaaaacttacatgtgattgaagcccgctaccgtccagcgtttatgaaagctttaaatggcgtatgcctagagtgtgttgtgcatcagcgtatagagagcttaaaaatatctacacgcacaacagcctctgtgcatgaaggaggtttgttctgggaaatactgagagcatctgtgtttgagcatattaaacatgatgatgagcttagtatcctactgaacccgctcaatacagatcttcttcttacatacctcgttaatcgttaa

SEQ ID NO: 64038 - DNA, 2301 bp, Acinetobacter baumannii
atgtcgagtttaaaagaacctcatgaacaagatgcggctaggatgctgagtttcttgcatggcgatgatgctcatacatttcagactgttcctgaggggggacaaagacaaagcgcccaaattttgcatgggcatttagacaaatgtatagccacactgactgagctaaatacatcgggctcgggagtgtttgtctgtgtgaatgaaacagatttgaagggacggaaatctgacaatattatccgtgtgcgggctttatgtgcagacttcgatgccccagacagtcaccgtgttgaatggttactaagcctaagtttaccaccaaatatgattatagaaagcagtcctggtaaacatcatgcctattgggtattcaacgtgggggaaatctctttgacggagtttagacctctacagcagcgaattgctatggtattggggagtgatgagaagatctgtgacctctctcgtgttttgcgtgtggctggattctggcatcaaaaaggggagccattcctcacaaacatctgtcatattggtgattactatacaactgatcagataaaagattttgtgtggtctttaaagtctggctcacattctgagttagatagtcactttcagacatcatctgaaatgctcaaattaggtgatatgcccccgcatattaaacaggctaaacatataacaacactgtggaatactgtggctcccttatattcgaccaatatagaggaaatagaagaagttttatctttcattccaggtgatgatcgtaaaatatgggtagatgtaggaatagctttacgtaattccaattttgaaaatgcttacgatatttggtgcagatggtccgctaagtcggataagtatgatacctatgagcaacagaaaaattgggatacctttgagggatataatagagtaacactaggaaagatttatcatcttgctgctaagcatgggtataaacgctcgagtgtggatagcttaacttgtggacaaaattcagtactggcagacgtactggatacgcctgaggtacctgccgcgctggatattcataccgttataggggagattaaaaaactagctgaactcaccatgattgaatacgaacttaaacgggaaggtgaggcaaaacgtctaggattgagagcatcaaaacttgatgagtttgtgaagctatatcgccggacagatgttaaagacgttttctttgaagaggttagtatgtggcatgaggttgtagatggcacagttctcctcgaggagatagaaaatactatcaagaagttcattatttcagaacctcatatagctacagcagcagctttatggattgtatttacatggtgcattgatgtaatgaagatcgcgcctatcgcatgtattacagcaccagagaagcgatgtggtaaaacacagcttttacatctaataggacgtttggtaaagcgtccccaaactgtggtaagtatcacaacatcagccttattcagaatgatatcagaatacactcctactttgctgattgatgaagctgatacctttattaaagacaatgaagagctccgaggaattttaaacggtgggcatgacagacagtcatcctatgtatatcgaactgtaggtgatgaacataaggtagggagattcaatgtatggggcgcgaaagctataagtggtattgggcatctccctgatacgctaagagaccgttccattctgctagagttgcgcaggaagaaaaagacggaggttgttgagcgcttacgtcgtgctcctgaggaaagtttttctgtgctcaggcaaaagctttgccgatgggctgaggataatatggacgtccttaaaaattcacagacttcattacctgatgagttgaatgacagagcacaggataactgggaacctcttttagctattgcagattgtgtcggtgggaactggggtgagaaagctcgccaatgtgcactcatcatgaacagtactgatcaggatccgcaaagtgtaggtgaatcccttcttacagatattaaaaaagtatttgatcaaaggaacgttgatcaattgtctacagacgaattaattaaaggtttgtgtgaggatgaagcttcacgttggcggacattcgactacggtaaagcgattagtcctcggcaattagcgaatcgtctaagaacatttcgcatcaagccttgtactgtacgtgcaaaaagtacgacagggaaagatacatgtaaaggctatgctcttaaagattttaaagatgcgtttagtagttatttagatatctag

SEQ ID NO: 64039 - DNA, 303 bp, Acinetobacter baumannii
atgacttttttatactctctcatagagacggaaatcagactacaacgtaaagatgctgtcaatgcacaatttgagctagagttagatttacttataaggtggataaaaaaatactgcaaagaacataaactgagtaccttgccttatgctactgtacaacgtagttgtccatcatctattcgtaaaaagggaggtgaacgtatagatttactcatggattttctttttctgcatgactatgtacgagaggtatatgtaaataaaagacgacatatcgagttattagaaaaatctagagtttga

SEQ ID NO: 64040 - DNA, 642 bp, Acinetobacter baumannii
ttgtattcaatacaagctggaggagaaaatcgttttttaaattctaatgaactaggcgattttttagcaggtatctttgcacctctggcatttctatttttatatcttggatatattcaacaaagcaaagaattacaacaaaatacacaagctttatcgttacaagcacatgagcttactaatctagttaataatcagaagaaagaaattgaagcaagagatttttcagttcagccctttttatttttaaagaagaattctataaaattagataaagaagcaagcccagataggcatggcaatgatacttatgaagatataattcaaattagctttgaacttttttttcaaggtggcgatgcaaagcatatagagttgatagatcctatctcaaaggaacaattagactcaaaatatgaaattaaagctgatagcggttatcaaactaaattttatttaagtaaaaattactgggatgaattattaaaaaataagagtgtagagttttgcttaatagtttactactttggaaagtatggaaaacaatataacaatataattgttataaaaatttttgacttagacattattcatgagaccgctgaaatagatattcgactaaatggaacagtttggaaataa

SEQ ID NO: 64041 - DNA, 702 bp, Acinetobacter baumannii
atgaatattgataatatcttattactaagaacaattttactctttttgccttatgtcatagtactatggttattttattggaaggtaagagatcctttttttctgaagccaagaacttatattcagctcaatatcatgatgatttgcttgattgtatgtttcgtagaaactgtctactggcatatctcatggaataagtttagttttttgaattttgaaattagcaatactgctggaaaggctgactctttaattgtacttctgggcatattggctgcggtattagggtggttatttactagcagggggcaagatttgacctccaaaagaagtcactcaatccaaacattaatggcgtctagactttctgaggcttatgccaggcatgcaaactatgccacaggagtttatgtagacattaaaggcaaaagaggagattcagcagttatttccatggctgaatttttggatctttctcaggaagaacgtaatgcaatattctatcaattgaactactttgagtttatagctgtaggtattcgatatggagatcttgaagaacagttaatgaagaatacattaaaaacaattgtgacaaataactatgaatttttcggggaaataatcaaaagcaagcaagaaaaagccccaaatatttatgaacatcttactgctctttataaacgctggaactgtaagtaa

SEQ ID NO: 64042 - DNA, 369 bp, Acinetobacter baumannii; identical to SEQ ID NO: 46169

SEQ ID NO: 64043 - DNA, 669 bp, Acinetobacter baumannii
  misc_feature (654)..(663): n is a, c, g, or t
atgtcaaatgcttatcagctcatttggtttcgccaagatttgcgtatacatgatcatgcagctttatggcacgccagccagcaaggaccttcactcggtttagtcatcttatcgccagagcaatggaaacaacacgccgatgctccaataaaaataagtttttatttacgacaactcagaacgcttcagaaagagttatcagcacttcatattccactagttattcaagtcattccctattggaaagagatcgcaaactttatttctgatttcataaaaagagataaaaatgtacaagactatttaaatcggcatggcaaagaactatttttattccatgaccgtactatttttcctttacgttcaatccgtaaccaatcacaacaaccatatcaagtatttagtgcattcaaaaaagcctgttatacaaagctcgacacaagcggtttacctcaatgttatccggtccctaataaacaaaatgaagtaccactagattttttacagggggaaaatattgatttagacgaaattgaaaagctattttgctcatctctctcaaaagaacagcaagatttatggcctgttggcgaacaatacgcattagaacagttagatcaatttattgaagaatcggtttgtcactataacgtnnnnnnnnnnctataa

SEQ ID NO: 64044 - DNA, 228 bp, Acinetobacter baumannii
atggggttggtgggattagagcgtatttgtgagcagttgattgcgcatggacaacgtccagatatgccagttgcattaatttcaaagggtacgacacctgaacagaaggttgtggtggggtcacttgctgatattgcatctaaagtgacagaacatcaaattcatgcgccgacactcacaattattggtgaggttgtacgtttgcgtgaacagttacagtggaattag

SEQ ID NO: 64045 - DNA, 555 bp, Acinetobacter baumannii
atgaacgcaaaaattaatattcaattaccaggacaatcagttcctttttataatgcttctaatttattaaatgcatataaacttgcatatgaaacggctaaccaacttcgcaccctactcaatcaaataagtaagtctgcaatcttcattaaaacatatgctgaagagaataatttagataattcaatcttcacagagattgaaaatttaatcgcaatttcgcttcaactttccaactcccataccgatatatataacgctgagattaaaagacatcgtcaagaaccatatgatcagtacgatgctgacgatttaaatggagcttatgcacttgctcatgaaaatacgacttggttagaaacgttaatctctaaaattagaatagaagttaatttggttaaagaagcagtaaaggatgttattcacggcgctgtctttgcgacacttgagcatttaattaatattgctgagtatttagctgaaaccaatgttaatgctttttctattgaaagtgaaaagtatgaagctgaacgggaggcatctaaaaatggataa

SEQ ID NO: 64046 - DNA, 2724 bp, Acinetobacter baumannii
gtggttgtgtatactaccgcaccgcaagcaggtaaactcactttatctgatttgaatgatacaggtgtttcagcaacagatcagattacgcaagataatggttttactttaaagctagctcaaccgattgtgattggggaacaagccgctttactagaccactatgaagtttcaaaagatgaaggaaaaacttggcaagagacaacagctgatcaaaaagatttagctgatggtatttaccaatataaagctatagtgacagacctcgcaggcaatatctcagaatctgctatacaaaaagttattgtagataattccttaaatgttgaatcaaccacagtgattgtaaagccgattactgaagacaatacaataagtctagttgaaaaagatcaagttatttctataagacttgaaatagctaatttacccacagatttaaatagctcactgacatcagtaaatacgacattagacaatgttacttataattttcattttgatgaagtcacgcaagaatgggttactgaaattccagcagagtttctttggtcagtagagccgcaaaccaatatatcaattgagattagtcttactgatcaagctggcaatacagccattatcaaacatacccaaaattataatgtggatcatactccgaattcaccaaccctagattcactgactttcaacaatatagatggagctatcatttcaggtagtgcatataaaggaagtaaggtcgatatctacaataaaaatggtgattggcttgcaagtacaataactaatgaagaaggtaaatttactttacaagatctttcaattaactcaaatcaagaagtttacgcagtcgctacttataatggttatagtagtgaaaattcatcaattgggctagttactgaagttccagctattagtattacacgaattagtccagaaggcgtgattagtggttatgcgactgaaggtagtcattttattgtaaaagatcagaatggaaatattctacaagaatttaattctaatgtatttgatagctctggtattacaccatttagtgtaatggcattaggcgaattaagaccatttattttgtccctcgatcagcctttagaggaaggggctcaaattattatcactacagataaagataatatttcaggccatccacaatatattactgcagactatactccagcagtatttttagaaactccacaatttgatattagtggtgaaactttatcagtacatgttaatgaacctaacagctttattcgtgcattttctggagaaggcaatttaattgctaccggttttaccgatgagcaaggctttgcaagtttacaagtgttccaatttttaaaagaaagcgaaacggttactgtacaagtagtagataaaaatcaaaatacgagtgaaaccctaatcgaggttccaaactttgcttatattccacatattgaacgtattacacaagaaggcttaatttcaggagttgctgaagataatagtacggtaattgtacgtgatgctgacggcaatgaattaggaaaggttacattaggtgatgaaaatagttggagtgactttagtcattttagcttgaatgtaaaccgccctttaattgatggagagaaaatttccgttcaaattattgataataaagggttaatgagtcctgagcaaaatatcatcgtagatctgactcctccatctgctccaacggagttaaatttcaatgatgctggtgatttagtttatggtcatgcagaacctttctctgaaattttagttaaagatgggcaaggaaatattcttaataaatggttttggaataactggaccgatgagagtggaagtttctcaatagaactaggtacatttttaaccaatgctgagacagtttatgtcacggctaccgatgtaaatggaaatgtaagtttagcagctcagatacaagcgcctaactatgcttttgccccccatgtagatagctttacttcggatggcgtgataagtgggcaagctgaaaataatagtactctcactgttaaagatgccaaaggtgacgttgtagctgaaattaaagttggtgaagataacggttggaatggatcaagttattttaaactccagcttgatcgtcctcttgtcgatggtgagcagtttttcttatcaattaaggatgcacgtgggcaagtaagtgctgatactgtaattaccgctgatacggttgctcctacaccagccagcaatttagttttctcagaagatggttcatatcttacgggtgtagcagaactgaatactacgattcaggtttttgatcataatggtcagctagtgaatatatggaataacaccattaactctgacggtacatttactatttacttaggtagtaacaatttacatggagaagcattcacagtcactgttaaagaccaagccggaaatgtgagtgaggctatttcaataaatgcgccgcttgacgatattgcaccgaatccaattaaaaatattttacttgatgcaaatggtcaaaactttacagcacaagcagaagcaaatagtcagatcgaagtttttgattcattgggtaatcagacaggttggggttctacagatagtgcaggtaatgcttctggttctttcaatcaaacttatttacacggtgaggaactcaatttttgttgttatagatcgagcaggtaa

SEQ ID NO: 64047 - DNA, 5577 bp, Acinetobacter baumannii
gtgaggaactcaatttttgttgttatagatcgagcaggtaatcgcagtatcgaatttaagcaaaatgctttaattgataccattgcaccaaatccgattgaaaatatcatcttcaacgaaaatggccaaagttttacagctcaggcagaagccggaagttctattgatgtattagatcagactggaaataagattggttttggttacaccgatagctcaggtaatgtatcgggttattttcagcaagtttacttacacggtgaggaacttacttttgtcgtgatcgatcgagcaggtaaccgcagtgcagaggtcaagcagagtgctttgaatgatgacgttgcaccaaatccgattgaaaatattgtattagatctcaatggtcagaactttacagctcaggcagaagcaaatagccaaattgaaatcaaaaataataacggtgacgtcgtaggttatggatcagcagatagtgcaggtaatgtttcaggatatttgtatcaagtgcatttacatggcgaagagctcacttttattgtagttgaccgagcgggtaaccgcagtacagaggtcaagcagaatgccttgattgatgatattgcgccaaatccgattgaaaatattatattagatatcaatggtcaaaactttacagcgcaagcagaagcaaatactcaaattgaagttaaaaatgctgttggtgagattgtaggttcaggttatgtggatggcgctggtaacgtgtcaggttatttatatcaagtctatttacatggagaagagctcacttttgttgtcgttgaccgagctggtaaccgcagtacagaggtcaagcagaatgccttgattgataatatcgcaccaaatccgattgagaatattttacttgatgcaaacggacagaactttacagctcaggcagaagcaaacactcaaattgaagtcaaaaatactgctggtgaagtcataggaactggttcaaccgatagcatgggtaatgtttctggttacttctatcaggtctatttacatggtgaagaactcacttttgttgtagttgatcgagtgggtaaccgcagtacagaggtcaagcagaatgccttgattgatgacattgctccgaatgcgattgaaaacattatctttaatgaaaatggtcaaaactttacagcgcaagcagaagcaaatagcaaagttgaagttaaaaatgctgcgggtgaggttgtaggttctggttatgtggatagtgctggtaatgtgtcaggttacttgaatcaagtttatttaaaaggtgaggagctcacttttgttgtgattgatcaagctggtaatcgtagcattgaagtaaaacaaacagcctttcttgataatacagcaccggaaaatgcgactaatttagtatttagtgaagatggctcatatctaagtggtatggctgagccaaatgcgacgattcaaatatttgatcagtatggtcaattattaaatcagtggaataataatgttaattgggacggaacatttaacatctatttaaacagtaactacatgcatggagaagtatttaaagtagttgtagttgatcaggctggtaatttgagtggtgaggttactgtaaaagcaccgcttgatgatattgctcctgtagctgcaagtgatctggtctttaatgaagatggttcatccctttctggtgtagctgagccaaataccttcatccagatttttgatcaaaatggtcagcagatgaatacgtggagtcagagtgtaaatgctgatggtacatttactatttttttcggtacttacaatttacagggtgaagagtttacagtcattgttaaagaccttgctggaaatgtgagtgaagctgtttcagttaaggcgccgcttgatgatattgccccaaatccgattaaaaatattgtatttgatgcaaatggccaaagctttacggcacaagcagaagcaaatagtcagattgaaatttttgactcatttggtagtcagataggttggggttctaccgatagcactggtaatgtgacgggttacttctatcaagtgtatttacatggagaagaattaacgttcgttgttatagaccgagtaggtaaccgtagtgatgaaatgaagttaaatgctttgatggataccattgcaccaaagccgattgaaaacatcatctttaatgaaaatgggcaaaattttacagcacaagcagaagcaaatagttttattagtgtcaaaaatgctgcgggtgagtttgttggctatggttatgtcgatagtactggtaatgtgtcaggtcacttcaatcaggtttatttaaaaggtgaggaactcacttttattgttatagataaagcaggtaatcaaagtattgaatttaagcaaaatgctttaactgatgatattgcaccaaatccgattgaaaacatcgtcttaaatgaaaatggtcaaaactttacagcgcaagcagaagccgatagccgaatcgaagttaaaaatactgagggtgaggtcgtaggttctggttatgtagatagtattggtaatgtgtcaggttcttttaatcaagtctatttacatggagaagagcttacttttgttgtagttgaccgagcaggtaaccgcagtacagaggtcaagcagaatgctttgattgatgatattgcgccaaatcaaattgagaatattgtttttgatgtaaatggtcagtactttacggggcgtgctgaagcagatactcgaattgaagtactagatcaatttggcaaccgcgctggtttgggatatgttgatagccaaggtaacgtgataggttatttcaatcaggtttatttacatggagaggaattaactttcatcgttgtagatatagctggtaaccgaagtgttgaagttaagcaaaatgctttaattgataatgttgcaccagcagcagctacaaatattactttaagctcagatggattgctttttggtgaggctgagccaaatgcaacgattgaaattattgatcaatatggtgcagttatcacaacaactgatgttggatatggtggggtctttaatcaatggatcaatttgagtcaataccagacacaaaatttaagtatcgttgtcaaagatcaagcaggtaaccgcagtgaagttgttaatgaaatagtacctttatttaccaactcaccaattgctgcaacagagctaaaattggatgtaaatggccatattcttacaggtaaggcgacagcaggaatgacgattgttgtcacatctactgatggtcagatcattaatggagaatggagcagtatagttaatgaagatggtagttttgctattaagttaaatagctattatctacatggacagacgttactaattcgagtttatgaccagaatacatatcaatacagcccaatcactgaacttattgcgccattagacaatattgctccagtgattaatgaggtagcgattagtaacgacggtcatgagataactggacatgctgattcaaaagtaattattaaagtaatagatgcggatggagatttacgagcagaatttcaaatggaggaagctggatatttcaatgttggtatgtatccacctgtattacgtggagagcaattatttatcacggcaacggatttagctaaaaatataagtacgccatttaatattacttttaatgcagatattaatgcaccaccatcagcagatcatgttgttttatctgaaaatggtttcttcattgagggaactgctacaccaaatagtgagatgcatatttttgatgtgtatagtaattatattggcggtggttctgtagatgaaactggatattttaatatccagttatactcacctcaggtgaatggacaaactttacgtgttgttgtggaacataatgggtatcaaagcgtttatacagaaattaaggcaccgatagacatcgttgcgccaaatgcagcaacacaacttgtattggaagaaggaaatatactttctggggaggctgaagcatattcaactgttaatattttcgatgctaataataatttagttggtcagactactgtgggaagtagtggtactttctgggtgcaattatggtcacaatattggcatggtgaaacattgacagtaaaagtagttgatgccaatcaaaatataagtgtgggctcaacgattgttgctacgaatgatacaacagtaccgaatgtagccacacaacttgccataaatggattgggagagctcgcgggacatgcagaaagtagagctatccttgaagttatatatcattttgctgatcaagaatcttctgtaacttctgtaataagtacgacggttatggttgatggaactttctctgtttatatgtatgagaatgcaacatcatttgatcttactgttattgatcgtgctggaaatcgtagtgaaactatcaataaagcaattagtgatttaactacaatcactgttgatcagtttaaaggtgattctgctgataatacttatatagttgatcatataattgattttgttcaagaatatattgttgagccgtatgcaatatataaagatgtctggattgataatagctatacatatccagaatgggtcactgaaggtcattacgaacagatatggtttgttgatggttattatgattcccaattggtcacaagtggttattcaactgtacaaaatgtttatcaaaatcagaatggtataacttatattgataatggcatggcagatggcgattatagtcgatatgaacaacaatattatgattttgcgaatggacaatggcaagaaggttatgaattgacctatatacgttcagaagaaggctgggttgatactagtcattatgaagacgtttatgttgatacaagtcattatgaagatgtttgggtagatactagccactatcaagatgttttcgtagaaagcggttattgggagaaccaacttgttgaatcaggctatcgagatgttgattttggtggacacgataaaataattagctctgtgagttatagtctggttggatattctgattggtcgacaggtctagaaagcgggcgttatgtagaagacttggaactggttggttctgctcatctaaatgcaacaggtaatgctttagataatcttttaacaggtaactctggtaataacgttttgaatgggcgtgaaggtaacgatacctatatgactaatgaaggtactgattccatactgttccaattgctaaatagccaagatgcgactggcgggaatggacatgacacggtgttagattttactttaggtgatatcagaactgaccttcaagctgataaaatcgatttaagtgaactattaattgactattctagagatgtaagcgcattagctaaatttattactgtagagcaagatgctgggaacacgactattagtcttgaccgagatggcgagggtacaatgtttaatagtgtgtcattgataactctaaatcaagtaaatacaacattagacgaattactaaataaccagcaaatcattgtttaa

SEQ ID NO: 64048 - DNA, 567 bp, Acinetobacter baumannii
gtgaagacatggaagaaagtaactacatggatagtatccattttagctttattagctttaatcgtaggagggacagttctgtatttaatacaaaagagtaaaaaggaagaaagactagttaattctgcttataaagaattaataccagataacattgattcatatccagagcttaaaaactattatttaaatttatatcgtcaaggtttaattgaaaaagatctacctatttctcctgatgaagatccgacaattccagacaaagttactttaattcaaggtaattgttatagccaatttcttgatttgaattatgatgagctccaaataggtctaaagaattttgataaagaaattgattttgaaggttataatttattagatggagttatgtcgaaatttaatgaaatcccacctatttctaatgccttggcactatatggatctgataaaaaaattagtaggaaagaactttgtacccttgccaatatgtatgaaaaagggaaagagtatgaagaaaaactgattgaagaagcacgtaaaaatagtataaaagctaatctatag

SEQ ID NO: 64049 - DNA, 276 bp, Acinetobacter baumannii
atgaaggaggtaactattccttggatgaagggcgggaatgtcccaacaagttgtggatcatttgatatacatctggctagtgttcaaggaagaaaaaatgatactaagttaacacctgaagcccatactattctgataaaaaagactaatcaaataggggggttatatatttatcgagatggaataagagtactaccatatggtggaccagagttcgattttataggtgtggaatatcgtagaactaaaagtttttctggatattatacttcgtag

SEQ ID NO: 64050 - DNA, 405 bp, Acinetobacter baumannii
ttgggtagcgaacctggtattgataactaccatgtcactgctcaagagttaaacggcaatctcattttattgcataaagtccaacaaggaccagcgagccaaagtcatggtttacaagttgcaaaattagccggtattccagctaatgtgattaaagaagctcaaaagcgtttacgtattttagagaagcaacaacagcagcatttacaaactagtgttcaaagtgatttgtttgcaactctagattcagaagttaccccaagcactcaagtcatagagaaagtgatagaagttgaagtctcttcacctgccctcgatttacttaagcaaatcgaagtagacaacctgactcctcgtcaggcacttgaacagctttatgagctaaaagcagcgcttaattcataa

SEQ ID NO: 64051 - DNA, 678 bp, Acinetobacter baumannii
  misc_feature (628)..(637): n is a, c, g, or t
atgaatattcgccaagtgtctgctatttgtctttcaatagcagctactcattttgtgtatgccgcttcaaatgttgcaaatcctgtaaatgattcttcccaagcaaaaggaattattaaaaatcaatatattgttatattaaataaggatgcaggtccttctaaagatttcgcacaaaatattgctaaacaacatgctggtaaagttttacaaagctacgatactgttcttaaaggttttgcaatttatttacctgatacagcaggggcagcctttattgaagcgatgaaaaagaaccctcatgttctttcagtagaaagcgatacaatagtaaatattgatgcaactactcaaagtaatccagattggggactagatcgtatagaccagaaagctttaccattaaattcgacttattcttatttacagaccggttcaggtactacggcttatatcgtggatactggtatattatctagccaccaagagttttcaggacgtgtgttaagcggttataccgcaatatctgatggcaatggtacaaccgactgtaatggacatgggacccatgttgctggaacagtaggtggtacgacctatggtgttgccaaaaatgtcaatttagttnnnnnnnnnnaatgttattgctggtttagactggatattgaaaaatggtga

SEQ ID NO: 64052 - DNA, 654 bp, Acinetobacter baumannii
atgaacttggttgcaccaaaaattcgattaaaatcttttcattgtccattttgtaatgtttattcatcaatgagttgggatatttttaaacaagaatctgaatacatactttctttcgcccaatgtttacattgcaatgagtcttctatttggagggaaaatgctgataaaagttcaatttatatcaagaagtatcatgaggggatgatggtataccccacttcagaaataaacattctaccatctgaagatatgccatctgatgtaagagaagattttaatgaagctagaacaatctattataaatctcctcgtgcagcagcagctttactaaggcttgctttgcaaaaattatgtatacatttaggtcaatctggaaagaatattaatactgatattggcaatcttgttagtgaagggattattaataggagaattcaaaaagcggcagatactgtgaggattgtaggaaataatgctgtgcaccctagtgaaatggatgatcaagatatagataaaattgccgaaaagttatttagtcttatcaatatgattgtatatagcgccataactgagccaaaagaagttgatgaaacttttaataaaactcctcaaggtgcacgtgatgcaatagaaaagcgagataaccattaa

SEQ ID NO: 64053 - DNA, 1929 bp, Acinetobacter baumannii
  misc_feature (1905)..(1914): n is a, c, g, or t
atgcaaaggactacgaaacactttcaaattaatgcattagcatttgcaatagcaatgagcacaatttcagcgcatgcagagactgatcagcagacttcggaatatggaactcttcctaccattaaagtaaaagctggaagtggcgaagaaaatgaaaaaagttatatagcagggaaaacagaaacagcggtaccactgggtttatccgttcgtgaggttccacaatctgtttccgtcattactcaacagcgtttacaagaccagcaattgtcaactttggttgaggtcgccgaaaatgttacaggggtaagtgtcaaccgttatgaaaccaaccgaggtggaatctattcacgtggttttgtagtagataactatattattgatggtattcccaccacatatagcttgccttggtcttcaggtgaaattttctcaagtatggccttatatgatcatattgatgtagttcgaggggcaacaggtcttacatttggtgctggaaatccatctgctgcgattaatatggttcgtaagcgtgctacgagtacagagccaactgctaacgtagaagtgagtgcagggagttgggataattaccgtgttatgggtgatattgccaactcccttaatcaatcagggacagtacgtggacgagcagtggcccaatatgaacaaggcgacagctataccgacttgttgtctaaagaaaagctaactttactgttaagtgctgaagcagatttatctgaaaatacccttttatcgggtggggtaacttatcaggaagatgatccgcgtggaccaatgtggggaggtttacctgtctggtttagtgatggcacaaaaacgaactggtctaaaaataccactacaagtgctgactggacacgctggaatgttaaatataccaacctatttgcagatttaactcataaatttaatgacaactggtcagctaaactgtcttattcttatggtaagcgtgatgctaattctaaacttttatatgtttcaggtagtgtagataaaaatactggtctagggctatctccttatgcatcagcgtatgaccttgaggtagagcaagataatgcttctttgcagctcaatggtagttttgatttgtggggcttagagcaaaaggttgttttgggttatcaatattccaatcaggactttacagcgtatgctcgttcaactgatacaaaaatggaaattggcaatttctttgaatggaacggcagcatgcctgagccagtgtggaatgcacctacactcaatgagaaatataatattgaacaaaatgcactattcgctgcgacttatttaaatccgattgagcctctaaaatttattttaggtggacgttttacaaattatgaaaagaatatatatggtcgtagttcacccataaaatatgaccacgaatttgttccttatgcaggtattatctatgatttcaatgatgtctatactgcatatgcaagttataccagtatttttcagcctcaagacaataaagactttgatggaaactatttagacccggttgaaggaaacagtactgaagtaggcttaaaatctgcatggtttgatggacgtttgaatggtactttagcgctttatcatattaagcaagacaatttagctcaggaagcaggacaagttactcgtaacggggtaaaagaaacctattatcgggcagcaaaaggtgcgacgagtgaaggttttgaagttgaagtaagtggacaaatcacaccagactggaatattacagcaggttatagccagttctctgccaaagatgcaaatgatgccgatgttaatacccaacttcctcgcaagatgattcagacatttaccacctataaattaccgggcaaattagaaaacataaccgtgggnnnnnnnnnntgggtggcggggtaa

SEQ ID NO: 64054 - DNA, 381 bp, Acinetobacter baumannii
  misc_feature (354)..(363): n is a, c, g, or t
atgcttgaattcttttctcgattaagcttagtcactaaaattattatcgccattattttagggataggcgtcgcactattatttccaaccgttacgccgtacttaagcttgtttggtgaactatttattaaagcattaaaatcggttgctcctattttagtctttgtactggttctctcatctattgccaacttccaagtcggtcatagtgcaaatttacgcccagtattactactctatgtagtaggtatgttattagctgcttttagtgctgtgatcgctagcttatcttttcctagtacgctttatctcaacactgtttctcataataatttgcaagcgcctggtagtctnnnnnnnnnngtctcgctgatatattaa

SEQ ID NO: 64055 - DNA, 450 bp, Acinetobacter baumannii
ttgttggcaggtgagcaaaaaaccaaaggtgttgagctttcattaacaggtcagttgaccgatcaattgtcagtattggctggttattcgtatatggatggtaagattgaaaaatcggctattggttttacaggcaatcattctgcgctcacgccaaacaacactgctaacttatggttaaaatatcaaattaatgatcattggtatgcagctgtaggtggtcgtggtgaatcatcacgttttagtgcgccagacaacaaaaacgttttaccgggatatgcagttgtaaatgcggcgttaggttatcaaagtgaacgttatgatgtgaacttaaacctaaataacttgtttgatcgcgattattttgtgtcaggtcatagtggagcaaatgattcgaacatgatgggcgatcctttaaatgctcaagttgcacttcgctatcgtttttaa

SEQ ID NO: 64056 - DNA, 1680 bp, Acinetobacter baumannii
  misc_feature (1658)..(1667): n is a, c, g, or t
atgacttcaatgtcgaacactacccaaaagcactttattgttgagcagtttcctttaccgacttgggtcagtgatgaaaaaggcttaattttatactgcaatacggagtgtacaaagtactggcgcgatacttctcctccattgtttcaacaatggctagatttcgtgtaccctgccgatttagaagaagttaaaaacaaatggttagatgcgatacgactccgatcaagaattgaatttaaatgccgtcttttgcataaaacccattattatcgatggtgtaaaatttctattcaattgtcgaaataccatgaatcttctcaagaaaatgaatggtttattagtttcctagatattgaccaagatatacaagagcagcaaagcttacgaaaagatatcgatatacaaaatcaaatgctcgatatcagtgtcgattgtattaaggttttaaatacagatggtactgtatctcatatgaataaatcaggatgccttgcattaggtatacctgtagatgaaaaaaaattcggtatgcgatggttagatcttttacctcctcatattcgtaaacgtggaagagttgctttaaaaaaagccctgcaaggtaaagtagcccgattcgccggcatgagttgtttaccaaatcatgatccagaatattgggataacatgctcaccccaattcaacatacaaacggcgaaattattcagatattgtgtgtttcgcgaaatgtcactcaacagtatcttactgaaaaccgtctaagagatattagcgagagagatgaactcacaggattatttaatagacgttcatttaagctacaactaaaacgcaccctagcctactcaagagaaacccaaactagtgtagggctacttttaattgatctagatcatttcaagcatattaatgacactataggtcatagtgctggtgaccacttattaaaaatactttctaaacgttttaatcagtgcgtagatcctgaaagatgttcagttgccagattaggtggtgatgagtttgcagttattgttagccatttagaaaatgagaatgatgttcgtgaacttgcagaagtattgcttcaacaactcaatcaacccattacatatgctgggaatgtgctcaacggcggcatgagcatcggctgcgccatttaccctcaagatgcagttgatcaatcgagcttattaagttgtgccgatatggcattacatgacttaaaagcccgtggtcgtggcggcatacgtatgtataacccaagtatgatgcagttaaccgaggcaatcgcctctcaactcaacattgctcgccagcttattcgtcatcataccattcagccctactatcaacccaaagtcgatctaaaaactcatgctgtagtgggctttgaagcattactccgctggcatacgacttcggcccaaagaggtttgccttctcagattgttgaagcttttaaagactacgatttagccagtaaaattggtgaaatcatgcaacaacaagttttgcatgatattgctaaatggataaaattaggttttgagccgcttcctgtttctctaaatgccgcaccggttgagttcttaagagataactatgctgaacgtttattaaaaaagattaatcaacttgaaattcctacccnnnnnnnnnncccatttaattga

SEQ ID NO: 64057 - DNA, 159 bp, Acinetobacter baumannii
atgtatagtatggctacacgagatatgcatgacattagtaataatagatacggctcaggtcgtgatgctttacttaaagcaacaatagaaattgttggacaacaaggattacatggccttacatttcgtgctcttgctaaagaacgacaatttatatga

SEQ ID NO: 64058 - DNA, 846 bp, Acinetobacter baumannii
atggaaattgataccgatcaaatgtccaaagctgtgatggattatgttcagaccaattacagtgccgatagtattcaagcagttttattaaagcttgcacaatcaggacttaattttattcaaattggtggaacagttgttttaatcccaattattgctttttacttcttattagactgggaccgtatgttacaaaacttacgtcgtctcattccacggccatatgaagctacgaccttacaaatcgtccgtgaatgccatagcgtgttaggagcatttgttaaaggtcagttccttgttatgcttttgctcggtgtagtttatgcagtaggcttacaattaattggactagaggtcggcctaattattggtatggtggcaggtcttgccagtattattccttatctaggatttgcagtcgggattattgcagcggttattgcaagtttgttccaatttggaatggactggacacacttattacttgttggcgtagtctttatgattgggcaggcagtagagggctatattctgcagccattcctactcggtgataaaattggtctttcacctgttgcagttgtatttgctgttttagcaggggctcaattggctggctttttaggaatgttaattgcattacctgtggcggctgtcattgtggtgctcttaaaacacctcagagaaaattacgaacggagttcattctatgctccatcttctacattattaatccaagagggtaatattgagcaacttcatgtagaaactgaaaatactaaacttgatcttgaagttaaaaaacagcaagatacagataccccgaatctttcagatcagaaataa

SEQ ID NO: 64059 - DNA, 1320 bp, Acinetobacter baumannii
gtgaaattcttcctatctctttttacgctgtttagtattttctgtactactcttaccaatgctgctctacttaatattgctcctgaaagtgttgaagccgctgcatggacaattgtagatacccaatctggtcaaattattgctgagcataatagtcatgtacaacgtgcgccagcatctttaaccaaaatgatggtggcctacattgcattaaaagagattaaggctggaaagttaaaactgaacgaagtcattactgcaacaccagtcgtaagcgtggtgcagtgggatgaatcccaaatgtacctcaaagcgggcgagcaaatttcagttgatcagctcttggctggtttaattgttatgtctgcaaatgatgcagctgtgactttagctgaaaaaatttctggtgatgtgcctcatttcgtacaacgtatgaatcaagaagcacaagcactgggtatgaaagacacgcactttagtaaccctgctggtattacaatgccggatcattacacgacagctcatgatttgagcttattaagtcaggcagtgattcaccagacccctgaatatttacattattcgaaaatgccgagctttagctacaatcaacgttttcaccacgcgacgaaccttgcgctcaaatacgatccatctgtagatggcttaaaaactggctataccaaagcagcaggttataacttggctctaacagcttcacgcccttcattttcaccgaacttaccgcaaagacgtttactggtaattgtcttaggtacaccaagtgctgtgaaacgtgctgaaattgcagataaattaatgaatcttgcttatgcttatacacgtgatgaagtggttattcctgagcaaaaattaattgctgaattgcctgttattaaatcaactttaaaaatgtttaaagtagaaactaagcagccaaccattgttacgacttctttatatgctgagccaacaccaattgatttaaatacgtttgattatgctacacagcgtattcaagttcttgatagcaatcaacaacctaaagttattgctccacttgaaacaactcaaacacgtgtaaatattcagttaaatgagcaaaagttaacagcaccgttaatgaaagcaatgaatttggcaacagtttcaatttatcaaaataaccagctcattcgcagtcttcaaattgaaaatgatgtacacattgaagaagcaaatattttccaaagaattatgatgtggttctcaagcctattctcaatcttttcatcaagtgagcacagtgcagcaaaactctaccctatagattcgcactaa

SEQ ID NO: 64060 - DNA, 450 bp, Acinetobacter baumannii
atgcagttcgacaaagtgcagcgtttgattgaagatgcaattgaacaaggtgcgactataatccattctcatcaagcactacctgaaaaaggttattttattgccccgactcttgttgtagatgtaaatgaagaaacagcaattgtagaacaagagcaattcggtcctgttttacctattttacgctttagtgatattcatgaagtcattgaatctaccaatcaaagtgaatttggtctaggcggttcggtctggactaaagacttgcaaaaagcacaggaaattgccgaaaaaatggaaacagggacggtctggattaatagccatgcagatctttccccggaagcagcttttgggggctggaagctttctggtttaggatattcttttggtatgggtggtctgctgcaatatacccataagcaatcagttcatataacagaagcctga

SEQ ID NO: 64061 - DNA, 912 bp, Acinetobacter baumannii
atgcatatttatattttaggttcagcagctggaggcggtttccctcagtggaactgtaattgtcctaattgtcatggtgttcgtacaggtacgattaatgccaaagtgcgtactcaatcttcaattgcaatttcagaaaacggcgtagactggattttattaaacgcatcaccagatatccgtcaacaattatttgattttaaagcggctcaaccagcgcgaaaattacgtgatactggtattaccaatgttattttaatggatagccaacttgaccataccactggactgttaactttacgtgaaggctgcccaatgaatgtgtggtgtactgaaatggtctatcaagatctcaccacgggttttccggtattcaatatgctgaaacactggaatggtggtcttcaatatcaccaaattgatcctaaacaagcttttaaaattgatggtttcgaaaatttagaatttttccccttaattattcaaagcgcggcacccccatattctccacatcgccatgacccgcatgagggcgataatattgccttgattattaaagatcataaaacgcaaaaacagttgttctatgcgccgggtttgggaaagattgatgatcaaatcatgcagattatgcaagattctgactgcgtcatgattgatggcacactatggacagatgatgaaatgcagcaaaccggtgtagggaaaaaaacaggccgtgaaatggggcatttatatattagtggtgaaggcggttcgttatcttacttaaaccaactcagtacaccaaagaaagtgctaattcatattaacaataccaatccgattttaaatgaagactctactcaatttgctgaactaaaagcaaatggtgtagaagttgcctttgatggcatgcaaattgaactctaa

SEQ ID NO: 64062 - DNA, 357 bp, Acinetobacter baumannii; identical to SEQ ID NO: 50562

SEQ ID NO: 64063 - DNA, 594 bp, Acinetobacter baumannii
atgtgtataagagacagtcatgaaattgcggcgggttctttaaatcctcacgaagagcaaaccaattattttgcccatgcagagaaacaccactatgaatttgtgttgggaacattaacagcagtaaataaagataagaaaataattgatttaattccccctcaagtctctaaagaacaaaatacccatattcaacaactcagttacgatacactggttttagcgcttggttcagtatcaaatgatttcaatacacccggtgttcgtgaaaactgccatttcctcgatagccgtaaacaggcggatattttccagcaagatcttttacatttatatatcgaagcgcaaaatcaacccgatcaacgtacattaaatattggaattattggtgcgggggcaacaggtgtcgaacttgcggctgaactgattgaaacgaccaaaaacttttatcgctatggtttgaaaaagatccatccgaatcaagtcaaaattacactgattgaggcctcagaacgcatcctccctgccctaagtgaaaaaacagctgcccataccgtaatatcactgttgagctggttaccattactaaaatag

SEQ ID NO: 64064 - DNA, 357 bp, Acinetobacter baumannii
atgtggacagtcattacaacggatctgtttaacgaatggcttgtacagcaagatgaatctacacaagagaaagtactcgcagcgttggtcgttctacagcaacagggaccaagtttaggtcgtcctttagtagataccgtctatgactccaaatttaccaatatgaaagagctacgtgttcagcatcgaggtaaaccactgagagcctttttcgcgtttgatcctttacgacaagctattgtgctgtgtatcggtgataaaggcggtaaaaagcgtttttataaagagatgttagatattgccgatcagcaatacgaacttcatctttcaactttaggagatcaatctaatggctaa

SEQ ID NO: 64065 - DNA, 291 bp, Acinetobacter baumannii
ttggttgcaagtcatattgtgggatgggcagatgcacctgataagcgattaagtcctcataatggtctgagcctttctccgctttatgatcgggctttcgatcagcatctgttaacattaaacactaaattagaagtaatgatttcgcctaaacttcataaagtcgcaaaaacgacattctataatattggactatcggaaatagagggtaaatcaattatcccccctattagatttggaattgatatggatttactagcacaacatcggcaacaattcctaaatttataa

SEQ ID NO: 64066 - DNA, 195 bp, Acinetobacter baumannii
atgaaagagctacgtgttcagcatcgaggtaaaccactgagagcctttttcgcgtttgatcctttacgacaagctattgtgctgtgtatcggtgataaaggcggtaaaaagcgtttttataaagagatgttagatattgccgatcagcaatacgaaattcatctttcaactttaggagatcaatctaatggctaa

SEQ ID NO: 64067 - DNA, 195 bp, Acinetobacter baumannii; identical to SEQ ID NO: 64066

SEQ ID NO: 64068 - DNA, 195 bp, Acinetobacter baumannii; identical to SEQ ID NO: 64066

SEQ ID NO: 64069 - DNA, 195 bp, Acinetobacter baumannii
atgaaagagctacgtgttcagcatcgaggtaaaccactgagagcctttttcgcatttgatcctttacgacaagctattgtgctgtgtatcggtgataaaggcggtaaaaagcgtttttataaagagatgttagatattgccgatcagcaatacgaacttcatctttcaactttaggagatcaatctaatggctaa

SEQ ID NO: 64070 - DNA, 195 bp, Acinetobacter baumannii; identical to SEQ ID NO: 64069

SEQ ID NO: 64071 - DNA, 255 bp, Acinetobacter baumannii
gtggagaagaaagtcattttagatgctgataataattcctttataataagtgatactgggccaggggtacaaacaattgatatgcaaaatatttttgaatttggtttttctcgccgaataggaggccgaggtatggggttatatgtaacaaaacagactttagaaaaagatggtttccaaatatctctggatccatataatcctacatcgggggccactttccgaatttttaaaaattttgaagagagtatttaa

SEQ ID NO: 64072 - DNA, 261 bp, Acinetobacter baumannii
atgattaaccgaaactctaatgcacttgcgatgaaattggttaatctcgcaagccttgatcctataataattgctagtgggcgtagaggtatgggaaatacctctgctttagataaagaagtgtgggaatactacagtaatagattggaacaattaacattagatgcagaaactcttcttaataatttaagaaaagcttctgaaagtcttatatatgatcagtattctcaactagaagaattgaataccaataatgattaa

SEQ ID NO: 64073 - DNA, 195 bp, Acinetobacter baumannii; identical to SEQ ID NO: 64069

SEQ ID NO: 64074 - DNA, 195 bp, Acinetobacter baumannii
atgaaagagctacgtgttcagcatcgaggtaaaccactgagagcctttttcgcgtttgatcctttacgacaagctattgtgctgtgtatcggtgataaaggcggtaaaaagcgtttttataaagagatgttagatattgccgatcagcaatacgaacttcatctttcaactttaggagatcaatctaatggctaa

SEQ ID NO: 64075 - DNA, 216 bp, Acinetobacter baumannii
atgaaaaataatacactgaaaatgactacattatgtatgttgaccataggtataagtcaatttgcatcggctgaagcgacgcgtgcgacattaccattactcaaagcagagcaactcccagcatggtgtgattctaatttaaaaaaattcagcaagagatttctagttttgaaaaaacgcctgttaaaaacgatgctgccgctgctcccatattag

SEQ ID NO: 64076 - DNA, 2139 bp, Acinetobacter baumannii; identical to SEQ ID NO: 42639

SEQ ID NO: 64077 - DNA, 375 bp, Acinetobacter baumannii; identical to SEQ ID NO: 42637

SEQ ID NO: 64078 - DNA, 1326 bp, Acinetobacter baumannii; identical to SEQ ID NO: 50187

SEQ ID NO: 64079 - DNA, 1230 bp, Acinetobacter baumannii; identical to SEQ ID NO: 50188

SEQ ID NO: 64080 - DNA, 453 bp, Acinetobacter baumannii; identical to SEQ ID NO: 42634

SEQ ID NO: 64081 - DNA, 861 bp, Acinetobacter baumannii; identical to SEQ ID NO: 50190

SEQ ID NO: 64082 - DNA, 561 bp, Acinetobacter baumannii; identical to SEQ ID NO: 50191

SEQ ID NO: 64083 - DNA, 1626 bp, Acinetobacter baumannii; identical to SEQ ID NO: 50192

SEQ ID NO: 64084 - DNA, 1029 bp, Acinetobacter baumannii
atgactgagcagaaaaactcatcaaaaactacagcacttgctcaagcacttttgcttgagcaggtggaatttttcaaaaaacaattatctatagaaaactcacctatttatttccggcaatttattcagctttttatgcaacatgccgacgaaattaaactttatgaagttgtggatttagaacaattacaagccgttgtgaaacgctatgcttttgaaatgcagcttggtgcaggcttgcttgagtttattggggaaattgcacagcgtatttatttatctgccatgaaatctccagttcagctacaagacttggtatccgatcaccagtttgaaatgtggctttccaagtttttggaaatggagcatattccacattatctcaatcagtttttaagaactagcccatctgtccaacagctttgccaatatattgccacttcaaccttagaacaaaaattacctaaatttctaacggcctctagagtggatgactaccattttgaatggcaacataaactcaaaaaattctcttttttacagcaacaacgtcttgagcataaacttgaaacgtggattgccggctttattcatgaacaactgacagaattaagccttttatcggctgaagatttagaaagcttagtacgtcatatctgggaagatattagacataaaaaaatctatgagtttatgaaacagctcactcctctcgatgttgaggagttctttgttttaatttatgaatactggaaagaattacgacagtcacaatttatgcaaggtcttattttgtatggtgtcgaagttttttatgatttttataaagatcagagtttatttgaagtattaagtgcaattggtttatccgaaactgacttacaaactgaagctttacgtttttatccaaaagttatggatgcctttaatgagcacggtattttggaaccgttacttcaagcgctcttagctcctttttatcaaagctcaaaaacactcgatataattgaaaaacattttagtgagtaa

SEQ ID NO: 64085 - DNA, 957 bp, Acinetobacter baumannii; identical to SEQ ID NO: 50193

SEQ ID NO: 64086 - DNA, 1452 bp, Acinetobacter baumannii; identical to SEQ ID NO: 50194

SEQ ID NO: 64087 - DNA, 975 bp, Acinetobacter baumannii
atgacgacatatgaacaggctacttatgccttaagtgaagaaatgcaaagccttgtgtactggagcagcatttattcaccagcagatgcagatattgactcagtccgtgcggcatatgatgccatgtgccgacactacactttgccacgtgatgacaagttagatgtagaagatcgagtgattgcaaatgaagagcatcctgtgcctgttcgtgtgtatttaccaaaaacaaatcgacctgagtctggttggccatgtgtgttgtatctacatggtggtggttggatggtaggtggactcgattcacatgagtttattatcagttatttgtgtaaggacttaaatgcggttgttattagtgtggattaccgcttggcaccagagcatcgctttccagcagcctttgaagattgtttagcagtctatcactggcttaaacaacatggttcagcttggcaaatcgatagtgaaaatatcgttctagcaggcgatagcgcgggcggtaatttagcagctgcccttgcagtggaactacaacatagtggtttacaagctcaagggctggcattggtttatccatgtttaacgacagcatttgatactgcatccgcacaaaagcacgcccatgcgccgttgttaacgacagaagatatgcatttttatttaaaggaatatgctccggactcacaagattggcaggatttacgtctagcccctttattggcgacggacttttcagatatgcctacaagttttgtagccgttgctgaatatgaccctttaagtgatgacggttatttccttacccaaaaattggaacaagcaggtatccctaacgagttccatttaggcaaaggtttattacatggcagtttacgtctgatgcgtgactgtccggaagttcaacagttatatcaaaacatgctgagtgcgatacgccgcatgtttggcagtgtcgaaaagacatcaatttaa

SEQ ID NO: 64088 - DNA, 1113 bp, Acinetobacter baumannii; identical to SEQ ID NO: 45783

SEQ ID NO: 64089 - DNA, 264 bp, Acinetobacter baumannii; identical to SEQ ID NO: 50200

SEQ ID NO: 64090 - DNA, 492 bp, Acinetobacter baumannii; identical to SEQ ID NO: 50201

SEQ ID NO: 64091 - DNA, 477 bp, Acinetobacter baumannii; identical to SEQ ID NO: 50202

SEQ ID NO: 64092 - DNA, 330 bp, Acinetobacter baumannii
atggatagtacatctaaacgttggaaaaatcgtttatggcaggggaagttagcagcggggtttgcaaattcgggcgggttaagtggtgataaactggcggttctgcaacaacttaatatttttgcgatgcagcacggcatgttgtggtcaggtttacctttaatgacaacaggccatactgaaaccgatttaaaccgtttatcgagctgtttagggttgatgactcaatcagataatgcacctgttgaaattacaccgccgcaaggtgatttagatacggctaaatggtttggtgaatatattgctgggcttttatatagattaaattag

SEQ ID NO: 64093 - DNA, 282 bp, Acinetobacter baumannii
atgattttagagcgattaaccgaaatttctaagctaagaaatcgggttgctcatctagaacctgtttggaagtttgaagcaaaagtatttaacaattccgtgattcctgcacctgtagatgaaactactgcattagatcggcttaataaagaaataaattgggctatagtctttcttggctggatttgccaagatacgcatgcccattacattaatactaattcataccgtagattgcataatttatgtacaaaatctggcttagactcattagttttataa

SEQ ID NO: 64094 - DNA, 570 bp, Acinetobacter baumannii
gtgaagcagtttgaaaagcatggtaatcagcttattagagctgctcgtgaggtgggggttgatccacaaaaggtcattttaatttcaggcctggagagttcgtttattgctaataatgtttctgaatcaggtgcaactgggttaggtcaatttactaatggtacgtttatggacagaattaaagcttcaaaacaccctgaactacaagcactgaagggaaaaagtagaagtgaaattttaagttaccgtagtaatccaagaattgcatctttagctctagctgaacacatcaaagatgctgaggagagagtaaaaaaatcttttagagcaaatgggatcaactcaccagttacattagctgatatttatacagttcataacattggcaatccttcaatggctgttgcagcaagaagagagcaattggctattgcaggtgtaagtgtaaaagccctgaagcttaatagtggtctttataaaaaagggttgaatacaacagcaagggagtatatggaaaccgttgatcgtaaatttaagattctggatactaagttaaagaatggcaactaa

SEQ ID NO: 64095 - DNA, 3051 bp, Acinetobacter baumannii
atggattttgtgattgaaacgtactggaatgttgagtccacatatttaactttaaattttatagcggctttcatgggtggcagtggatggttaggtctacttaaatttgtatttttgtgcgccttgatgaccgcaatgcttaagtttgcctatgaccgagatattggtgatttacttaaatggtttgcacaagcatatttattagttgttgtttttatggcccctgtaagctcagtggcagtagtagataagttgaatcaagaacctccaaaagtggtaggtaatgttccctggttgatagcaggcacatcttgggcaataaacactgttactggatggttggcagtagagtatgaaaagcttgcaaatgttcctggaagtttaagactaacttcaacaggggatatgggattcggtcaagctttaattagaaatacaaatcaaatcacgattacaaatccatatttacgtgcagacttgatgcaatatattaaggagtgtgcactttatgatatgcaagatggagttttaagtgttgatgatttaatgaataaaactaattcatggtcacttatgttctctaaaactaatccagctcggtttgtaactcttggtacagttaagggtgatccgaaaacttattcctgtgttgatgctgcaagtattttagataccaatgtaacttcaggcgtagaagcagctatgcgttactatggaaaaaatgcattcaataattttaatcctaatgttgcatacaatatgtatgttggggcattaggtcaaagctattcatggatcttaggtgctaatcaaaatgcatctgatgcggttaaacaagctatgtttaacaatattatgcgttcagcaaattcagagttaccagctttaataaatgatccaacacgcatacaagaaattattgcttcaggtggagctgcaatggctgctgaacaatcaaagggcagtgcaaatgtagtttctaaattagcttttgaagcaattccaactattcgaaattggttagaatctgttttatacagcttatttcctatatgtgttttatggctagtaatagcacggccaaataatacactgaatatcctatctgcctatttaagtagctttatcggtctaggtcttataccagtattttatacaagccttaatcacctttcgatggtttatctaaaaaaacaagctgaagctatggagcttgctcaaggtgttcctttttctaagttatcagtactagacagcactgtgattgatgagcaagctatgttgggattctttgtcctaattattttgctgttagctgcatgggcagcaagggcatttaatggcgggatattgagtgttgcaccacgcttattatcttctatgacctcagcaggttcttcagttggtggaagcttagcgatgggtaatacatcgctaggggaaactgctttagacactaaaacagtaaataacacgtcaatgaataagtatgatggaaacttaagcatgagccgtggtttgtcaacttatacaaatgaatcaggaacgtcacacactataacgcctaacggattaatgaatactcaaaaacttgaggacgttgtaccgcattctttgcatacaggacaatcaatcaatagatccaatgagcaacgttatagtcaatctacagattcaagtttcacacgatcaacagatcaaaatgttgtaagtggctctacaacttcagatagtttctctagaacacagaattatggtactgagcaaacaacaggagtttcaaattctgttaatagaggtacaaacgtttctaatcaatatgatagtggtattaatgaaaataatactaactcgacaggccatactttagaggatggtcgtactgtttatactgctttaagtactggtatttcaggacatggaggaatcggagctgctggtggcgttggtggtgataacggtcaacgtgtagcaggatcgcctactaatccaggtcaaactatgcctacaggtaataatgccaatgcatcaaatggtgcttcaggaggaactggaggaaaaggtggtaaaggtggtaaagcaggcttcaatgttggtgcggatgttaatgctcaaggtcaaatgggtgttaattacaatgcaaaccaatctgattcaaaatctagtacaaatgctgttgatcaataccgtagcatttcaagaggtattggtacacatgctggaactgactattcaagaacagatactggatctgtaaactcttcaacaggtcatggctttgaaacaagtgcatcaagatttaccaatacatcacatactgatggtcaaaatgcatctatttctgaccgtaatggatatgatcaaagtactgcctactcatcttctcatcaacttgagcaaggctataatcttgctgcaagccctgaattcaaacgcgatgttgcgaagcattttgaaatggatcaacttcaattcagtaatttacctgccgatgagcaaatccgcttaatgaagcagtatagagatgaagaagttaatgcaattcaaaccactccaagtagctatgagaatggacagccgattgctttcaatcttccaaaagactttaatctaaatcaaagtaaagtcggctctactaaggaaattgatagtgattttcagaaaaatgcaaatcgtatcggtacaaatatagagcgtgtgaatgctgatacaaaagcacctgagagtttatcaagaacgaatagtacgctagaggatgtaaacggtgaaatgaatcgactcaacagtagtaaagctgaagagacgagagaagcaagtaataaaaaggccgagcttaaagacagagttgatgcacgtgcacgtgaagatgtaaaagatgctgcttataatttagctagttcattaagccctaaacaaatttggaaagataccaaagctgcatggaatgatgtgacaggtaattctgataaaaactcagataacagtacacagataaacaataatggtgcaagtatcggacaatggagcaaaaaagacgttgacccaaagtaa

SEQ ID NO: 64096 - DNA, 1440 bp, Acinetobacter baumannii
atggtgttaaaaatgaaactaagaacaatatgtttagctttattctgtatatctatctctactgttgatgctgcttcaggtacttcaatgaatgaagtatttgaccagatcaatgctacaggaaatgttacgacccctaccgcaattcaagggcagacgatgaactacaccacaggcggtagtttatttatgcgtatgccaaatacgacctataacctagctgcaattacacccccatcggcgaatgcgggatgcggcgggattgatctatatatggggggattcagctatgtaaataaagagcaatttgtagcaatgttaaagaatattggttcaaatgctcttggatatggatttaagttagcacttcaaaatctttgtccgacttgcgataacgtaatgcaagcattacaagctgtatcccaacaggtgaacagactcaatattgactcatgtgaagctgcaaaagggattgttaatgcagcattacctactagcgttcaacgtggccgtgaacaatcatcaatgagttggggaaatattaaaaatatcttcagcgatatgagtgaaggctggggcaaggttaaaggtaatgaccaagctacaaataatactttggaacaaatcaaaggatctgatccagtaattaaagatcaaattccagaagggaatttaacatggagagcgttgtcaaaaatttctgcattacccaatgaacaaaaatatcttgtgatggcaatgataggaacaattgtaattgacactaaaaacggtgcaccaaagattgttgcctatccaagacgaattgataatatctcaacattaatcgggactaatacagcaacaaataaacagtttcctgtttggcgttgtgttgacggtactgctgaagatgaatgtcgtgagttggttcaagataatttaacaactaatgagactttctatacccttgttgacaaaaaaatgcgtttattggccgatgcaattacccaaagacgaccaataggggatcagaatagtattattcaatttattaacttaactgacataccaatctataaaattattgctcttaatacacgttatggtggtgatagcacagcagcaatggcagcaatggagcagtataaagaattaattgcagctaaatacgctttagcgtatttcgaaatcacaagtaagatggttgaagctgcattaagtaatattgttgcaggaacttcggatccgatgacatcccaagaaattattaaaattcgtgaaacattagataaaacaagatcagatttaaatcaaagtgttcaaacggcatattcaagatcaaatgtatcatggaatattgcacaagaagtgcagcacatggagagaacactccattcaaacttaacaccagcattacgacaatcaattgtctttgctaacaccttgaataaaaaataa

SEQ ID NO: 64097 - DNA, 810 bp, Acinetobacter baumannii
gtgaataagttacttgctgtggttgtggctttaagtgcatttaatctcaatgctaaatctgcattagattacgattctgtatggaaatgcgacaacaaaaaaatgaactggtactgtgatgaaaagccacagaaaaaaacttcaccgttggtaatgaaaagaccagttgcggatccgcaacttagcacaacacctttgttcaaagatttaaataaattaaagacggtcgaagaattaaaagctgaagtacaaaatcggttgaacattgcaacaatgaatccatctccgcaaaatgtagaaagatatattgaagcaaatcaatttatgctggataaatcgactgtttttgctgatcaatggcgaagagttgtatatcagaaaccgcagtacgattactcgttaaaaagtccaagtaataactcagcaatacgtgtacagaaccaggtcaaaacagatcaaatggataattacctaaaaagtctgagtaaggaacaagggttaattttctttttccgcagtgattgtccatactgtcacaagatggcaccgactttaagaatgctatctgataaatatggaattgaagtgcttggtgtaactattgacggagggggattacctgatttcccaaaccctgttgatggtagagccgtagcacagaattggggtattgataaagtacctgcaacgtttattgcatctaagaaaacaaaagagcatgccccgataggttttggagttatgtctctaaatgaagtgatcgaacgaatctggatattaactaatactaaaccaggtcaagatttctaa

SEQ ID NO: 64098 - DNA, 2676 bp, Acinetobacter baumannii
atgaaaagattaatttctgcaatcctgattacttcagcatttttaaatccagtttttgctcaaactgctgagcaagaagggatagattttgggcgtaattcaattcaaggtacttcagaattggtaaatactaactcaggccaaaatacagttccgagatattctacagatgcacccgaatcaagttattttcaaaacggtctagggaatattaatgctgtaggaaacaataaagttaataattgtttaaatggtcaggcgggtacgaacgatcaaaacttggaatgtgaagctattaatttagtaaataaaagtgctacttctagacctatatacagtattgatcctaagaaagatgaggttatacagtctagtcaaaagattactaaagaagcacctaaaaatcttgaaaatggtcaaacttgttttgtcaaagaagtaaaagtcaaacctgtctatgaagagcaacaatgtatgcaggggcaagctttctcacaagcgcaatgcttagagcagacagttaatgatgtttgtcctgtaagtgtagacgggaatatttgtaatggtgacacgggtattgatgcaaagcaaatctcaacaagtggtcaaaataacgcctatattagatatcaaaacaataaaatatacatgggtttaggcttagaaaatacaaagcgtcctttaggtagctacagtgcaacttataaaataacagtaagagaaaagtctaaacttggatatgtaaagttagttcgtagtatttacgatgatggttatatattaagaattaatggttcagaagccttagctgtcaatgtcaatggagagggcaataacgtagaatggacgactgacaaagatctaagtccttattttaaagaaggtgaaaatacacttgagttgattgtatttaataccgtagataacagtcagtaccgagctgatctcgaaattaatattcctctatattgtgaatgtaccaaaaagaaaacaaacacttgtaatgatgaaattaccaaaaacccttcttgtggtattcaaagtaatgtttgccaggaaaaggattggaaaggtaattgcgttgtaaatttgcagaattatgtttgtcgagacagcaacttctatcaacagagaaaaagttgtgaaacaacaaaattagtgcaatgtagaaacccatctggtgttgtaaaggacatctctacttgtgatcaaggcgttgattacgaaacattgcaaatgacacagaatgaaggtaatgggagctttaataaatcaccgacttccttctccctaagtacaagtggcgatgatggtagaggaagatcaagccgtagaaactatgcagttacctttaatattaaggatgttaattctacaaacatggtgttgaaacaagttcattacgacaatagaggaatcgtgtacgtaaataattctgaagttttcaatcggtctacaaatacaaatcaaactgacaatgtcagtattaatttacgcccttatctaagaaacggatcaaatacaatcagattgtatatagataactgggatgggccttggtctggaagcattaatgtagaaacaaattaccaatgttcatgccaacaacaagaaattagttcttgtaatgttagcaatacttgtaaagtagtttctgaaacatgtactgattcagccccaagaaatatcaatggagtaatagttaatggatgttggaaatcacaaaaaacatatagttgtgaacaaggtggaacaacacttagtgattgccaacagtttgttaataaaggatgtgaacaaatcggtagtgtttgtacagcaaaagattctaatgggaaatgtttaagttacagtcaaacttatcgctgcgaaaaaacaccagcacgtacagaaaaccaaaccatttgtgtgcaagctaattgtattgatggaaagtgttatcaagaatcaaacgaaccagataccgattttggtcaagcagtggcaatgatggaggttgcacgtgaagcaggtgtatatggcgaagtagatgctactaagaccatgaaagtattcaatggtgaaggtggaacatgcaccgttaaattattagcaggccataatattatgagctgttgtaaagaaataaaagtgaatgtagacaaggctagtaataactcaactaatagtaagcaatcacaagcaatgggaaataatccagatcagcctgcccagcaaactgaaggatccacctatcaatatgatgatctctacaatgatgattcaaaaacaatgacaagtcttcaaggtgatttaactcttggatggcttgaatgtactgaagaagagagaggattggcggttaagcggggtgggagtttgtgttctcatgctaaaacttggtgttcaaagagtttgcctttaattggttgtactgaagaaagtagaagctactgctgttttaaaagcatcttagcaaaaatcattaaccgtgaaggtcgtaagcaactcggcttatctctggaaacttgtgagggtatttcagttgagcagcttcagaagctagatttttctaaaattgatatgactgaatttactgaatcagttgtaccaaaaaatatagatctaggtgatcgagctgaaaaaattaaacaacgagttgaaaagcaaagtgttgggggatattacagtgaataa

SEQ ID NO: 64099 - DNA, 708 bp, Acinetobacter baumannii
atgaaaaaaattctgttagttggattaatctctgtttctttcaacgtatatagtgcggattttccaagtgaccaagctattcagcaagaaatgcaaaaagtgcaaaaccaaaagttttctcaacaagattgggaaaaggctcagcaaaaagctttagagcaaattgagaaaactaagtcggtagaagcacggcccaataattttcctaatgtccaagcagtaagaccaacaggtatagatattggcaatattgcagcaaggtacaaacgtaaagttgaaactaataaaagcattgatggtgttgtagcatttgcaagcttatctatgccaaaagaatcacttaaaaaattagtaatagatgtatcaaatgttggaggtgcagtagtcttcagagggtttaaagacgggaattatatggagatggcaaaggctatctcacagataggagtaaagtcagccaatatacaaataaacccaaccgcttttaaacaatataaagttgaagctgtgccagcaattgttttggtaaaacctggagctggtgaaagccttgatgaagagggctgtgttcttcctgaaaaccatactaaagttactggtgatgtatctttattgcatgcacttgaactaatcgaaaaagaagataaatcttttagctcaatagctcaacgttacctttcttttataagaggaggtaattcaaaatga

SEQ ID NO: 64100 - DNA, 1044 bp, Acinetobacter baumannii
atgatcagacatttactagctgttttacttctagtgtttacaagttttgcatttgacgcagaagataacaattcagaatcaaatcaaactaatctgcgttgtcctggtgaatttgcaaatcctattacggatatatgctggagttgcatttttcctatttcaatgggtggtatgcctttgtggactggtggacaggaagataacaggaatccatcgcaattattttgtagctgtgcagttcctagaatctatttaggtatacaaactggattctgggagccagtaagacgtgttgatgttactcggacgccttactgtatggtgtctttgggtactcaattagatgttggcgtaacagcgccagaaggtgaagtaagactccatagtgataatgaccgccattccttttatcaggcacattggtataccgatcccattatgatgtggttagaaatcatatatgaacatccatgcacagaaactggttactttgatattggatatatgactgaactagatccaatgtggaatgatgatgaattgtcagccattctttcacctgaagcagctctctttacaaatcctgtcacacaggctgcatgtgcaggagattgtgttatggcttcagcaggatttggttctaatgctttgttttggtgtgctggatgtaacggttctatttaccctctaaatggaaatgttggtgctcatgtaagtcatattcaagcatcctcacttattgcacaacgattagcagcaaaaatgcaccgtcagtttcttacatggggtactaatggtgaagcaggcttatgtggtgtctacccacaaccagtaatggacaaaactgcatataaatatcaaatgctatatccagttccacaaacaaagaaaatcaatggaaagtgttgtcagccttttggacggacgacaaccgtgtggggtgcaggtaaatcatggcctgtcacgggagagcatttttcttatgagctatttagaaagaaaaactgctgtctaggccctatttcacctttttatgtatattga

SEQ ID NO: 64101 - DNA, 639 bp, Acinetobacter baumannii
atgaaattttctaaaaccattatcactgctttatgttgcggatccgcaacacttattagtgcaaaagacttaggaacgcatggagctgtctacaagattcaggaaccagatgccctagaacagatctacgataaattaaaggctatggagaaaacgggagcactacagaaaaaacaaaaggaagctgtagaccgtgctttaaatactgcaaaaaatccgaagccagttgaaaacattcaaacagcaacaactcgtagagtccgtatgtttgatccaacaatgagactttctaatgacattactactgatgaaggcttagtggttgcgagagcaggaacgagcgttaaccctcttgatactgtgacaatgactaagactcttgttttttttaaaggctcagatcctgagcaagtagccgcagtaaaaaaactagtagatgcatataaaaaccgtattacacctcttttagtcgatggttcctggtacgaccttacaaaatcatggaaaagacaagtttattttgatcagcaaggttatatcagccgaaaacttcaaataacgacagtacctgcaattgtgcgtcaaaacggaaaacttctagagatatcagaagtaccagctaaggagcttaagccatga

SEQ ID NO: 64102 - DNA, 498 bp, Acinetobacter baumannii
atgcgtgaaattaaacgattccgagctacacgagtcattcttgtgaccatgtttgcctttctattactcagccttgcattgttcatcagtactaaatggtacatctatacgatcaatatgacgcaaagtttaaatggcagtatttatgtcatcaaaaaaggagcaccagtacaaaaaggtgatttggtcggttttaaatggaatggaaatattaaatatcctaaagatgccatttttgtaaaagttgtttcaggtgtagaaaacgatcacatcaaagttaatggccgtagtgtatttatcaatgataaatacattggaaaagcaaaagagtatagctctgatgggaaaatcaaattagatgtaattgaaccacacaagattgagaaagacgaaatattcgtgagcacaccacataaggacagcttggatagtcgttatgcattggtaggaactattaaaaaagacattatattggggaaagcttatgaaattttctaa

SEQ ID NO: 64103 - DNA, 417 bp, Acinetobacter baumannii
atggaaaataaagaaccaaaaacacgcagcaacagcatgatagatagacttacatttattgcaagttcagcactaattgctttgcttgttacagcgccacttattttttatatagattatcgtaaggtcaaaattggaacaattaacgttcaaagtttggttgtagagcatgaacggaacttaactaatttactttaccagggagtaaaaaatacggaaagtgatcaagttgatttgacgcaacaaacaaaaattgctgaggttgagaatcaaagatttgcaaagaaacttgatattgcagttaaaaaggttagtgaagaatgcaattgtattctaatcaataaagcagctctattggctgatacaactagagcaactgattatacccaacaagttaaaagtgctttgaaagactaa

SEQ ID NO: 64104 - DNA, 2703 bp, Acinetobacter baumannii
atgaatgcgaaagtgaatttcaaacaaatggtttttaattggtggcgtgtcaatgtacttggtgatgaccctgatggtaaaagacctacaaatgtagatttagcaaataaaattttagattcatacggtatgtatcagatttttaagctagatatgtatgatgtgaaaaagcaactgtactataacgaaggttcagttgggttcgcacttgagttattacctcaaacaggatcagatgaagattttgtttctagattagtaaacattgtatctaactttcctgctgaaactggtatccaattacttcatattggtactcctgttttagatgatgacttgcaagcatatcttgatatgcgttctaaattgtttattgataagaaagtaaataatttcgcagttgaatttgcaaaaaataggattaagcatgttcaatctcggaaaggaagaccgcagtttggccctgattcatattatgtaattaaacgaccgaaattggttttatcggtaactagatcaggcaactatcaagacaaagctcttgtttcacaaatggaaaaaatgtgtaaagcggtttcaagccaattaacccaggctaaactacctgctcaagtattaacaccacgactcctattaaaaataataaagccgttgttagatccagagggtatgtttaggaacttacctgctgagcatgaatttgctgtacctaagtcttatcctacagttcaatacaatccactcgatagtataaaaactcagttaacacctttaggtcatgttgctgaagtaagaacacgtgaaattgtttttgggccaaaagagcagatcaatattcaagaaacatcctcaaaagttgataaacctttttgggaacaggatgatgaagatgagaaaattgttgataaaagaattgcttttagagcctttggtataactggatatcctaagacaaaacagctatgggaaatgagcgatattattggattatttaatgataattctcaacaatatccttgcccattcattatttgtacgggtatttacatcctagataagaactcttcagaaacaactgcaagggtaaaacatgcacgtgcgaagcagaacgcagaatcaaaaatggctaagtggcagcctgaatatgcagaaatttttaatgattgggatgcaattgttcaccaccttcataaaaacggagcgatgtgtgagctatacaatactgtaggtatttttgcacctttaaatgaattggataactactcccaaaatgtaattaatatttggaagtctaaccaatttaatatcatgaccctgaatctccttcagttacccctttattatatttctatgccgatgatcctaagcaaaaaagctagggatgatctaaaaaaacttcgctatctgagcactaagaccactattaatgctgttgatatgatgcctcttatatctgagtggcaaggctttggtcgtccagtcattatgacttttggtagacgtggagtaccttgtttttttgacctattttctaacaaggctggtaactacaatttttatatctgtggtgtttcaggagcaggtaaatcggtcttctcgttagaaatattggcagcttataagagtctcggatataaaatttatattcttgatgtcggtcgttcatttaagaatttcgttgcattgtcaaaaggccaaactatcgactttgccaaacgcgaacgaatttgtatgaatcctttctcttggcttgaggtagttggggaggacgaagatacagagggtgattttactttaaatacattcgcacaagaaatgaaaatgcttttgccaatgtatgcaaagatggcttctcctgaagcgccacttgatgcttatgaaaaagctttaatgtcaaaagcaatcaagcatacatgggatgagtttggtcaaaaaaatggtgttgatcaaatctctgattaccttaaaaccattactgatcacactggaaatattgatcctgttggttggcgtttgggaactcagcttgagaatttcaaaacaacgggaatgtatggtgcatatttcaatggcgaagccaacattgatctgaacaacgatactatttacttagaacttgaagaactaaaagattctccagaactcaaaaccgtagttttgtttggtgtaacgaaccgcatcatgcgagacatgtacttatcaagaaaacaaggcaaagtcatgtttattgatgaggcctggcaattacttgatgatactgctgaaactgctgcatttattgaggagggttatcgtagagcacgtaaatacaatggtagttttggtatgggaactcaaggtattgacgatgcttttaaaaatgatgcggcacgtgcagcctataattcagcagactggaaattttatctacgtcaggatttagaatcatttgaaaaattaatatctgagaagaaggctaacttctccgacaacattgcacaccaaattagaagtttggatacgcaaggtgggatgtattcggaaatcatggttacttcaccaaacggcaagcatattgtacgtcatatcgctgatccattttctcttgcaatggcatctactaatgctgatgactatgtatatatcgaagaatgtattaacaaaggtatgagcaccgtagaagcggtatatgcgcttatgtcacttaaagaggaagcagcataa

SEQ ID NO: 64105 - DNA, 633 bp, Acinetobacter baumannii
atgaaaaaatcattaactctttcagttcttatgttatctcttagcggatgtgcagtatttagtgggggttttgatggcactggtgggcaaagcacattctcatgtaaagcccctgatggagtcatgtgcgatagcatgactggtgtcatggcaaatctaaatgctaataacctaccttcacagcaagttaagcataagcaaaataaacaaaacgtacctacgcaaaatcaagctcgaacaagggcgactcaagaaaatgcaatgcctattgcaccatattccccaactccattattgcgtcaaccaaaaacattgcgggtttgggtagcaccatacgaatcttcagatcgaactttatttgatcagcaatatttttatatggttattgatacttggaaatggggtattgagcataattcgagacgtttacaagatgcttatgcccctgtcggtgctccaatcctaaattccacaactacagttgttgcggatccgcaacatcaagcggttgataatgatgctccaattccagtttcaaatagtaatacacctactaacggtcaacttactaatggcatcaattcagagatcaaagatcttaatattgatatttctaaatttactcgacagtaa

SEQ ID NO: 64106 - DNA, 738 bp, Acinetobacter baumannii
atgaataaattaaatctatctatcggtatcttattagcaattgcaacatcactaactcatgcaactaagactgatgatgttaaagccaaagtgttacaaaactatccagcaacaacagtatctcaagtaaacgaaacgccactgaagaatatctttgaagtcgttatgggtaaaaatgttgcctatacggacgaagaagcaagatattttatctttggcaacttgtttgacatgaagacacagactgatttaacaactactcctagcaataaaattgaaatagggttcccatctaaagaacgtctaaaagatgccgtcaaaactgttaaagggaatggaaaaagaaaattagctgttttcagtgatccagattgcccgtattgccaacagcttgagcataacctgcaatcaattactgatgtaacaatttacacgttccttttccctcttgagagcttacatccgcgtgctaaaggaactgcaatttcaatatggtgcgctaaagatcaatcaaaagcctatcacgaatacatgcttaacaataagcaacctcaagttaagtcatgtgaaaacccaattgatcgcaatattcagtttgggggaagtatgggaattcaaggcacacctagtgtgatctttgaagatggatctctcatccctggcgctattagtgcacctgaattagaacgtcaattgcaggaagcaaataagaaagtaaatggagggataagcaaatga

SEQ ID NO: 64107 - DNA, 1323 bp, Acinetobacter baumannii
atgactgattctttagaaacaaacccaaacgatcaaacaaagaaaaaacagtttcgaattattatggctgttcttatggttgtctttgttgggatagcagcattcttatttatgggagatgatgcaccaaaacaagaaacaacaatagaaacaggaaatgctgctgatgttcctatgcctggagattcttctgcccaagatgaatggagaatgaccgcagcacaagatgctgagcaaacgaagcaacaagtaaatgatttgaaaactcttgtagaagcacaaacggctcagaatcaacaattgcaaaaccaattgaatgaaactaaccaaaaattatctgaagtcgctacaactaaagcttcaagagttgaaacacagcctacaaatacgactccaccaagcatcggctcaagtggttcagccaattaccctaacaaacaggggcttcatggtaactcaattttatcagatccaaacggaacttctgtagacccctctactggtcaaatcattccactagcaaatcagaatatgaatgagtcttataaatcattcaatgttattgattttactaaatctgatgatggtgaagatgcaactagtgcttcaactggaaatactgcaccaacacaaccgaaaggctctacgacatttattcctgatggttctttcgttcgagttgtcatgatcaatggtgttgatgcgcctactggtgggcaagcccaaagcgaccctattccagttgtattccagacagttggcaaaattgacatgcctaatagctacaaaatgaatattaagggatgtcgctttgttgggttggcttggggtgaactttcaagtgagcgtgttaaagcacgtattgaaagtggtaactgcattattaatggacagaccgtacagatcggaattaaagggcagatcgtaggagaagacggtaagactggcatccgtggtcgtgtagttagtaaacaagggcaaatactggctaaagcggctctagcaagtgctatggaagcagtaggtggtttatatggacagactgttggtacgtcaagtcaatcagcgttaggaacagtacgaacaattacaggaagtgagttaaagcaagctgctgtaggcggtgcaatttctggtggtgctgaaaaactttctgacttctatatgcaaagagcaaatgacatattcccgattgtcgaggttggagctggccgtactttagaaattatggtgcaaaagggcgctacggtggaaaacaagtttttgatttcctctaaagcaagtaattcgggcgcaaaaaaacgaatcttaatggatgactaa

SEQ ID NO: 64108 - DNA, 720 bp, Acinetobacter baumannii
atggtactcaataaattagctgtctttacagcaagcttaattatttcagcttctgcctattgtactcaacatattactaaagctgataaacaatccgtatccgttgcagtttcaaataaagatctcaatgttttatatgttgatggtcggaaaatggttacagctacaccaagcaattcaaatgctcttgaatatcaaaaagacaaaaatcaaggtgcgctctatttcaaaattaaccctgcatttcaaaacacaacgataccagttttcgtcactgatgattatggaactcgatacaaaatcgagcttcaacctaaaaatatgcctggtgaagatgttgtgcttgtaccaccagcagaaagcgaaacgagtgtagggaaacgaaatcagtcatatcaacaacaaatcaaagagttgatttatacaatgggagatgatgcggatagcccacgggatgagttagcaatagacgggatttcaagaagttatattggtgcagatataccactatggaaagaagcaagtcttaagcttttaagaagatatgatgctgatagtggcatgtatggggaactataccaaattaaaaatatctcttataagcctttaaacatgcttgagcaggagttttatagaaaaggcgtagcagcagtttcagtggaaaaccttactttgcaaccaggagctacaacattcttatatgtagttcgagagcagtag

SEQ ID NO: 64109 - DNA, 579 bp, Acinetobacter baumannii
atggatgctgaaagtggtaataaaactatcaattcaatgcaggcaagaaatagatcacaaacagttgtgatcttttctttagtgggtgtgattattggactaataatcgttttgggtatagcacttactaacaataaaacaatcctacagttcccaggtaaagattctcaatcatttattgtaggaaatacaaccgcaaaccaagaatactttgttaatgctgctgattacttcgtaaacaagctatacaacgttacacctatcaatgctcgtaaaaactttgactcaattctagtagctactgatcaaagaacatacccacaaattaaaaaaatgcttaacgaaactgaatcaagaattgttaagcagggcattacaagtgtgtggtcgtcaagtggggcttttacctatcaggaatctgaaaaaactgtaacggtcgaggggatgttaaagacctaccttgctgatcgcctagtttctgaagaacctaaaaaacttaacattaaattctcaatgaataagggaactattgctctttattcaatgggtgaggtgagagaaaataatggtactcaataa

SEQ ID NO: 64110 - DNA, 294 bp, Acinetobacter baumannii
atggcttcaggaattgagttattacattacgtaccgagcaaaattgatgcaaaggggaaattctttgtttgggatcaagatgttgcttttgcagcttttgcgatgttccttacagggttttattttggtcaagctatgcttggtgggttattaggcttaggcattgcttattactataacaaagctaaagctggcttacatcctgattacatactccacctatcttattggataggtaattcaccaaaattcaaagaattacctgaatcacataaccgtcatttttatggttga

SEQ ID NO: 64111 - DNA, 351 bp, Acinetobacter baumannii
atggaattaactgttcctaatccagttcaaaaattaaacgttctagctaaatacgagcgtcctttattagttgcatttgttgttatggcagcaatgcttctttggatggggttatcaactgctggtactgcaacaggtgttggttcgcaattcggtacttgggcaacaactcttgagggctggattaaaggcccttacgggaagatgaccatgttattcgcattgcttattgcaattggtgcgtttgcttggactcgtgacttgaaagtaattgtgattcctgttgttggtgcaattgcgattggtcttgtcgtttctttaatcacaggatcattcacagcattgatctaa

SEQ ID NO: 64112 - DNA, 231 bp, Acinetobacter baumannii
gtgaataagaaattaagcgtattaatcctatgttgcggatccgcaactggagtattcgcaaaagatgaaaagagtgcatctctgaatgaagttaatccaattacccgttatgtgaatgtttgtcagcaaccagggggtaacgaaaagaagttcgttctttgtgactcaaaagataaaagctgtgcacaacctgaagaccgcacagtaaagcatttggcaacagccaaataa

SEQ ID NO: 64113 - DNA, 606 bp, Acinetobacter baumannii
atgcaaacaactcaaataataacagtaaagaaagcaatcattccaattaatgtgatggctttggcaattgtcattagttgttcggcaaatgctacttgttggaatgaggctgccgcaacttacggccaagatccatatcttcttaaggctatcgcttggaaagagagtaagggttatgtcggtgcagtaggttcgttattgaaagacggcaatagagcacttggtctaatgcaggttaatacgatccatttaaataggcttagcaaaattggagttagacgagaggatttatttgatccttgcgtttctcaaaaagtaggcgcttgggtgcttgctgaatgtatggataaattcaaagaagtgtggcgctcggttggatgttattacggtggcccatattcaagagcttacaccgcaatgaatctctacgctcaagacgttaagcgttattacgaacaatataagcgcaaagctggtctgccactcgaatacacgcctatttatcaaaataagttcaatcaacaatggccttctgtgactgcaactacagaagaaaagccaaagatcaaaaatacaaatacaacttttgaaattatccaattttaa

SEQ ID NO: 64114 - DNA, 297 bp, Acinetobacter baumannii
atgagcgaatatttagacgcatctcaaatcctaaaaactgaaattcctgcactcaaaatggacactccaccgttagcattgaatgaaagtgttaaatgccccaaatgtgaaagtcgaaatctaatactttttataaacaaaaagatttcagatgtaattcactttaataatggtgatttagacttcaaacaacacaatgctgtaaacatctttcatagcatttcatttgaatgtaaagattgcgaaaatagatttagtgatgaatcagtgaaaaatgtagaacaaatattcttataa

SEQ ID NO: 64115 - DNA, 489 bp, Acinetobacter baumannii
atgaaaaaaatttctttcagtcaatgtctagctatcacttttattcctgctggatacgttatctttcaacctgttatatataaatcatcaatttcaggtgttgagaatattttggcattttcaggcatagcaatggtattttggattctgttttgcccacttttcgttaaacacaagttacttaaaaaacttaactgggttggtgctttatcagataagcaattaaaagcactccagactaacaattggaaagaatataaccaaaatagtcatggatttaccaaaagagttacgccatattttttaagaatttctctaataatcaccgcaatctatatagtagattctttactttttcctgtgcaaaatcatacaattaacattcaaaaatatctgcaattaataccattaactttagcattctacttgactggtgtgcttctatttatagcattacatgtaggtatgagtttaaacaaaaaacaataa

SEQ ID NO: 64116 - DNA, 204 bp, Acinetobacter baumannii
atgaaggacttcaacttgatagaaaaatatttaatatactttttcacaatcaactttcaattacgtttattaattagcttattgttcgtaaattttacatatgaaatcttacaaggttttatgggcttgtatggtttactcggaatcttagctagtatgcctatatgtatttatacatacgataaaattagaaaaaaaatttag

SEQ ID NO: 64117 - DNA, 639 bp, Acinetobacter baumannii
ttgaccattgctaaagttgcaagagtgtacttgcgcgtgagtacagattcccaaagtcttgaacgccaagaaaaggttatttctgatgctaggtcggcaggatattacattgctgctgtttataaggaaaaagcttcaggtgcaactatcgacagacctgagcttcagagaatgattaatgatttacaatcaggcgaagttgtaattgcagaaaaattagaccgtattagtcgtctacctttaaaagaagccgaaaatttaattgaatcaattagatctaaaggtgctagattagctattcctggtttagttgatctttcagagataagtaaagacttatcaggaatgagcaagattattgttgatacgattcaagagctattattaaaaattgcattacagatggctcatgaagactatgaacttagacgtgagcgtcagagacagggccaaaaaatacttaaagataaaagattgtataaaggccgaaaaccaaatgagaaggttaatctagaaattatcaaacttaggaaaaagggcttgtcgattagtgaaacagcaaaaggagctaaatgctcaatagcccaagttaaaaaaatctggcgtgaatataatgatcaattaagtgaggatgactag

SEQ ID NO: 64118 - DNA, 210 bp, Acinetobacter baumannii
atgctttttttgcttcttgcaaatgtagggttagggttgggtgggtggtttggtattgttgaatataataatcaagctggtgtgggcttaattcacgcagtaattgcccatcttcattgggtaaaccttgttgctcacctaaaaagattaatttatctgcctttaaataagtcgcagttttggttgcaacttcttcagctcttaaattaa

SEQ ID NO: 64119 - DNA, 687 bp, Acinetobacter baumannii
atgaaccaacagaatactaataccgaagatacaattgacttaaaagaactgtttttttcattgattgctcagtggaaactcattgctctatgcgttattttaagcgttgtatgtgccctactctatttacgtgtaacgccagatacctattcggtagatgctttggttcaggttgaagacagtaaaggggcttctgctgcacttttaggtgatctctcacaaatgattgagcaaaaatcaccagctcaagcagaaatagaaattttaaaatctcgtttggttttaggttctgtgattaaagatttacatctgaatatacaggtctctagcactgagaatacatttacacatcgcttattgagtgatactgattataaaactgaatatgctaaaaaatcggttttatttaaagatggtttaaaaagttttgatatacgtcagtttgagattccagcttattatctagataagaacttacttcttgactttgataaacagtctttacgtttaacagacccagatactgaagaagtcatcttaactgttccattaaaccaagctaacagcgttacaggaccgtatggtttatggaaagttgctatatttacaaaagaccaatttgactcaacttataatattaagaaattatcacttcctttagctataaaatctatcagttcctattag

SEQ ID NO: 64120 - DNA, 357 bp, Acinetobacter baumannii
atgaagagaatcttattgttggcaacagcatcattattaagtttcggcacttttgctaactgcgaaatttactttaatgatccgtcagatattgctaaatgttatgaagatgaatcctttgcgaaagtcactactaatctgaagaaattaactgccctatcgaaagaacagttaagttataaccctaatgtattaaaagaactcaataaatctcaaaaagattggttgacttaccgtaatagttactgcgattcttacagcaattatcatagtgaaagaaacaaccattctaattgtatagttaatttaaacaatgaacgtgctcgtcaattacaggaagatattaacactaattaa

SEQ ID NO: 64121 - DNA, 465 bp, Acinetobacter baumannii
atgcaaatcggtaatcataattacgagattggtcgtttagatgcatttgatcaatttcacgtatctcgaaaaattgcacctattgtccctacgattgttcctttcatgactgagatactgaaaagcaacattatggatctattagataaatttggtgatgatccagacaatccagatctaagcgttttagaggactttgatctaaatagttttggtgaagcgatccagccatttatcgatgcattcgcaaaaatgccagaagaagatgtcaattacgtgatgaaaaagtgtctttcagttgttacacgtgacggggcaaaagtggtagtgaaagatacattgatgtttgatgatttaagcgttgaacatattcttccgcttactattgcagtggtgcgcattaatttgggaaattttattcaagggctgcttacgacggcattgagcaagaaacagcccacataa

SEQ ID NO: 64122 - DNA, 324 bp, Acinetobacter baumannii
atgttgggcttaagtctatttagctggatgtcttgggcaagtggttcattattaggtggtttatttgcagatcaagtcgcacaccttccaaagtttttacaagcagctttagacttcttattacctgctttatttttaagttttttattagcggcatttgaacgaaagcatagccttgtagttgctgtatcgttagtggtttcagctttggcatgttattggattaacttatcagcggctatctttattggcattctttcaggcattttagcaggtctatttaaacattatgtgctgaaacaatttgatgaggttgaaacttaa

SEQ ID NO: 64123 - DNA, 570 bp, Acinetobacter baumannii
atgttaaaaagtagagatttagatggcaatagatattctgaaattttaaaaaactataatcaggactttcagctattacttgatcatactgaaattcatatttacatgaatttatgtcaaatttattctcccaacccacgacaacttatacgaattattaataaattttcattattaaaagaaaatttagacaatcgaaagaaattatttctttttttatttttaatttattctgaaatgagattaattgaaacatataaagagataaattttattgaacacttctatgaattacaccttaatttccatcaaataagatttcgtcaatacgctctaaataggagcggagagcgaagtgaagctgctaagctttgtgactatcttgattatcatgtttactcttttaatggaaattcatctttatttgatttatttttttactatatagagcacattaaatcgtcaagaaatgattataaagaatgtaagaatgcttattaccctactaataaatgctccgaagatttaattgatgagtggcataaatatgtacatatgattgagggataa

SEQ ID NO: 64124 - DNA, 405 bp, Acinetobacter baumannii; identical to SEQ ID NO: 50879

SEQ ID NO: 64125 - DNA, 378 bp, Acinetobacter baumannii
atggtaaaaaccaagcaatttattgcatttccagacaacgttattaatgtttcaagtagctttgattttgaggctcttatttgtgatttgccagagcaagtcataaatgaccttgataacgctattttaaaacttcaatcatttgaaacgtcattatatgcagcctatagagttgcaaatttcaatttaaaatcttttgttgatcttaaactgcttaatttctatcaagaaattgagattgaggatgtgtttttatttattaataaagatggtctttatgctcaactttctgcactagtcaataaccaacataatttttggtttgtacagctaaaaatgtataagaacgggagtctgactgatgaaaatagcaattag

SEQ ID NO: 64126 - DNA, 525 bp, Acinetobacter baumannii
atgagtaatattttttacctaaccaagtacgatgataaggcacttaatcaaatttcctttgatttaaatattgcccgtaaaacaatatttaaatatatgggaatggttggatttgtttttattgttgcaatcatagcgatgattaaaacaacagattcaaatttaaatttcttttttagtactggaatatttgtttgctttgtagtgttgtcggttctaacagtaagattttttagaaattcagcaatgcgaagatcgttatttcagttgcaattaaactctaatgaaatagatagatatctttttagtgattgcaaagcacaaaaagaaagagcattagtgggattaattgcacctggacagatctgcattgttgcaagtaatgatttaggtcaattctttactgctatcggtaatccagattcgatacatacaagtcaaattaatatcaatccgaatgaagtcaatgattttaattttgtaattcaaaacaatgacttctatgcaatcaatgaaaattggtag

SEQ ID NO: 64127 - DNA, 207 bp, Acinetobacter baumannii
atgagtgaagcattaattgtttttcctagaagatgcagtatttgcgatgccgaaaaagctgagcatctgattgatgcaaatggcttttctgcaatggatgaagtgatgtgtgagtattgttatcaagcatttcaacagattcaagctaacactcttgctaaacaaaatcgtcagatgagattaagtaaattaaggatcgttcaatga

SEQ ID NO: 64128 - DNA, 471 bp, Acinetobacter baumannii
atgaattatctagctttaatacctcttcttgtatcactttcaaactattgtcatgctgattttgttgcaaaagtagtgggtgtaacggatggcgacacaataactgttttggatgctcaaaaaaatcaggtaagaataagactggctaatatagatgcgccagaaaaaaatcaaccttttggctcacgttcaaaacaagcactatcagacttagtttttaataaatatgtttatattaaagagagcggttttgataaacataatagaatgatagcaacagtaatgaaaggtaatgatccaattaatagaatcatggttaaagatggttttgcctgggcatacaaagagtatctaaacgatccaattattttaaatctggaaacatacgcaaagaaaaatcgggtgggattgtggcaagatcctaatccaatatatccgagccaatggcgcaggatgcaaacacaaaaataa

SEQ ID NO: 64129 - DNA, 546 bp, Acinetobacter baumannii
  misc_feature (476)..(485): n is a, c, g, or t
atgagaataattagtaaattttcattattaattatcttagcggcaacggctgggcaagtattttccgcatcggagaaagatagttcaataatgtcatctgagcaaattgagttatttcagaaaaatgctctatttatgaaaattccaaaattacaggatcgtcaagattcaagtggatttatactaaagaaggctatggaaaagcttgatacgctaaagacctctgaagataagctatcttatgcaattgcaatgaatcagcagttagatagtggatttcatgttaatgacaattactttcctctacagtggagtaaagataaagaatattttgatgctttttatatggggcttttattttcgataaatgaagaaatcaaagctggaaagaaagataccaattccatagtcaaggagtatgaaaataattttccatttaagatttacgactctgatttgctaaaaatcaaagagtnnnnnnnnnngaaaatttacagcgataaagtttatttaattttaaaaagagtatggaaaacatcaatttaa

SEQ ID NO: 64130 - DNA, 294 bp, Acinetobacter baumannii
atgaaaatcaaatctgcactaattaaactatttgtattagtttcaataatatcacttgcgggatgtacaccaatgcgtcctgaagacggatattttttatcaaaagcctataatatatttttttcaataggttacataatattacttggtgtatttataaaaagtgtgagaggagcagcacttggtattggaattatcttattaatatcagcgtatatagcatgggtattaacgacggctatgtatcctccgatgaatttagtcatcactctaccgtacaaatggtgggtataa

SEQ ID NO: 64131 - DNA, 324 bp, Acinetobacter baumannii
atgaaagacatagaaaactacacagtacctgaacttgaaagtttacgtgtaagagcaggtgaacttatcgagctaaaaaaagagcaagctattgatgatgcgtatgaaaaactactcgaaatagctgaatcagtgggctataaggttgaagacttattagcttatggtgaacagaaaaaaaagaaaaaaacacgtaaatctgtagaaccaaaatatcgtaataaactgaataatgatgaaacttggacaggacgtggaaaaccaccacgatggttagttgcacaactagaaaaaggtgcgaagctaaacgatttccttatctaa

SEQ ID NO: 64132 - DNA, 201 bp, Acinetobacter baumannii
atggctaaaagtattcgtcttagagatcgtcaagctgaacaagttgaggatctagctcgtaaactatcttttgagcacaacataacaattaaagagtctgatattgttcatgcactagttgacaagggacttgatgaccttactttggaagaaattataatcacaatgcagaatttaaaaaaagaaaaatcaggggtataa

SEQ ID NO: 64133 - DNA, 744 bp, Acinetobacter baumannii
atggtgttaaaaatgaaaaatacacaaggtaaagaactaaacttaattcttggcgaccgttatgcatcagtacaagaagtattggatagtaaaactaatttgaatggtactgtagcgtcttggaatctcaaagctttggactctattcatgtaatagattcaataaatgatgatcaaaaacgtaatgaaattgcttttaaaagaaagcgtaaaaacaatgtaataacatgggcactgattggcggagtattggatgcttcatctggagaagacagtattttagatggtgttttattaggtggattattcggctatgcatccagtggcagtgtagaaaaacctgaagcgagcattctcttaacttttactaatggcgataaattaggactttatgttaaccaaaacgaacttctaaaaattatggaagtacaacaagaggacaatttaattgatggaaaaaagattggtaatttaacagtagaacagcagcagatcgttattgaatctcgtagaaatgatgaatttttcaatcaactgcttgcagcagttattatgttaatcggtataggtctttttaactttttgttcggagaggacgtgaagcaagaagttacacatggcgcattactgttatacatagcaaatataggcggaatgctgtgttttatatatgtagtcttatatgcaacaggtgtgataggaaataaaactgatgaagagtttaagaaacctaacgaaaagtaa

SEQ ID NO: 64134 - DNA, 576 bp, Acinetobacter baumannii
atgaaaaccagtgaagacagagtgactaatttttttctgattttatacggggttgctgaaacttttatatataatgttgtctttataacactaatgattattggttatttcttgtcaaataaacttggttatgaccataaaggttttcttctgtttttcttatgttttttaagtgttcagtctattggtaaatcactgtatttatttggattgttgttttattctaagagtttggatcaatttcccttaaaagaattaggtatctttatttcaaattgtattattacaattctcactatttttttcactttctatgtttttgatttaagcctttctgataaaaatacttttggtacgtttagtacattgtgcttatttatcatgatagattttatgcttacaccttattcttttaatatttttagaaattataattttattaaccaacctgatccaatgattgaaaatcccattgttgttgataaaaaaagcaaaggcatatttaattttatctttagtttttcctcgctgactttgggtatgatagtagttgagtatcttagtaatcaaatttaa

SEQ ID NO: 64135 - DNA, 321 bp, Acinetobacter baumannii
atgtttgacacaacaaacgatataaaagtggaagcccaaaatgcatttggagcctatgctctcatagcatcttcaccaaaccgagggcaactttacacttttaaggcgattcaatactctgtacataggatagataaaagtaaaacttatgaattaagtatatttacaggcatgatagtttcaatcaaaagtaacgaatcagatccaacgttgcttgaggttcgctatataaatcctagtaataagtattgcgagatatttgtaactgatatgtcgatatctgagcttgaaagtttaatcaattcaaataaatctacgtaa

SEQ ID NO: 64136 - DNA, 1518 bp, Acinetobacter baumannii
atgccatcaaatagcaggaggtgtaatttgactagttttacagactatacacaaccttttaatacgcaatattcactaaactttgataagaaaattattattgatttttttgcaggcggtggaggggcaagtactggtttagaatcaggattaaatcgcattgtatatgctgctgttaaccataaccctaaatctatagcaatgcatgaagccaatcacccctatacaaaacattatattcaagatgttttcgctgttgatcctattcaaatatgtaatggatattcagttggatggtttcatgctagtccagactgcactcatcatagccaagcagcaggtggtcaacctagaaaaaaagaaatacgtgacttgagttgggttgttttaaaatttgcgggaaaggttaaacccactgtcatatctttagaaaatgttaagcagattctagattgggggccactaatagcaaagagagataaattaagtggcagggtaataacactagaaaaaatagaagttaatggaaaaattataaatagaattgcagatcctggggaagtagtcccaagacataagcaatttttaattcctgatccaaaaagaaagggtgaaacatggcttaggtttgtaagtgaacttaggaaactaggttatgttgtggattggagaaaagatatcgttgctgctgactatggagctggaacaattagagagcgattatttatggtcgctcgatgcgataataaacctattctttggcctgaacgattattttctaaattaccttcttctcaacaaaaccgatggataccgaccgcagtttttattgattgggatgatttaggaaagtctatctttaatcgctcaagagggcctttagcggaagctactctaaaacgtatagcaaagggtttaaaaaaatatgttctggatgctaaatatccatacctcataaatccaaaacactattctgaaaaaattgatgttaattcgacacacgaatttcttagcaaagattcattcgaagctgatttttttgcaccatacattaccgaatttgcaaatgcatctcagcagcgtaattggtcaatagatcaacctttatctacaatatgtgctcaagttaaaggcggtcaccacggtttagtaacagcaaaattaagtaaaaataattacgaaggagcgatgagagttgctgcattcataattaattactatggaaatggggatgcaagagatatacgtgcaccaatggatacaataacaacaaaagatagactagcactggtaacagtttggattcgcaatgaaccctttatgattgttgatatttgcttaaggatgtttaaacctcgtgaacttttccgtgcacaagggtttccagattcatacattattaaccccacatatgaaggaaagccattatcaataaaggatcaggtacacatggtgggtaattcagtgtctccaatgccaatggctgcaatagctagaattaataatccatttaattaa

SEQ ID NO: 64137 - DNA, 777 bp, Acinetobacter baumannii
atgaagaaattttatcaaatcagttttagtggtggacgtacttcagcatatttaacctattacttactacgaaattttagccatctttataactttattgtgactttcgcaaacacaggcatcgagcatgaaaaaactctagaatttgtggacaattgtgataaatattttaactttaacactgtttggttagagccagttattaatccacaaaaaagagtaggcacaacacataaagtagtaagttttgagacggcaacgcgcagtacagacctatttgagcaaatgattgaaaaatacgggataccgaacaaagtatataagcattgcacacgtgaattaaaaatacgtccaatggattcatatattcgaagtcttggcttaaagccgaaagaaataccaactgctattggcatacgtattgatgaatctcggcgctgtacgaagaaagcagaagagtataatttcagatatccattggttactgaacacccagttgataagcaatttatcttagattggtggtcaaaccaagagtttgacttagatctggatgagtgggatggtaattgtaatatgtgttttgaaaaatcatttcctaaattattaaagcaactagaaacaaatcctaaagcgctagattttcatctgagaatggaaagaatccacggccaaacgaacaatcaactcggaatgccagatcgagtttttttccgtcaaaattactctgctcttgatattttaaaaatgagtagacaagctctagcagcagcttag

SEQ ID NO: 64138 - DNA, 585 bp, Acinetobacter baumannii
atgaccaataatcgccataccaggctgagcaaagaaagctcatcacatataaaagatgccagtaaaatctactttgtacggtatgaaagagaaaatttaactttaaaaactgttgtattggtttttctaaatgaagatatgtttatagtcgcccaagatggggatatgggctactggaatgcagatgatgtcgtcaaggctaaacgatcaataaaacgtttaaaccctacttgtgacatatttgatcgtagagattacatcattaaatatgaagataggcaaaaatcaaattattataataagatcctatctgatctcaccctgaataaaactgaaatagctgctcctgaagcaattcaagtagttcaacgcttagaccaaactattagtaagttagagaaacaagctgaaaatatgtttgcagatagagccaattctaatgatattaaagaactgtatgaaaaatattcaaatatagtagataaaattaatgacctgagaaagatccgataccaggacacaaatattgtatttaaaaaatattcttttaaggcatttcaacctttatctaaactcgatgattaa

SEQ ID NO: 64139 - DNA, 309 bp, Acinetobacter baumannii
atgtcacttggtacttcaatgactgaaataaaagcattatttcaaaaattcactaactcaactcttaatgatgaagaaaaaatttatctgaataccacagataaaaaggttatctttacagcatcaaaaatcattactcttcaaatttcaaaaaatcgtattgcttatacagagtacgatatttcaaataaagaaaaaatgagaattgttgcaaaagagactttaagttttagtacatcactaagctttttagtgaaatttcattttgccaaagtacatgctgaaacaataatccaagcagcacaataa

SEQ ID NO: 64140 - DNA, 354 bp, Acinetobacter baumannii
atgaatacagtcactgctacaaatccacaggattcacaaaattctgtaagtcaatctgctgacaatgctacttctaatattgaagaaaataagaccagcaataaacaggatgaagctgaaaaaatagaacatagttacctttcgcctaaagctcaaaaactgctaaataaaaaacaaagtttggttaaagaaatcgaattattggagcaggcattagaagaggaaatcaaagaagcacgtaaaaaaactgttgattcagtagtttctattcttgaaaaaaatggcttgttagatgttagcccgaaagtttggaaatctaaaattagtgaagttgtaaaaatatttaagcaataa

SEQ ID NO: 64141 - DNA, 447 bp, Acinetobacter baumannii
atgggtacaagagtgcccccaggcattaagaaagcatatatagaagcagcgagaaacagtggtttaacgccagcagaatttcatagaaatgttcttataaataatctttctttagagagagtcaagttactaacagatgagttatcacatcaaatctcttcaatgatggaatatatggataactcatttaaaacacatctagaaaagattgatcaacgactagaagtctatgaatcatccataaaacaaacagtaattgataatgcgagttctgaacattcagaagtaatactgacttgcttatttcttctagcagcaactcattacaggaatttagatacagttcttgatttcaataagagacaagttgcaggccaaacactctttgactcaattcattcagaagccaaacaaaccgttaagaaaaaaaccaagacggctgcttaa

SEQ ID NO: 64142 - DNA, 2133 bp, Acinetobacter baumannii
atgaaagcaaaaaataataacggccttatagaatttactcgtggatccgaaatatggattcatcagttcaagatgttcatttcaagtgtaatgaatgtgattctttttggcgtgtgtgcaacactttgtatcgttgctttatacctctatctaaaattagatcaatcacatttagtggccgttagtgtccaatgggatattctaatacgacacgtgttttctaatactgaatcaaagatcccccttaaaattaatggtgctatgcatgagtacaccatccaagaagctcagagaataattgatccatattttgcacaattcaagtcctatgttttcaagtcacttctacttggtttactaagtagtgtcatgttaattgttggattaatttattactggttttcctatggaaaacaggtaatggcagatgaacagatacgaggatctgagctaaaatcaaatcaagaattgattaataaaattagagataatggtggatttagcccatataaattaactggcgtaccacttaaaaaaaatactgaaggaacaaatattggtgtaattggatcgcctggttctggtaagtcacaagtcttccgtgatgtgatttctcaagtaagaagtcgtcaaagaaaggcaattatttatgacccttctggtgaatttactcaggaattttatcgacctggagtagatataattctaaatccttttgatgcacgaatgcctttttggagtccttatcttgaagttgagcatgaagagcattttgatagtattgcaaaagcattcatccctgtagtttcgaaagaaccttattttgaatctgctgcacaagctgttttttctgagattatgcgtgaactttataatcaaggtgataaaacaaatagatctatttatgacacagtttctttatctacagttagcgaaattcactctctgttagaaggtacaccagcagctaagcatgtcgatcctaaaaatgaaaaaacagtgcttggcgtactttcaacagttcaaactaaacttgctgtatttcgttatttaccagactcaggagagcctttttctatacgccaatgggtaaaaaaatctgaagaggattcatgtatatttttatctattcgagaagaacaaaagacaacaattgagccattaattgctctttggttttcggtctttattaaatccgttatgaacttgccagcaatacacaaagagttactttggttgttttgtgatgagattccaactttgccacggatggatgacataccaatgtcattaacgaatactcgaaaatacggcttatgtcatatgcttggctttcaggatttgccacagctcgatagtaagtatggcgataagattgctcagtcaatgttatctgcattacagacaaaaatatttatgcgtgttaatgaaaacaatactgctaaacgtatgtctgaaatattgggacaaatggaagtagcagaaaaaaatcaatcacggtctatgggtattgaatctagtagagatggagatagttttattacacaaagacgcgaacgtttcattgtgatgccatcggaaattatgcgacttcctgaccttaaaggttacttaagaatccctggagattttccagtaactttagttcaacaaacctatcacccacatacaaaaaatcaacctccacttgttctgcgtgagagtctaagtgctatggcaattcttacaagtaacgatgatgtagaggaagaaatagatcattctagtaatggtatttatgatcaagttttaagtcaaaataatgattttttagctcaggattcatcatacgatcataggcaagaagctgattatctagagccagaatctcaagatgtctatcaagaaacatccaatgaacaaaatgtatctcaatcagttcatgacgataaaactggtgaatatgaagatcaaaattatcatgatgagcttgatgaaaaaaagaaagatacgagtagattagcttcatttaaaaagtatgaaaatgaggatagttccagccaagttgatacatcatcacagtcaacaagtgagtcaactaataactccaatggtgacttattttcaaactactttggcgacaacaataattaa

SEQ ID NO: 64143 - DNA, 3180 bp, Acinetobacter baumannii
atgataggtgtcaataatgtttctgagacaggacaagcgttaaaatattatcaacttgataactattatacgaatagtcagcaggctttagatcagactgaatggtatggtcaaggagcgcagatacttggtattgaaggagagcaagttgattctaaaacgtttgcagatcttctaaatggaaagattgatgatcagcagttaggcagagttagagtcgatgatcaaggtaataaatacatagagcacagagcagctatggatattacttttagtgcaccgaagtcagtatctattcttgctgaagtttatcaaaatcaggatgttttagaagcacatcaaaatgcagtcaaagaaacattatcgactattgaggagaattttgttcagacaagattaagtgaagatggacaaaaacaaaaagttgatagtgataatttaatagttgctctctttaatcataatactagtcgtgcattggatcctcaaactcatacccatgctgtagttatgaatgcaacatttaatgataaagatacttggtcaagtataagtaatgaagcaatttatgcaaatcagtcagtaattggttcaatttacaatgctaacttggctaataatttaaaggaattaggtctagatcttgaagtaaaagataacaaaggtaattttgaaattgcgggattttctcctgaagtattagaagaattttcgcaacgtagaaaacaaattattgatagcctcagtgatcgtggtattgatattggagacgcaccagccagcttacgtgaacaggcagcactaaaaacgagagatcgaaagaaagggtttgatgagcaagagcttagagaaagctggaaatctagagctagtgaacttgggatttctgataaatttattgacgacattagattacaaattagagaaaataagttaattgcggatccgcaactaggaaaagaaactcaacctgaagtagctcaagatccacagaaagtaccacagacgagagataatcaactggatcaacctgaagtagctcaagatccacagaaagtaccacagacgagagataatcaactggatcaacctgaagtagctcaagatccacagaaagtactacagacgagagataatcaactggatcagcctaaatcaacccaagaaccagaaaatcaaaaacctaatagagtacgtccacctaaaagagataaaccaccaattgtgatttccgaaaaaaccaaggaagcagttttttattctattgggcatcacacagaacgtgaaatgatgattaatgaaaataagatcatagatacagcaatgaaagttgctgtaggtgaaacagactttttgcaagttaaagctgaactggataggttgaagaaagccaatattattattcaggtaggaaataggataacaacaaaaaaactagctactgatgaagtatggtcacttgaacacataaaatcagagaaagggagtatgagtccaatactcaatgagaaagctattaaggacagaattaaccaggaagaaaaacttagagggaagcagtacacagcaggacaaagagatagtattgagacgattttaacttctgacagtagatatgttgcagtagatggattagcaggtacgggtaaaactactctcttacatactattaataaaattgcgagtgaaaacggatttatagtaagaggaatggcagctactggtgttgcagcaaagaacttggaaatggagacaggaatagagtctaaaacaattgccatgttccaatttaaagctaatgatctacttaaacaggcaatggagcaaggcgttgaaaatcgcaaacctgaaatctggattatagatgaatcaagttttgttggtcagaatagctttaaggaaattttgagcttatcaaaacaactaaatacaagagttgtatttttaggcgataaaaaccagttacaagcaattaatgcaggtaaaccttttgaattagctcaaaatacaaattctatagacttggcaaaaatgcataatattttgcgtcaaaagaatcaggaattaaaagatgttgtaacgttggtagtagctaaaaatgataaaggagaaattgatcttagtaaaaatgctgaagcatttgacttattggattcgcaaaaaagaatacatgaatttggaagtgttcaatctggtaaaaataaaggggtaaaaagtcagctaaatgataatgaagatatacatcttgttcacaaagaattaattaaaagctatatgtcaaatgatgctaaaggacgacaagaaagtttaattattactccatttaactcggatcgtgttgttttgaatgcattggtaagagaggaaatgaggaaggcaaatgaacttcatgggcctgatagtgaattttccattcttatcaatacaaattacacagaacctcaaagaagtttacaagcaaactatgagcgaggaatggtagttagatttcaaaaaaactatgcagataaagatggtcaaaataaaatctttaaaggccaatatttaaaagttttgatgaaaaataaagacggtactctaacattggaagataaagacaagaatcagtttcaatggaatccaaagaaaaagagtaatagtgtagaagtgtataaagaagaaaatcgcaaggtagcaattggagatacagtcagatttaccagaactaaagaagaagaagatataaaaaatggtgaacgttataagattaaaggcttaaccgaagatcatgtgaaaattgaagatcaagcgggaaacgaaaagctaatagataaaggtgattttaaacactgggattatggttacagtaatacagtatattcatcacaagggttaacaaaaggcaatgtattcttattgctcaacagtcgaaaaatcgctaaagatttaaatgacgataaggctgctactaaggtgctaggtaaagcttttggtacacgttctttctatgtggcggtaacacgagaagagcataacttgcaagtttttactgataacaagaatgcatcacgacaggccataacatttaaacaagataagtctagttttgttgaagctattcaaaaagcaaatatcgaaattccaacgcatttgttagaaaatgaagaattgcaacaagcaaaatatgagattgatagatag

SEQ ID NO: 64144 - DNA, 435 bp, Acinetobacter baumannii
atgacggttacggaaaatgcaaccatgaaaaatgttagcaatcgtatctatgaagatcgggaagctatacaacttttgatcaatccaacttacaagtatttgctaacagtatattcaaggaaaaaggaattaccttttaattatgtactcagttatctcgttggtaatgctgtgaatgatcctgatttattgtcggaaataaaacgcatccagccccaattcaaaggtgttaaagggaaaaacacaccttttagattagatactgagatagctaaacgcttcaaagaagttgcaaaaactcaaaaaggtgacttgtattcaagctttgtgaacgcagctatttattattttctaaagcatggtgattttgaaaaaatgccagagctacaggctttgatcaataacgagatcaacactgaagaaaagcctagttaa

SEQ ID NO: 64145 - DNA, 1017 bp, Acinetobacter baumannii
atgactacaaataaaacgattgtatttgtctttttgtcaatattcgctttaattatctctattgcacttctagttgctttatcaatttatataagatcaagctatatagttttaagtgctgccgtattaagcctaattggttcctctttatttttgatcagatttctatacagaacattcattaatgaaacatcaacctataaagaaaaatatactttttgggttatgtcttattcaatgttcatcgttgtagtttttacaatcccattgggttattttattaatgtttatgaccaaaaaagatatacaaaaaattttttggatttattaaatagtgttgagttcaaatcaattctaaaactaggaacagaaaatgatgtgtatgttcaactaggaaatacaaatactggttggagtaaaacacgtttagttctgcctgaatcctctaatgcttcaatgtacttaaacaatggatattgtggcttaaattatgatgatgactcatctacttctatgaagaaaagcatttcaaaatatcttgacaaagatagactgaaaaataatcaaatagatttagcaaagttgtcaataatggtgcatgaatttgggcactgtcttgatatgaaaagagattttataagctttaatacaaaactaattccagaaaaaaatacattgataattggaaaaaatgcaatagttcctaaaatgagatccaaagctaaggatattgaaagttatttacttttggcacaagactctacgttgtggaaagaagtatttgcagatgtatatgcatcaggttatatgtttgtcaatcatccgaatgaagcttttcaaataacaaaaggtttacaagagtatcggttaaaaaacaaaaaagatgatccagagcacaattcatcctgttatctaaatgttgtactaacttctactaagccaaaatcaaatgaagaactaatcaagtggagtgataaaattcgtgaagataaaaaatgtaatagcgggttttactag

SEQ ID NO: 64146 - DNA, 384 bp, Acinetobacter baumannii
ttgaataaaagcctaactgatgttgatattattaattatacaaattctttaggctctaaaaatgattgttactttgacaatgttactgttaaaaaagatgggaatggtaaaattgccatactaacaataaacgataacggttctattattaaaggaactcctatttttgatagaacaacaaaacaggttctaggatttaaagtttatccaagtcaaattatgtattgtacaaagggtcgctttaactataaatcgccaatcattactacagatcgagtattagcccaacttcctgaatcacaagttaaagaaaaaacttctaagtttaataaagaattgtcaaataaatatattgataaaattggcaactatttaaccaaataa

SEQ ID NO: 64147 - DNA, 384 bp, Acinetobacter baumannii
  misc_feature (369)..(378): n is a, c, g, or t
atggaacgttcttctgtgtccgcggctcaacctcatgagcaaagtttacaacgctacgtacttctgacggttatgcttggtacaggtacggttagtttaaataacagtagtttcaaccctgcaatacctcatttaatgtcctattttcaggtaggtgaggtatgggcaagttgggtagttgttgcctttttattagcaatgagtatcagtttgcctttagctgggttcctaagccagcgttttggtaagcggtcaatttatttaattgccttattgggatttgctttggcttctacagcaggtggtttatttaatcagtttgaatcggtgttgaagctgcaaaatataatcaaaaatggcaggctcacnnnnnnnnnngtttga

SEQ ID NO: 64148 - DNA, 3504 bp, Acinetobacter baumannii
atgcccgacttggtcgagactgcggtaaaggatgaaatgcctgcgctggcacttaccgacttatccaaccttcatgctgctgtaaaattttataactcttgccttaagaaaggcattaagcctattttgggtagtacaattcgtcttaatgatgcccaacatcgtgcaactttgcttgcaatgagtgatattggatggaaaggactgaccgaaattgtttcgcgtggatttattgaaggtcaacaactcagtatcccttgtgtacaaaaagaatgggtcctagagcagcatcaagatattattgttttacttggccaacatagtgatgttgggcaaatgctttgctcatctaacccgcaaaaagcagaacctttacttgaagagtggattgaaaagtttggtaatcgtgtttatctagccttaacacgtactgatcgtcctggcgaagaagactttattcaagaagctgccaaacttgcagctaaatataatgttggtgttgttgcacacaacgatgtgcactttattgaaaaagaagatttcgaagcgcacgaagctcgtgtatgtattgcagatggttatgttttagcagatgatcgacgtccgcgcttatatagcccagagcagtatttcaaaacttctgatgaaatgattgagctgttctcagatattcctagtgctattgaaaacacctatcaaatcgctaaacgctgtaatgtcactttaaagctcggtacttactttttacctgagtatccaattcctgatggttttaccatcgatacctattttgagcacttatcaaaagaaggcttagaagagcgcttaaattacctttaccctgtcgaaaagcgtggtgaagactggcccgaaattcgtaaaccatatgatgaacgaatagattatgaagtcggaatcatcctgaaaatgggattccctggttacttcctgattgtcatggacttcattcaatgggcgaaaaacaatggtgtccctgttggaccgggccgtggttcaggtgcaggttcattagtagcttatagcttaaaaattacagatcttgatccacttcgttacgacctactcttcgaacgtttcttaaacccggaacgtgtatcgatgcccgactttgacgtcgatttctgtatcgcaggtcgtgaccgtgtgatcgattatgtatcacgtacttatggccgtgaagcggtgtctcagattgcaacgttcggtacgatggctgcaaaaggtgcgattcgtgacgttgcccgcgttttagggaagtcttatggtctagctgaccgtatttcaaaaatggttccaactaagccacttggtgtggatttggcaactgcaattgaaatggaacctcagcttaaagatattgttaccaacccttccaacccagataatgatgatgccagcgaaatttgggaaatggcattaaagttagaaggtattaccagaaatacaggtaaacatgccggtggtgttgttattgcacccggtaaaattaccgacttctctgctgtgctttgtgacgcagacggtactaaccgcgtagcacagtatgataaagatgatgtagaagctgcaggtctcgtaaaattcgacttcttgggcttacgtaacttaaccgttattgaagatgctattcaaaatattaataaaaaccgcgatagcaatgaccctttaaacatttcacacgtccctcttgacgaccctaaagcttattctgtctttgctgatgcaaatacaaccgcggtattccagtttgaatccgtcggtatgaaacgaatgcttaaagaagcgcgtccaagtaaattcgaagaaattattgcgttcgtatctttatatcgtccgggtccgatggatctgatcccagactttattcaccgtatgcatggtggagaatttgagtatcttcatccattgctagaaggtgtattagaaccaacctacgggattatggtttaccaagaacaggtaatgcaaactgcacagatttgtgcaggttacacactcggtggcgctgacttgctccgccgtgcgatgggtaaaaagaaacctgaagaaatggtgaaacagcgccaaatcttccttgagggtgctggacaaaaaggtattgatgaaagcacagctaaccatatcttcgactatatggaaaagttcgcaggctatggttttaacaaatcgcacgccgcagcctatgcacttgttgcataccatacagcatggttaaaagcccactatcctgccgaatttatggcagcagtaatgtcatcggaaatgcagaacactgacagtgtcgtatttttgattgatgactgccgaaataacggactcgaggtcttaccgccatcagtcaatatgtcgacttatcatttccatgcgagtgatgataaaaccattgtttatggtttaggggcaattaaaggtgttggtgaacaggcaatgcagtctgttattgactcacgtcgccaacaagggccttatactgacctatttgatttctgccatcgtattgatttgaaaaaaatcaataaacgaaccttagaagcacttatccgtgctggtgcgcttgattgtttaggtattgaacgttcaagtctaatggctcaattgccagaagctgtacaagctgccgaacaagcacgtagtaaccgtgaaagcggtattatggacttatttggtgaagttgaagaagttcaacgtaaaccagctaaacctgttaagccatggagtgatgaagttcgtctcaaaggcgaaaaagatacacttggactatatttaacaggtcacccaattgatgtttatcgtcaagaactcaaagcgtttattcctgcaaaacttaatgaaattaccgcaactcgtcgcggtgtaacgactgtttatgcaggacttgtccttgatgtagcgaatttcccaaaccgtgttgttattgtgcttgacgacggaacagcacgtattgaagtcagttgtaaccacgaacgtttccaacgctttaaagatattattcaagttgagcgcgtagtcgtctttgaaggcgagatctatgagcgtgaaggttttgatcgtccaatgggacgcttgaacaaagcgtttagcttaaatgaaatcagacaaaaacgcgccaatagtattcaaatcaaattaacccatgatctattgcaaccaagtttggcaaaagatctacaaaatatattattgccttattgtaatgtcgatatgcatcagcatattgcaatacagttacagattgaccaaccatatgctcaggctgagcttcagcttggcccacaatggaaagtcgctcctttagatgaacttcttgccaaactaagagattactttggtaaggataatattcatattgaatatcaggtaaaatctaaggcagctaaagcagcagaacctgttcgtccacaacctgttgcctcacctcctgtggacatgactattgatgatgcattggattcataccaaagcgaagtttctcaatattcgtaa

SEQ ID NO: 64149 - DNA, 174 bp, Acinetobacter baumannii
atgttttgccatttaagcgagataaaagtagaaaaaggccagcatattcgtcaaggggaaactttaggtctagtcggtaaaacaggacgtgtcacaggccctcatttacattggggaatgagccttaacaatgcacgggtagaccctcaactttttctaactacgactcattaa

SEQ ID NO: 64150 - DNA, 567 bp, Acinetobacter baumannii
gtgttgtttgatgaggttgaaaaagcgcatccagatgtcttcaatatcttgctacaagtgttagacgatggacgcttaaccgactcacaaggtcgtgtagtggactttaaaaacacggttattgtgatgacatcgaacttgggttcacaagatgtacgtgaacttggtgaaggtgcaactgatgatgaagtgcgtactattgtaatgaatgcggtaagtcagcatttccgtccggagtttattaaccggattgatgagttggtgattttccattcactcaaaaaagcacagattcgtggcattgccgatattcagttggaccgcttacgctcacgacttgttgatcgtgatatgagtttaactgtagatgacagtgcatttgacttattgattgacgctggttttgatcctgtatacggagcgcgtccattgaaacgtgcaattcaacaacaggttgaaaatacactagctcaaaaaatcttgtcaggtgactttgttgcgggtgataccattttagttaaaggcgaaaatggtcacttagtgtttgataagctgaaactcagctaa

SEQ ID NO: 64151 - DNA, 393 bp, Acinetobacter baumannii
  misc_feature (378)..(387): n is a, c, g, or t
atgaaaagtaagttaggaattagtaagcaactttttattgccttaactattgtaaatttaagcgttacgctattttctgtagtactgggttatgtcatttataactatgcgattgaaaaaggctggattagtttaagctcatttcaacaagaagattggaccagttttcattttgtagactggatttggttagccactgttatcttttgcggctgtattatttcattagtgattggcatgcgcctcgcaaagcgttttattgtgccaattaacttcttagccgaagcagcaaaaaaaattagtcacggcgacctctctgctagagcttacgataatagaattcactccgccgaaatgtcggagcttttatataatttnnnnnnnnnnatataa

SEQ ID NO: 64152 - DNA, 396 bp, Acinetobacter baumannii
atgactggaaataatacaagcaacaagtttaaagctgctagagagaacaaggattttgtgcaagacgttaattcagatgcagcagatccaatgcctaaacaaattactgttactagcagaaataaaagtcaaataacccttgagcaaaataccctaagtcaacgagagagatccagagttaaaaatggtaggaacttaacgattccactatttgcagaagaacttttgattatagaaactgctgttgaaagcctttctcaaaaagaagatgtttctatcaatagcttcattagaagtatcgttcttgataagtgtaagaaggtgataggaaaagatgccttcgataaattaaatgaaaacaagctaaatgttgttaaagcaaaaaaagaaaagtag

SEQ ID NO: 64153 - DNA, 618 bp, Acinetobacter baumannii
atggctgaaataattactattgctagtagaaagggtggggttggaaaaaccactattgcaataaatatggttgttgctttaagcaataaaggtaaaactttattggtagatgctgatgaacaacaatctgctatgaaatggaataagcatcggaaagaaaagatagatgctatatccatacataaggatctaattgctgagttggaaaaactagatggggagtatcagtacattctcatagatgttgctggccgtgattctgaaatatttagagaagcacttcttatcagtgacaagctaatcgtacccactcaagcaagtcttcttgatttagatgtaatcccttatctaaatgaaaaggttaaaacagctaaaaaaaccaatccaaacttggtttcaatggttgtgattaatagagcatcaaccaatgccaaatccaatgaaacagagcaggcaagagaatttgttgctgattatgaggaattcaagttattgcaaaccacattgcatgaacgaaaacagtatagagatgcagttcttgaatcaaagagtgttcttgagatggcggcatctaaagctaaagacgaattaaatcaatttctaattgaggtgctgtga

SEQ ID NO: 64154 - DNA, 510 bp, Acinetobacter baumannii
atgatgcatacagtaaaacaagttccatttgatgtgctagggcaagtttatatggaacttgagatagcaaaccaacatttaggtcagtattatacgcctagtgcaatttctgatgtgatggcaaatatgactttacagggctttcaagccactgtaagagaccagggttttataacactttcagaccctgcatgtggatcaggagcaacactcttaagttgtgtgaagttatttgtcgaaaataattatagagttgaaaacaccttgtatattgaagctacagacattgaccgtcatgctgctttgatgtgttatgttcaacttagcttatggggagttccctgtaaaattcatgtagggaatagcttaacaatggaaatgcgtgaatcatggtgtagttttatgtatttcatgaaaggttggaaaatgaaattaaatagatttatgcttcagcaacaaagtaagtctggtgaaagttatgtaccaaattttatattagttgaaagttga

SEQ ID NO: 64155 - DNA, 774 bp, Acinetobacter baumannii
atgaaaaaaatagtcattactaatgaaaaaggcggcattgggaaaacatctgttgcagttcatcttgcacattattgttatgagcgtggactcagagtcctttttgtagatatggataaacaaggtaatagtggtttttctcttgaaaaagttgctcttgaaactaaacagacagttagcttatttgctgaaaaacaagattttgaagagttggcagttaattttgttttatatcaaggtagtaaaaaattaaagcctctttttgatccaactgaagaggattttcaacttaataaagttaatgagtatcaagataatttcaaattaaacatagagaatgctagtaagttttttgatatttgcatctttgatacaccgcctactgatggcccatttcaaagattacctctaaaagtctctaattttgctctttctccatttctattagataaatactcaatgcttggcttgaaaggcattattgagacaactcaagaaatcaaagatgtaaatcctgatattcaatttctagggtttttaccaaatatggttaatgcaaattcagtaactcaaaaaaccactttaaatgagcttcaaaaacaattagcacatttaatgcttgataaaacagcctttattcccaatcgctctgccattgctgatgccagtaaggagcaagttcctgtctggaaaatagataaaacttcggcaaaagatgtagggcggaaaatcaaaaaaatcaatcaattagttttagaaaaaatgggagtataa

SEQ ID NO: 64156 - DNA, 1260 bp, Acinetobacter baumannii
atgacaaattctttattaaatgacttaaatgtggttgatagctctctaaatacttcgaatttgaatgctaatacaaactctaagcgtaaaactttaaatttacctttaagtcgtattaaattggatcctgcaaatgtgcgtagatcttatgatgaagtttatataaacgaacttgctgaaagtattaatgacgttggattacttcaatcaatttcagtacgacctgatgaagaaaaccctggtgaatatattattaacatggggcattatcgttatcttgctcatcaaaaactaggaaaagaaacaattgaatctacaattgataagctgttaggttcaagaaaagtcaaaatgacggaaaacatgatccgtaaagatatgagtttgctagaagtagctgaaaacttaaagctcatgttggaggatggactagctgaaaacccgaattatagttatgaagatcttggggcagagttaaagcgttcgaagtcatgggtatcaagacgtttacagttacttgactcagacgattatttaatagggctaatggataacaaaatggtgaatgatgctgaaacaggaagcatcattaaaaacctattggttgattatccagaagaagtcaaagcgcttgtagcagatcatgaaggtgctatttcttcaaagctggcgcgagtgtgggcaaaagagttaaaaggtgaacttacacaagaagttcctgttatcactgctaaagaagaaactgtaaatacggctctacattcagaacctagtgatactagtgttgaagagctaacaaaactgcaaaaagacgctgaagacttaattcagaaacagcatgtacaaactgaaatcgaagaggttgtgcattcaaatgttaaaactgaggaagataataaaaacttcagtactacatcgcagaaagaatcgaaagaaatcttaaagaaatcaagatcacaattcagtgaacttgatcaagcttattacaacggtgtgctagagagttatgcaaagctattagattggtctgagagtgaagatcaggaattagctgctgtatctaaaggtattttacgcagttttaatacagaggattctgcaaatctattctcatggaaatccttgattgcttttccagaggttattgatgaacttaactcgatattagacggcatgggaacattaaaaacatttgtttctacttctgagattgatgaccatagaatgcaagtcattctgaatcaacaatctttaatttaa

SEQ ID NO: 64157 - DNA, 1236 bp, Acinetobacter baumannii
atgaatttcaataataagcaattaggccatatggcaacacattcagctaagctgtttcatagaaagggaactcaaccgccactttgtgcccaaattcaaactcgtattcctaatacttatatttcttctgcaacagtaaacttagagcgctttacttggtcagatccattacaaatcgagacgaataaaagaaccgatattgtagatttaaaaacaaagcaaattacggtttcttataataataatcttgatagtgttgcaattacaccaatgacggccattggtttgtattacgagttattcaaacgcgaaaacaactcagacgaatttgttccaggtacaaaactaactgatttctgtatcgaatttaatgaccgagctttgtgtgagtataacgaagtaattagtactctgaatggtcatatcaaagcattttctacacctgaaattaaagcaaatagcctaagtggcacaaagaaaatttcactagatgaaaacacttttgggcttacagtacagcttaaaaatgcaaatttaagcagtaacatgatcgcagttggattacctagtattacagcgatagctgggttttttatgttcatagagcataggactggaattaaagcggattttgcaattggtattaaaaatacgattaaaaatactgtagttgagatgtatggcaaccgtagttcattacgtggctttcgatcattcattgataagagagttgatcaaagaaacggggatatagaactaacttttattattcgatgtaattccacagaagaagttattaatttaaagtcttggattcaatctaatgattttaaaattgctggtggagatgtccattataaagttatttctgatgttctctatgatgactgttgttggatctatgaagctgaccctgccactgtccaagaagatattaagaatcgggaaataacagaaattcctttgaatgccgatgcacttgactatgcattaatactacatcgaacaaactatattgactcggataataaatatacagtgtctgcaaatggatatgcatttttaggtagtccagagtttgacccttactctagagcacattcaggaatgcatgtatgggcagaagttatttttgcagtaatttatctaaatagaaatctagacctaaaaaaatgcttttggtctaagcaggatcggattgaaggtggcctactatgttggtcagcaatttcttaa

SEQ ID NO: 64158 - DNA, 174 bp, Acinetobacter baumannii
atgtcggctaaggaagagataaatgaacctgaagaaatcccagttttatcaatgaatggtttaatccgtgaatgtaaaaaaggtgaattatttaaatgttcaatgtgtaatcaggtatttaatacaagtgaagaagatccgatagcacactcaatgttgtgcactggtttctag

SEQ ID NO: 64159 - DNA, 300 bp, Acinetobacter baumannii
ttgaaatatcaaaatgggtttagtgatttaatcgttcctatcatattggctattatctttcttgctatttattgggtagttgaccttcatccacctggtgaatggaaagcgaaagatgatcaaattaagagtgttaatgaggtattagaaaaatctcaaaatcaaccattcgcaaatgagattaagaaactagcacttaaagctcaagaggatgggcaaataacacgagacgaagctgagttaattatagcggagtatgataaacaactgattaaacacaatattaataaattaaattaa

SEQ ID NO: 64160 - DNA, 312 bp, Acinetobacter baumannii
atgaaaaatcagaaaggttttattcaaattggcattgttgaaattgtttctactttgctacttacaggagtcatatatttttctttaaacccccctggtgaagacaaggcatcgaatgatgagttgaaaaaggtaaatagtattttagagcaatcaataaatcagcctttttcgcaagaaatgaaacgagtttttaatgaagttcaaagtgacggaacaattacccaaaacgaagttgaattaatcgaaaacgaatttgagcgtctgaagttgaaacagaatgctttaaagctcaatgaaccaaacaaatga

SEQ ID NO: 64161 - DNA, 402 bp, Acinetobacter baumannii
atgcctgatcttcaacgaagtattgaaatgcgcgaatgtgaccacctaattgatcttcacgagaataatatttcatattatccgaacctcattagtaaagtggatcattcttataattttaatggcaacataaaacctaatcagaaacatgtaacttgtgttttagggaaattactcaactcagcagttcctgaaaactatctaaacaattttgctttctcactttatagagaaaaaattaccagtgccgattacaaagagtttgttaaaacaataaatgctgatggtgttgttacttattccgaagctatcgaattatataatcggattcacaaaagagagagtgaaaaaagatcaacagaatcattgtcagataaagtagcgagattttttaatgaataa

SEQ ID NO: 64162 - DNA, 438 bp, Acinetobacter baumannii
atgaataatgaaattcataatctcctagctaagtcggatagtgaaatttcgaatctagctaaaaaacctgtattgcatactgaatttaaaagatttcaaaaacagctagaaatgatactgttatatttccatgttctacctgaatcaattcaatggaattttgaaaaaggtattatgtttcctgaatttaatggcgaaatcatgattcatagttctggatatggctatggtgatgctggctatttctttgctcttgtagataaatttcagttagcaatgtttatcaatctatatttttggcagaccagcagagatcattataacgagctgtatttggatgaattacataatttatgttgttctgtcgttgattatctccaagattttatcaagcaaaataatattgatttaacaagttgtatcataactgatcattag

SEQ ID NO: 64163 - DNA, 255 bp, Acinetobacter baumannii
atgtataaagatttcataattaatcaaattgagagttccataaaaaacatggaagatgctttatcattagactcaaaatttaatcaacagcgtcaactgaatgaaacaatgcattatgcaaaagggttagtgactggtttgggtcttgctaatgtcattgatcttaatgaatataaaatgtatatcgaagatatttctgatcaacatagcgccttactagaaaagatagcatccaatgtacttggaaaagtatag

SEQ ID NO: 64164 - DNA, 444 bp, Acinetobacter baumannii
atgaaaaatgatttagttttaagttataccctttctaatggtgaaactcatttttatggctattttatacatcgcaatgatggttcgcttacatctggtttcaatcaaacaccagaggaagttattgaagggcttaaacaacgttatggcgagcgattagtctcaacatcactagatgatgaaattgaatatttcaaaaaggagttagagtttttaattccaaagcaaattgacgaagaagaatataaaagtaaattcaatatattacctcctgcaaaaatgtataagagtgagtcggtagaagcattcatgtgtacagagccgttagctatcaatctgtatacccatttcgttaattttcctaagcataaaaaggctttccagatcgtagcgtttggaaatacgccaataacagacgttatcaaacaagcagaacatttttga

SEQ ID NO: 64165 - DNA, 1053 bp, Acinetobacter baumannii
atgaaaaatattactgattcaattattcaaaaactaggtctaattacgtttgaagagttagaaaaaggcgatttagaaatatttactaactttgatacgtgtaaggtaattatcaaggaaattaaaaaaaattggagtgaagaaaaagtatttaaaattttgttcgatgctcttaacggcgactttatctattgtaactcacaacaagaattacaagcatttattaagtacttcaagactactaataaacaatcgaataaagctgagcaacatttctttgtacagccaactaaaccctacatggttgatcccaaaaaacgctatttcattgccaatctagcagttcccaatcttcaaattgaaaacttaaaggatgttgataatttaacgagtcgagaagtggaatttataaataaagttaaagatggttttgcaaatcctgacattgacaagtctttcctaaactttttagaggactataaaaaaatagttgcagcagagtaccagaggaaaacaaaccaaaataaaaaagcaatggatgaaattgaatggttcattggcaatggcttttttattcctgagcaaattctcaagtacgaagataaaaacaaaatcctcgatatcattgtgtactgcaatattgcagctttgaattggttgttgatcccaagtaacttgtctaaatatgaaaatattcatcaaaacgacttgttagctttaaccaaatatttgtacctgatgcaaacaatattggcagaaactgaaatcacaaaattaagaagtggcgatgtagaggaatattgttttaggaaaaaaggatattattttttagatgaattaagtagtgaagagattgatcattattgtgagggagaagattatgaagtctggattgtaaaatctaaagataatgaaatcgaacctgaaaccgcagaaaaagcctatgatgcatatggaaatagttacgcatacgacttaaaagaactaaaggatactttgcaaaaatttatatccttaaatgaagtgcagtttttactttacaaaaagatttaa

SEQ ID NO: 64166 - DNA, 198 bp, Acinetobacter baumannii
atgaaaaatgaatattctgattcagaactagaaaaactgtggtgtgaattaagcaaaatagctattgcggtaaatgaaaattttattgaacaagacttcatattttttgaagcaggtacagacataattgaaatttggatttggttcgatcagttacattcaaaaggggttaaatggctgcaagataatattgattag

SEQ ID NO: 64167 - DNA, 456 bp, Acinetobacter baumannii
  misc_feature (14)..(23): n is a, c, g, or t
atgtgtcatgttgnnnnnnnnnngcgcatcaaagaacaaaagaaatttggatatagattagtaagacatttgaacttttttactttcttagggctgccttttgcctcagccttttatttaatggttaatcggattatacctgcttcatttgagccgagggaactatacgaggtttcagcattttatatagcatggctattaagcttattgattagctttagctgctcaataaggaagggaataatcatcatgctatatattacggctgctgttttattccttattccagttattagtgtcgttctggtgccagaagcctctttattaaatagtctaaagtctgtgcattggtctcttgtcggtgttgatctggcgctcatactgctcgggctattctatttagtagtactacgcttctaccaaaccaaatttattacgttaggagaggccaaatga

SEQ ID NO: 64168 - DNA, 417 bp, Acinetobacter baumannii
  misc_feature (378)..(387): n is a, c, g, or t
atgactgtacgtccaattttatttaattcagaaatggttagggccattttaaatggatctaagacgcaaacacgccgaattattaagagtaaagttcaaaaaaaaattgatatagctgaacatcttggacagttctttggtttagaagattctaaatcacaaatatcttcttattttcagaaaatttgtccttttggagcaattggcgaccagctttttgttcaagagacgtatggcaccaaaattagaagtttaggtggaactcctcatgagtcatttgtctacaaagcagataacccaaatgaaattgcttattacgactgtaagggaaagggttatccagttagatggaagccatcttctcgtatgcctcgtaannnnnnnnnngtaaagcatcacgtgttttgcttgaaatag

SEQ ID NO: 64169 - DNA, 903 bp, Acinetobacter baumannii
atgaataatattccacatgcaaataagtcattctggctagcccactcaggcgaatatattccatcaccacctcttagaggtagcattgatgtagatgtggtgattattggaggagggtttactggattatctactgcttatcacataagaaaagtggattctgctgcatcagtggctgttcttgaaggcgaatgtgtagcatttggtgcttcaggccgtacctctggctgggttgtgccagttccagtacttgatcccactactgcaaaagtactttatggaaaagaaagattaactgaacttcaaaatttcgcatggaatggtctggactatgtgcaggacttaatcaaacgcgaaaatatggatagcgattttgaaatgcctggtgtgacatttactacacttcgcggccatgaaaaaagattagagcactttactaaatattggcaagatcaacctcgctctaaagacagcgtctatatggatagagctacggtaagccaagccctaaatagtgatgcattttctggtggatgccgaatgccacattctgggcaagtcaatcctgtaaagcattctcgagaactaaagcgaattgcagaacaggctggtgcacaaatttttgagcaaacgccagtattggatatagaagataaggaaacgttctttattctcaaaactccagaaggagaggttagagctaaacatattgtattaggtaccaatggttttactcatttattgccaccagaattggggctaaaacgcgcccaactccccatgtttgtatatcagttaattaccgaacctttgggcgttctatggacgaagctcagaaagtgcaattttatgatgccgctgagcgaatgtataaaaaggtatttcctgcatttcagaaattaa

SEQ ID NO: 64170 - DNA, 1245 bp, Acinetobacter baumannii
atgaaagtgttcgaaaaattagtattcccaaatggctcatatgttcctaaccgtattgctaaagcagcaatggaagaaaacatggctgatttaaaccatgcaccatcagaagaattaatgcgtttatatcaggcttgggcaaatggtggcgtaggtctaatcattaccggaaatgtaatggtagaccgccgagcaatgactggaccgggcggcgtagtgcttgaagatgaaaagcatctagatacttttaaaaaatgggcacaaattgggcgctcaaaaggtgctcagatgtggcttcaaattaaccatccgggtcgccaaatgcaagccaatcttggtcagcagacgtgggcaccatccgctatttcacttgatcttggcaaaatgtcaaatcgcttcaacacgccaatcgaaatgactgaatctatgattgcagaagtgattcagcgttttgcaaacacggcgcgtttaggtgaaaaagcagggtttaccggtgtggaaattcatgcagcacatggttatttattaagtcagtttctttctccactgagtaataaacgccaagatcaatggggtggttctttagaaaaccgcgctcgcattttaattgagattgttgaagctgttcgtaaagtggtttcgcctcagtttactgttgcagtaaaactgaactcagccgatttccaacgtggtgggtttagcgctgaagatgctcaacaagtggttaaaatgttaaatgagcatgcagtcgatttggttgaactttcaggcggtagctatgaagcacctgcaatgcaaggtcaagcacgtgatggccgtacacttgctcgtgaagcttactttttagaatttgcgcaagagattcgtaaagttgccaaaatgcctgttatggtgacaggtgggatacgccgtaaacaagtggcagagaaagtgattgaaagtggtgtagatatggtcggtattgccacagctctagcaattgaacctaatttgccaaatgcttggaaacaaggccagaatcttactcctgagttaaaaccaattacttggaagaacaaaacacttgcttcacttgccaatatggctatggtcaaattccagttacgtaatttaagcgcaggtaaaaaaacaaaaccaaatgtttcaccagcttgggctttaattttgcaacaatcagctatgtcatgccgtactcgccaatacaaaaaaggcatgcgtgactattatttgcttcttaataagtga

SEQ ID NO: 64171 - DNA, 1023 bp, Acinetobacter baumannii
atgaaagtattagataaagaaaaaagattaaaagaattattagaaaataatataagaaatgaaaaaattggtacagcaattgctattactggtccttggggagttggtaaaacttttttttggaaaaagtttatagaaaagaataattttaaaaggaaatatatatatgtatctttatttggtcttcagtcattgagtgatttgaaaacgcatatttatagcaatatcgaaaataatcattctactttagaagttcctagatggattcgaggattaccagctatttttaaagatacaagggtttcacactttggtttaagtacttctactaaaatttttgatagtttgatgtttagtcaggtcaaagatgcaattatttgctttgatgatttcgaacggatgtctaataaattggatattaaagatgttatgggattggcaaattatctaaaattagaaaaaaactgtcaggttattttgattttagatgaaaataaaacagcaagcgaaaataagaaaaattatgctgaatacaaggaaaagttgattgatacaacaattcctattgactcagtgaaatcattaattcaagaaaatacagaagactttgaaggagatgaaatacttgttgagttgatgtttgagtttgcagaaaccttagaaatccataatttcagattttttcaaaaagtaatcaagttatatcgagattttaggaagtcattacctgaggcagtcgctgactcaacaaaagaaactattctaataagaattcttcaaggctacttaattcaggatatacctgaattagaatatggatggaatgactgtaaatattttcccttagatcagcaaaaagattggtctgatagaagaaaaaaaacttataagagcctaattgatctttcaaatgtgtgtataaaaggtgatggtgacctttggtttattgaatttaagaaatggtttgatcaaaaagagaatttttctattgaatcaataaaagagttagctcaagcgggttaa

SEQ ID NO: 64172 - DNA, 141 bp, Acinetobacter baumannii
atgaatgaagaggtaaaaaaactatatacagaaggttataaggaaatattagacaaagaaattgatttaataaatatgaatcataatgaaattaaattgagagagcgagatattcaattaattggtgagtatctgtcctaa

SEQ ID NO: 64173 - DNA, 501 bp, Acinetobacter baumannii
atggataaattttttcaaacatcttttttcgattttcttttcaattatatattttcatctccctggatatatggtggcctaacagtattgggatttgtcactcttttagttgcctatgcaacacatattgacaatattcaaaggaaatcaaaatcaagaagtgaatttgaaaaggcagaagatgacaatcctctttcagattccgttctagttaatgtacttggtggtctatttattggttttatcgtaatagttttaattgctggttattggacgatagatactgattccgatgatcaaaaagatatgcgcgaatttcttatcgaagcgagttttgctgatacctctttaaaattaacggcgctcgaagcatatgaatactatattcaggatcaaaccgttaaaaattgggaataccgtgcttttaaagatgggttagtaaagttgaaaaatgaagatgctaaatatcaggttcgtaaagcatttttgattgaaaattaa

SEQ ID NO: 64174 - DNA, 564 bp, Acinetobacter baumannii
atgaaatttaatattgctttatttccagtcgcactaataatttcagggtgtactgttcaatcagatagtacatataacttagctcttgatgaaatgactccaaaagttatagaaatgactttagacaaatatcaaagccaagtagtacaggtacaatctgaattttatttaccaccatttaaaaagaatactgcacactttaataattgtgacggtgagtttattccgagagaattaattaaatatgtgccgtttatttcttctgaaaaacattactttgtctcaaattctgttaatcaaccagaggtattacaaaaattccaccaatgcttattaactgaatttaataagtctccagttccaaaggaggaagcagataagtttattaagtcaattcaattggctaatgtaaaatctaatcctgaaattaatgcaaaagttaatgaaatcacacaagataatattttaacttttggtgagttggttgaactctataacttgttgaacaataaagttcccttaagtactgctacttctttaaaagatgctttcaaacctaattaa

SEQ ID NO: 64175 - DNA, 273 bp, Acinetobacter baumannii
atgttagtaactcaatatttacctgatttagataaaataaaatctaaaaggagttcggaagcaccatttcgatattggttggaaaatattctcaagcgtagtgataagttgccgcgtggtaagttttttaagggaaaagtaggaggtaagcccctaagaattattgatgaatattggatgactagagattttgacatggaactttctattttcgctaaaccaagatatggattgggcctaataaatattgattcagagaatagccaaacttaa

SEQ ID NO: 64176 - DNA, 267 bp, Acinetobacter baumannii
atgaaatcagaaattgtgactgttttaatagttcttttaattgtttttggttggattggtatttcattgaaatggcaatatgaaaacgatttagataaatctaagcaagagaaagcatttattcaacagctcaacaatgaaaaatgcaaactagtagaagtcttggctgctgacagtgtgtttggatctccacgctataaatatctatgtaaagataaaagctacaccttaaatgtagatctctccaatgttttaacatctaaatga

SEQ ID NO: 64177 - DNA, 141 bp, Acinetobacter baumannii
atgagtctatatttcaaaaaaattgtcgtattctctcttatcagcctatttgtttcgggttgtgaagtacctgaatcaaaaaagcaagcagcgcgtgatgcagttattaatgaacatctactctgtacacgacaaaaatag

SEQ ID NO: 64178 - DNA, 294 bp, Acinetobacter baumannii
ttggtacatcaagaatgttctgaattcggatttgagttaattacgcctttagatcataaccatcgtggtagtcatgttagttatcgtcatgaattcggttatgaaattattcaggcacttattgcacgcggtgtgattggtgattatcgggaacctgcagtcttgagatttggtattacacctttgtatctgggctttgaagatatttggaatgcagtacagcacttaaaagaaaccatgctgaatagtgaatggaaaaacaaacagtatttagttcgtggtgaagtgacctga

SEQ ID NO: 64179 - DNA, 1164 bp, Acinetobacter baumannii
atgataactagcaatatctttgctactgataataaatctatattaatcagtaggttgtatgaaaatctaccacgaaaaccatattgtaccaatgatttctttgggttacggattcgtgaaaaaaaatctgcaatatcacactcgcacatacaatttaatcacccaagctttaaacgctacatcgtaattgatgctgattatgctggggctgctacagcttggcgctatgaattcgcagaaaatatacctgttccaaatctaatagtcacaaatcctgaaaacagtcactgccatttttattatgaattaagtgctccagtaagttttacagactcatcgagtaaaaaagcacaagaattttataatgctgttagtaaaaagcttactgaagtactaagaggggatacaaattacacaggactgatagcaaaaaaccctgctcatgaaaagtggattgttgaagcccctagaattgaaacatacagcctacatgagcttgtagagcatttagagctacatcctcacgaatatcggtcaataccaggtcaaaatagcaagcaagagcaagtacaatgtataaatggccgcaatgaccatctttttcatacagtaagagttaaagcctatgttgatgttagagacttcagatcaaaaacctatccacaatgggaagaacatgtaagacaattgctggtagatcataatttagagttaaataacccattaccttattcagaaattaaagcaacggccaagtcgatagcaaaatattgttggaaaaaagacggctattgctatcaagagttttgtgatcgccaaatatctaaagcaaagaaaggtggtcaagctaaagcagataaatatatagaattaagaaaaaaagcagtggctttgcttagaaaggggaaaaataaaagattaatagctcaacttctaaaagtttcctacagatcagttctacgttggctttataacgtcaaactagcggcggccataatgcatcttagagacttaaagaacatgtgtgacaatgcccaaaatcagatattagccgcttttgttgccagcttagctgtcttattccttgatgagtttatttatgactttactcaagatgatattttaacaattaacttaacttttaatattaagatgcttatttag

SEQ ID NO: 64180 - DNA, 474 bp, Acinetobacter baumannii
  misc_feature (398)..(407): n is a, c, g, or t
atggctcgtcacggcggtggtgcattctctggtaaagatccatctaaagtagaccgctcagctgcgtatgctggtcgttatgtagctaaaaatattgttgctgctggtcttgcggacaaatgtgaaattcaggtgagttatgcaattggtgttgcagagccaacgtctatttcaatcaatacttttggtactgcaaaagtttctgatgagttaattatccagttagtacgtgaacatttcgatttacgtccgtttggtattactcgcatgcttaacttaattcaacctatgtataaacaaacagctgcttacggccactttggtcgtgaaggttcagatactgcatttacatgggaaaaaactgataaagttgaagcacttaaagatgccgcaggccnnnnnnnnnnctttaagctgattatattaaaagcccgctcttcagcgggcttttttattatttttgtatttgattaa

SEQ ID NO: 64181 - DNA, 168 bp, Acinetobacter baumannii
atgcgtgccacagatgttgttggggctaacacagtcgtctctattatttcaaaagtattggttcttatttttattttattttgcgcaatctattctggaaaatatgaaatggtttattctagcaagtactacaggttttgtgtttttcttactttatctcatgggtag

SEQ ID NO: 64182 - DNA, 819 bp, Acinetobacter baumannii
atggtgctttattttactgaccacacttcaccagatgaagttcgtaaaattaaagaatcagaacatgtaaatgcgattaagctttatcctgctggtgcgaccacaaactccgataatggtgtgagtgatattcgtaaagtttatgcagtcattgagcaattagaagagcatcaagttccgttattgcttcatggtgaagtaactcacaatcatgtagatatttttgatcgtgaaaaacgcttcctagatgaggtattatcacctctattgaaacagttcccgaaacttaaagttgtgcttgagcacatcactaccagtgatgcagcacactttgttttagaacaagaccgtaatgtggcggcaacaatcactccacaacatttattatttaaccgtaatgatatgttggttggtggtattaaaccgcacttttactgtttaccaattttaaaacgtcaaacacatcaaacgactttgcttgaagtggcgacaagcggtaatcctaaatttttcttaggtacagacagcgctcctcatgcacaaaatgcaaaagagaatgcttgtggatgtgcaggctgctatagtgcaccaaatgcaattgagctttatgcacaagcatttgaccaggtcggtaaattagagcgtctagaaggttttgctagccattttggtgcggacttctacggtctaccacgtaatacttctaccattactttggttaaagaagataacctcgttccagaatcttttgattatttagataatcaaaaaatcatcccgctgcatgccgggaaaacgctgcaatggagaaaagtgtga

SEQ ID NO: 64183 - DNA, 663 bp, Acinetobacter baumannii
atggagaaaagtgtgacacaagaaaactctgtcccggtcattggccaacgttttcgtggcttcttacctgttgttgtcgatgttgaaacggcaggttttaatgcccagacagatgcattgctagaaatcgcatgcattccgattgtgtatgatgcgcagggacaatttgtccctggtcctgcatttcatgcacatattaacccttttgaaggggctaacctcgaccgccgttcgctagacttcattggtattgacccattcaacccaatgcgtattgcaatggctgaagatgaaagaactgctttacgtcgcatttttaaatcggtcaatgaagttcgtaaacagcaacattgtactcatgcagtactcgtaggccacaacgcgcattttgaccttgggtttttacaagcggccattgctcgctcaggcacaaaaaaccaaaacccgttccatagtttttcagtgatggatacggtcactttaagtgcagtaatgtttggacaaactgtacttgcaaaagcatgcattcaagctggaattgagtttgatggtaaagaagcacactctgctttatacgatactcaaaagactgctgaactgttttgctatattttgaacaaactgtctccttacctccttgacagtttggtggcggcttcttaa

SEQ ID NO: 64184 - DNA, 159 bp, Acinetobacter baumannii
atgcttatcacgattgcccaatgtatttctcctaatgacttaattactgtttcaaaccctagagtgaagtacacaaacagtaatttagactttttatctaattttaaacttaatgtaaatcaaaatcttatatctctttgttatcaaattagaaaataa

SEQ ID NO: 64185 - DNA, 369 bp, Acinetobacter baumannii
atgataaatgaacaatttaaagagattgatcaaaataaaggtatagaaattaaaaagttagaattaactttagagaaaccaaaatatattaggcaagctaaaaatttcaaagatgtacaaagaggaatagtggttgaaacttcccaagataaattaattctaaaactaaatgataaagttggcattgaatacgatatgaaacaattacaaaaagaacagaaagaatttactaacttgagactcggccaagaattacatattaaccattcaggaaatacaccagagatgatgaatgaacaagaaattatggattatcacataactcagaatgatcaatctcatgaaattggtttagatcagagccgttga

SEQ ID NO: 64186 - DNA, 201 bp, Acinetobacter baumannii
  misc_feature (162)..(171): n is a, c, g, or t
atgcgcgagtacgctgtttttacctcggaatctgtaagcgaaggtcatcccgataaaatggccgaccaaattagcgacgctattttggatgcaatcttaaaagaagacccatacgcacgtgttgcttgtgaaacactggtaaaaacaggcgctgttgtactnnnnnnnnnnaaatcacaacaactgcgaatattgatgtag

SEQ ID NO: 64187 - DNA, 384 bp, Acinetobacter baumannii
  misc_feature (38)..(47): n is a, c, g, or t
ttggcgataaatcagttcaagctcatatttataatacnnnnnnnnnnttataatactgatggtaaacctgatttaagtgtagctgcgccattgccagaaattaaaactgtgaaaccacaatctcgtattgaaacaaaaaccatgtatcaattggtagatgggaaatggcacagcacttctgtagagtctaatactttggcatttggacaaaagctttttccaaagaacgttcaagttgtaaaaagtggtggaccgctgagtaaattacttgatgaactaggagctaataaagttctacgttttgatgtagtgaaagatgcacaattggcattaaatatgcctgttccatatccatcacttgataaatcgacagctaaaaaataa

SEQ ID NO: 64188 - DNA, 618 bp, Acinetobacter baumannii
atgacattaaaggatgatgatttaaaaattattaattcaactgatcttgtagagtgggatgttaaagtaagttcaataccttggatcccgaatctatacaatggaaatattaaagtttgggccaaaagaaacgcagaacagaatgaagtttttgatatagctttccgtaaattaactaatcaggcttttccgaataccgatttatctatgtgggtatttgagaacgcttcttgtgtaacagttcaagatagtaataaggtaaatttacaaattaaggtacagaaaatgagagatatcactcgtaaaatattggctctaaaccttttcgacgttttaaatatagaggtaggtgatacaaaccattgggatgatcctgatcatattaccctacttaagaatgcgtatgctcaagttgtcttaagaatttcaaatcaaggccaagatagtaatttgtatacagtaagccttgaaatagatgaatacgattcatatggagatatttatcttaatgatgaattttggtttttgtttggaaatgaagaatcaataatatcagatattaaactaaagcaatggaatcctattgatttacaaccatatgcatttcattttaaataa

SEQ ID NO: 64189 - DNA, 546 bp, Acinetobacter baumannii; identical to SEQ ID NO: 56012

SEQ ID NO: 64190 - DNA, 327 bp, Acinetobacter baumannii
atggttgttaatgagcaatggataccttacgaaaatatttatgaatttcaattgatttctgaaatgattgccgaaaacaggccattcattaaaggattgagatacaacctggatagaaaaaaacctttatcaagtttagtagatcttaatactttgccagaaccgacagcaatgtatattattccccctgcacaatcacatacttacagagaaagtgttgataatctgattcaacaaagtgattatttagggtggatctgggaagctgaaatggcaatgcctgagctaccaattcacaaaactcaaatagaggaaaaggatgagtag

SEQ ID NO: 64191 - DNA, 531 bp, Acinetobacter baumannii
atgagtagttattctatacaggtcgggcaaattaaaggtctatatgatatttttgtcgaaacttcagtagctaaaactgatccaaattatagtgaatataaaagaataggagatacttttctaaagtatattatgactgaagatcctgattatcattctagtcaagtttattctattctttctgaagtaaaagaattatctatagcaaataggttgaaacggttagaagcgaaagtcagaaataaaaattttgacatgcattatcttgcttgggattatattaaccgaggtatagttcaagagaaaaatgattatttagctgcacttcaattgaataaaatttatgcagaatcgaaggttcagtataaaagaatacatggtgaagaaaatgaactaactagcaaaatttatgctgaaatgcttaaaacaaagcctgagaatttaagacgtatgttaaatcataatagagaagtagatctatatcttttagagcctgctaaaaaaattctttcacaactttctagtacatga

SEQ ID NO: 64192 - DNA, 546 bp, Acinetobacter baumannii
gtgataaatcgtccgttctttcatcttgatcaagcagaaagaaagctagaaagcttaaaaagcgcaaaccctaaaatttgttactacatgagttatggtgcttttgataaatcaatcttagattttgaaaatgaaaatgcccctatgtgggagcgtgcttggcttaatcaacatgaattccgtttgatcaaattgaatgttgaaaaaatggctgaagaagatttagttaagctaattccaaactataaagatgttctaacttggcaagcagaacaaaacacaagtcaaagctgtcattactacttttctcaatcttttgatgattcagaaaatgagattaccacatcatcaccattctatttcaacctaaaagatgcattgatagctaagttgtattttgaaaaaacaatgcctaaacgccgcttcaaaattcattctggagttatgtctacacaaggattaatgaagcttgatggtggaacaagtgaacactctcaaggcttagttgatgctcacaaagagcgcttagcttcacttaaaaaataa

SEQ ID NO: 64193 - DNA, 360 bp, Acinetobacter baumannii
atggctggcgtttcagataaggcttgctgcattttttcagctttagtatcaggtgcaataccacgtaactggatcggctgcttacgccatgaagttgctccaatatcaggccctttttgtaattgccacggtccgacagccaatgcaagtaaatatgttggtagtggtttggtttgtgcaaaactgagtgttttccaccctgacttctctatttgctcagatgtttgttgggtattggcaaaacctgaatatttgcttggaatcgtcaaacgaatattaaacggcgttttaaaacgtggttcatcaaatgatgggaatgactggcgtgcactaattgcttccatttgcgtcatcacataa

SEQ ID NO: 64194 - DNA, 312 bp, Acinetobacter baumannii
atgaatacttatacaaaaattgcaatcaattacttcaaaaatttgctatccgttagcgaacaaaataacggattgaaatattcagaatcaatgcaaaacccgaagcacatagcctgtaatgaaactacttttttcataactcaaattgaaaattcaattgtaattatcgactgtgatcatgaaagttttttgccgtattcgattgatgcctgtttagattttacgtctaacagcgttaaagaagcagcagagaaagcgattgattattattgtcaaattcgtgatcactattttgaattaattaatcaataa

SEQ ID NO: 64195 - DNA, 204 bp, Acinetobacter baumannii
atgattaattatatggaatatattgataaagtgaatcaaatgttgccaattgacaaccttacagcactgcaaatatcaataatttgggtatgtattttactattttcaaatggtgttattttcgttattttctctttaataactttttttattgaacaatatcacctcattaaactgaaaaaagttaaatatgaatcggactag

SEQ ID NO: 64196 - DNA, 225 bp, Acinetobacter baumannii
atgattagcgatgtttctaacactattccagaatttaaaaataaagtaaaagaaattctaaaaaatagagatggaattattacaggcttcgattttataaatcttaatgttataaaattattaagtctattaaaagaacaagagtcaattaatgagtctaacaaaaaaagagacttaatcctcactgacctgttcaatgataatggagataaaaataatgattaa

SEQ ID NO: 64197 - DNA, 231 bp, Acinetobacter baumannii
atggttcagcaaaatatacaactaaaatttaaaattcctgctagtcgatttatctctttgtttgggtttattgcgattttaagcattacagtgactacctggtttaccagtgaatttaagtctactttacaatttggcgtacctttagtgcttgttcttatatttttctattatttgaaacgttctaccgtaaagttaaatctcaactctagtgaagaaacattgaagtga

SEQ ID NO: 64198 - DNA, 369 bp, Acinetobacter baumannii
ttgattggagcagatgcaacaagcccttttgttatggtcatgaagattgtcggtatcccgtatgcggatagcattttaaactttattgtaattgtagctgccttatcagccatgaatagcatgctttatatttcaactcgtatgctgtttagcttgtcacgtgcaggtgatgccccaaaagtctttggtcgaattagtagtaatggtgtaccggtaaatgcgctgttgttatctgcggtagggattggtattgctagtattgtttatacgattaatccagcttccgcatttccaattatgattgcgctatccatgtttggtgcgttgttcacgtggggaagtatatttgtgactcatatgtttttttag

SEQ ID NO: 64199 - DNA, 255 bp, Acinetobacter baumannii; identical to SEQ ID NO: 44740

SEQ ID NO: 64200 - DNA, 171 bp, Acinetobacter baumannii; identical to SEQ ID NO: 51532

SEQ ID NO: 64201 - DNA, 348 bp, Acinetobacter baumannii
  misc_feature (333)..(342): n is a, c, g, or t
atgactgctctaaatcaatatggaatgagtttagaaattacgccgcataatggatggtctcagcggttttgggaggatcttttaccagtgaaggagcgggtgagtaaacatccgttttttactgaaatggccaatgggggattgagcctagaaagtttccgttatgctttacttaatttctatccattagtagcgcatttcccgtcctatatggctggtgcgttagctaaagcaactgcttttgcagaacctggcgttactgaaacaagagattggttaattcaaaatattaaggttgaagagcgccatttacagtggtatcgggattgggcnnnnnnnnnncggtag

SEQ ID NO: 64202 - DNA, 657 bp, Acinetobacter baumannii; identical to SEQ ID NO: 48612

SEQ ID NO: 64203 - DNA, 249 bp, Acinetobacter baumannii
atgaaaaaaattcttgttccatttttgcttgctttggcttctgtttcggcttcacaagttgcattagctgcaaaaaaaggtggtacgtgctattcaatgaataacggagaacaatatacttgttctttccttaatgctaagcaacgcttctcagttgaagatttatacaattctggatatagagtagtagcttatcgtgcacctattccgacaagccctgctcacatgattatcattgaacaacaatag

SEQ ID NO: 64204 - DNA, 504 bp, Acinetobacter baumannii; identical to SEQ ID NO: 50906

SEQ ID NO: 64205 - DNA, 276 bp, Acinetobacter baumannii
atgcaaaatataatatttgtatttccatttattatgattctagcagtcggaatggcatggaagtatagggatgatcctacaaagccttttgaagatgctatgacattcgggtggtggggatttggtataaccttaatacttacaattattgtagctgtgacatcaaataaagagcatccagattatgtagcccgtgtaattcattttgcatcaatgccagccattactttagtttttcttggcgcagtagctttaatgaaaagttcagtaggataa

SEQ ID NO: 64206 - DNA, 879 bp, Acinetobacter baumannii
atgaacatgcaaaataaagaacagttctctttcactaaagctgaacgtaaaaaagcaaagcttaagctaaatcttaatggcgccagcggttcgggtaaaacctactctgcccttgtgttggcttcaagtcttggcaaaaagattgcagttattgatacagaaaacgaatctgcatctttatatgcaaatgaatttaactttgacacattgccattaaagccaccctatagccctgaacgttttgcaggcgcgatccatgcagcacataacatgggctatgaagttcttatcattgatagtgctagtcatgaatggattggaactggtggatgtttggaaatcaacgatgaagcagctaaacgttttaaaggtaacacttggtcagcttggtcagaaaccacaccacgtcaccgcaaatttattgacgcgattcttcaaacagatatgcacattatcactacaactcgtgcaaaaactgagactgtacaaggtgaaaaaggaaaagttatcaaacttggcatgaaagctgagcagcgtgaaggctatgagtatgagcttaccgtttcactcgatatgttgcatgaaaataaatttgcaatccccacaaaagaccgaaccaaactttttaatccaacaggcgaagtaatcacaaaggaaactggcgaaaagctcattgcttggcttaacgatggtcgcagccaagaagaagcgcttcaagctgcttttgatgaagctatcaagcgtatcaatgcaactacagatgttgctgaacttggaatcatctattcacagttcaaaggtgctgattgtgaagctgaaatagttagcgcttgtagtagtcgcaagcattctttaattggcacacatggcaatgcgtga

SEQ ID NO: 64207 - DNA, 765 bp, Acinetobacter baumannii
atggataactacaaaatcaaagttaatgatgaagctgagagcaaagaggctcaggagttgtttttagagctaggtggacaatggaaagacagcggaaaagtgattttggaatatgacccaagcatgccgtttttctatctagatggtgaaatattacataaaggatcatcaactcacaactatcaagtatgtgacagaaaagaactaaccctccctcagcttcaagaccttgttgtgttgaagcgtggtgatgtgaaggatgcaacacacaagaacttcagaacaaataccccatacctaaaacaaggtgagaatgaatactacatgtttaatggggagtgggttttgtctaactgcccaaatgacctagagccaataaataaaccccaagacccagccttgattagcggtgcggaggcgttagatgcacttaaggccaagaaggaagtcgaatattgcggagaagggttgaatgatagctggttatcagcagaaaccttgccagtagtttatttcttgacagactctttcaggttccgcctcaaaccccaaaccatcaagcttgaacttgagctgccgaagccttttgagccagaagaagattgtcacgtttacatcttagatgacggaaaaacagatggctatcgtcgttattcctacgaagttcatggtgataaaggaaatacatttattggtatttggcgtaccgaagaagagatcaagcaagtcgtagagcaactcagaaagatacgaggtgcctcatga

SEQ ID NO: 64208 - DNA, 375 bp, Acinetobacter baumannii
atgattgatcaatctatattagtaccagtaaagatattaaaacaaaatgatatttattacttgagtaacaaagaattagatatactggagcaaagtagcaacttgtatattgccatttcaaacttcaaaaaactcttaattcaaaagtatgttgcttatgcaattaatgaaattgaacctcctaaatttgatcttgataagagtctcaaaaatggtggtatcttaattgaagtttctgatgagtgttttgatagtgatgttgaacgagtcacgatgactattccgaaaaatattattaaaggtattgatgctatttcggagaatagaagtgcaacatttactcaactaggtaaacaattaatcggtaagccctaa

SEQ ID NO: 64209 - DNA, 219 bp, Acinetobacter baumannii
atgaaaaaattcttaacttttattctctgtgctggcttaggctattttgtatcttattttttagataatggatttttcttgatcctaactcttgttctttggggtttatgggccaaagatccaggaattagttcagtaaagtttcactatgttccatattcaaaaagccattcaaatatagctcccttcactcctcctttttttacgtctagccgctaa

SEQ ID NO: 64210 - DNA, 1326 bp, Acinetobacter baumannii
atgtatcttgaatatgtaacgttttcaagatggaaaatgtcaaataaaatcatatttttgatagatatcaacaatgcttattgctcctttgaaagagtatttaatcctaaactcaatgatcgtgctgtaattgttactagcaatggagacggttgcatagtagctcgttcagcagaagcaaaggcgcttaatattccgatgggtgcaccactatttaaagtcattgatattgtgaaaaggcacaatgtaattgttttatcaagcaattatgctttatatggagagatgagtagaaggtttcataacatattacgagattacgtaacttatgaggaacatgaagaatattcaattgatgaagcctggattgatttaacttcttatgttcaaaattatgacttaaataatatagcaaaagaaatacttcagcgtttaaaacagtggcttggagtgccctgctgcataggaattgggaaaagtaagacagaagcaaaaatttcaaatcacatcgcaaaaaaaaacccacaattcaaaggtatatgtaatctagttgatatggatccctgtgatatagaagaactatattctggtatagatgtttctgaagtatggggagtgggccgtaaatactcaaagcggttaaatgaaataggtatatttaccgtgtttgatcttgcatgtgctaatccatttgagatgaaaaataaatttggggtagttatgcaaagaactatactcgaacttcaaggtcaagcttgcattcctctagaaccaaaacccccagcaaagaagcaaataatttcatcacgctcatttggtcaaaaaataaataacttgcaggatcttaaggaggcagcaactctctttacgcaaaatgcagtaagaagactcagagctgatgaacaactatgcggtgaaatcactggttttgttcaatctaacccttttagtaaaactgaaaaatattatagtaaagcagtggtatataggtttccagaaccaacagattgtgttttggatatagttaaaatttcgactgctttaatgaatcaagcatatatgccaaatataaattttaaaaaatgtggggttgtattatcaaatttagaaccaaagaataaacatatttatgatttactgacagatatgcaaaatattgaaaagaaagaaaaattcatgaaatcatatgagctgatccaaagtaaattcggaaagaaaaaattagcggtcggtgcttgtaatttaccaggaagaaattggtctatgaaacaagaacgtcttagtaataacccttttacttggagtgggttgttaaaagtaaactaa

SEQ ID NO: 64211 - DNA, 687 bp, Acinetobacter baumannii
ttgtctcgtgggctcggagatgtgtataagagacagaacttaattccaccacatgatacctacatagaactattcttaggcactggatcaattttatctaaaaaagctaagtcatctagacaaattggaatagatttaaatattgattgtattgaatcttttatttcacccgaaaatgatgttgagctttatcatactgattctttaaatttcttaaatgagtttgatttttcccaatctggccgaacagttttatattgtgatccaccttacttactcgaaaccagatcaagtaaaaagcgctacaaatatgaatttaatgatgaagaccatctgaaactaattcaactcctaaagaaattgcctgaaaattgttttgttcttttatctggttatagaaatagaatttacgatgaacttattgcggactggtggtctatagatttccaggctatgacaaggggtggtgttcggactgagacagtttggtgtaatttttttccaaataccattcattatcatacttatgcaggtaaagattttactgaccgacaaagaattaaacgtaaagctgaaaggtgggcaaataacttcaaagatcttccatgcgctgaacgtcaagctattcttgcttccatactttctgtttctaatgctgaggattacttaaatgacattaaaggatga

SEQ ID NO: 64212 - DNA, 498 bp, Acinetobacter baumannii
atgaaaaactggttcagtacagcagtaaaaagtcttgatgatttaaaaaaagaatatcgtaaattatgctttaagcatcatcccgatatgggtggaacaactgaagatatgcaggccataaattcagaatacgagcaacttttaaaaaaattaattaatcaaaaagctgatagtaactattcggataaatcaacattttcaaaccgagaggaagagatagaagcagaaattaagctaagagaagttttagaaaaaattgaaattttagagggcttagaaatcgagaaaattggattatggttatatgtttctggcaacacaaaagctcataaagacaagttaaaagaagcaggattaaaatggaaccatacgaggaaactatgggtatatgtaggtacagaagcaagaggacgtggtacaaaagatatggatgagctaagagcaaaatatggaaatgaaaaatttaaaactcgatcaaaaataaagaaaattgcttaa

SEQ ID NO: 64213 - DNA, 597 bp, Acinetobacter baumannii
atgttaaaaattttctcaaaaaaaactattttagcaattatgatcggggccaatatcgtttcaatggcttccgttgtacatgcaggctctaagtctagtagcagaagttcatattcttcaagttcttcaaaaagtagctcgtactcttcaagtagtcgtagctcttatacgtctactccttccagtagctcatatatttcaagtgctcgtagctcatacacaacaagtacaccatctaaaacgtctgtatatacccctgtaactaagacgacagtaccaaagactgcaccgtataaccatgaagctaaaaaaacatctaatgtcaaagcaagtccaataggtaataaatctacaggacaaagctatagcacattaaaaaatactaaatataagaaaggatctagtaactttctatctttggttttacttgcttggattttgtcagattcaaatgactctaaagcgtctacttcaacaacaaaagaagtcgtggttgattgtaaacaatggcttaaagataaccctcataaacctaatgacctctcaaatgacgagtatcaaaaaattaaaaaatattgtgaaactatagccaattaa

SEQ ID NO: 64214 - DNA, 489 bp, Acinetobacter baumannii
atgtataatgtattgattatagagcaattaaaactatgtaaaatggataagccatctttttgtgcttgccaggttggtgagatctatatttgtgatccagtgattgaatttaataatggtttagaagtacttaaaacaaacatgtatgactgtaaagattttgatatttacagcattggtactaaggatcagtttaaaaaatttatttttactttagaaaaattagcgcagattctgcatggttgcccattgctagatggacttaaagcaacaatgaattttcagggcgcttttattgtagattgtttctcattctttcaagctaatttagatattttattcaaacctagaattctaagtgagttcacatctagtgaagatgaaatattaaatttccagttaatatacttcaaacttctagaagtatttagaaaagctggagcaaatggatttattcaattcaatacctataaaacattaaataaataa

SEQ ID NO: 64215 - DNA, 231 bp, Acinetobacter baumannii; identical to SEQ ID NO: 64197

SEQ ID NO: 64216 - DNA, 171 bp, Acinetobacter baumannii; identical to SEQ ID NO: 51532

SEQ ID NO: 64217 - DNA, 1854 bp, Acinetobacter baumannii
gtggttgttggttatgagggaaacccttataaaattgtgaatgttttaaatgctaatgacattgttatatcaagtcttgattcggtacgtagtctacaggtcaatgctagaagtttgaccatttttaatgggggaaatacgctaactgagcgtttgaataagggtgatcaggatattagtaatgaagcttggcagattgctttacaacgttatgagattattaagcctttgattgagtattcaacgactgaactggtcgaaaatagggcgaatgaatatgatgtgaatcgctcaacattgtggaaatggcttaaagattatcgggaaaataattctctaatggcattgattcccaaaaaacgaggttggacaactgaaaaatcaaggttgtcacctcaagtgagcaatatcattaaacaagctatcaatgatgaatatttgaatgcgaagaaacctagtatttccaaaacgattgaaattgtaaaagcagagtgttcacggcttcagcttgaagcaccacatgaaaactctattcgtagaagaatcgaggctttaaataattaccaagtaacgaaagcacgtcttggatctaaagctgcaatagataaatttaaggctgctgctggttcatttccaaatgctgattaccctttggcatatgtgcagattgatcatacacctctagatattgaaatcgtggatgacgagttcagagaagcgattggaaaacctcacttaaccttggcaatcgatgttttcagtcggatgattgttggatattacctatcactagaagcaccaagtacgacttcagtggcgatgtgtatagcatcttgtattttgtcaaaaaaacgtaagttgatcgaactaaatattgatgctgaatggcaggtcgaaggtattatggactcggtgcatacagataatggacccgattttagaaccaatcacatcagtaaagcttgtctaaagtatgggattcattgggaataccgaccaattggtggggcaagatttggcggtcatatcgagcgtatgcttggtatcgtcaatcttgaaatgcatgtcttggatggtacaactttttcaaatgtgcagcagcgaggaacttatgattccgctaaacaagcctgtatgacattaaaggaacttgaatactatatcgtttattggattactaaagtttatcatcagaagaagcattcagctttaggaacatcacctattgttaaatgggaagaaggtgtttggggaacgaagacgacagcaggaacaggtttgaaagaacgtgtatcagatgaagataccttgtttattgattttctacctgaatttgaagcgactattcagcgtacaggggtgcaaaaagataacttattctattttgccgactgtttaagacaatgggttaattctattgatccagacgacaataatcgaaagcgcaaaagaaaattcttatttaagcgtgatccgagggatatttcacagatttggttttatgagccattttctaatacctattttaaagtacccactgcaaagcgagagataccaccgattagcttatttgaatatagacaggtacagaactatctcaagaatgggcgtcaggatgttcagaatcaggatgagatttacaaggcgattttacatctacgtgagcagcttaatcaggctcgaagcttgactcgaaagcaacgtcgctcaaaccaaagaaaaaaggaaaatgaaaaagccattactcagctatccgaacagaatcagtctaaaaaggctgtagtttctgaaagccttcagacaagtgatgatttgtggagtactcctttaactgcatttgatgatttaaggtga

SEQ ID NO: 64218 - DNA, 480 bp, Acinetobacter baumannii
atgttatctcattcagaacttgttcaaatagcagcaaaatgggttaagagttacttaaaattcccaattattgaaacagagcttaagtgtattggaagtagagaaatacctgatattttggcatttagatcaaatacaagcttgattgttgaatgcaagacaagtttagcagactttagaaaggattttaaaaagcctgaacgtaacggtcaattaatgggtgtcggtaactatagaatctattgtgcacctaaaggattgattgaaatcaacaaagttcctgactcatgggggctgatcgaggtcagttcaaacggcaaagttacaatagagaggttcagaacaggtaatatttattcaagtaataatagccaagatatttataaacaaagggatccgttttttcatctatcagatatagaaaaggaaagatcatttctatattcaattttacttaggagaatgtctaatgacaaatga

SEQ ID NO: 64219 - DNA, 504 bp, Acinetobacter baumannii
atgacaaatgaaatatatgacgcaaccaaattactaactgcatttaaattccctaataaagccagtggtgaacatacatttattatgggctgtactaataaaaataaaggaaaatccttgttccaagaagaacttaaagatcatcctaatattatctttatagaagccactgaagatgacattgcaaaacaaaaagaatctcaacgattgaaaaatttgaaagatgaacagcgattgctttctataaaagaatgctattggagtcattctaaagatgaaagtttctttttagatactctaaagtattccctaataaaccatttcgaattttttgaaaatgtagatcccactattgaccagttaaaaaccctatttatgtattttgatgattacttaatcggacaaataattagttggggctatagtgatacagaggtttccacttatattgatgagtatatagatgaaaacagagatgagctagagactatgctgttcaaataa

SEQ ID NO: 64220 - DNA, 225 bp, Acinetobacter baumannii
atgtttgaacttaagactggaaataaagaatatcatgaaagccaattgaggaaaaccaagatatttattattattcaagttacaatcctcatattggttaacctatataccattatcctaaaaggtaaaattgatttggggttaagtacaattattttgtttagtattggacttggattactaggcttaaaaaaggttttaaccgctttacagaaattcaaataa

SEQ ID NO: 64221 - DNA, 306 bp, Acinetobacter baumannii
gtgggtgaagtggttctggcaacgcatttaagagcatgcaagattggatttgaacaggaatataagttccatcctgaacgcaaatggagagcagattttttaataaagggttcaaagattttgattgaggtagaaggcgggatctggagcggaggccgtcacacaagaggtaagggctatttaggggatatggagaaatacaactccgcagcaatgatgggttttacagttttacggttcagcacagagcaagtgaaatccggtatggcattaaagcaaattgaattattaattaagggtaaatag

SEQ ID NO: 64222 - DNA, 291 bp, Acinetobacter baumannii
atgaacacaaataatctatcaaatcaacagcaaataatccagagctggtttgagccggctctccacacacttaaagcattaatcaaaaagtgtgaagagaacttagagcgaatcaaagctgacaagaaaaatgccgccgtaaagcgagatgactttaaggaaactttagttcgtcaacaccgtattacgtataaccatgctgaggaaattatcaaaagccttggtcgtgctgggcgtattcgtttcttgggtagtacttacattcagattaaagaaggcggtgaagcatga

SEQ ID NO: 64223 - DNA, 162 bp, Acinetobacter baumannii; identical to SEQ ID NO: 46251

SEQ ID NO: 64224 - DNA, 123 bp, Acinetobacter baumannii
gtgcgtcagcatcgtattacgtacaaccatgctgaggaaattattagtagccttagccgtgctgatcgtattcgcttcttgggtagcacatacattcagattaaagaaggcggtgaagcatga

SEQ ID NO: 64225 - DNA, 150 bp, Acinetobacter baumannii
atgactgacaagaaatgtccgtattgcgattttgatgaatatgacatcattgataagaatgaatttgctgtaattttaccagacccaaatccgttgtctaaaggtcactgtgtagtgactccactacgccatgtcagctcgtttttttga

SEQ ID NO: 64226 - DNA, 600 bp, Acinetobacter baumannii
  misc_feature (8)..(33): n is a, c, g, or t
atgaccgnnnnnnnnnnnnnnnnnnnnnnnnnntatgatgacgacgatgaagatgatgatcgtggccgttcaggtggccgaggccgtggtcgcagccgtcgtgatgacgacgatgaagatgatgatcgcggtcgctcaggtggccgaggtcgtggtcgcagccgttatgatgacgacgatgaagatgatgaccgtggccgttcaggcggtcgaggtcgtggccgcagccgtcgtgacgatgatgacgaagatgatgatcgtggtcgttcaggtggccgaggccgtggccgcagtcgttatgatgacgacgatgaagatgatgaacgtggccgttcaggtggccgaggtcgtggccgcagccgtcgtgatgatgacgatgaagatgatgatcgcggtcgttcaggtggtcgaggccgtggccgcagtcgttatgatgatgacgatgaagatgatgatcgtggtcgttcaggtggccgaggccgtggtcgcagccgtcgtgatgacgatgacgacgatgatgaccgccgtggccgttcagatggtcgtggtcagaactctcgtaatcaaaaacgcgatgcttatggacgctttacgtcttaa

SEQ ID NO: 64227 - DNA, 942 bp, Acinetobacter baumannii
atggctggtcaaatcgttttaaaatctcaaaatgcaattgataacttggctgacttgccagatatcaattactacattaaccgtgttaaggcagatggcggcgttatctataatatgaacgcactattggatgtctttgcattcatctattcaaaaaacattactgattcagaagtttttagtgctatcaatccagcatggggggttaaatacgaccctgccacaggtaatatttctaagctctatagtttgtttgatcctgctggcgatttaaatgcattcggtggatcattaccaattaaattgcagaatgacttaggtgtgccgagcgcttatttgggtggttctcagaatacatatttgaaagcagcaggaaccgtatcaggtgtagaaactattggttatgcaacagcagcggttattcctcaattaagcaattatggtgcaggtgctggtactaatttcccactaggacttttatggtctcgtgaggctcatgatgctgcagatcctgtagggtcagttactccatatgtcgcagcatcttggtatgtaggccgccctgacacaagcaatattactctatcgcagtggactgaatatttctctgtatttagttcaactggtagtgcaggttccaatgctttgacaggctatgaaaatgctaaacctttgtctgcatttgctgatacaggcggtttaagagtgtataaaaatgggttgcaagtgctgtttgattcaactgtaactcaaacgcctattcacaaagataagcttgagttgcttatcggggcgacagtgacaggaactggcgctccagcaacaacttatttcttgggccatttcattgaaaactgggttttagtaaatactgcctctgaaaaaatgattgaaatcagtaaacgcattaacgataaatattatgcggttatcccgcattaa

SEQ ID NO: 64228 - DNA, 2118 bp, Acinetobacter baumannii
atggctcaacaaattgtgattgaggtgcccggcactaaaatcagtgaacttgaaatggcatcaagtgtctctcgtaaagacacaacccctgttgttcaaaatgaggagaccaagcaggcatctgtgggttcaattgctgatttggttaaatcagagttgggttcagctgcttttaaaagttcttcagagtttgcaactccgagtagcgtaaattcggtagatatcgccagcaaaatgcgtgttgatgcagtgaatgagcgtgttgatgtagttgaatatgctgtttcaacaatgcagggtggtggtgatgcaagcttcaaaacgtatgaagaaatgcttgcgtatacgccgcctaaaccgaatgtgacagttcgagtaaataacgatcctgatgtaactaaaaatggtacttatacatgggatggtgttgcttatatcaaaagtccttatgacccttatattcagacaaaagaatatgttgatgaaaaaattgagcttaaaaaatcaattaagaaacttttttcattaaaagacgttataaatattcccgttttaagtgtttacactgatggtagtgtttggattaaagggttatcaaaagatatcgcttcattttccaatgcgctgggtacagccattgcaaatattaatagctttatttcattaggttctaactcctcaaatattgttgaggtgcgtgaccgaaataatctacctgtattttcaatcaataaaaatcttgaagtaaatatcggtaaatatcggttgggttcaatgtcttcggcattggataaactttcaggtgttttattcactcaaaaaagttcaaatctgcttgaagttcgagataacaataaccttcctgttttgcgtcttaaacgtaatggaaacttattgattcctcgcctcggtgatgttgcaagtgaagtacttgcagtaaagcggacaagtgctcgacttgagaaaaatgtgaattctgcaaatggtgccgaatatgcagataacgttttagatattcttaccgatctaccctcaagtgggacactcaccgcattaagtgcttctgaagtcaatgcttctggtctttttccccatctcgttacgatggtgcgtattccagctttaacacgtatcgcagcaaataaatatctttgcttttttgaagctcgtcgtgatggtgatgactttggggaaaactcacaaggtgttgtcactctaactgttgatccagtgaatctgacaattacgacctctaatatgcaatcgcttcataatacttacgttgatgaaaatgatcagcgttggacgtttatgaatgcttgcgctgttaagcttgattcaggacgcattattgcactttacgttaagcgaaatggtgtatcaaatcacgcaattttaaaacgatattccgatgatgatggtgcaacttggtctgaagctgaggacattgggcatttcttaaatatgtctttttataatctgttatgtccatgttctcaagggcttgtcaaacgtttcggttcaaatcgtgggcgtattgtttttcctgtttggtattcaggaaaacgatatttaccttctgaatttcgtgctggatacatctattctgatgacaatggtgacacatggcgtgacggttcatttaacaatgaaacaatgagtaatgaggtccagtgcgcagaagatgtgaacggggatattcttttctgtattcgtcgtgaggtggaaggcaatacaacaaagacatggagcaagttgttggatggtgaaacccaattaactcctttttatccaaatcaaattttaggtcaaaccaaaatcatgagtgggcttatccaagctcaaaaccagtttgataaaagtaacgctaaattccagtttatcaatgcttatacatctggacgtaaggatgtgaagatttggtcttcatataacgggggcaaagactggactcatgagtttgatgtgcctgataccgcttcatacgctgcatatacgtgtattgagcgcgtaactgcaactcatttgctcgcattgtgggaagcatcaggtcacgcaacatttaaatgcaacattctcagtatcaaagatacaaacacttataaacaagcaggttga

SEQ ID NO: 64229 - DNA, 1197 bp, Acinetobacter baumannii
atgaaggtgttaaaggatagctttatttacttaatcggggagctttttgcaaaaagtctcccctttctcatgttgccctatttaacacgaaaacttggacctgatggttttggtgagttatcttattacctaactatgctatctctgtttggtattttcgtcggcttaagtcaagatggtgcagttacacgttatttctatttttacggtaaaaaagctttaaataccgtggttaaagcaggttatttatttaacattgctatttccatcgtattgttgctcagttgctggtggcttaaagctgaaattatggcatatgttgttctagcaacgatgtttcagtcttttgtgaatgtccaacttgctttgcgtcagtgccaaaaacagcctctaaaatatattacaatccaaattatcttatctttaaccaatgttttatttacggtaggtgctcttgaatacttcaatcaagacttagtggcctatcgtatattagcaattgtggttgcaaattttacaacattcgtgattgcgagtttaatactgggagatttgtttagggatagctaccgttttacgtggcaaaggttgcgtttaggtcttttttatattttttctttcggatttcccttaattctgcaccagtcaagtatcttcattaaagggcagctagatcgcatctttatttatcagcattatacgaaatcagaattaggtatctattctgctggggtacaaatagctttagtcttacctataatttttatggcccttaacaaagcaattgtacctcactattaccaagctcttaaaagtaatagtttgacaatagtgcagataaaaaaatatacattattaagtttacctttaagtatactacctgctgtagttggctggcttatgcctgaacaattgtatcaattatttctaggtaaagggtatgagacatcaaaatattttacagtggtatttttggtaggttatggtttaacaatgccatatctaattttggtaaattatttattttatcatgctaaaaatagaattatttcacttataacctttagtagctcattactctatataggttcattatatatttttagtcaattgaaattagaatggattccattcgcattaattctttctaatctttttatgttggtagctttatggaacatcgtcaaaaaagtttga

SEQ ID NO: 64230 - DNA, 888 bp, Acinetobacter baumannii
atgattgagcttaagctttcgcaaggggctaaaccgggccatggcggtattttacctaaacataagattactgctgaaattgccgagatccgtggtgtttcccgtgaccatgattgtatctctcctgcgaagcattcaagcttttcgacaccaattgaaatgatgcatttcttacagaagttacggactttatctggtggtaaaccggtaggtttcaaactgtgtattggtcaaccttggcaatttatgagtattgtaaaagcaatgcttgaaacaaaaattgtgcctgattttattgtagttgatggttctgaaggtggcactggcgcagcccctattgagtttagtgactatatcggaacaccattacgtgaaggcctacgttttgttcataacacacttgtaggtgctggcctaagagatcaagttaaaattggtgcaagcggtaaaattattagtgcatttgatattgccagcacatttgctctcggtgcagattgggtgaactcagcacgtggctttatgtttgcagttggatgtattcaagcgcaaagttgccatacaaaccaatgtcctgtaggcgttgcaacccaagataaagatcgccagaaagcactccatgtaccgaccaaagcagaacgtgtatttaatttccacaaaaatacattacatgcattatcagaaatgattgctgcggcaggtttacgtcatccatcggatattaaagctcatcatttagctcaacggattaatgaccgtgaaattaaaaactatgctcaattacacttcttcttaaaagaaggtgagcttttacaatctgaactgaaaaatgatgatgataatttctattatcgtatgtggaatatggctgacgccaatcatttttaa

SEQ ID NO: 64231 - DNA, 252 bp, Acinetobacter baumannii
gtggatcttgagctacttcaggctgatccagttgattatctctcatctgtggtactttctgtggatcttgagctacttcaggttgatccagttgattatctctcgtctgtggtactttctgtggatcttgagctacttcaggttgatccagttgattatctctcgtctgtggtattttctgtggatcctgaacttcttcaggttgagtttcttttcctagttgcggatccgcaattaacttattttctctaa

SEQ ID NO: 64232 - DNA, 927 bp, Acinetobacter baumannii; identical to SEQ ID NO: 46217

SEQ ID NO: 64233 - DNA, 819 bp, Acinetobacter baumannii
atgcttggtattgtcaatcttgaaatgcatgtgctggatggtacaactttttcaaatgtacagcagcgtgggacttatgattccgctaaacaagcctgtatgacattaaaagagcttgaatactatatcgtgtattggattactaaagtttatcaccagaagaaacattccgctttaggaacatccccaatcgttaaatgggaagaaggtgtttgggggacgaagacgacagcaggtacaggtttgaaagaacgtgtatcagatgaagataccttgtttattgattttctacctgaatttgaagcgaccattcagcgtacaggggtgcagaaagataacttattctattttgcagactgtttaaggcaatgggttaattctattgatccagacgacaataatcgaaagcgcaaaagaaaattcttatttaagcgtgatccgagggatatttcacagatttggttttatgagccatattctaatacctattttaaagtacctaccgcaaagcgagagataccaccgattagcttatttgaatataagcaggttcagaactatctcaaaagtgaacgtcaggatgttcagaatcaggatgagatttacaaggcgattttgcatctacgtgatcaacttaatcaggctagaagcttgactcgaaagcaacgtcgctcaaaccaaagaaaaaaggaaaatgcaaaagccattactcagctttccgaacagaatcagtctaaaaaggctgtagtttctgaaagtcttcagacaagtgatgatttgtggagtactcctttaactgcatttgacgatttaaggtga

SEQ ID NO: 64234 - DNA, 321 bp, Acinetobacter baumannii; identical to SEQ ID NO: 46215

SEQ ID NO: 64235 - DNA, 153 bp, Acinetobacter baumannii
atgttattcaaaaaattcgctgttgctgctgctgttgctgctactttagctttcgttggttgttctaagaaagaagaagctcctgctgctgctgcatctgaagctgtagctgctgcttctgaagctactgctgctgcttctgctgcacactaa

SEQ ID NO: 64236 - DNA, 1902 bp, Acinetobacter baumannii
atggaaagtcaaaaagttatagctgaaattgagaaacaattaatagaactagataaaaagtatgctgttttacaagaggccttactgaaggtcgaaaataggatcggagatctgggagcattaataactttaggaacagcaggatttgcaattgttataacaatattggctattattttaggtttttttgtttatcgtaatgctcaagcaactgccaaaaatgaagctcaaaaatggttggaggaaaaaggatacgaattaaatcatcagctagatgaattgaaacaaacatctaaagcagctatagaacaacatagacgagatttagaacaacaatatgtaattaaagaaaaagcattcgaacatgaattaaagattatgttagcgataaatatgagtgataaaaaaaagctaatttctgaatttatcgatttacctatatctagtgataaaaagaatgaatttttggatagcttgtataaacaaacgaatatgcgagaacttttagatgatatttatattagtaaatttaaagaaaataaaattgataaagatttattttcaaatcaaatagtcaattcttatttaagtgtggcccagaaattaagtaaaaatgataatttagagggagcaatacaggtttatgatgatttgatttcccagtttaaagactctaaaaatgaagaaattcaggtgagagtggctaaagcttacgtcaataaaggttttagattaggagttcttgataagcctgaagaagcaatacaggtttgtgatgattttatttcccagtttaaagattctaaaaatgaagaaattcaagtacagatggctaaagcttacgtcaataaaggttttagattaggagctcttgataagcctgaagaagctgtacgggtttataataatttgatttctcagtttaaagattctaaaaatgaagaaattcaggtgatagtggctcatgcttacgtcaataaaggttttagattaggagctcttgataagtctgaagaggcagtacaggtttatgatgattttatttctcagtttaaagattctaaaaatgaagaaattcaggtgatagtagctcaagcttacatcaataaaggttttagattgggagctcttgataggtctgaagaggcagtacaggtttatgatgattttatttctcagtttaaagattctaaaaatgaagaaattcaggtgatagtagctcaagcttacatcaataaaggttttagattgggagctcttgataggtctgaagaggcagtacaggtttatgatgattttatttctcagtttaaagattctaaaaatgaagaaattcaggtgatagtagctcaagcttacatcaataaaggttttagattaggagctcttgataggtctgaagaagcagtacaggtttatgatgatttgatttctcaatttaaagattctaaaaatgaagaaattcaagtacagatggctaaagcttacgtcaataaaggtgttagattaagagctcttgataagtctgaagaagcagtacaggtttatgatgatttcatttctcaatttaaagattctaaaaatgaagaaattcaagtacagatggctaaagcttacgtcaataaaggtgttagattaagagctcttgataagtctgaagaagcagtacaggtttatgatgatttcatttctcaatttaaagattctaaaaatgaagaaattcaagtacagatggctaaagcttacttcaataaaggttttagattaggagctcttgataggtctgaagaagcagtacaggtttatgatgatttgatttctcaatttaaagactctaaaaatgaagaaattcaagacgctattattagtgccacaaaaaagattgctagaaacaggcattaa

SEQ ID NO: 64237 - DNA, 879 bp, Acinetobacter baumannii
atgaacatgcaaaataaagaacagttctctttcactaaagctgaacgtaaaaaagcaaagcttaagctaaatcttaatggcgccagcggttcgggtaaaacctactctgcccttgtgttggcttcaagtcttggcaaaaagattgcagttattgatacagaaaacgaatctgcatctttatatgcaaatgaatttaactttgacacattgccattaaagccaccctatagccctgaacgctttgcaggcgcgatccatgcagcacataacatgggctatgaagttcttatcattgatagtgctagtcatgaatggattggaactggtggatgtttggaaatcaacgatgaagcagctaaacgttttaaaggtaacacttggtcagcttggtcagaaaccacaccacgtcaccgcaaatttattgacgcgattcttcaaacagatatgcacattatcactacaactcgtgcaaaaactgagactgtacaaggtgaaaaaggaaaagttatcaaacttggcatgaaagctgagcagcgtgaaggctatgagtatgagcttaccgtttcactcgatatgttgcatgaaaataaatttgcaatccccacaaaagaccggaccaaactttttaatccaacaggcgaagtaatcacaaaggaaactggcgaaaagctcattgcttggcttaacgatggtcgcagccaagaagaagcgcttcaagctgcttttgatgaagctatcaagcgcatcaatgcaactacagatgttgctgaacttggaatcatctattcacagttcaaaggtactgattgtgaagctgaaatagttagcgcttgtagtagtcgcaagcattctttaattggcacacaaggcaatgcgtga

SEQ ID NO: 64238 - DNA, 213 bp, Acinetobacter baumannii
atgaatatgttagccaatatctcgtttgatgctgctactgagtcaaagcttttgaaagacttaagcaagcatcctgaactgttagctggtgcagtggaatatgccttccaacgtggtgacatcgactctaaagaataccgtaactggcaaagcaagattgcagaaatggagcgtctacacactgcaaaccttttagcgactattaaagcgtga

SEQ ID NO: 64239 - DNA, 705 bp, Acinetobacter baumannii
atgagccttagttcaaatgtactaaaatatcttgaaaaacttgaaaaaagttttaaagttttatctcaaaattacacactaaaagaccaactttttgattatggatggtatccgattagatttgtcagtagagtcgaaaaagattcaaatgagtctattgacgcatatatggaaaggttgattttagataaatatgatcaaatcaaagaatattgttttgagttatttcctttgcgaagggagattatagaagaagcttttaaattatttgaagctgaaaactatatagcatgtataccgctttttctaatgcaaaccgatggtatcgctagagattacggaacaaagggaatgttctccggtaaaattaatgtagagccaaataaaagtaaattcattccatatgtgaataaattagccaatcaagatttaacaaaagcaatatttattaggttttttcatagtgataaatttattagttctaaaagctacgaagaattaccaatttcaattaatactgataatacaaccccaaatgataattattctatgaatagacatggtattttacatggacttattgaatatcaaaattatggtacaaagttaaatgctttaagagctatatgtttcatggtctatacgataaatcttggcgaagatgttaagtttatttctaaaagtaacatcgatatagatcattaa

SEQ ID NO: 64240 - DNA, 255 bp, Acinetobacter baumannii
atgtcaattaactctggaaaatggctttgtattggtggaagtgaatctgggaagtgggttgagcaagatgaatttcatgaagttcatccatataacaataatcccctaagacctcatatatatcgtccaacaaagttgttaaatccgcatactaatcagaaagaaattttttatgttttaactgatttgcctgaagatagatatgattatgctttaaaatacgcactagcaaaccaagtaggtactagcaattga

SEQ ID NO: 64241 - DNA, 219 bp, Acinetobacter baumannii
ttgaatatatgtattgttggtgaactagatgatcaaattatagaaaaagagggcaagttacttatagcttctgacattgacttatcctacaaaaccgaatactacaaacagattttcaaccgcgacaatgtcgtttatcaattttggttgcctgtaggttccgatctacatgaaatgtctaaattagtattagatatcttaagagcgcctaaaaactag

SEQ ID NO: 64242 - DNA, 1635 bp, Acinetobacter baumannii
atgcctttaccaaatattcttgaatttattggtacgaatgtgactcaagcaaagtttaaagttgctttagaaaaattattaagctacctaagtgttgagggtgcaacaaaagttgaactgagtgctgcagtaacaccaaaagctgataaaacttatgtcgataatgcgttaggacaatttcaatcaggttcgagtaagttctatgcaacgcttgcagatgcaaacgcggatatcgctaatatcatgcctaaaattgcgtctgatactattaaagacttgatcaacgttggcgaagttataaatggaggcacttggtataaagctagttatacagcgacgagtttgacaaagagtccatatgatgccctcactaactccaaagagtacacagataaaagtatcaatgaacgtactttgcaaagttccaaaactggcggaaaagagataggaataatcacggataggaatgggcgtagaacgtggattgaaataggctccgatggaggaccgactgaacgcactaaaagcttcattaaaaacgcgacgataccagaaaccaaatctaagagtttggttttcggtatcgtggatagaaatgggcgattgatatctggtgttgataagtttggggggcaggttacgagaaccccaaaccttagatccaattatttatcaggcgtggtagacaaaaatgggcgtctaatttctggtatcgataagcaggggttagcctaccctaagtcgtcgccaatctctggaagtggcgataagaaaatcaaaatattggggatcggaaattcatttactcaagacgcgtttatgtatataccgtggttgttaaaagagctcggttttaataatttctcggtgtcggttttaatgtatggaggatgtactttagaacagcactacaattttgccacaaatgatcaatctgtatatgactatgagatttatgacacagatggtccagatcactgggtgtcaaaaggcacaaaaacttttaaagaaggtatcaactttctgaattttgacaccattatcttgcaacaacaatcggcaagaagttgggactatagttcatatcagccctatctaaaccccttaattaattatatttatgccaacacaaattacacgacaagattaggctggcatggaactccctcagcccctgatggtcagcgcaatggtaattggaactggaatggtagtggaagtttcacatcagcagagttttatgcgaaacaacaagaaacatatcaacaattacttgttgacacaccgattgagtatgtaatccccaacggaacagctattcaaaatctgaggggcacatctttaggcgacttaggaggacttaataatctaacatcggatggtcttcacttagacgaaggcattccatgtttgacttctgcttatgctgtcacattaaagtttttagaaatattcaagttacaagggtctgttttcggtagtcgtattttaccgactgctgaatggctcagtaataaaaatattcaaggaccaaatggtacgcctgcgcgagttactccagaaaatatttatattgcacaaaaatgtgcaatagcagcaatcaagaaaccttttcaaacttcttcaattaactaa

SEQ ID NO: 64243 - DNA, 774 bp, Acinetobacter baumannii
atgactaacatcattcgtttaaatgaagcaattaacgactatgtttcacgccctgtaatcactgaacttggcgaggcattgatcgcatttaatgcaagtacccatatcgcagaattaggaagtaaatctgagatatcaccatccgatattttaattgacggttcttatggtcaatctacccccaatccgtttattaacaaaatcggcacaggaacggctacagtaaaaagcgattcaaacggacctcatgtatcgtttaataactgcggatttagagcaaatcaattagcaactgtattcaactacgataactcaaaaagtgtacttttagtttgtaaactcagagtaacaaaaatagcggaagtgaccgcaggaatgcctaccagtcgcattttctctatcaacgcaggtttcccgctgattacgctttcagtcacactaatcaatacaaagaaacatttatcaattagtgtaagtccaacggaagtatcgttaggagaggctgttgcaggcaaggtatacactatggcgattttacgtactcctacgcaatgtaaagtcctcacggctgaaacgattcaaaacgcaggtcctgtgggcattttgaccgaaaaccagattaatattgcagggatagggttaaacacgagatcggtcaatctagggatggatggcgaaacaccattaagcaacacggacgtcttttcatgggaactctatggcaatggggattggagcgatgcccagattcaaaactatctagccacattgtga

SEQ ID NO: 64244 - DNA, 156 bp, Acinetobacter baumannii
atgttttatgccttgttagaatctgttttaatcgacacaaattcaaatggcctactaaacaatcctgcttattcgagtatagaagcttataaagaaacctattcaattcttaatgaagcgataaccttaggaaaaaagattacaaaaattgaataa

SEQ ID NO: 64245 - DNA, 306 bp, Acinetobacter baumannii; identical to SEQ ID NO: 54617

SEQ ID NO: 64246 - DNA, 345 bp, Acinetobacter baumannii
atgtctttgccaaactgtccaaaatgccaatcagaatatacatatcaagacggcgatttattaatttgtccagaatgctcacatgagtggaaagaaggggaagctttagtaactgaagagcaagaagtgattaaagacgctaatggaaacgttttggcggatggcgatagcgttactgtaattaaagatttaaaaattaaaggttcttcttcagttgttaaagtcggaacaaaagtaaaaagtattcgtttagttccagatgcaagtgatggtcacaatattgactgtaaaattgatggtattggtcagatgaagttaaaatctgaatttgtaaaaaaagcttaa

SEQ ID NO: 64247 - DNA, 339 bp, Acinetobacter baumannii
atgtacaagcgtttatgttgtcgttgcgaaacttgtgttgaatgggcgctttccactggtttaatcaaatctaagccaaaaccagttgtaaagcgtggtccagatgctcgccaattgcgtatttgggcacagaaaaaccaattgaccccctacgctacagcttttaatgaagattgggatttactggccttagaagtggattattcagttacggcatttcaacttgaacgtatttatcaaggtcgttctgaaattgatcacaactttgtttggaatcgagttaagcgtgtagctgatcgtttagttgctgaaaagttaaaagctgaagggggagtgtga

SEQ ID NO: 64248 - DNA, 1056 bp, Acinetobacter baumannii
atgacattaacgcaagctgattttgaagcccagctccaagcagcgatagatgattatgagattcaggaacgctataaagctcaagatccacttgtcgttcaccagctgcgttctatggctagttttttgactgcatttggtccagaaatcgatattgcttcaattgaaccatttaccaaaacacgtgaccgctcaattattgcggatgctacaaataaaggcattttgcctataggtacaccgtgtcagcacttaatagaaattatcaaccggtcaacaaatgctgtgagcttaagtcaagggcgaatgattgaggaccatagcggcggtagagtatggcggttgcttcaatcaattactgttaaagctggtgagacggcggaagtaatagcagaacaaagtgaataccgtgaaattaaatatgttgtaccagttactgaagggttccataaatatcgaatagaccttttagaggacctttcacttgcaaatatttcggttaagcagggcaataataactatgtaattaagccgcgctggatgaatgttgaaccaggtgaatatgctgtaactgttactacagataatctaagaagattgtttattgagtttggcgattctgagagagctggtcgtactctgcaagccaatgaaacggtaataattggaattcttgagacatacggggaagttgatgttaatcgtttaaaagatgcggccttacttgatgtacttactaatgatgaacagcgggtatcagtgcgttttaaagctggtggactgattagagagggcgtagatccgttagctgtatcagaattacgtttattatcaagctatccggtaatcgggaacggggcagaagtagagtttttcggaagcaatattccatatgcagatccgcaaaacgattctcactgggtgtctattcttacattaacagctgctgcgcctgatactgaaccgtttagacagcattgctgggataagctccgttataaagtgaaagcaggtgataatgtggagatttatgtttcaagtggtgtaagcggatag

SEQ ID NO: 64249 - DNA, 243 bp, Acinetobacter baumannii
atggatattttaaagacacagattgcaattattggttctggaccagcagggttattgcttgggcaacttctatataaagctggcatcgatcatattattgttgagcaacgtagtgctgaatatgtggcttcacggattcgtgcaggaattttagagcaagtttcggtcgatttacttaaacaagcaggcgttgaccaaaacttaaaagaaaaggattaccacattcgggcatcgaaatcttaa

SEQ ID NO: 64250 - DNA, 414 bp, Acinetobacter baumannii
ttggtcggtatcaatgacatttcatggcccggtacagcttttgcacctaaacagcaaataccttcttttgaaggcttaactgaaggttatcgacgtgttgtaagtgaggcccataaacataatattcaggtgattggtgcaaccttacttccgttctctggtgctttgcctaatacctctttagataattattatcaacccaacaaagatcaattacgtcagcgcattaaccactggatgagaaccagtcatacctttgatggtgtgcttgatcttgatgaaggcttaaaagatccaaaacatcccaatcgattaaatccaatttatgattctggagatcatttacatcctaatgatcgaggcaatcagcatatggcagaattggtagatttagatcaaattattaaaaattaa

SEQ ID NO: 64251 - DNA, 306 bp, Acinetobacter baumannii; identical to SEQ ID NO: 54617

SEQ ID NO: 64252 - DNA, 891 bp, Acinetobacter baumannii
atgctatttataagttccaatgcttggcacactaatgaaaatttaagtttattattatttctgggtcaaaaatttgatgaattattttttgactatactttagattcttacaaacctcctgctttaaatccgtcatttatttgtagagaagctttgtccctaattaatgatatagaaagtgaagttatagatagaaataatttaacttttgtattggaagaattagatttctctttaagaaatgatattattgtaaaaaatctattaacttctgaaattgaaaaatttgttttaaaagacgaaaatgttcggttaagtgatttaaagttaagattagaagttctagaaaaagtcttaaatccattgaattattttactttatgctgtgagcttttattaaatgaaatttctgataataagggctcaaaaaagacaattaatcaactagccactttactagcatctttattaattaatatgggaatttctaaacaacatatttatgaaaaaacaaaggaattcttttttagtgaaagagaaatcaaagatgttgaggaagttcaagatttttttcagtcaatttccccaacacatcaccattttgaaatttttttcctcgtttcaaaagatatattaactataaagaattctgtagatcaatttgatattgaaattatagatgacctaccacataagttttctcaattagcagaattaaaaaaattaaagaaaggaaaatctgaagtgtgggtaagaattgatgacatagaaacttttgatagacattcagctagacgtttagctgagaatactttagagattatgagtgatttattctcactttattcacataagaaaaaaattatatggcgatccaaagcgataatatga

SEQ ID NO: 64253 - DNA, 318 bp, Acinetobacter baumannii
atgagttattcagaacattttagacgtaaaattttagctaagcttgaggaaggttattctattcgagcagtagctgcacaatttgaaattaataaaaataccattgttgaatggaagaaacgtatagagattaaaaaaactcgtgtacgtaaaccttctaaaattaacgatgatgctttacgtgaagatgttgaaaagtatcctgatgcttatcaatatgaacgtgctgcacgttttaattgtggtgtttcatctattggtgctgcattaaagcgcttaaatattacagttaaaaggctttgttgcataaaggtttga

SEQ ID NO: 64254 - DNA, 627 bp, Acinetobacter baumannii; identical to SEQ ID NO: 63934

SEQ ID NO: 64255 - DNA, 276 bp, Acinetobacter baumannii
  misc_feature (258)..(267): n is a, c, g, or t
atgaactttaaaatattaaatcagaatattcttatgagctgcttactagccagtttctttctcactggttgtgtgagtaatcgaattattggtgaaaacacgcgagagctatttacaaaatacgactcaggctatgaatggatcactttaacagaagatgatgtaattgcattcggtaaaccatcagtatctctcccaaatgaaccagaggacagtattgttatcgcagggaaaaaatatagttatgtcattagtaannnnnnnnnnattaattag

SEQ ID NO: 64256 - DNA, 672 bp, Acinetobacter baumannii; identical to SEQ ID NO: 58791

SEQ ID NO: 64257 - DNA, 2772 bp, Acinetobacter baumannii
atggctgtatcagaacaaacgccatttatagaatatacagcgaatggaactactacagttttcccacttccattccagtgtgataaagcagagtacttaattgtattggtggatgatgtagagccagttgtgggtgcgtggtcattaagcaatggcgctgtggtttttaatactgcgcctgagaatggtaaaaagattactattcaacgaaatacaccattcagtcgcactgcagattaccaatcctacaacaactcattccgtccacctgctgtaaataaagactttgatttaatctggtggaagcttcaagaacttgggtatcgtgatcaagttatttggcttgctttagttaaagaaattgctgaccgtactgatggagatgaagacctacaaaaccaaataaatactattgatgagtggttgaccaatcttcagcagaatgtaaatgaaaatactagtgatattgctcaattagtaaatgatctttcaaaagaaattgccgaccgtattcaaggcgaccaaattctaaaagatatgttcctctctatgattgatgaagcaatcaatgaagggacaattaatgcattagcagttacgcatgttgatagtttggaagggctgaatgctatttcaaatgtatgggacgggcgcacgatttatattaaagatctgggcaactaccgttacgacgcattaactacatcttgggtaaaagcttatcaagatgctgataatgtaatggatggttcggaatctcagatgcagattaatgacaagtcagttcgcaattttgagtctattgctgatttattgacttatacgccaagaaatgatgggcaagtcgtttatgttaagggttatcacaacccaacaaattttgccttagctcaaccgtataaaggtggcggtaagcgtgtttatgttgaatcgcgcaaaactgaaaacgacggcttcttatgtattaatggatgggtattgcagattgagaataataccgttactcctgaacaggctgggtgccatggtgacaatacccatgatgactacgcacagttacaaaaagttttaaaatcagagttaaaagttgagtgcaatccttttgcaaactatagaaccagtaaaccaattgaattgttttcaagtcagaaaatcaaaggaaatggtgcaaaaataacaaagtactcagcaagcacaacaggtattacaggccgaacggatccagcaggtaatctatatgattacgatcaagattgtgctgttgtctttgccgcttggttcggttggtatagccacattgatattgaaaatttgacaattgtaaaagaaaaagtgaacggtgaagatgttggaaaagtcttttttgcaccatatatcagcttgtctacattaaaaagtgtagtagtaaagggtggggaatacgggttctatggggaagacctttggatgttgcattggaacagatgcgaatcgtattcaaaatgtggtttttatattggcactggaacttctaatactttcgatacatgttggtctaaagaaactaaagctgggtactcagcatttagattacataacttgacatattcatcattaattaattgttgtgcagaaaatgttggtgaagacggtgcgcctgctgacgctgcatatcatatcaccagctcagacttgactatgattagttgcggtattgagggactgcatgcttataatgcaatacgaatcgggtattcttgggttgaaattataaatcctagctttatttatgggattcatcaattatacaagcatgaaacaaaaactggtcttattgatatagagcatgctgattcagttgtgtttttgagtggggggcgaatatcacttgctgaaaatgcggaaagcggatgtgttccgattcgtgttgatggtggtaccctttcttatgataagcctttgtggaatggggttttatttccaaatcaaacaggaagctataaaattaccacccccaatcctgctgccattttagatctaacagattttactggaaggaagtatgtctcaagcggaagatcaggtagggattggtacataaatatgaaagcacagtttgctgctgggcttaaatcaaacaaattaacaaccgaaaatatcaataatatccgcaaagatatttattttgcatctcagagtaacggtaataatgggtctgtagcaaacggatatccatttgatgggtttggcggtacagttctaaacttttctgatgccgatgctgcacaatattctaataccgcacaacttgctttatctgctgtatctaacagagtattttatagacgagcagcatatgagcaagcacttggcacgtggtacgagtttagaacaacggcaaatacgacagtcgattcaaatgggtttattaaagctgcgtcacctatcgtaaaactatttgcagataagattgaactcaatgatgaagctgctgagcaaaatatcatttttgaaaagctgggggttggtgactatttaattaaaaatagcactggcttttcaaatgatggttggtacattgaaacacccaaagacgcaaatggtaacagtctatttgctgtaacatatacaacacttgaaaatggcgacatttcagtaaaaacctacaagaaaaaatttgatcttgaaacggcttcaatcgttgcagatttaactaatcctgtagatatacctctaaatagatggattgatttgcggttaaaagtactacctaaatctgaacaagtaatttaa

SEQ ID NO: 64258 - DNA, 906 bp, Acinetobacter baumannii
atgtcaacagtgaatcaaaaccagattacatcggcttttattcaacaattccatgatacgttcgatctggctacacagcagatggaatctcgattgttgaaaacaattactaaccgaggtcgtattcaaggtgcttcattcaccattaacgatttaggtactgtggaaatggaggattacgctcgtttctcagacacaacgtggcagattccaaccgctggtgttcgtactgcaattatgagtgataaaaaactctttattccaattgaacactcagacgtaccaaaattaaaagcaagtcctcaagataagtatgcaaaactttggctcgctgctcgtgagcgaaaagttgatgatgtgatctataaagcaattcttgggtctatctcacgtaaaacagttgatgatgctggtgatgagaaaactagtattgtttcgcttccatcttcacaaatcattcttgcaggtggtacaggctttactaagcagaagctggtaaaagctaagtccattttccgtgacaacgagtgtgatgaagagaacggggaagaaatcactatcctttataactcaacaatgcttgaacagatcttgcttgatacaacactaacaagtgcagacttcatggcagttaagatgctgcaagaaggctcattaagtaagaaatggcttggtattaattgggtgccatacaacaaattagataatggtgccggtggtgcaacagaacgtcgtactgtgatgtatacaaaaacatctacacattatggcgatgcgccaattgctcaattcaaaatcaatgaacgtccagataaaaacaacatcatgcaaatgggtggtgttcagtctatggcggcaggtcgtgctaacgaagataaagtcgttgctattgacttcttgatttaa

SEQ ID NO: 64259 - DNA, 333 bp, Acinetobacter baumannii
atggctgctaaacgagaaattaaaacaccaggtgtaactgctgaacagaaccaagaacaacaagcacaaacaccagatgcaaaccaagacacttcaactaaagatcaggctgaggctgctttgtctgaaatcttatctggtcctcaagattccgaaggtccaacgcaaacagatattcctgattgggcgagtgcaattgtagagagccaagcgcgtattgaacaaaagctagatgcaatcttgtctcaatcaccaaatgcacctgctacgcctaaagcaaaaggccgattcaagcttgttgaaggcaagggccacgtttggacggaggactaa

SEQ ID NO: 64260 - DNA, 402 bp, Acinetobacter baumannii
atgaatcttgaacaatggcaacgaagtaaaaagataaaagccgaagcagaggcagcagctaaacgcacagttgaacgtgtgttgaataccataaaggagccagccatgagtgagtttaaagtcggggattgcgttgtctataaagactcaaataaatacaaaaaccatttgttcaaagttgttgatgtcgaggatggaattgcaattgctgttgaagctgggcaggagtgctttgtttattttcctgatatgcgattggcagaagatacagagatagccgcaggctaccgcattgacaacgatatgggcgatgactcccacatagaaaaccacatttcgcctaactgcaaagtaactgaggcgcacattaacgaagctgacaagctcaatagattggggtga

SEQ ID NO: 64261 - DNA, 279 bp, Acinetobacter baumannii
atgaaaccagagcagtttattcgatggtacggaatagaagatgcaaagtatctgattgagcaaaatattaattgcaatgatttcgagttttctttggacgacctcaagcgtctggtggagtcggttgaaatcattcagttctggcacggcattgagtggtgtaaaggccttgttgaagattacaaagaagaaccaatccataaagaatcctatggccacagaattattcaagcgattgctgattacgaatcaatatacggaggcggggatgaatcttga

SEQ ID NO: 64262 - DNA, 507 bp, Acinetobacter baumannii
atgagaataactgaacaacagctagaagcaattcaaaacaagcgaaataacgcacaaaaaggcacattacagcgcgataaaagtaaaagtgatgcgtatgtaccacttaaggcaaaaatagctgatacaagcgaaataagagcgctttacgaagatggcttaaaagtcattttagattgtgaaattaaaactgcaccaccgtcagtaaatcactactgggtagcttctggaaaaagaagatttctaagcaataaagcacgtgattttcatgcattggttcgccaagttgtgccggctcataaatcaactgcacgactcaaattagaagtgacttttcatttcccaacacgtcaatgtcgagacatcgacaactacctcaaagcgactatcgatagcttagtgaaatgcgggctatgtgtggacgatgaacagttcgatgagcttcttgtaaagcgtggaaatgtcatcaaaggcgggcttattaagctcaaggtttgggggatttaa

SEQ ID NO: 64263 - DNA, 1047 bp, Acinetobacter baumannii
atgaacgcacaagttaatgaattacaagtattagaacaaaacgtaattgtagctgctttcgctaaacgtggtggtacagatgaattgtatgaacgtattgcgcaagaagttcgctctcatgtgccagatgtaagcacaaagaaaggtcgtgatgctattggatcgcttgctttgaaaattagcaaatctaaaacattgattgaaaaatgcggaaaagaattagtagctgaacaaaaagctcaaatcaaattgattgatgatgaccgcattgcaatcgttaaaaagttcgaccaattgcgtgatgaaatcttggcgccacgtgatgcttgggaacaagcagagaaagatcgtgtagcgaagcatagccagtttatttcaaatatcaaagttatgtatggtctttgttttgatcttccatcactggaaatcaaaaaagctatcgactccctggagagtttagttgttgactcatctcttgatgaatatgagcaggaagcaaaacttgcaaaatttgaaactattgaagcacttcgtacagctcttgttgctcgtgaaaaatatgaagccgagcaggctgaacttgaacgcctacgcaaatctgaacaagaacgtttacaacgtgaacacgaagaacgcattgcacatgaagcagctgaaagagcccgcctagaagctgagcgtaaagctaaagaagaagccgaacgtgtagaacgtgaaaagcaagaagctgttgctaaagcagagcgtgaaaaacgcgaagctgctgaacgtgaagctcgtttagttgctgaaaaagaagctgctgaattacgtgcacaacatgcagcagaagcagaacgtaaacgtattgaggctgagcaagcagcaaagctagaggctgaacgccaagcagatgaggcgcgccaagcaaaccaagcacatcgtaaaaaaatctgtaatgaagcacttaaaggcttattggctttgggtattgatgaagcaaaaggaaaagagattttgcaagccatcaataaaggcttagttccacatgtatctattaagttttga

SEQ ID NO: 64264 - DNA, 816 bp, Acinetobacter baumannii
atggataaatgcattgatgtaagacctcatactgcttcaaaaaaattaaactattttttagaaaatatttctttgaagaaagattcattcaagaagcttaatcgagtaatagacttacattcaaccgcattagctagtgatttagctgaaaatcaattaattaatatttggatagcaatagaaactattgttccctcaagtatcaatggaggtggaaaggttaaaaaaatatgtaatgcattagaaccaatcctactaaaagaatatataagtcgcttattacaaaatttgatcagagatcttttgaaatggggcagaagcaatttaactgatattttaaaagaaattgacaattacaaagataaaaaaataaaccagttagtacttgagctcatggccttagataaatataaacctttaagaaacactttatatcaaaatttaggtaacttccacctacttagatataggtgttttgaattatcagaaattttaaaaaatcccaaaaatgtattagcaaagatatcattacatgaaaaaaaggtaagctggcaattacgtcgaatttatcgaaccagaaatcttatagttcatagtggtcgctctttaccttatattgatactttaatcgaaaattcacatgattatttagatcaaacgattaatgccgttgtaaaatattcaggtggctacttgaatgccgatactctagagcaagtttttgaaatggcaaaattagattatgaatcctttagtaaggaattaaaattaatttcatcttttgatgaaaataatatactcatactgttgaactaa

SEQ ID NO: 64265 - DNA, 747 bp, Acinetobacter baumannii
atgcctcgtaccatgctgacagatcaacactggcaaaagttgaaagttattctgcgtaatttatccattcaccacaactcaaatttacgcaattttattgaagctattctctatagaattagaacaggctgtccgtggcgagatattccttgctgttttggtcattcaaactctattttcaaacgttttaatcgttggtcaagcagcggtaagtttcttagattattcaaattactagcctcatgccccgatatggagtggatttttattgatggctctcatgtacgtgctcatcaacattctgccggcatagcgaatcaatctatttctaaaagtgtaggaggaaactcctcaaaaatacatttgattgttgatgcacatggcaatcctattgatttcatgattaccgatggaaccacacatgatgttaaagttgcacctgatttaatatcaacattagatttaaaagagacaaaagtggtatgtgcagataaaggctatgattcagaaccactgcgtgaacagatcaggaaaacagggactaaagcgaatataccaaagaaaacaaatagccaatcgaacaatgaccatatggactggtatttatataaaatcaggcatttagttgaaaatatgttttgtagattaaagcaatttagaggaatagctactcgatatgacaagctcaaaagaaattatcaaagttctgttgctttagcatgtatatttttatggctacctttatag

SEQ ID NO: 64266 - DNA, 447 bp, Acinetobacter baumannii
atgaatttattaggttcaactggtattggcaaaacatggcttgcttgtgcttttgcaactaaagcttgctcgaaaggttacaagactaaattctttaaatatttcgagtttattgccttatttgaaaaggctgtagacaatacaattgataagcagttaatcaaaaagttaatgacatttgatttgctaataattgatgattttgggcttacctctattccatctgctgtagaaggaattttattagattttattgataatttttcaatgcaaggcagtttacttattacaagccaattctcttatgatatttggtatgagaaatttaatgaccctacgattgctgatgcaattctagatcgaattattcataactcttatacattcgaaattagtggagactctatgagaaaaataggatcttctgatgaaatcgccactctttaa

SEQ ID NO: 64267 - DNA, 306 bp, Acinetobacter baumannii; identical to SEQ ID NO: 54617

SEQ ID NO: 64268 - DNA, 474 bp, Acinetobacter baumannii
gtgtttattagtgtatttgatctttttaaaattggcatcggcccatctagctcccatacagttggaccaatgcgtgcggcatacagttttgtggaagatttattgaagcaagacgatttacaagcaacggttagagttcaggtgaagttatacggttcactgtcggcaaccggtgtcggtcatgcgacagataaggctgttctgttaggtttaatgggttttgaccctgaacatattgatactcaagtaagcacaagcttgattgaagatgttcttgaaaataaagccatccagcttaatcagcaaaaaactatttcgtttgactataagcatgatgtgctttttttagatgaatctttgccttatcaccccaatgcaatggaactgattgcgtataatgaggctcaagaaattttatatgcagaaacttactattcggttgggggggctttattgttagccaaagacaattag

SEQ ID NO: 64269 - DNA, 768 bp, Acinetobacter baumannii
atgatcaagcagcaagtgttattaaacaaatttcttgaaattctcattgtaagccctatagaaacagaaaatttaaaaaaattaaaaatactctttcatgaggttttaaaagttaataagtgtttggatgactcgcatccgataccgtatcacgcgataactagatatatgtataattatgaaaaagaaattataattgaagatttaaatctattaatggatgctttagaaactcagttagtagaagaagtagatataaaagttctagaatgttttcgaaaatttaaaaatcatatttctttagcatcaacacaaaagtactatattcagaagattgcagccgatgccttagaaaccgcaaaaaaggcagaagaagaagccgaaaaagcaagagacacatacaaagacataatggtcaattatataacaatcttaggtatttttgcttcaattatcattaccatatttggtggaatgcaaataattagtgctacaactggtttattgcaagcaaatttaaatctcgctacgttagtgttagttttatcctttttgacgttattaatagtattaatactagcaattttactaaattggatatcgaatctaaaagaagaaacccgtaataataagtttgtgtatattgctttgagctttacggttttttgtatagcaatatctggctggtatatacatgaacaaaaaaattcagatttacctcatactaataccaaggtacttattaaagacgaatcaaaggataagtaa

SEQ ID NO: 64270 - DNA, 519 bp, Acinetobacter baumannii
atgaataataaaaaatacacagcgatggaaattgctaactatattgtcgagtatactaataaagttttaggagcaaaaaacctaactccgattaagcttcaaaaaattttatattatgtatatgttaattgcctggtaaagcaaaacactaaactatttaatcagccaatagaaaaatggaagtttggtcctgtagtaagtagtgtttatcataattttaaagtttatggtgttggtcatattggtaacactatttctgattatgagtttagcgaaaatccaaatgaaattttttcttttaaagaaataccatttgattcaacgaagcttcatttttcagataatgtttctcaagagatccattcaactattagtgaattgatagatgttgatcctttcaaattggttgaacaaactcataaagaagctccatggaaacttaaagagctagatatcttgaacggtgtgagggggctggtttattctgaccaagaaattctagaccatttaggaaaataa

SEQ ID NO: 64271 - DNA, 270 bp, Acinetobacter baumannii
atgaaaccagaacaatttattcgatggtacggaatagaagatgcaaagtatctgattgagcaaaatattaattgcaatgatttcgagttttctttggatgacctcaagcgtctcgttgagagtgttgaactggttgaagtatgtggaggacttgttgaagcaaaaaagaaaatgaatagtgaatcccttcgttctgcaacgattgagtatgttttatataaagccatccgcgaccacgaatcaatatacggaggcggggatgaatcttaa

SEQ ID NO: 64272 - DNA, 282 bp, Acinetobacter baumannii
atgcgttcgacaaagaggctaaacgaaataagaaagctaccatgcgttagatgcggctatcctcactcacaagcggctcattcaaatagctcgaagcatggtaaagggcgtgttatcaaggcaagtgatttatatacggttccactctgttatgtctgccatgctgctttcgataagtttgaactaggcacaagacaagaatcggaagccatgtttgagcggtggttggaaaaaacagagcggatgttgaatattgatggaaaatcacaagatttattttga

SEQ ID NO: 64273 - DNA, 156 bp, Acinetobacter baumannii
atgtttgttcagcataaatccgaatacattaatttaactcatagagatttttataagttagttttaactttaacctccaatgacatcctagatctagagtttaattctgaggaagagctagatcggttcttgaaaaagttggaaattgtgaagtag

SEQ ID NO: 64274 - DNA, 1677 bp, Acinetobacter baumannii
atgagtacgtggcttcttggaaatacaacagttcgtagccctttcagactgattgacgggctaaaagtttttgcgtcaactaatggggacattcgggggacaaaggagaaagaattagtattctgcaaagcattggttgatggtggaattattagttcgaattttgaagcagaatatacctccggctttagtgatacaacatatagtgtggggcgaaagtggcgttctgctttagaaaagttagggtttattgaacaaaacaatttaatttatattttaacggaaaacggtaaaaatcttctcaatagtcagaccttacagtctgatcaagaatgctatttaagatcattaattttatattcttatgaggctgagaattcagacaatccaggtggtttcttttcaccactgatgttgaccctgcatatcatgaaagagctagagattaggacaggaagtagtagaatctcctttcaagaaatggcagcagttatccaattaacatttagttattcagatataaatcaatctgttgatgaaatccttaatatcagaagtaatagacaagcatctctatcaaaaaagaaatttgatagagaactatatgagtcaaaatcttctaaagcaaaaattaaagctcctagtatcaaagactatgctgatactaatttaaggtatttaaaatctacaggtttatttactgcctctggtaagggtatctgttttattgatgataaaaaaatagtcattgataagctaatagcaatgtatggaacctttgatataagtcaatctgatttaaaaattcagaaaggtgcccctttaccaacagatcataaagaaacaaacatattattggtcgcgcaattagaagagacattaaatagaaatagaattttatttgaaaaaaatagttctatagcacaagctccaataggtgaaatcaaaaattatagatatcatctagaagagttactttttgaaaataatgagaaaaaatttgctgaaaatcaaaagaatgaatgggatgaaattcttgcttatatggatttactaatttcacctaaaccaatctcaattgagattggtgataaagagatttctattccgtcaggagaaaaaccagcatattttgaatgggttttgtggagagcatttttagctttaaatcatttagtcattgagcctcaacaatgccgccgatttaaagtcgatcaggattttaaacctatccataatgctcctggtggtggggctgatgtgatctttgagtatgaaaattttaaaattcttggagaagttacattaacatcaaactctagacaggaagcagctgaaggtgaacctgtaagacgacatattgcggtagaaacggtgaatacacctgataaagatgtctatggtttgttccttgcacttactattgacactaatacagcagaaacattcaggcatggtgcttggtatcatcaagaagaacttatggatgtgaaaattctgccattaactttagaaagttttaaaaaatatttggaatcattaagagagaaaaatcaagtggaaacaggtatttttgacttgaagaaaatgatggatgaaagtttaaaattgcgagagacattaacggctccacaatggaaaaatgagattactaataagtttgctagagctatctaa

SEQ ID NO: 64275 - DNA, 1923 bp, Acinetobacter baumannii
gtgaataagcctttattagtcgaccttaacaaaaattctgcttcacaaaaaattaaatgtaagccgattttaaaatgggctggtggtaagacacagatgttggattcaatcttacctagattccctgattcttatggaaaatatattgaacctttctttggggggggggctgtattttttgcattacaacctgagaatgctgtaattgctgatagtaatcctgaattaattaatttatatcgcacagtcgcagataatgttgaggcggtaattaatgagttaaaaaaattcacaaatactgaagaaatgttttatgaggttcgttcccaagattgggaaagcctttctcctgaagcagctgctgctcgaacaatctatttaaataaaacttgttttaatgggttatatcgagtgaataaaaaagggcaatttaatgtgccttttggtaaatataaaaaccctaagattctagatgaagaaaatttaagggctgcttctagcttgttgtctaaagcaaaaattatttgctgtgactattcagaagttctggaaaaattcactttttcaaatgatctaatttttctagatcctccttatgtacctatttcagaatattctgactttaaacgttatacaaaagaacagttctatttagaagatcatgagcagctcgctaaaatatatagggctttgagtgataagggatgtcatgttttcttaactaattcaaatcatccagtagttcaaagtctgtatagtggtttccaatatgaggttattcagacgaaaagacatatttcttgtgattcaaagactcgaaaaggtgaggatgtaatcatctctactatttctaaaaatcagatatttcatttggacttagaaagagtttcatcaattcctgaacaggtaaagttatatccatcaactagatatatggggtctaagcaaaaattacttccttatatcctggggcttgttgagcagtttaatgtgccgacattggttgatctattttcaggttcaggcatagttagttacttgtttaaaactttgggtaagcaagtaataacaaatgattatatgaacatgtctcatactttcactaaagcaatggtagagaataatcatgtgattttaagtgatgaaaaagccagatcattgttaatagaaaagtatccgatagatgatttcgtacagaaaaaatttaaggatctatatttttctgataatgagaatctgttgattgatattattcgatctaacattctgaagcttgataatgaatatgagcaagcgattgctagaagtgcattgattcgcgcgtgtatgaaaaagagacctcgtggaatttttacatataccggtcatcgttatgatgatggaagaaaagacttagtactgacattagaagaacagtttttgaatgctatagaagcaattaatcagtctatttttgataatcatcaattaaatatttcataccgaaaaaatgctttagacgttgaattacctgataattgtttgatttatatggatcctccttactattcgacatgttcggataatgaatatgtgagaaggtatcattttgtcgaagggttatctctggattggaaagaaattgagattcaagagcataccaagacaaagaaatttaaatcttatccaacgcctttttcatctcgaaaagatgtctatgttgcttttgagaagttatttgagaagtataaggaaaatattcttcttatatcatattcatcgaatagccttccaaacatggatgaaatgttgattatgttacgaaaatataaggaaaacgtagatgtgataccaatagattataagtattcatttggtaatcaagcaactaaggttggggataatcgtaatacagttcaagagtacttatttgtagcttactaa

SEQ ID NO: 64276 - DNA, 252 bp, Acinetobacter baumannii
atgccttatgcagaatttcagcgattaattggtaaagcaggacttaccattaaagagtttgctgagttattggggatgaaccctaattctataaccaattatcataaagttggggttataccttcacacatagctatcattatttcattgatcgctaccatgagggatcaaggcttagatttttatgaagtttttgaaaaattaaaggaatatcatagtattactaatgaaggggttatagaaagtgaataa

SEQ ID NO: 64277 - DNA, 303 bp, Acinetobacter baumannii
atggctaagactctgcaagaattgttagctagccgctctccagagagccaagcccgtattcaaaaaatggcagatgaattactgctagaaaatcagcttcatcttattcgtgaagaactcgaaatttctcaaaaagagcttgctgaaactttgggaataaaacaaccatcgctttcagcaatagaaaatcgtggcaatgatcttaagatttcaaccatgaaaaagtatgttgaggcaatgggagggaagctccgtattgatgtagagcttccaacaggaaaacatataggattcaatgtttaa

SEQ ID NO: 64278 - DNA, 357 bp, Acinetobacter baumannii
atgtggacagtcattacgacagatctatttaatcagtggcttgaacagcaagaagaatcaacacaagagaaggttctggctgccctggttgttctacagcagcaaggaccaagtttaggccgccctttagtagataccgtctatgactctaaatttaccaacatgaaagagctccgtgttcaacatcgaggtaaaccactgagagctttcttcgcattcgatccattgcgtcaggcaattgtgctatgtattgctgataaaggcggtaaaaaacgtttttataaagacatgctggatattgcagatgaacaataccaacttcatctcaccaccttaggagataaatctaatggctaa

SEQ ID NO: 64279 - DNA, 687 bp, Acinetobacter baumannii
atgtcccaaaaatttcaaattagattagaacacctaattaatcaaggcgaacaaatatcggatcaatcttataaaaatacaaatgggtatatgaacttttcacaagaatcaaaggatttatatgttcaatggattgttagttcgaaatcattacttaaattaatttctgatgataaaaaagcaattcactatgaactttttctttcagcagaaaataaagctcatagcatggaaacacagccacttattttaaaacgtcttatcagtatcttaagggcaactttagatgatctaaatagtggttgtttaacctcttttaaacaacttatacaagctgatgtttttgatagtgaattagaccaagctaaacattttttagaatctggttatcctgttgcagctgctgtcactgcaggagtagtgctagagtcatcaattaaagaactttgtaagaataatggcatagatatttatcctcctgattctactaagcctaaaaaacttgatgttttgaatgctgcattaaaaaatgctgatatttataatattctccaacaaaagaaaattacagctttagctgatattcgaaataatgcagcccatggaaacattgatcaatttacgagtgaggatgtaaaagatatgattcgcgatattgagcggtttttactggaatatgcttcttaa

SEQ ID NO: 64280 - DNA, 264 bp, Acinetobacter baumannii
atgaataataaatacaagatcgagtcactaggcgactttcttaaaatccctgctgatcgaattaaagcttgtttggcagagctaggcgaccatttatttgcaatgcgtcagaccatcgacaattttggtgttgagcctactggcaatgaagttaagtcattcacttggaaagatgacggaaagcaagacctagcaattaaagcaacagttggcgatgaagtcgtagaggtgaagttcactaaagcggaaagtaaggaggggtga

SEQ ID NO: 64281 - DNA, 291 bp, Acinetobacter baumannii
atgaatgatttagtcagtttatctcaaatagactctgaaatatcagaagaggagataatagaacgagctgttatcgcagctatagagctatatgcaaaacgcttacttccaaccagtaagcgaacaaagtctactgtgtatattagccctgagcttgatagtcatgttaattctatcaaggaatttctgggtataagccgtcaagatttagtggaagaagctttgatgttttacaccagatggaagatctacgctagacacatcaatcgcagtattctagacaaaatatag

SEQ ID NO: 64282 - DNA, 237 bp, Acinetobacter baumannii
atgaaaaagcctaaacgcaaacaaacatcagaaccaaaaccaaaaaagacgaaggattcccttattcaaatcgtcacaaatattcatgtaggcaaaacaactcaagtatctgttgctatggggcctgaggattactcgctattaaggactatctccaaggatactggaatgagtcataaggacatttttcttgtagctttccatgaatgggttgagagaaatcgttataagaagtga

SEQ ID NO: 64283 - DNA, 402 bp, Acinetobacter baumannii
atgacattcttgccagataatttacaagaacatttaacagaaaattacggtttcaccttggtattaaagccatcaggtcaaccaccgaataagaaagtacatagactagctcatagtaacttagagcattttcttcacatacaacttgatgaatttactcaagcaaatttggctatgccatacatccctgaatatgttgataaaattgatgactgcttaacaattgatggaattgttgaagctagggaatcgaacagatcatgttttttgggctacccagataaagatccaaagcatccatccaaacaaaagcaggctctatgttttaccatcgaacaccaagatgctgtagaaccattcatggagttaatgtttggtttacacgttagcagcagaaagtaa

SEQ ID NO: 64284 - DNA, 306 bp, Acinetobacter baumannii; identical to SEQ ID NO: 54617

SEQ ID NO: 64285 - DNA, 1455 bp, Acinetobacter baumannii
gtgacagcttcaacttttagagagaaggggcaggcacttgtagatggatttaacaataatggaaaaatccttgttgatactaccaaaagtgtagttgagaacagtaaacaggcttttggctcaatttcaaatattgtcaccaatcaagcgggcaattacgacaaattgactcaatcgattattaataaccgtaaagcacaattagagtggactaagggtgtgaaaggtggtgttactgctggtatcgcccaaaacaaagccctaaacccaaccgccaaaaaagaaaaagccaagaaaactaaagatgataaatctgctttagaaaaagcaaagcgcgagcaagagcgtatagagaacgctcagcaatctatcatcatgcaatatgccgacaaagagcttcaaattaaattgaagtatgaggaagataagaaaaagattgcagaggcatttgctaaagacccagtgaaacgcgatctttatttatcaaaggcagaagagacgtataagcgtgatgttgcggcatttaagcaagcacaacgcgaaaaatacgactcttataaaaatgaccttttagctcagatggcagatgcagaagatgctattgcgctctcctctatatctcgcagatttggacaaggtcacgaatataatattgccagcatgaatgtagcatcacgtaaggccaaagatgctgaacttgatgcatatacaaacaacgtaaaccaaattaaccgtgattatgatgatccggctgaggctcaaaagcgatatgaattgctagagcaggcgaaagctacgcatattgcaaaaatgaaggctctagatattgattatcacgacaatgctcgcaagttaattgatgatcaacataacgccaccttaagcatgtatggagcattactctcccaaagttcttcagtttggggcgatatgacccagatgattaaagacagagctggggagcaatctgctacgtataaagcaatgttcttaatgcaacaaatgtttgcagcagcttccgctctagtatctacacatttggcagcagcacaagtccttgcagatccaagtgcactaacacttgcacaaaaaactgcttattcagaaatggttttaggtctgggttatgccaatgttggtttaatcgcagcacaaaccattacaggtatggcccacaacggtatagataatatcccgcgtgaaggtacatggcttttagatggtggtgaacgtgtactgaatccaaaacagaatcaggacctaaccagattcttaaatgatcgccagagtgcaaacaatggaagcatttcaatcaaagttgaagtaaacgattcagttgtaagcacctcaggtgccaatacacaagatcagaagcagctcggccagatgatcggcaatgcagttcgcgccgtgattcggcaggaacaacggcaagggggattgttgagtaagtaa

SEQ ID NO: 64286 - DNA, 1248 bp, Acinetobacter baumannii
atgactcatgttcaaaataaacttggaaaaattactattggatgtatgatgaaccaatttaacaatagtggttttgagacaatgaagattacatctttggggttggaaaatgttggcgggatttcaaacttaaatctggaaaacctcaaccctcaaatgaacattatttgtggtgaaaatggggttgggaaaactaatattttagactctattgcatcttggttttctgagaatgataaaaatacacttaaaaagaaagttggtagtgataaaggtaaaattcttgttattacagataacttgggcagtaatcattatgaaatctcaattgataagtttgatcctgaacaatatgacagctatttaaataatcaaaactatggcaatgttaagaaaagccttttatatttaaagacaaacagagggattgattacaagaagatttcctcaattcaagctgaccctgatattgaacatcgtgctagatataatgccacaggtataaacaatgacgacataaaagactggcttctgaatcgaatactgcatagtgggcatgaaaaacatttatctgaaatacagttaaaaaaccttgaatttgctaaagagagttttagtcttcttaatccagacttcaaatatagtcgattaaacaccagtaatgagttatttgttaacacgcctacaggtgaaatatattttgagtatttatcgtcaggatttaaatcaataatttacatcttgctagggattatcaaggaaattgattatcgactaaaacacgatgatacagcggcacgcgactataatggaatcattttaattgatgaaattgaattacatcttcatcctgagtggcaaggacggatatgtgaggtcttaaaagtcgcttttccaaatgctcagttttttatttctactcatagtcctcatgtggttcaaactgctctcaaaggtgaagttgttgctttggagcgtaaagatggcaatgttggaaggcgagaattacctgagtctcagtatggctaccaaggttggacggttgaggaaattcttgaagatgtgatgggcatggttgatttaaggactcaaaaatataaggaaataaaagggcgctttgataaagcacttgaagataaagaccgtaacgctgctcatatagcttatgaagaacttgacaaaatgcttcaccctcaatatccattacgtcctgtttttagaatgcaacttgatagtcttggagaataa

SEQ ID NO: 64287 - DNA, 720 bp, Acinetobacter baumannii
atgattaagttgcaaagaggtgtcagacctacttatttgagtgatcagaaagttcaagagctcacagatatatttaaagcagataaaaataagactgtttggaagcaagaatcaataggtgagtctttattgaccagttcatccttcaaatgcgcatattgtgaatgtaaattacaaattgaagattcatacatgcaagtcgagcattttaaggataaggatacttatcctgatgatgttgtagactgggaaaatttactaccatcttgtggacgttgtaatcggaaaaaatggacattagatgttataaccaatccaattgttaatccatatattgacgagccaaaggtgcacttatgtcaagagtcatttaggctttatgggaaggatgaaaaaggcaagactactgttaaaaagttgtttttgaatgatgatgatcgtgtggttttaccaagatttttagtttgtaatgaattgaatcgacaattatcaatagctgcctcaagttttaccgacattgataattcaagagattcaatgtccaccatattgtcttcttgtcaatcggataagccatattcagcatttttggccactactttgcatacaaaccaagattacttatacatcaaaaaacatcttgaagactgtcagatgtgggatcatgatcttgaagccttgcatcaattgtctctgaaattggtattagatcaacgctaa

SEQ ID NO: 64288 - DNA, 402 bp, Acinetobacter baumannii
atgaagaaattacttttaatcctgccatttttagctctgggtggttgtgtaacaccaattgaccagatgataaacaataaatttagtgatgttgagccaacaaagccacaggttgcaggaatttggactacatctgttggtccgagcctctcaacaattaagttaaatgaagatggcaatggacttctttgtgaggactcaagtggttacgtgagtttgaataaagttaaatattctgatggaaggttatttgcacaaaatgggatgatcctaaaagtcttaaaattaactgaagatgttttagaggcaaaaaccacagtcagtgcatttaatgtcactatggcatataagagtgatagtgctttaaaggcggcttcatctaaatgcgctaaagaactataa

SEQ ID NO: 64289 - DNA, 1677 bp, Acinetobacter baumannii
atgtcttcaatgtcactcacctggactacagcttgcccagactgggcgacccgtattgtttctaaacaatcgttaatgccgtgtaagccattattccccaaagtggctgacgtagcggagcgtatctttaaagagttaattcttgttgatgtgatgggtagccctaagatgggcgatgtcacattggaatgggtaatcgagtttgttcgtgcaatctttggcgcatatgacccaagcactaagcgtagattaatacgcgagttctttcttctgatttcgaagaagaatactaaatctacgattgccgccggcattatgcttactgcattaattcttaatgatcgtatgtcggctgagcttattctgttggcgcccacaaaagaggtcgcggacaatagttttaatccaatccgagatttcattcgcgccgatgaggaattaagtgaacgattcaatgtatctgagcacacaaagacagtcacacatttgggtacaggtgcaacgcttaaagttatcgcagcagaatcaaatgcagcagcaggtaagaaagcttcaatcattttgatagatgaggtctggctattcgggaaacgtgccaacgctgaatcaatgttccgtgaagcaaagggtggtttagcatctcgtccagaaggttgtgtgatttatctgtctaccatgtcagatgaagtgccatgtggtgttttcaaacaacttctagactatgcccgtgatgtgcgtgatgggatcaaagaagataaggcctttcttcctcttatctatgagttcccaaaatatctagttgaagcaggtgagcacttaaagcctgagaacttctatatcacaaacccaaacttgggtgcttcggttgatcttgaatatctgatttcggaatttaacaaagttaaagatgctggtgaagaatctcttagagacttcttggccaaacatttaaacatcgaaatcggcatgaacttacgtgctaaccgatgggcaggtgcagagtattggaatgctcaagctaaagacattcaaatcgaccaactaattgagttatccgatgtcattactttgggtattgatggcggtgggcttgatgacttattaggattcgctgcactagggcggttatcagcagatccacgtatctggtggctatggaaccatgcatgggcaaataaaattgctctcgagcgcagaaaagagaacgtacctaagtatgaagacttcaagtctgagggttctcttactgttgttgaccgaataggcgacgacattgaccaactcgcagcaattgccaagaaagtttatgacagtggaaagctcaataagatcggactagatccattgggcttaggtggacttttagatggcttgcttgaggcaggcattccagaggaaagcatgtttgctgtgccacagggatacaagctcatgtcttacatcctcaccactgagcgcaaattagcagaaggcaatctcttccatgctggacagcagttaatgacttgggccgcaggtaatgcccgtgtcgtgatggtcggcaatggtatgcgaatcacaaagcaggaatcaggcgttggaaagattgacccattgattgccacatttaacgcagttgctctgatgtccatgaatccagagcctacaaacaaagaatataacgtctttttcgtctaa

SEQ ID NO: 64290 - DNA, 393 bp, Acinetobacter baumannii
atgaatcaggttccagaaggtgtgagagaagcaatgcttgctgctaaacatatgaatcaggttccagaaggtatgagagaagcaatgcttgctgctgagcgtatgaatcaggttccagaaggtgtgagagaagcaatgcttgctgctaaacatatgaatcaggttccagaaggtatgagagaagcaatgcttgctgctgagcgtatgaatcaggttccagaaggtatgagagaagcaatgcttgctgctaaacatatgaatcaggttccagaaggtatgagggaagcaatgcttgctgctgaacgtatgaatcagattccagaggagctgagatcgcttgaagaggaaaatattcttaacaatatgaaaaattggtacaaaccaaataattga

SEQ ID NO: 64291 - DNA, 1725 bp, Acinetobacter baumannii
atgaagttaactctaattttagttcttatagcagtattattttttatatttgaggatatatctaaagcactgagtcttatttttgaatataagtatatccatgtcattcctttcatgattgggatatcagcatttattgcattaaagttgagcaacctaaaaagtattatttttaaatggttagaacaagttttttcatacgtaatgctttgtttattagtggtttttttaattttttttgtaaatgcgttcttttgggaaaaagtaagttctttagacttcttaatctgtgtaggcgtgctctgtattggctttttcactggcttattattggatcgtatttttacgccatgtatagaaaaaataagaagattatttactaaaagtgcaggtacacaacgagattcaaaaacagatattcgtgatgttcaaaatagtcttgagtctgtattgaaatatgatcctcaaacttttttccatcctgaaaaatggtttttgggtttggatagcaaaggaagtccaatttatttcggtctgaaaaaattacttcatacgcaaattacgggtgcatcaggttttggtaagagtgttttacttggattattggcttttcaagcaattctaaaacgtgaagcgactattatttttgatcccaaacaaggcggggatgaatggcttccaaacgtctgttatcaagcctcacttgtagtaaaagcctcttatttttttgtagatcttcgagtcagattagctcaattaaatctttttttagggatgacaagtaatcaaattattaatctcttgattgttggtttgatgctagaagaacgtggtgatgcagctgattattaccgtgctaaaaaccgaaaaatggcacgttttgttggggagaattatcaagatggtatgaccctaaaagaaatcagtgatacttatgatgaatatttccgaaaaaatgaagcagatggttttgcagatgcattacaggaaattgcacaagtggagtcggtgaatgctcgtgaaggtatttcacttaaagaagcgatggatcaagggcatgtcatctatgttgcgggagattgggaagaccctaaacacataactgttcagagaatgctattggctcgaattgtacagattgcaagtgaacgagataacacgttagacacgccaaaacaggtttgtgtgattctagatgagctgtcctttcagatttcaaaaatctttggtgatgcgctcaaagtcattcgagacaagggattgcacttcattctagcccatcaaagtattaaggacctgaccaatgttcctgacagcatggatgctcaggcatttgcaggctcggtgatggcgaattgccctctaaaatttacgtatcgtgctgttgataatgaaactgctcaatatttctcagacttctcaggaaaagttttagtggatgatgaatcccgaaatatcgaacaaacgctaagtttgacggaccgaattttgcctgaaaaacaaattcgccaaacagagcgaaatttgattgatctaaatatgatgttaacgctccctccaggtacaggtgttttattcggtaatgggattgctcagatttctaagatctgtccaatccaagttaaaaaaacggctgaagcaaagacagttaaaggctttgaacagcctagtatctatgaaaattcagaactctcagcttctttagtttttgagaaactggggtga

SEQ ID NO: 64292 - DNA, 750 bp, Acinetobacter baumannii
atgtctaatttaattagctctaaagccgaacgtgaccgaattagagcggataaacaaagacaaatattattatttttattggcagaaggcttcagcatcgctgctgtattggctttgcttttgaagatgactccaaatggggtgcaaagaatcttgcgcagaatggaaaaagcaggattgattaagtcacatactgttgatttcgagttgagtgcttggaacctgaaagtttggggtttaacgcctacaggtgccttacttgctacagatatggatgaggatctgaaattttttgaagtaggacgcataaaacctatcaccattgcacatagtttgtctttacagcgaattaaggtcacctctttgagttgtggttggaagcaatggaaaagtagctctaggatgctaaaaaaggccaatgagagccgttctacatggattcagattcctgatgcatttgcgctatcccctaaaggccgaaaagtcgctattgaattagaacggactgcaaaaacacctaagcgttatgttgagattttggcgaactatgccgaaatgatttcaatgggtgtcattgatgaagtgatttatgtgtgtcctgaacagttaactccccgactgcaaaggctatttcatcgaattgagaaaatcatttttaaaggaaaggtgatcccaacgcctactggtttattagagagattttatttttctagtattgaagattgggaacagaaggctacaaatttttaa

SEQ ID NO: 64293 - DNA, 360 bp, Acinetobacter baumannii
atgttataccaagctttttatccatcagaactcagtgatagccaccctattccaatctcttatgggattgtattagaaggaaaaactttaaatttagttgttgtattatctgatggtgtactgggcacgcgaattaagatgctgaccgaaaaaacattgaaaaatttgttctgttggctattggacaagcacgtttttaaggttcccgcgcaatttattaaagtgtcttatttagcagaagatcatttgaatcgattcgagggctatacatggtctttcaatccaaattttgatttggttgaagagtcgatgcttgaaaatgatcgaatcgattttttactaagagcgattaaaaactaa

SEQ ID NO: 64294 - DNA, 534 bp, Acinetobacter baumannii
atgatgaatgaaaagcaaacagcgactaggctaaaaaaagtagctaagcaaaatctggattggcgtcaaaagttttggcctgaaataaaagatgaagacttatggttgagaaaatcgaaagttggattcattacggtaccaagaggtttgccccaaatcatggcttttattgacgctttaacgaaaaatactccggcttctaaggcttattttgctctctggtgtaggagttttgatgaaatggttatacgtattcagaaccctatgattttagcatctgaatcgggattttcagggccaagacaattaactacatggaatacaaggatggaattactggaaaagtttggattcatcaaaacagctaaaggtccaactggtccgtatgagtttgtaatattactgaatccatatgtggtcattaagagttatatgaatgatcctgccaatacgattaatgaaaatttgaaacagttatttttagctttagaaataagagcatctgaaattggtgcagatgaccttttagaatag

SEQ ID NO: 64295 - DNA, 1050 bp, Acinetobacter baumannii
atgaacacaaatcctaaaacatggttatctctggataaacaattagaacttttagcgtcaagaaatgtaactatttctgatagtaataaggcgaaagaatgtctagaacgtatagggtattatcgtttaagcggctatttatatccctttaaaaaagatagttatttgtgctgtaagtttccaccgaaaaacttaaaatctacatctaatttccctgggggaattataaaaattgatgattatcaaaatgttaattttgaaacaattattgatttatatatctttgataagaaattgagattattaatcttagatgctattgaaagaatagaaatagctttgcgatcacaaattgctcatctattgggtgaatatggtccatattcttatttggaatcccaatatttctataaggattttacaagttcttcaaatagtggtgcttttttatcgaatcatcatttatggcttactaaaaatgcatctttaattaaaaggtcgaaagaagattttataaaacatcataaagataatgggttaatacctatacctatctgggtaatttgtgaggtttgggattttggggcactggctactttatatgaaggaatgttaaaggatgaccaagataaaatttcatgtaaatatggtattcaaaatggtcgtattttttataaatggcttcaagtgctaggtgagataagaaatgtttgtgcccatcattctcgattatggaatagaaatattctgaatgtcccaacatatccccctgcatcagcctatgcttggttatcaaaattggatactgagataagcaacgagaagataaacaacgggataagcaagacgaaactattttcaattttatgtatttgctctttcctagtgaaggcgattaaccccaatagtgaatgggtagagagacttattgagctattaaaaaccttacctgatatgtctgatcaaggattaggattgaatagtatgggattggatcaaacagttctagaagaagactgggaaggtattttaaggaatatcagaaattaa

SEQ ID NO: 64296 - DNA, 792 bp, Acinetobacter baumannii
ttgtttatattcgaaattataattccaggtacatggcttgattatgatgatagagaatggacttggaaaattgaaaggcaactcgattcattacaatctcaattttttgaagcaaatttagctttaaatctattcctatcagcccaatcatctcgagcatcttcatcttcaaaagatgtatgggatgctgattcgaaaagaagacaagaaattcgtcaaatattagaagaagaatatactaaacaaggaaagagttattgggatagtcatcatgagatctatttagaaacagagattatattaaaaagagaaaaatggcagaagggaattctcccacgagagtttgaacataatattgtatttatctatgcacgtgcttttctttatgcattagatgcctttgataaatttctaggagtattaagcagagaagagaatgtacctgaagttatttcagaactacataaaaaaatatctgatattttcccagatctaagaggtgtgcgtaacacagctcaacatctagaagatcgttctagaggattagggtctggaaaaccccctaagccattagatttaaagccaattgataataattttataagtgctcctggtggtgtattagtacttaatagcttaaatggttctaaatatggttcaactatggctgatgggcattatggcgaagttgatgtttctccagaatcaatgagtcatctacaggaaatactcaataatattttaggatcatttaagtggcatggttccaaacagcataaacctagtgtttga

SEQ ID NO: 64297 - DNA, 318 bp, Acinetobacter baumannii; identical to SEQ ID NO: 59916

SEQ ID NO: 64298 - DNA, 558 bp, Acinetobacter baumannii
ttgactcaatttaatcctaatttgcagttaaatagcgtacgcattgatcgtaaaaacttaagacatgagctttctacggggaaaattgattttgcgattgatgtacaacattcggttgaagatagcattggttatgaatgccttactaaagatcaatttgtagtaataagtcgtaagcagcatcccttattatccaaaacaaacctaaccaaagaaatttatttagaagctaagcacattacagtgtcctctcgtcctacaggtcgtgtttttgaagattttttcttatctaaacgaggtatcaaaagaacgattagtttccgctgccaacaatatgaaacggcaatccgtctaatcacacaaatggaccatttactcacgattcctcaatgtcaaattgctcattttaaagatacttaccctcaaattaaggtacatccgttacccattgatatagctggttatcaaatgaatttatattgggatcagcaaaagtcccatgaacaccaaataatatggtgtaagagtcaaatattgcagcttatgaatagtttataa

SEQ ID NO: 64299 - DNA, 306 bp, Acinetobacter baumannii; identical to SEQ ID NO: 54617

SEQ ID NO: 64300 - DNA, 192 bp, Acinetobacter baumannii
atgactacatttccctatcaagaatcaccacaccatagcacggctgaagcagcgcctgagtcaaatacagagaaatttaaacatgacggattgactactaccgaacctaaacggattccaatccctgaatatgtggaacctgaacctgaaaaaaggggcttttggagccgtttttttagaccctatgattaa

SEQ ID NO: 64301 - DNA, 1131 bp, Acinetobacter baumannii
atgtctcgagattcaaatgcagctgaagctttagctgaccttcttttccctcaagaagaagattttgcagaaaacattttagatataccgccagtacaaagaaaactccatactgaaacttacgatttcacagtgcaaatgatcgtaaataaactagcagatggatctatttttataccagattttcagcgtaattacgtttggactgatgttcaagcatctaaattaattgagtctttaatcattcaatgccctatccctgtaatttatttaaatcaggaaaaagatgaaaattattctgtaattgatggaaatcaacgtactagatcatttgctagatttttaaacaatgagttttgtcttaaaggtcttactgcttatactgaacttgaaggctatacatttagtcaacttgatccacgttttcaaagacatataaaaaatagaactattagatgtattagtattttaaaagaaacacatcctcaagttaaatttgatgtatttgaaagactgaactctggtgccactcaacttacacgtcaagaaattagacatgggttgtactatggaaaattaatggaattagcttctgaaattgtagaaagtagatctgcggatatttttacctatgtacaagctattcatcccgagaataagcgcatgaaagcggaagaatttattttaagattctggtcattcgcagaaaattttgatagctattctaagcccttagcaggatttattaattcgtatgtacaaaaaaatagaaaacctactaagaagaaattaacagaattaagaagtgcttttataagtaccttacaggtagttattgaagtattcgggaaacattcatttcaaacttttactatcaaaaatgatggtgaaatagaggttcagagtaagtttaatgcggctctttatgatgctgtcatgataggtttttatcaattaatacaagagaatagactagataatagtttgaaaggagaacgtgccttagagaaaatgaatgatttactaaaagatgtagattttagaaaatcaatcagccaatcaactagtgatgtaaatcctattaaatttagggtttcggcagtcaaagagcagttttctcttagaaagtaa

SEQ ID NO: 64302 - DNA, 714 bp, Acinetobacter baumannii
atgatctataaacctagcaaagcattagatacgtttgattctgatatccaacctattttaaataggttggattctttaaaaaatcaacaagatatcattagtgaatacaaagatgatattttgttttcatctatttttttatcccatgcatattttgagaattatatagatgatattttttctagctacacaaaaagttttgctaattttaaattaattgacttgccagattatttaaaagctttttatttttacaaagctattcctgataaggtacataagctggctgtaggttttgagaatgaagaaaccactttggcaacattacaaagtactttgcgaaaccctaatcagctcctaaatttgcacgctactctacctcaatatgcattaaaaggagattttttatatgaacgtaagaaatatccttcggtagataatttaaatattatttataagagaatagggataaaaaaaatatttaatgaagtatcaagggaactaaaatctgatgctcagtcttatttagaatctttatcaagcttaagaacaacattagctcataacggggaattagttggtatcagttttgatgatgtaattttaagcttggagaaatttatcaagtttgttgaagggttagataaagtattacataagcatttacttagagaactgggagatgctttttggaatattgaaatttcatcctaa

SEQ ID NO: 64303 - DNA, 153 bp, Acinetobacter baumannii; identical to SEQ ID NO: 58779

SEQ ID NO: 64304 - DNA, 534 bp, Acinetobacter baumannii
atgaaatcaacaatcgcccatattgctactgtattcactttagtgctttctacacaatgcttcgctgatgcaggtgcaattaatttcaaaggaaacgttgttgcttcagcctgtgatattactgtgaatggtacatcttcagctgatattaatttgggcacctggcctacttcaacattcaaaaatacaggtgataaatcaagcccacaaccgtttaaattagaagtaagcaaatgtaatgcagggacatatcaatttgcatttatcggtactgcagattcagacaatccaaatttatttaaagtaagttcggcgaagggtgtaggtattggtattgctactgctgatggtcaaactgatgtaaagatcaatacaactgtaagcgattcatcaaatgcctcgttaaccactacaggtggtgaaggtgctgcaacaggtacacttaatttacaagctttttatgaagcaacaggtgcatcagtttctgcgggtgatgcaaatgctaatgtacgtgttacattacaactgaaataa

SEQ ID NO: 64305 - DNA, 705 bp, Acinetobacter baumannii
atgcgcttgaatcatgttttatctacaatgtgtctcgttgctataagtattgttatatcaacgcccactcattcagcggttcaagccttagcaagtcgtgtaatttataatggagatgctaaagcggtaactctggcgattacaaataatgctgataaaccgtatatggtacaaaattggctcgaggttggagatgcaccagttggtgagggtaaaattccttttgtgatcacaccaccgctgttaaaaattgatcctaaaaaagaaactttactacgaatcatttattcgggtacaggtttacctatggatagagaaagtcaattttggattaatatccaagaaattccacctaaaccagaagttgaaaatacacttcaactcgcagtcagatcaaaaatcaaactcttctatcgccctaaacaagttgaaattgaactcaatgatgccgttaagcaattacgttggtatattgaaggtaatactttaaagctggaaaacaaaagcccactattcattaccattggcgacttaaaattaaataatgatgaacatccagtcgcgaatatgaatcaagatatggttgccccattcgcaaacattgatgttatcaaaaacctgtctaaaaatataaatagcgttacttatacctatatcaatgaatatggtagtaatacacctatgccaagtgtttcattaaaataa

SEQ ID NO: 64306 - DNA, 2595 bp, Acinetobacter baumannii
atgatcttgaaaaaaatcgcactgaatacactgccttttagactaatagctttgtgtgttggactactcagttcgcttacttatgcaagcgatacagaatttaatgttgaatttttacaagatgttacagatcaaatttcggtagatgccgttaaatatggctatagtattacacctggaacatatgatttttctatctttattaatgagcaaaaagtaggtacacgctcgattaaattttataaaaatgaaaagaacgatgttgtcccttgtctggatcaatcttttgttgatgattacagcattttatttaaatcattaacagaaaagaagcaagatacagtaagttgttatgatctaaccgcgattccaagtgcgacgattacaactgataccaatgctcaaaaaattaatttatccattccacaagttaacttgcaacaatatgcacgtggttatgttcctattcgcttatttaaccaaggtattaatgcagtcgttttaaactactctgcgaattcaaatttttttaataataaagacgttaaggatcgttataacaattccttatttttaaaaagtgggtttaattatggggcatggcgctatcgtaaccaaagtagcttaactcaatactccggtgagtctacacattggcaaactgtatcgaataaactggaacgtgacttacacacctctgttcccatgcgtttagagcttggtgatacgtcaagtaatagtgatgtttttgatagtgttaatttccgaggcattcagctcagcagtgataccattcaactcccccttggattgcaaaattatgcaccagttattcgcggttttgctcaaactaatgcattgattgaaattcgacagaatggctacattatttacagtactaatgtggcccctggtaattttgtgatcgaagacttgtatgcagccaatgataatggtgacttagaagtttcgattattgaaagtgatggccatactaaaaaatttattcaaccatattctgctgttcccaacatggtccgtacgggtcaaagtaaatttcaaattactgttggtcaatatcgcaacggaacctacgataattatcatccttattttacccaaatcggttacgcctacggcttaaataactacgtcactccttacactggtgctgttgctacagacgattattatgctctagctgcaggtatagctctctctttaggacgttatggtgcactttctagtgatcttacttatgcacaaaatattacagcacaaggagacaacaaagaaggtacgagtttacgttttctttatgctaaatcacttaatacattagggactaatgttcgtttagtaggttatcgatattccacacagaattactatagtttaagtgatgccatacaagaaaaagcacaatggaaaaatggagtttatgaatatatttacaatgataatactgctataactaatgatcagcttagtgaagacgatcgccgacgttattattattcatcaacttattataataaacgtaatcagtttcaagtttctttaaatcaaagtttaggtaactggggacaggtttattccaccttggcaaaaacagatttctggaataaagaatataaccaggaaagttggcaaattggttataaccaaagttataaaacgatctcttatagtctttactatcagaaaaataaatcaatgtatcaacgggctacatcaaattttggcgttacgatcagcataccattagattatccacgttcactcaaaaaatatgatctagtctcttataatagtattgatcactcagatactacaggtaatacgatcaattcctcattaactagtagttttcttccagataaaaatctaacagtacagctacaggctggccattctgaagaaaatgacaattcaacgttagcggcaaatgtaaattatcgtgggacaaaactgaattcaacgtttggctatacctattcagatcaatataaacaagcttctgcgagtcttaatgggggggttttaatccattctggaggcattctatttggccagcaaatgtatagtaatcctattatcattgaagctaagggtgcagaaggtattcgtattgaaaatcagtctggactgaaaattgataaatctggctatgctgtcgttagtggaagtagtgcttatatgcgtaatcgcattgccctacgtgcagaagatattggtcaagacgttaatattgaagagcctgtagtcagtgatatcgttccaacaaaatacgccattgtaaaagtaaagtttgatgtaagagcaggtaaaagtgtgcttgcgacaatgcattttaacaataaactcatcgtgactggagcatctgtaactgatctggaaactcagaaaagggtcggcttagtgggattaaatggtcaggcatatctaagtggcgtgcagtctgaacaaaagcttttggtaaaatggggtgaagatgccacagaaaaatgccaattagctttgccaattttgagtgaacataaaatgggatatgacgaaatggatattatatgtagtgctgtaggagaaccttag

SEQ ID NO: 64307 - DNA, 1104 bp, Acinetobacter baumannii
atgcagatgactcattttagtgtcttacagctttttctatttatagcaataacacttttaggaattcaaccaagctgggcaacacgatgtctggaaggccaaaaagcaacgacaaactttaatattgataacgcaaccaacacgacgcataccacagcggttacccccattcgtgtaactaactcaaatcaaagtgcgggcactttactgtggcagtctcccgtttatagtacgacatttacttgttacgatgactacgcaagaaatgcgacagaaaaagcttatctttatttagatgatgtagctaaaaatttggcaactgcttttcgaaatagcaatttaattgttggtattaattataatggagttgattatcctatcgactcactgactgagtataaagttgatacaggtttgctcgcaatcagttctcgatctaatgatattacagcaaaaaataattgtgctttaatcggaaaacaggtaagttcaggctggcctttttatcaacctacaaaaaattgtgctgatccaaaaaccattacaattagctactccttatatattaaatctaggggttcaggaaaaaactacactgacagcgcgaaaagctatcaagtatttcagctagatggtgaattgggtcgaaatgttaatggtaatttccaagaaaaagtatctaatataagtgtgacttacatcgactgtattacaaacctaaatactaataatgttaatcttggtaattattatactttccaaaacacaaatactattttacgtcgtacaccatttacaattaatgttacaacaacaggtagagactgtgcaaaatatccatttataggcaagtttacgtctactcagacctatgataaagatactataacaccatctgaaactggaatgaaaaatgttataggtattaaagtttattccgaaggaagcaaccaagcaattccacttaatactatttttgattttggtagtattaatacaactgtcttaactaaaaactttgaagcaggtgttttatttttaagcaagccatctacagcgggtgagtttactgctatattaaattatgaaatttattttaaatag

SEQ ID NO: 64308 - DNA, 591 bp, Acinetobacter baumannii
ttgtacagtgatggtacttctgtaggcttggcaagttgtgaaactttagatcagcgtggaaaaagacgtactggttatgatgagttatgtgatttaggcgcaattgaatatatcctaaatagtgatatctcttcagttggtcaggatattagatatgggcaggtagcaaagtttagtattttaggctcattaagtgaagcagacttggttacacctgccacgtgtaagcgtttattcggtgaacgtcctgatggtaaagaatggcaacctggctgtttgaaaataaaacaaagtactgatacacctgtttcgaaaggtaccgtaactatagatcagaatggaaatgtaatttatacaccaaatagtaattggcatggtgcagatatttttagtattcaggtagttacaagtatttcaagatttaatgaaggagtcgagttccaatacattactattcctacaagaattgtacaggaacctttgtcaggaattgaagataaatctgtcagctctggtgggggaggaagtatagggactggatttattttaagtttactagggttggttgcgttacgtcgctttaagtcataa

SEQ ID NO: 64309 - DNA, 306 bp, Acinetobacter baumannii; identical to SEQ ID NO: 54617

SEQ ID NO: 64310 - DNA, 294 bp, Acinetobacter baumannii
  misc_feature (225)..(234): n is a, c, g, or t
atgaaaacaaattggaaaataagtaaggcagctttgctctatagagctaaatctttagatcttttaaatgaaacaagttatcgtagtggctttattcatttgaagcgtactggtgaggctattttagaatcagaagatcatgaaatacctaaagaagttccaactttactaaatacatgtttcaaagctttaagtaaaaaaggaatttcagcaattgatatagcnnnnnnnnnnaggcggtttagaccgcctttatttcttttaatctttctgcccatacagattgataattaa

SEQ ID NO: 64311 - DNA, 606 bp, Acinetobacter baumannii
atgaatacttattttaatggtctagaattgcggctcttacgtcaatttaatcatttgtctttagaggacttatcaattcatgttggtaagtcacgccaattcttgcataaaattgaaatgaaccaagttgttcctacacctgatttaattgatgtacttagcaacttcttcaatgtaaaaacggatattttttacagttctcatccgattttacaagaagaacaaatcaattttcgaagcaacaaaactgccaaaatttttacaaagcaatcagtgatcgctcagggtgaatatttaaaaaggttagtagaatttatagaggcaaatttaaggctccctaagtattcaataccttctgttgaatctgtaaagaattttcaagatattgaaaatgctgcgcttcaatttagaaaatattttaatttagggttgggacctattagcgatatgactcaattaactgaaatgcttggaatttttgtaactacttttccaagtgtttcaagcgaagtcgatgctctatctattgcatctaaaagaccaatctttgttaataacgaaattagtagtacttgtcgccagcgttttaatttagctcatgaatag

SEQ ID NO: 64312 - DNA, 759 bp, Acinetobacter baumannii
atgaaaaaactacttcctattttcatagcattaacctgtataacagctaatgcaaaaataattgatgcagctaaaggattggagaatgggaggttacacgtagaaaaatacaataatcctcaatgcagaggtttaagggattatatacagaattctggctcagtttatcaaagagcctataagggggaaatttctttaaaaacggctgatagatttctccaaagcgaagcaatagatactattcaacgtcttacaaagcagggattacctcttccatttaacgccagttttttattacagcaaagttctcaaattcaaagtaaagtttttagtaatcaatatgataattcagatgaaaatttagatgccatttacaataaatgtgcctcttctttagcaaaaagtgcttacagtaataatgataattatgatcgtgctatagactattcaaaaggcgaagataaaatttacagaccaaaaataacgaaaattgagcaagtttgtgatcgagcagattttcctgcacttatggaaaaagctagaaataatattaaagattttgcatcaaatagaggtcaaaccattgatcaatttttatctgcgataaactataaatctcttaatagattggctgaagatatgctccaagcaaatttagatgatggaacaatcaacgtccaatttcttttagatgcttcaggagggtggatgggaaaacgagttggaaatctatctcctcgatgctccataaataaataa

SEQ ID NO: 64313 - DNA, 372 bp, Acinetobacter baumannii
atgaaaaaaaatattctaggcgtagctttacttttcatagctggaatagccaatgctacagattataaaacagccttaacagggaaaactctacggatgaaaggtggaaactgtgcaggtttatctcttgctaaaaatgcagggttattaggagatcaatccccttgtgctgtggatttacctacaagagtaagatggttaagtgctgatacatttatgttggttgaaaaaaatcaagtttcagaaagtagtcctccaagagtctttgtatacaaagttaaatcccttaaaggcaatcaagtcgttttaagtgagatctgggctggatggaataattttcctgatagtgatatctcgtataccatcaaataa

SEQ ID NO: 64314 - DNA, 399 bp, Acinetobacter baumannii
atgattagaaagtggttttcttggttcatagggaatgtgttttttcagaaaaaacgtgcagcagccttctgtactcttatttctataatctcttattcaatagagtattttttctgtatagaaaatctcttttcttcttcgggagcgatttttaccattgcaggattattcctgaatatcaaattgacagccattttccatttaaaactacctaatggagatccattaggtgttcctagcaaatacgcaatgatttctaatatgggagtatttggaggaggaacacctaaagaacaacaagaaaaagccgttaaagatgttgaaagtgacgaaatttggggggcatctttaatggttataggtacattaatatgggggtatggttcatattttatttga

SEQ ID NO: 64315 - DNA, 759 bp, Acinetobacter baumannii; identical to SEQ ID NO: 64312
